United States Patent Application Publication US 2014/0230087 A1 - sequence listing, part 7

SEQ ID NO: 3975 - DNA, 1114 bp, Medicago truncatula
  Intron number 1 from transcript Medtr1g127110.1 (locus Med tr1g127110) derived from phytozome v7.0 (chr-ID MtChr1; po s 28529685 to 28530798 reverse strand)
caggaaggaggctgagaattgtgattgtcttcaaggtattctttcttccgatttctgcttctaactgtttttgtgattgttctttttttttttctttttgattttcgaagtatgataaattttcttctgcgtatttttttttcagttactattttagttatgatgattttcgtttgcatgtttatgtaacaatttagtgtgtaattcttttaaatatttattgttaattatgaatgaagctaaattgtagagaatcgaactttgatctaggaatttttgtgtttgtatgtgcttattttgaagctttatagtaatcagtaacttaattttactattttagtcatcaattattgatgatttcttttgcatgtttatgcaacaatttagcgtgttattctgttaaatattgtataaatagttatgaatgaagctaaattgcacataatcgatttttgatctagaaatttatgtgtttgtttgtgcttaataagtaacttgattattgtaatcttaattatgaatgaagctaaactgtagagttttgaaccttgatttaggaatttgtgtgtttctgtatatttaaaagcgttatatatcaatcagactcggtaacttgattgtactattttatttattaattgttgataattttattttcatgtctgtcaaaaatttagcgtgtcattccttaaaaacttgcataaccaattatgaatgaagcttaactgttgataatcaaatttgatatgggagtggacgtgtttgtttgtgcttattttgatttgaagtgctgtattaataggtaacttgattgtgtagattgcacgaaaggttgttataatttaccactgtgttttgaataacttgtattctaaattagtatgtaagagcatgattggatttctgtgttgtgctaaattagtttaatgctgtagattatataattttgatgtgttctgcatatggtttagaagttgcgatataacttggacgtgtatggatttctattttaattgttattatcaactgtttttttacttgaatgtgggatttctaacatggtattcagaatctttcaggttttcaggtttgccactcccttggtggtggtact

SEQ ID NO: 3976 - DNA, 1065 bp, Medicago truncatula
  Intron number 2 from transcript Medtr8g097040.1 (locus Med tr8g097040) derived from phytozome v7.0 (chr-ID MtChr8; po s 21446596 to 21447660)
ccatcagtaaagtccaggttaggttcttttgcttttttaatcttttcagcttcagcttgctaattattttcaaatttgtatcagttaatcatgttagtttctatgatcgaatgtgttagatataatgttagctttgccttttaagtattttgtctagattgttttactttaataatgttcgctttggtagaatccttcgatcttgttgggaaaattactttgtgcttttccttctaatggctcattgttgggaaaattggattgttgcaggcaatgatcaaagttatggaattcaaataaaattttaccataaaaattgtaactagattatattgagttatgctgtgacatttatgtttggtactagtttggaactggagacaataatctgaagccatgtcactggcatagttttgtatgaatttcttttggtagttcagcccatgagaatttgagtcattttgagtctggattttgacttgttttgcattatctcagtcttgtgttttgtttttgttgtgtaattaatagagtgagtcagtatagctaatagagtggctggcggaaagaggcttatgcttgtaactgattgtaggtttagatcaggttaaataggtataaataactacctacacttgtccgggttgcatctttataaactctaataagtccttatctttattcagtgcgggacttgggttttcctcaataatattgagtggtagctgaactgtaatgtgttcttttaagtagtgcaggcggtatgtgtatgactttgtgggataatctctgtacttgttaaactttggctcaaacaaacaatattgcaagtgactcgtagaaccttagactttacgattaaatagtttttctttttctttttctcatgcatagctatgacaagttgcgttgctttccatgtccaactatttatccctgtccttcactcaattagattttttttctttcttgtgggcattattttttatgtttgctgtttgttttgagttttctggccctgattatgttcattttccactaatacatgtaaacaggggcaactgg

SEQ ID NO: 3977 - DNA, 2550 bp, Medicago truncatula
  Intron number 1 from transcript Medtr3g124190.1 (locus Med tr3g124190) derived from phytozome v7.0 (chr-ID MtChr3; po s 31408942 to 31411491)
acaccgttcatccaagcaaggggttgaaaatagtatgaattcgataactttaatttattcatttgtggtatttttgtgatcattgttcttgcatttattgtatcataatttgattgttttgaactgaaattaagcatgttctgcattcttatgaaaaatgattagaatcaccgtagaattggtaccaagttgaataggaattaggaataaaaatcaagtttttaagagttctgcaattgtttgtgaccgatttgcgatatcaaataccaatttctgatgatgacttgagtaacagaccttttgatatacatgttgtataagctgattgaatttcatagtatttggttttgaatattagttgggttccctaagcctttggtaaatgtatctctggattgtctgcgtgatgttaacttcggctacaacgaagaaattattccatttcttgcacttttgaatattttctttcagaaaaatgtttctctgggttgggcagatgaaaaagatgttaatttttcttgattgagaatcatataattgaaattgttaaaatgctgattttcatatagcggtcgacagaaaatgctgttgtgttgtgttttgatatagcagttgcaatgctatgatcatggtcaattttgtggccgctccaaccgcaatcacaacgaagcattcaaaaaccaaaaaatgccctccaccttacagcctttttaaatattttttgttgttgtaaatttagagatagtgatgcttagaacttgactcattgaagaaatcacttttgtttactgtaaatgcacagatgaattattttaatttttagccttggaggcaaaaacatatttgctagtttattttatattttgtttgaaaattagtagcaatgaacttcgattatttgttatgaatatgtgttttattttgtgcattcttctatttttgagctcttacacatattgtcaccctaagttttggcgaagcagcgagactgcaacctgcttcaccacaacaacgttttgggggttggatgcaacactctgcaatcagccattgactgcataggatattctgaataacatgacagcctttaccgaaggagagataaaaatttacggtgaagggagagggaccaatcttgctctgtggttgggtccactagtattgtacaatcagaactgcattttatctattttttctctcataacatgcccctcttcttttggtgaataaaagaagagaatttgaatcctatatcaattgtgttttacctaacaaactctttgtttggactccatcactcaaagtaagcaaagcttgcattaagggcatgtattatttttttacttggtatagatttacaattaaaagcaatttagaatcattgaccgggaaatttaaaatgaagttaagactggttttcctcaatagtagatagagtcattggattttctggctaaatcttttcgtaattaaactcaagttttctatattagagatcaaatgtggtggctattaaacataatatcaaaatttcatttgttgaattttgttatgtaggtctcaatactgttcacatagttaattaagctgatcacttatggaaatttgaatgttgaaattattttgtaataatatgtcactggcaacaacgaacgacagaggctctctttccatattttcttctcttttgagatcctcaaatctttttaacattcatgcattcattatgttgaaatgatcaatgtattatatgttgcattacgtccattgcatatttggctgtctcatttttgttgaatttgatatacaatgactttagtataatctctttgcaatatttagatagtgaaactgtgttatgcttacaattcctttcgatccttttgatgaaaaacatatgcaagtgtcataattacaaagttttagataaggactcaggtggttcttcctagacatatatcaatctacactgtgttatataatcgtattagtttttgacagtttgttgagctgtttgttgagattgtgttgccctgcaatctgtgtcttttaaaaatgcgtttggttaatgttttattgtgatatcatgagtttaacgaaacaattcatctcttttttatcttattatgcatggatagttctgccaataggcccatctgtttgttgttaagtccagtaaatttttaagcgcactctatggttttgaatatgtttttatgtttaactttgtgacatgaaaatagtaccatacaagtttatctccccatctctagtgttctagacatgaattatttgaacagttgaacatttatttgtgcagacattttttaattaaatgtccttagtacccttctaccatgtaagaatttgggcatgtgatattaaatgttttgtacctctttttctctttcttttttgtaacttcgtccatatgtttcacaatttttttcttggcttgttttgtgtcagaagggcagtcgttgatttttatctatgtggtcaattctttttgcagattcgaaaaaaacagacgagttgcgaagccctgaa

SEQ ID NO: 3978 - DNA, 1922 bp, Medicago truncatula
  Intron number 10 from transcript CU179634_35.1 (locus CU17 9634_35) derived from phytozome v7.0 (chr-ID CU179634; pos 127491 to 129412)
gtcatcttggcggccaggtttgatattttgtcctttgataattcatttatatattatttagagcagttaagtttcgactgtggttggcaacattgcttgagtcaataccaagggcaatatcgagtagtgggtctttcacaatcagactaactggactacctacacactaaggtacttgcttgtggaagtttgccgtgtagctgacgtactatggggttgaaaattctgtggcaaactacccacacaaagaaacaactaatggagtaaaacagaaaaagaaaagagaagcctatcctcacaatttgtggcaaaatgatcagttttttcaacggggcacttaagctctgaagcgacgcacaaagcaagttgggcacttcggtgatcctgacaccaccatctgcccttttcacagggcaaggttaaatgaggtgtctgggttttgttttaaagaagagatgactaagagcctatttggattggcttagaagttggtcagatctacttttaaatcattttttagcttttaggagtgtttggcaaaattagaagtcaacttaaaataagttaaaaatgagtgaaaaaaatttaaaagttaaaagtaggtaccctcctacttttttttttaccttaaaagttaatggagtttgacttcttttaaagctacttttttcaagttaagccaaacggactctaaatattaaatattatttaccatggcctgtgttttaggtaaggttctttagttcgatggtgacttgtattttcatctcccctctctcagtagctatgaaagatttctaaatatatttccttccttccatttatggcaccctaaaggaaaaagataattaataattagcaagatattatgggtcaactagtttctgggtatgcgccacgcgcgcgtggccatataaataaaaatatttttgtgaagattgtatattaacaatatttttaagttatattatgtgttataaaatagaaaatataaattacatgttcttaaaattgataagtatcctatatggtgtttttatttctaagatccaaaatccaaaaaactatacaactacaatatttaaatgaataagtgaaatgttatgtgctacgttaatgaaatatgtgtaaaatcagtaacatatagaaatcttttaccgtaaaattaatgttgtgcgttgcacatattaagccctagcgaggaaattaaataataagtgtcatgtgttattcttcactaagaaacttccttgacgaatccaacaacattcatagctgaaattcttggacaaatccaacaatgttcatagtgtattttaatagcctttaactttgacattgattgagaaaaaattgctcagagaaatgatatactcttctttagagcccacaaaaatggagagtggacttgaggaaaatgaaaactattcttggctttatataatactcactttaaatgattaattagtctctttagcttcttttcatgtatttatcattgaaataacatatattaatatattaactatgagattcattgtattgaaatctacaacttttaagattctagcaatgtaaagtaactacaaatattaatacctatttgttctcattaactaatatttgtctcttcattttctttaacgttaagattatttaattttcataactgttcaaatattctcaattcattaatagtaaaaaaagtttactgctcaatatttttcaaaaataaaataatcaaatatgaatataacatttttatttagtctagggataaaatggtaattcaactttacattttggagcttccctcttataatataaaggaaaaaagaaattatttagtacttacttttgatactaattcaaattgtgttgctgtgtcagaagaaggatagctatactgattcggtatactc

SEQ ID NO: 3979 - DNA, 1878 bp, Medicago truncatula
  Intron number 2 from transcript Medtr2g026060.1 (locus Med tr2g026060) derived from phytozome v7.0 (chr-ID MtChr2; po s 7030669 to 7032546)
ctcagaaggactttagaaggtaatgccatggatttttttttcccctagcttatccttttcatgtagttattatttgtagttactttgaacatgtttggttaggtgtttgcaactctaaacataagtttgctactgaaaacgtaagttgactatttgtttgggttcttttaaaattccgttttgctgtcaaacgtccgattcgagaagtaacattgttggtactttccattcttccattttcagtttggaacttaatgaaaaatatattcccattttaccttaaaaacataactaccctcctctatttctaccaatgcaaatctagtcagcgcaaagtcttcagaataaaagctgagaaaaaattagaaagatgaacttggactgaaacaagagggcattttcatccaaaacttgctctactttttttaacttctcgaggaagcccagaagcttctcaaagaagccagagttactttgcccttttttttttttggtaaatcctctgctcgtattttttatcgttatattttaaaacaatttcctttgcttataataatattatagttactaaaaaataattatattatagtatttatatagagagagtagcggagccattcaaaaagttagtggaggacgtgtaacaacttccggaaataaaaaaggatgtgtaacgacttaataaatatttgagaacaatttctacatgatatttatatattatacttttaattttatacccttttcggtaaatatacagttaaaagtaatttcagtcaatataatccaaacaaagttcattgtgtaaaatatgcgtttgaaaaaaaagtattaaaacataaatcacattagaacaaaaaactcctttttaactaaaagtacaattacaaaataacgtttgctcaaaagtacatttggaaacattaatccgaacacactctttgaagtttatctgacaaatttggatcaggggcttattagtagttgtagtagtggtattagaataaagtataaacaattttgaatagaggtttgacagaagtatgttaggattcaatatttagttagtccagtcctatttagtcaatgctaaaatgattttgattatggtaaacgaatacaactatttctgcttttctaaaaaatctctaaattattgaatacccaaatcacttttttcaatatgtactattttggtaggcaaaaacaaatcattttttagattttgtccccgtgagcttagctcagttggtaaggacaatgcataataatatgcaaggtccggggctcaaaccccggacaccaccaaaaaaaaatcattttttagattttgattaatttaaacagcttaaacaaataacattaaattcaccaaaatatgttttttttagttaaaaaggtgatttctctcaaatgatctgtaacaagggaaatgcatcccctcctaagtcctaaatcatcttacaaatcagatcactttatactaactccttttctttactttctataagagctcaaatctctttaagatagtttatcataatcaacattgttcatattcagaattaattttttctcatattctattaactttatcgagtgtgagagagaacttttgttacaagtagtaacgttgtggttgagttgcgaagtaacacacagaaagtctattataactttagaaggaagctattatactatcaatgtgtgttgaggttaatgctgttggcgtttcaaaaaatatgagttaaccttgggggtatcagtgggtgttttgctattgtagaaaataaaacagatatgcatttgttgagcctgttttgtacttttgtcggtcttccaggccttctatatctgctagattgggaagcacatcaa

SEQ ID NO: 3980 - DNA, 982 bp, Medicago truncatula
  Intron number 2 from transcript Medtr4g033460.1 (locus Med tr4g033460) derived from phytozome v7.0 (chr-ID MtChr4; po s 8275544 to 8276525)
attcttccaaaggtcgcctccacatttcagtaatctttcattgcatgttttaatttactattaatcatccattatattgttatctgcaccgtgaagcactgaattatagcttttgtattatcgtcaagaccactgtgagtgagtttgttactgtgattctgccaaatttacggccaatcttgacatgcatttagggtgtgtttggtttggttcaatattaaaatgattttgttttaaaaaaaaaaaatttatagattttttgagatttttgaaaaaagctgaaggtactttgtgtttgtctactgtcatagaaaataatttttttaaaaaatctgaaacaaaactgttaaaataataaaattgatttttttggttagaaaaattccaaacgaactggccctttgtgcatgtttggttctgcaatgacaaaaattgatttgacttaaaagtgagcgtaatgtaaagtggttttatgtgttggtacatttacataaaagtgagttgaacaataaacttagtgcaaaagtcatgtttagactcaaaagctacaaatcctagcttcaagttagaatcaattctggaggcaaaatcaaataccactcgacagcaaccatacttgtcaaaatcaattttacacttccagaatcaattctggctgctccaaacatgaacgtagtgcatgtttggaatacggtgagtttgacaaaatcatggtgtcacagtgattttgataaagctccaaagtgtagtttttgtcaaaattatagtgacacggtgattctatcaaactcactgccatccaaatatgcactcaatgcatgtttgcaatacgaagtaatggtggcaccatgattttgttgaggctcctaagtatagtttttgccaaatttaccatcatcctaagcatgcacttaatctgttatcacttgcaaaattagattgtgaataattgtaaactctgaatttcaggccactttgggac

SEQ ID NO: 3981 - DNA, 1905 bp, Medicago truncatula
  Intron number 1 from transcript Medtr5g102580.1 (locus Med tr5g102580) derived from phytozome v7.0 (chr-ID MtChr5; po s 41074790 to 41076694)
ctctttcgttgaatccgtttttgtcgctgttcaaggtaattttcttctatttttgcgtcatcttttcatatgtcacattcttttgagcattatccttttttttttttttattcaaaatttaattttgcaatattgaatcaattagtttgaacttgtttagttcatcatcagtttgaattctatatactgattttggtctctctctgttagttatttgatttctttacatactaatcacatgcgcacatcacgaagtctctgtttggataaacagcttaacctgcagcttaatttacattatacaggcttatgtacaagctatttatgtaacaaaaaataaaataaagctaaattgtttcatggaagctataagttgttttcataagctatttttgagaacttgaagaaataatctgaaaacagcttatgaacgtcataagctgttttcacaagttatcccaaacaatctcacaaaatttatgtcagtagattagctcaaataagtcaatccaaacaaacacttagggactgtttggattggcttatttttcagattatgcaaataaataagcttttatgtattattcataagcttgtcaaggtagtttacgaaaaaacagcttatgaagatacaattttcgttggtttcgttagtgagaacatatgaattaacataaaaacttatttgcgtaaactatttttcataagctcaaaaataagccaatccaaatggacccttagtcatttggcatcacaatgtcttgtgcatttgtgtttattgaacttacttgagttccctgaggtttcaaagctctgttggctgttctgttgcctatactaccaactttaattttatctattgcagaataatggaatattttttaccattgtgtttatatttttttcattgttccagctagttgaaaatttaggccacgtactatgggcctgtttgaattggcttatttgagctcatctactgccataagcacttgtgacactgtttgggttaacttgtgaaaagagcttatgacgtggtcaaaagtttttttagcttatttatataagctctgaaggatagcttatgaaaatagcttatacattatacgaaagaagtttgaatttatattaccttctgttatagaagtagcttattcaacacttatatgataaacacttatgttatgctatatgctgcaaaataagatgtttatctaaacagggtctaggttgctacttctaatctgatgcttgaatgcacatctacttttagttgatggcttcttgttggtattttattctgaatatatttcattaagtttaattgttttcgtataagcttatgaatataagcggaaaacatcgtacgaacaatgtcataagttgttttcataagttctcccaaactgtttcacaaaactgatataagtagataagcttaaataagccaatccgaacaggccaatagtcatttggtctttcacatgctagtcatatgtgcacaccacaaagtcttgtgcatttgtgttatatcttttttaattttcttgtattcctttgttcaaaattttttttcttgtattcctcaagggttcaaagatgttgcctatactatcaactttaggaattttatttattacacactgatggagtattttttttttactattgtttgcatatttgttatgctgttcaggctacttgaaaattttggccacatacttagtagctacttataatctgatgtttgaatgcacatctactgcttgttgctggcatcttgttttttagtgtgaatatatttcttctatgattaaagctagctgctttcttacaaatataattgtaaacaagcaatgaatttttcactgtgttcaaagtgcagcaaaaaagaagccacttcaa

SEQ ID NO: 3982 - DNA, 2346 bp, Medicago truncatula
  Intron number 1 from transcript Medtr7g104090.1 (locus Med tr7g104090) derived from phytozome v7.0 (chr-ID MtChr7; po s 23513582 to 23515927)
cgcaagttcaagattcacctgaggttcaggttctggtaagtcttctaatgtatttttgttttgtgaatacttaatttgttcactacttagttgaattttacttttagattgtaaatttctgttcaaagtttgtgttttccgtgtgcatagttgttaattagaaaagggtttattcgaattttgaagttgtatttgtttctgcaacagaatcaactattaggttaagctttggttctgttttcagtagttttgtatttgtttggattcacaacatttttcgtttgttttcaatttaattacaaaagtgtcacttgttttgagacatagttttaaattgtgtttaatttgcaaactttgatattgcgagaaatagtagggaaatgcagctgatgcagccgcaattgcagttgtgataccgttgccgggggctctaaaacctttattttacagccgcgattgcagttgcagactgcaaattaaaaccatggttttagacttgtttttccgtgtcttttgctacaaaacttcgagaacaagaaacaaattggataatagaaaaggtttttgtaattaaaacagacaacgggaaacgaaaaaattaaaatcaaagggggaatatgttttttctggtcatttgctctctctttctttctatattggtttgtctttttgtattgttgtttttattgcattggctatcctgtagtgtaaggtgtctgagtgcaatgcatggtttaaattttgaattgggtgtagatgtgatgtgagggtagaatctaggtaggttactactccctccatttttttctttttcttttgatgttttcgaacttcaactatattccaaaatattttatgttttagtatatttaatatttttttcccaagtttacccttgttgaaaaacacaccataaaactattaaaggagttgtgaccttcagcttatcacatgtgagtttaatcataaataaggatattttagtccaatacataccaatatttctatactttaattactccttaagacttgtgccaagagctaaaacgtcaaaagataaaaaacagagcgagtaactgttagcaaaaagtagagaagggtctggaggagaaagtaacataaaaatgacttctttttctggtgtaactgtcctgtaaagaagacaatttggcttttatagtgcaagctaagacctttcagactccatgaccttccaacgtagtgcacgcttgtttgagcttgattttttgagaaataatttttgtttttgaactgaaacttgttgtctaatcattaagattttgaattcaaattctttatagttatacatgatttttgattgaatattatgacaactttctgtcattgtttaatttatgtaagtgtttcatctctagtctccatttaatgggaaaaggctttgatggttgttgttttctttgttgtaactgtttttttaaagtgctgacaaaaaaaaagtcatgattatttcctgtaataagctaatccaaagatgcatccaatctcctagaaattccaaactggaaatatagaactacaaagttttaggtacaacctaaaagaaaccaagttacaagggaacaactcctgaatcgtagtccttagcacttattaccaacgccagcccattagcatcatgagtcctcggggggcttacaagtactagataactataacacttaattaacatgatactaagttaaagtattgcccatagacagaaaccacatataaattacaagattttggaaatataaatattccacaaattgttatattcattttcacttccactatatctgctactctccctccataagtttacttgaactctctgttaacaaccttgaaagaaagtacgcaatgatgtttggtattattttatctctatataatttaattgatttccatctctcaatatcttttcagtttttttgccaaaaatattgtgtttgtatatcattcacttcttatcgttatcatcgtatctcttgttcttcctaatttagagacattttaaattgcatgaagccttagttaatttgtgactgttaaattttatatcttccggcatttgaattttgagtaactcaaacaaaggaaatagttgggtcaataatttgaagtttttattattactattattattgttgttgttgttattattattagtattattttgttgttggtgttgttatttgtgttgtttttttaattattattattattattctatttttttttttttgtggaaattgaagttttatcgtagttccttgtttgtgtgttaatttgctggtacaccaattcaacaggactctacag

SEQ ID NO: 3983 - DNA, 2180 bp, Medicago truncatula
  Intron number 1 from transcript Medtr6g069730.1 (locus Med tr6g069730) derived from phytozome v7.0 (chr-ID MtChr6; po s 12956028 to 12958207)
attaatctcttccttaactccataccctctttcaagtatgtatctatgattttttttttttgatttttgtaaaattttaatttttttttatctgattcgttgtttttgattgattttatgatacccttttgtttattttgatttttaatggcttgtttggttctatagtgataataattgatttttattgaattgattgtgtaaaattgattttagataaaagctacacttctaattgaaggtgtgtcccattatgtcgtgttacatgacactacatgacacagacacttgtgattacattgaattataattatatgtgcgtgtcagtgtcagtgtctctgtatgtgcttcgtaggataaagtcagttgaatgtaaagtgattttcgtttagatgtatatgtaaaaatgaatttaacaataaatgtaagggtaaaaaattgacatttgtttttggtatatgattcgctgtttttgaatgatcatagtagataccctttctgtttattttttcctttcagtagttgtgttattttgctgcttggtgggttgttgtattctccttgtggatttttgttacttaaataaaaaatttaccagaatatttgaaaacaattaggatgattaacactattcaaatatgtgtgcttagttaggttcagtaaatgattaatgcatataagaattgctgcaaactcattaaccattcattgtgaatgtaaccatgattttgaaggttactcactacgatttttaggtgctcaaatatacatgatctttgttaattagttaaattgtgtttgataactttaggtgttgaaatatacatgatatctatattaatcatgatttatgcgcaaatatatacacttcaaaatcatggttaatgatgttcaaagtcgtggttaatcatgtttagggggttattaatgagttgcaacatgttgatatatccattaaccatccactgaattcagttaacaatgtatttgaactcagttaactatctaaattgttgtcgaaattaatacgacatatctttttgatatgataagctagtttttatatttttttatgtaatttgattaatttattttcatgcgtagtttacattatgtcagtcttttttactcagtcccttgggccttttattcttcgtgaaatatgttattcatccctcactagcgtaataccatttaaatataaaacagagcctgcactcgaataatgctagcgatggatgaatcacatattcaggtgacatcaccattaacatttgttagctgcttatctttcaaaatagcaccttgacatatttgtaactgccatagttgtacaataaggcttcctattatattatcatcgtgattttacttatatcacccttttgaaaactttccttccatttctttagtactggattgaggtgagtttgtcataaagaagtttggggtgagttgataattcttggtatacaaaagctgatttatgtggtaaattgttactgtaaggcttaactcttaagtatatcaatattgactaagggcattttcttccatgcaaaatgtatatcacaaatatatgtttcaattgtttcaataacttatccatgactctgtacttttgtagtttttttatagcccgacttaacaaaatcgccgttagatttgttcaaaaaaataaaataaaataaactcgccgttaccaattacatttccttttaacctagatctaggagatcattttcaaacaacttacaagcattatgattttttctttccactattgtcaagtagtggctgttgcatgccgaaatctaaacgtatcactattgttttgtgatagattatatagcacaaagtgttgtcaaatagtggctatggctgcactgtagcgttgcagaatttgaacaaactgctattttccgtgttctgcgattgacaatactggttcttttctagtctaggttagtagaaacaactaattcatggcaatactaacagattttagtgaaatatgtgattttaatattattacatgaattcttgtatttgtgtgattcgtgtatatagccaacccaactttttggaaaaaggctttggcggttgttgttttattgtctacattattttataccttttatttttcaggaagcgtgcagagagtgatacttctgttccca

SEQ ID NO: 3984 - DNA, 779 bp, Medicago truncatula
  Intron number 1 from transcript Medtr6g027720.1 (locus Med tr6g027720) derived from phytozome v7.0 (chr-ID MtChr6; po s 6060157 to 6060935)
tgaggcatttgttgttaaggatcatcgtggagaatgtaagttttataaacataaacttggtatattaaatcataaacttggtatattatattctatatatgttatcctgaatatgacttaattttttgtgtagcatgatatattattgcaatatagattggaatatatttgatgacaatgactaaacacttatttccaactaactttgttttttaaaaattgaatttgtttacatgttaatgtgttttccattgatgatttgccaagtaagcactttttttttgccaaatcacttaaaaattagacacatcagcgtttttggaagagaaattaggagttaagactaaaacaacaaaaacatgatagtttagggacggttatgttcgatttaaaaaaggcaggaccattttcttgagttggtcaaaatacgagggccaaaagtgtaattaagcctaaatatattaataagatgatccccacttttgttgttgtagttatgttattgagtgtgcaaatattgtttatatttagtatttacacaaaaaaatggagacggtccatttcctaaacaaaagtagtactttaaatcttactttgatgtagtattaattttatgagttgcatataaacatatttgcctgttaagggaatcatagtttagaagtattactaagttttttttttaagaaagtattacatgctaaatatctaaatttaatttcttgttgacattgttttcatcattatcattatcagtgtacaaaaaacaccacccacca

SEQ ID NO: 3985 - DNA, 1292 bp, Medicago truncatula
  Intron number 2 from transcript Medtr3g080980.1 (locus Med tr3g080980) derived from phytozome v7.0 (chr-ID MtChr3; po s 19237114 to 19238405 reverse strand)
cagcctccgaattcagaaccacaagaatctcagccgtaagatttgtaacttgtaaacatgaaaaagtatatgctctgtggcttgatttggtagattctttgtatttgtgtttcttcttaattttctgtttctgttcatcgaaataaaattgaaaaaagaatgcatagtactttagttgctgatgtccagtaaatttgattattctgttttaaacatgtaatgcagttctggtttttttccctcctttttgaatagttagtttatatatggaagatcaatgtaaaattgcgttctttttaatgctggctacttatgtctatttttattttagaatgagtctaacttgacaaaaaagctacctcatagtgtgatataacgaggccatatcacatctactgcaagaaatctcagacaattacttatttactggttttgatttgttgtttctaaagctaatctcaatagggaaaaacacacaattaaaatcaaatcatagcttaggaatttgttgggaagaggacagagttgatcacatatgatctatagcggacatctccttttctttttgagaggagaggacacatccttctttagaactaaatggactctgctaaagtttaatgccacaaataaaaaatccagcgaagaccatgaccactatgcctacttttaatcctgtggacgaaccctataatatgatgatttgatccatatataccctatgcacgaacactagtatcattagtgttcaattaaaaaacacatcccttttacttaacatgtgtggacttgccgtgctattagaatattatttcattgaagtccatgcacctcgtaaaaaccaatatgaatttcacaaattggcaagggataaggaagatttgtcctgcaactaacaaaatttcgacatatccctgaaataaaaaatgctcgatcatattagatatcaatgactagattgacagatccaaaaggccttacggcatcaatgattttcaattaccttaaggctaatctcatttttgaatttcggtaatttaagagactagatttgtctgaaacctacaattttaggactaaatcattccttttacctgcttctcattcacttatctggtcatttttcatgtatttcttgcaattcatgttttttttttttgtctcacaatttagggatttaataattgatttgtcattgtacttgaggagcgtgaagaacttacaattcattgaaactgtttcgaaaaatggtagttaatacgtgtattatttgcagagttcagcaaacctga

SEQ ID NO: 3986 - DNA, 2388 bp, Medicago truncatula
  Intron number 3 from transcript Medtr8g093220.1 (locus Med tr8g093220) derived from phytozome v7.0 (chr-ID MtChr8; po s 20421097 to 20423484)
cttggattcaacatcaaaaccctcacctaccagaagtaaaacttcgcttcatttttcacctcacaaatcactctaattttatttgtatatctctataccgatgtccatttttatgtttctcgtttgctaattatgttaagtcatcatttttaggaattaggagatgtgaataagaacgtgcttttggtctttatttcaattgaacatgatttatgaattttgctgtgacaatagtaatatacttttgctttatgaggataaacatgtgatactgcttcttaatttggtacggttgtggcatattctaaattttttattttctttaaatcctagggattgtatgttaaggtagatatttgggggtatgttttgggtagatattagccgacccaacttagtgggataaggcttggttgttgttgttgttgttttggggagtttctgttttcggatccttttcttttggtgccatgctgttttggtgctgggtggctgcggtcttccagttcgaggctgtggcttctcggcagtggggtctgtctgcggtgctgtctgttctctgttgatcagtgccttgtgcatctgtttcagcttttctgatttttttgggcggtttggcttaggtgttggccttgccgtgcagccagggccgttcccgacaatttagaggcccaattgtaatcttgacaattttcgttaaaaagaattaaaaaaaaaaaaaatctaacattggtttaaacatgacttttacctacagacaaatagacacttacctacaaaaaatgacatttagtgacagattttgtcataagtaaaagtgttattttttttttatcctacaccccaacaattataccctcatatccctatgaatatttgaggcccccataaattggaggcctagctccatagagctccttgctcttgcccagggacgggcttgcgtacagcatcggccttttctcctgtgttgttgtttttgtgcccagcggccctttcacttcttgtgaggggttggctttataataaagttttgcggtttgaaaaaaaaataaaaccccgagttgagtaaaatccctgctaaatatgatgaaaatgtgaaatcaacgtgatattgtgtgattccatacgattctaatgatcctggctttgagtcgtttatgtttaagctttgtgactaggctgttttatgtttaaaatacgagactttgagtcgcgtatgtttatgatttgaaacttcgagtcttttatgtttaattggttgttttatgtttgtttaagattttaaactttgagtagtttatgcactatattatatatatctatatatatatatgagtcaggatccgttgacaccaaatcttaaccgtctattttatttgatcaaaagctcaaaatagtcttcatattaacccacgttaatatttatgcacactgatgcatcataaggctcacctaatttgcaatcactggaatctatacactgttgcaatttgcatcgtgatacactaatactgcttattcttctacgaaaaatttgttattcattgtccacatctctattctctattgttaattaattcctcctatcaacatgtgccatatctttgaaaaagatcgtaattggagaggaagacaatgaattggggtattctggatgggtttgtgtgaaaatgctattgttttaaatgatttggatgtattagtttgtaaatcactaaaaataattgcacatcttttttttctttttgaaggagaaataattgcccatctgaatagctgccaattttcagtgtatcggtaaatcaagagatgatgggtatgaacggtggtataattgatttgtaattgaaatatgaaattaggttaacaatatttatattttaatttttgattcaattaatctacaccataatagaatagtgggattttgatttgcataagcagcacattagattggtgaaatctttgagaatgtgcaagcacatgaagaagatggaaaaccatagaataaaagatcatgtaggtgatggttcacatgcattgttaagtgaattaacaagagcctttggattaaattaaatcaatggatgtgatttggtgttaacaaattcgttgacacctggtgtcaacggatcctgactctctctctctctctctctctctctctctatatatatatatatatatatatatatatatatatatatattatttttgttttggtatgatccttcaatctgggttgcgatctaatgttttacgatcttgctatccccattcgatctgatgcaagatcttgattctgacaaccttgcatacggtggctagattctagaatgttgaggcttttatctaaattgacaatggcaggtacactctaaatat

SEQ ID NO: 3987 - DNA, 1123 bp, Medicago truncatula
  Intron number 11 from transcript Medtr3g087440.1 (locus Me dtr3g087440) derived from phytozome v7.0 (chr-ID MtChr3; p os 20808544 to 20809666)
gtgaggaggggctcgcactacgcatagccatagaggtaaaccatccacaaacttgaagtttgttaaatatatgctaacatgatcatctgttcaccttacttgatattcaaaggcacacatcttcaccttaatatggattggtacttggtaggtttagattagtcctcataattctgttctaatggcttctaaaggttttattgtgtacttatgatttatttttgtcgatgttgatgatatatcataatatgatatctgcatattatggatgaagactgacttaatttttttatatacagtttatagagaattaacttatttaaagcagcattttttttaaaagaaacttattttaagtagctcttttatagttgcgaatgcagtacaatatcttaatgaattgaacagggaaagttgatttttaatggggtaacttatgttgcacagtgcactcaattttaaatacgatagacatgtttgtaatcttgttacttgatctactttaatcttttatccaaacattgcataaaatgatatattgatctggaacctaggattttggactgaattattgtgcggtgaataaagttacttatgatgttactgttgatatagaaactacttataataattctattatagtagaaatttatcggtaaatgcaattagaggccagattcttatagttaaaattaaggacctttttgttgtatattcttggcaattcatcattatgtctgaagctagttttaagctaagtgtgcagttcctagtgaagccttttcgtatgctgcaagaaattggcctgtgcatgttacatatgggaaattgaaaatagtctgaactgggtgttggttttcattgcgtactttgaagtttggcatgcaactgccactatattgcttaattctgctgaatgtcacttggacacaatagcataatgaatttatgttacccgttatacagtgaagagaaagaaatagtatatatgaatttcatgtcagatggctgattaaaaatattgtacaattaacaattcaattaatgttcattcgttttttttctttctttctttcctctctgttaaggtcacaagctttcactcgaagaaggtagctgctga

SEQ ID NO: 3988 - DNA, 1766 bp, Medicago truncatula
  Intron number 6 from transcript Medtr5g090280.1 (locus Med tr5g090280) derived from phytozome v7.0 (chr-ID MtChr5; po s 35185659 to 35187424 reverse strand)
ttatatcgggtaagtactctttcttatagctcatttatatatttgagttggaaccaggacttttttttttttttgcactggccaaaatggctggtttaataagcgtagactttttccttctgtttgagtttggtatggggagagatactttcttatccaaatctctcattaagatttaaatgtaaggcagctttctttggtagcagagagatagtaacgttctaaccacaaattttgaaatagcctcatgtttgtagattagagaagtgcaggtagcttgtttggtttaatctttcaactttcttgacataagtgatcctgtcattcatagaggtcataagttcaggattagaattacttctgaatttacgtaaaagtgcacattaggggattcaaatctctttcttgacattttgctaatatccatgttatgttgtatataagttcaataaccacttgcttggaatataactatttatttttatctttaatacactgctaaatatgaaaatcatttaatcttgagctgtaattaaagtccaaatccactactatactatctcattgaaaccaaatttttgatggtttggtcaaaaaggctttgataacaggttaaagatttttcttcaccaaaaagtattagggatggtatagaatttactttccacaacattctatgatgttggattagattcagtaagggttggcatagaaaccatttcccctttcaacccgtttggttttgcgatgataaaatagtagataagacttgctgatgagtgaaagattcttcaaagttttcactctatttaaggaggataggatgagttgtgaaggatgtttaacagtaatgcctgtattctatggtgcatatttctatgagaagaatttttgtttattggtcaaatgtataatatcttcaataaagaattgagccaggcccaaagctacacggaagttaaattaaactaaagctaaccggtccacaatccggatttggataagccaaatccaacaaacaaaagaaagcacaaataaatcagtttgcgctgacttacagtctaactataggatcttccagaatgacagagaatccaaagtcactaaccctaggcttagcaacacccagagcattcgccttttccattacgaattacttccgatttgaacaggagatcctctctggaggagactcccttctcagaagaagtgtttgggcgtgtctagtttgaataactaagagagatccacttggttaatttggactcaacaagcaatgggcatatcatggctggaactgtatgactggccagttaaatcagacatttataaaataaatccagttaactcctaaattaaatcactaattttctatgtacacaatatagattataggcattaacacgcatctattactaatttataactattctagcaattagtaaattcaatgttctaggttatcagtgttttcttgcatgggtgatattttttgcgtacttattttcatatattgcgcaccatattagagctttgtaaattgaaatagatttttactaattaatttatgaaaacttatgataatcttcaatgaaattgccatattagagaagattaatgtcagaaaagtggtatgttaagttcctacaagataaatatgccatatgcatattgtcaatttccagtttcttttcatttgagaaatcatatagttttaacatctaacttgattcaaaatgttgcacatctttgcagaagcagttgga

SEQ ID NO: 3989 - DNA, 1174 bp, Medicago truncatula
  Intron number 1 from transcript Medtr2g005460.1 (locus Med tr2g005460) derived from phytozome v7.0 (chr-ID MtChr2; po s 249685 to 250858 reverse strand)
ggatcaatcgtgtggctcctgtgcatccggaccttgtaggattgggctttggtttgggcttagttctttttacgtttttttgttattttcttgctatttgcactgcctttcttgctatctgaacctgttacttgcctacatttttttataaaaattcctaaaaaatcctagttgtttcttggtatatttttggcatttttatggtgttttcttgcatgtaaaaaatgttaaaatggcatgaactaattctatgtgtttttacacttttggtatgcattttgctatgttttgttcttgacactttgatattatgacatggatgaatgatgcctaatatggtgatgaatatgcctctggaaatgtgcttttgtttgctgtttttgaatatgattttatggatttcttgttttacaagcaacaagtgtttgttttagagaatagagtgtcaaatttctctatgaatttggtgtgataccttgcttgcatgtgtttccattaatttcatgtcatggcttgaaacaaaatttctttcaaaattgccatgatgtgatgattatgggttacaagcacctttaggtatcacatcaaaatttttaggtttattgccactttattaccttttctttgccatttttatgcatttccttttgattatttcctactattttgtgctttatgattactaaccatttcatctcatgtgccatacatttcatagcattccaccaccctctccactctccactttctttaagcctagcatttattttttgcaagttttaattcatttggtgatgtaatttgttatcattggtttgtagcttggcaaagaggccatagaatgtatttagggaatttttgtaatatggactatggacactatgacgcaccgacacgcacacactcactttagatgtatgcttaagattgtatgcatggatgtatggctaggattgcatgattagatgaacgtttagttttgaacacttagagaaaatccaatgttttccaaaaatatgcaaataaattcacttcaaatatttttatgaaaaatggagtcaaaactccaataacttttcccttttattctcttaagtaaaacctttaatgaactttaactatacttggacttcatttagcaaaacgattaattccacctcactttttttcaaat

SEQ ID NO: 3990 - DNA, 3104 bp, Medicago truncatula
  Intron number 1 from transcript Medtr7g021930.1 (locus Med tr7g021930) derived from phytozome v7.0 (chr-ID MtChr7; po s 5336656 to 5339759)
ttattggcgctgccatcactgaacaactctacaaggttctatttccatttcaattttctctttttttgtttcttcattattctgcttactgcaactatagcattgattggtaccaattatttcaagaaaaaaattctgtgtgggtgtgttgggttttaaattggcagagagaccgttggtgtaaatcagttttacactgacatccattaggaatcctctatttttgcatgttgttaaagagtcccacatcggataagaaaaaggtccgacaatttgtttataagtggcgacaatcctcacctcttaagccagttttatgaggttgtgttaggcccaaccacaatttctaagacttgtattattaattttagttgtgataaaagtgaggcgaggtagcaaaataatagaattttattggatatttcactgtgaagattcttttaatggtaaattcttttaacgtgattcattaagctgttcaagacttcaagtgttttggtattatgtttgactaattgctgcttaaaattttgctggcttagatgatgtattagttctttaaattctgtgaaacttccacattctgacagcagtatcggtttaggggcagtaagcattattttatcaattaatatctgaccattcttgtccaatatgatttattatttttccattatttgaatttggtgctttgtgttgcgagatgcaaaacagccttatagtgtgatatcttatgtcatatgctggtagttcagcattctgtaatggttcagatatcaacaccagtaacagaatgaatctcaaactcaaacacttttcactagtataaatgatgagaacagggaacaaatggttgagttgagaaatacaaatactgatgaccaattaacagtacaatttatggaaggtaaaaatactgaaagtaaaatagagaagaagaaatcattccggagaatgccaaagggaggaaaaagtcacttccatcaaattcttcacacctatgattgccaaccctcactacttcagtatcagtcacaagggaatatttctattagcatcttactctctctcttgcttctcacctcccaaaagtgtggatcagttgccatttgtctcatttcagaaactgattctgtgttgctaattgtattgccacttgtgctattatgaatcataacattcctcatttgatttcatttattcatgttcttttgggccaaccaatataccagtgttgctttgaatggtaaaatttcaatctcatccttttgaggaaacactggattaacacatcactctaacactctttccaacattcacatttcttttattgggtgaaattcatgtgggtcccactattttagaaatgttccccactaaaagtggctagaccgacattaatttgatttgataagagagttagtgttggaattcggaaagagaggttagagtgagtgttactagcacttctcttaacatgtttgctcatgggacatgtcaaatttgggattttgacaggtgcaaacttgctaggtttcacttatatgcagtttaatttaatttatgcgtaggtgtgagatttgagactaacctcctctactttctagtgctagacttacttccatggcatttatcttagtcatgtccagctggttttggagatgctataccatctcttgtgcttgttgatgtgagttaaaatgaaagaacacgttaactttgaattagtaggatgagaaggtgatttctgtacttgtagatgtgagtcagaatggaaggaccttttaattaacattagaattttttttctttagttaagtaaggatgataaaatcttgaatatgattataaattcaaattttatgaaaaattaatattacaattactgtctttcctttagccagtgtatcatgaattatgttgtggtgtggtgcctgatacctgtacaagtatgtgatacattagggtcaaaatttgtgtagaattggatttttatgcataagcttaagatatagtatgaagtagtgaataaatattatgactaggaccattagtaaattttataaaacgactagggtaatgtcgataactttaaaacatgacagtgtttgaatttttgcaagaaaagctaagagagagtacggtgagaaactgaggaatatgaaaatttctcatgcccttcgagaaatttcaccctaataggagacatggtctgcttttggaaaggaataagctactccattctctgtgtgaaaccaaaggtctaaatctaagagattcacattgtgctgagagaggacagactcagacttcggaaaggaagaaagacttgtgtacagtcgtgcaataacagaggtgtaaatgaagcaaagaacttcacctcttttccctttctcttacttggaaatttgaacatttttgagtatcctgggttgcacatgcttgccccccaacatgagatataaaggattagggattagagggattcgtgttttatttcttttgttatctgaagagttgtctatcattctaatttttttggaccagtatctgcttcgtacttatttctggagttcaacatgcatcccacattaccgattgtgtttataatgcttgttaactgtgttacactttataaacacgcaaccaaacataatagggaggaatagaaaataattcagctccgtttgtgttcttccatgcttgtactgtatatgaaagttggcttgtttgtaaaatgctccttgttcttgccttaagtttattattgcttgttaatgataaaaatcactactcacttttccttggtagttctctgttgaaatgcttgctgatggcataccttgaatcacttgataactggttggttactgatgtgtatactgcatagtaataatgttaacaattgctgatttttattttattttatgaaaatcacttgtaatcatgacgctgtgagattttccatatttttcggctgcatgttactctgtgctattaactttaaatgcatcaagaggacctatctttgacatactaatctttataatgaattttgtattatcacaggaaaagtactgggaagagaaccctgggaaagcagt

SEQ ID NO: 3991 - DNA, 1146 bp, Medicago truncatula
  Intron number 3 from transcript Medtr7g017890.1 (locus Med tr7g017890) derived from phytozome v7.0 (chr-ID MtChr7; po s 4212331 to 4213476 reverse strand)
caaagccaactggcaatccagtaggggtatgtaactctcgcaatttttttacgcttcttgcattctcatagggtttgtatacttttgaagaaatcaatcaatgtctgtttgggcgctatgttgctatttattattctagagagcttagcatttaacatggttttgatgataatcatgtgctcattatcttatttggtgttttgattttacaataatgcattcatcttccttatgaagtgtgctctgttgcttttctttattattattctggagatggtagtctttaccatggttctgatgatattcctgtgctcataatattatctggtgttttgatttaacaatggtgcattcatcttcttttttgaagcaagtgatagaaaatcataggacactaaccctgtttgagtgttatttgcagtttaagattgtgatttttgtttgcaatttatcaaggaggctattgttataattcaaagcagtgacaatgtgtcatatgttaccctgtccaaattcaaagctgatttttttgattccacgaagattatctgaatgtctttgatgatacacctgtttttcaaaatcatgggattgttgttaaaattatcgtccttccaaggagcccccttagggaattggttaagcaattaaagaagatattattttcaagtacaacaatcaatgcattagtgacactagatgctacactttttaattaagtttttccattttaattcttcactccagtgcctctaaaaataggctagcattttcctaaaactactaatgatgatttgcgtgctcaattagcataacaaaagccattgtgtaagttatattcgtaaggaatgaaattatataatgcaaaaatgaaattacaagacaagagagatctggtgtatcccttggagctctgttgtttcttttgcctattcatatatattctagtgattagtcacgttactactaaaaataggttatgcatgttcttgtttttaagtcttaatgaataactcttttgttgtgaagtctaatgtaatgctggtaagtgatagggtatctttttgattttattatgtttttttgtgatcatggcaaagtgataggatatccatatattttgttgcctgtctcaggtgaattcca

SEQ ID NO: 3992 - DNA, 1727 bp, Medicago truncatula
  Intron number 1 from transcript Medtr3g020350.1 (locus Med tr3g020350) derived from phytozome v7.0 (chr-ID MtChr3; po s 4581895 to 4583621)
cgccgacaagtacttcaacgatccttctcgttctggttagtttcttattactctctttggattttcttaattaacgttcctctgcaattcactggttctttccttgaatttggagcagttttattgcagctattattcttgtttgtttattcaatttttgtatcaaaaatgaattttatggtttttgtgttgagtgaatttgaattattcgatttaattattattatagtttattcgatttattgggagtattaagttcaattcctaactggataattcttacttgtccccggttggcttattttgcagcttataatgctaagctattttcttataacagaagacaagataaagttaaattgttttcgtataatctgtaagcagtctttatagttatcttcaagagcgtatgaaaataagatgaaaacagcttatgaacatgtcatatgctgttttaatatgttgatgtactatcaaacaaccaatttgggtaggcccgatggtgttgatttgagaccttggagtgtgctgctcctcaagatctcaggttcgattctccggtgccaagttaggttggctaatttagcttcttcaaaacaaaaaaaaaaaaagttatatcaagtatagtcatattgggtttatgctagtagtagataagttgacataagccaatccaaatagaacatcagcatttactagctagattctggataacatgacacttttaaccggaagaagacgaaaaatagagccaatcaatgcatttaaatttgcaagggtcgtccatttggaggggtaacacaaaaaatagaggcaatcaatgtactctgttcatgtgtttggaagggaggggaagggatggctttgggggcaggggagtagagggaaatatagagaaatattccacattttttagagttcttttgtagagaataattaatgaatgtttatcattaatatattcttaatgttgggagtattatgacaacaatgattggatttgaagaatttatttaaaccctaaaaaattgtcattcaattaaatttttgagttcccccatttttgggggattttgtattatgaaggaaaacaccccccccccccaccccaattctagttgggggactatcctttcttccatttcctttcctccttccttttacctaaagccctcccctcccctccaaatttcttaaacaaagcctaagtgtgcaaggatcatcaattgatgatgacaaatgtgtgcactgattagaattagaactaatggattttgtttttttgtttgttgatttagtagacaaaggtttttttttttttttttttttaatgttaattctgtggcattttattgcgacattgcaaatgagaatcattgctatgatttattcatgacgaagaggtatataatggcgacggctgtgtttgctgagtagtgattacaacttgaatagatattgttattgttgattcactatcggtgttgcttcaattgaacggttcactaggtctgtatgaatatttgtcgttgattaggcttattctctgtttgcaaatttttaaccttttttgttggtgtgcagttgctaattttgattttgaatagtattaacagaatgtttttatttttacggaatgaagattattttgattttgattattttaattatttgaacaagagttagtgtgatgatatagaatggggatttaataaatgtgtgtaggg

SEQ ID NO: 3993 - DNA, 1041 bp, Medicago truncatula
  Intron number 1 from transcript Medtr7g106120.2 (locus Med tr7g106120) derived from phytozome v7.0 (chr-ID MtChr7; po s 24447515 to 24448555 reverse strand)
ttttaacttttttgctatgtaagttctttctatctttcctgcatttccgtttttgttgcatgcaactttattttagctctcattttataattattctttccaattttatttttctacaatttgcttcaagtgcaatggttgatgagaagtaagaagtatgtttattaattttatttaatttaatttttatttttaactagtaattgagtttataatatttttggaatgtaggttgatttgatgttgataatatttagtaatgcatttgagaaattgttaattaatggtgtccacgtctagtacaatatatcctcttgcttgtgatctcaagttgctaattttcttagatcatctctctattttatatttaattttaattttaattttaatttttatgtttatgttaggctcctacgtcattgtctacaatttttcatttttgttgagtagatctctatggtttcatgattttgtttgtttgtttgttgagctggagtagccatgacattttatctgatttgtatttttctatttttttcttggaggcagatgtactaactttgttcaaattgatttgataaattgataattattttggttatatgaatgcttttgacatggtgactgtgcttgatctatctttttcattagaagtaggaaaaaaatgacacttaatgattgtgattgaaatcaaccacagcatactggttactttgtgttgatgttattgtattcaatctttccctttgtcctttacaacttatggcgacacgacagttacttctactagattttaacgacatttatgatttgattttttgattgtttaacgacatttatgtgtttgatgtatcttaaagtgcatatacattttgcatacatgacatggaagggtgaacatctagagcttttaatatcctatgcggttcagctaaatgaagacatgttatttagtattgatttttctttccatgatattcttaactgaaggtttgataatatgtttcatttcttcttttagcagacaaatcttttttcacg

SEQ ID NO: 3994 - DNA, 1156 bp, Medicago truncatula
  Intron number 1 from transcript Medtr5g101050.1 (locus Med tr5g101050) derived from phytozome v7.0 (chr-ID MtChr5; po s 40423278 to 40424433 reverse strand)
gatactttcttcggtttatttcttcctttttttcttcttctgtgttatttgttgtcctaattatctatataaatatttttcaataatcaaatatactttctacttcttctttagtgttgaatttatttgtaattgttgtgattttattcaggttgagcaatgacggttcactgatgtttctgtggctcttgatttctcaaaaaattcaaagacaatactcaaactcaaagaataaaaataaagagagtgcatgtacgtgtttctaattccactctttatgatcatcatttgtttaatttttatttttgatggaatcaccatttctttcatgtttctcacaatgttccatgatttcatttttgttccaactgtctttattgttgttctctaaagcaatggttgcttttaaaaattgagaatggaacatctgtgatttgagcagttacaactttaatctgatcaaaagtaaccacctatccctcacgatgtaaacctctttttcacttcgcttttgttcttctactctgtctgcatagagacagaagttaaaaggtagaatgaagaaggaccgattctgagtagtatttgtctttgacgacaatgatatttgtcttacgcggtgaaagcaagacgctgcgacattgcccatcatggcagaggaatttatggggcacaacccttgattttctttctcttttttggctttcgcaaatctcaagcactctttaacttgcttttaacttcttctatttgacagattgtgttttgtacttttgtttggatgcatgaaccataattaaatgaagatttagtagaaatttagcatagtcgtagtgaaaaagatgtgttggaagatataaggtcagagattaaatagttcatcgcatagagattgtaagtttttttgaagttttttgcttttcatttttgtattaaggaatttgatgtctgttctactctaccatgactatttgtctcttcttttcttatttcattttgcaaggctaatttgtagttattattttttgatttaaaggatttcaagttcacaagttaccaaatattttttactatgaatattgattcttcataaatatcatatttttccattgtcaagaaagtcaaagcgaatatagttcagacaaatacacattcg

SEQ ID NO: 3995 - DNA, 3166 bp, Medicago truncatula
  Intron number 4 from transcript Medtr5g088650.1 (locus Med tr5g088650) derived from phytozome v7.0 (chr-ID MtChr5; po s 34374827 to 34377992)
ttccagcagtgcttcaagaggggactggtgggaaggtaggactaggaaccataatttaatttattttggctaagaaaagttttcataattaaaaactagatattaaaaaatggccactatcattagtattatgtctttgttactcattttcattacacaatttcgatttttccaggttccctttattactaaatcagtgaggcatggtattaaaatttagcatcctgcaggtacagattccttctccttcatcttccatgaccaaactagatacaaagaattcaatggaatggatcataccaattaattttaaaagaaaaaaaaattatttctttttaattaatttttcaacaaaatattgttcaccgtatttcttttcttcttctctaagattgacttggtgtatgtttggtatcatactggatatacccgaatcacggttatccaacgtgattttgcaaaagctacggagtataatttttaaaatatcgtggtggatcgccacgtgattctacatacataccataataccaaacataggctaggtatatttcgcttaaaataaggagtgagagctagttgtgaacttgagattatttgaaattgattttgttattgtgtaatctaaatattccggtctaagcatatgtttggttcatcttccatgtcccttaaagtcgtggcaaagaaccatgacaacttagaaactacactttataacttgtagaaatcatggtaaacacctagatatggacgtgtgtttgaagcttttggacgcagttccaaacatacattaagagtgatagtcgagatccttagtgtgaaaacgaagtgcttttttttatgaattttttattacttttgcatgcaaatgaaagaagatattacaacttcatgattttgtttttgttgcaggatgaagataggccacataactagagtatgctctacttagttccgtggaaataaataagttaatgtactattatagatcgtttatgttattactaccctttcatcccataagttgggttctttttttgttagctaaaccgttaaggtagtttggggcaaaaacaacgtcgtgctttgtattttttttctattttatatatataagaaagttatatatttatattttatttatatgatatgatcgtttttggttttctgggtcttcatattcagctcatagtatatgttattggtatacaggttggacaaaaatagtgatactgtattgattggataaatacatggtaaaataaagtttacattcataaattaaacattctaagctttctaaaaaaagatcgtttactcaaaacaaggtttcatgtacttaaattttgtccttggcaattggagacatcatgtaattggtaaataaacaacaacttttgcagttaaaaaagaaaaataaacagaatagctgttctaatcaaatttcataatttgttgtcctttttaaaaataagttcaaaccttgtagaattgtgtgaaaaaccggattttcacatagataattggcgtcaatattgtcattgaagattgttggtggttgtggttgagatagtttgatgccaagttcaaataagagttgttgcaacgataatattcgcataaatgacgagttattctttgtatttgatgatctgcgctatttatttctgggcgggatggcattccccgagccatattgtacttggaaaaatttgcagcaaataaaataatagtgggacctgaaagttcaatctataaaaaggtggataattttgtgagtatgataaaacagaaaaaccgaaagtgtaattaagcaaaacaaaaaaaattatcatatctctatgattatcttgaattgaaggaaaaaaaattgcaaggtttaagttgtcttacgggggactacaacattttcaaatcatcacattctaaaaatataaacctgcatgcatgcatggatgataaagtgcattatacaatttttagaaatttcctctctttacatctttcacaagcattactagagtacattttcaggttttttatttcacattaatatttctgtgtacttctcatgagaataaatggtatatattgcaagggagcttctatggtgcagtcgggaaactgacttttttggaaaagttaattgttagttttagcaaaaagaactcagatatgcactcaactcaacccctcataagtactattctcttatcgtttgtttcattcatctccaattttattcttactaacattcagcttctccccccttttaaagtacagcttctgaagtgcaacttctgatgtgcagcttttgatgtcttcagaagcagagtctagtaataaactttggttagcgtgttaaccaaggtagttaatttgttagaggagtttgttacaacgtccagttcagttgtatatatactcactcatgtgttgtaaataaatgacaattttcattcaataaaattacacaaatcttttactcatatctcttttctctctaaaaaccatagaaacccagaatctcaattccatcttcttcaattgaacatagttttaagtgctggtttcattctaatttcatacattgttccatcactatgtatactttcatgttctatgcttttctaagaggtcttaaatgatgaaatttaagtgaatggtgacggttggtctaaaggtgaattcgatgtgaatttggacatttcttatatgtaatatgtaaatgtctcataattgtttagatgactgataagatgagtgggagtattaggactctccctagctaggtggattctctatctacgacgggacgtgcaagaaggggtaaacgggacaccatttatcggagttaatctatctccgccttaccaaatgatttatataatggtttaggttattgaggttttcccacttttgataacctagaggattgcttagtgattggatagtgatgttaattgtgaataattaactaatgtcttatgatcgagtatatataatttcctaattataattatatcttatggaaaatcttgttcaatgacaagattgtattttattccacgtcgggaagctcactgagataattcatatcacacccaatgttgatttccatttttcaggtaaaagccgttttaaagtatcatctaagatcgga

SEQ ID NO: 3996 - DNA, 456 bp, Medicago truncatula
  Intron number 14 from transcript Medtr6g005410.1 (locus Me dtr6g005410) derived from phytozome v7.0 (chr-ID MtChr6; p os 275453 to 275908)
ggcctaagtaagtgaatctgattccccaccatgtttaatcatttcaatattttgatattgcaaacttctgaactttgtattttaaattttaatttaacttcctaattcttgtatcctgcttcaaagcaattattccttctaagattttactatttgatgatgtgtctggatcttgaaacaaaatattctgttcatttttatccgcaaaatttcaataaaacatcatttatgttactcttttactaaaacctctcttgcttattgtttgattacaatattattttccttcatactaacattaatttcacatgatatgtctgtttgtagtttaagttttttttttctttcgagtttaaggtgtcgttaaaatatttgtaggtaaattgcatgtcttattgttttgacattggattgtgtgcagggtatcaagggaattttacttgaacaccgaggaat

SEQ ID NO: 3997 - DNA, 1161 bp, Medicago truncatula
  Intron number 1 from transcript Medtr3g114320.1 (locus Med tr3g114320) derived from phytozome v7.0 (chr-ID MtChr3; po s 28914595 to 28915755 reverse strand)
ctttttgttaaacaaccaaatttattagataagtgacaaataaaagtgttactaaagtgattagttaatactcatattttatgttcttgagtagttaaaagtaaaagcataataatttttagggttacactgaaagatttgattccactctgtgagttatacttcagataggggtttggatgatattaataatttgaccacccataaaaataattatttgagtatgactattaaaataattatagtttggatgatattaatgaatatgagtatgatattaatattattaaaaataaaaagtggattcttttcggaccttaactatgagtattaaaataaaaattgagtgaattcgctaaaaggtgaatccgtttcgcttctttttttcgttaagtcttttgagtggtccacacgaatgatatttatgtaagttgttgatcgatgtgtttatgattttccattaaactttgacattgacagcccctaaaatctctttattaatgtgatttgttgtttggttatttattttagagatttagaattcttcccgaggtgtttctttggtgtggttcatttgagatgaaagtaaataagtcttgagttttgatgcatctttaaatttgtaactatgatatttcattcaggctaaataaaattcattgagtcatctaagccagcatgtggaacttgatgacttggaacatattcaaagtgataaactatgattctttgcattttctacggggtggacgttgttgtttgaaattactaagaaggtttggataatggttttgacatgcgaccactaggataatatttatacgagggttaatggttttgtgtgtgtcaaatttttaacgtaatgttttttatgtagatagttgttttgtgtttgtagtttgtggtgtgatcgaagtattacaccacatagaaataaaaaaataaaaattgttgctttatatcgaaattttaataatatttcgtttatttgttaaaatttcatgtcactctctcaactacgattcttctcgttcaacaaaaataattgaaattaaattctcatacgtaatagtgatcttttacaaaatttggaaggtcacttttgtcatcggttaaatcagttcaggtaactaagcttgactttgataagcttcaagtcat

SEQ ID NO: 3998 - DNA, 3005 bp, Medicago truncatula
  Intron number 2 from transcript Medtr8g070620.1 (locus Med tr8g070620) derived from phytozome v7.0 (chr-ID MtChr8; po s 13554855 to 13557859)
cgtaccttacggtgaaccgcgtttctctatttttcgtaaattaaataataaaatcatatttaattatttaattaataataagtctcacttattattttataaataagtcttacttatttatttctctcatctatctgtcctttgtgtgtgaccctataggttcccgtaacattgacaataatattaaatcacatatttaatattataaacagtgagcggtatctagcaacacatcactgctacccaagtgacgagaatgtcatgtgatctgtcgaaacctttctgtgataatgatcatgtgtataattacccttttgccctcatgtctatattgaacacaaggcatagaccgtgtcatccttgtctagttcaatattgggcccgtagacatttctcatgttatgtaggaggggaaaattccatctaggtcactcatgtccctcaatatgattcatggagtacccatcaaccaactttatagtcatcctgttacggacaacgtttgaatggtgacaaagcactcgactccaacatctagggtacatagtggtttcaggtcgaagggtggaatacaccactatcactatgagaatatcttatgacacttttcataacttttactatgtagtattctcatggcggatcaatccaatataaatattactcctaatatttatatctatgtgaagacttgataactctttatccatgatctgtgagatgtgatcatcagtctacctacataatagtctctatgctttaatgatatcccacttctcaataaagcttgactacggatactttgagaatagtttccttatgtttaatggggtctcacaattaagttatacttaatgttccattaaacggactaactattctaggaactttattattttgaaacaaaacaaaatcaataaagaaatgcattgttattatatattcacaatatatatttatatcaatatcatgatacaaagccaaaaccaatcaatatagattggctattagggcttattccaacagtaggccctccgacttcctacgtgaaggtaatgttatcttgaaaaactttaaaaggcatcattgaatctagattggagaagggggtaggccctccgacttcctacgtgaagatgatgttttaaggggcaccattgaatctagattggggaagggggtaggccctccaacctcctacgtgaaggtgttgttccttaaataaagtacccaaaatatgtaattggcaaaagatcaaaaggtcacaaaaactcccatctctcttatatgaaatgaaagaagaatttttcttggttgatttagtattaggattagaacatgttcctcattatatctatcttatacaggagcaagaaaagggttgaactacacacacacacactcacttcagacttgattgttgggttgaaaaaggattacaagaaatgcttgagtttgtgattagtgtactctttgaaatgaaagcctttgaggagacatgtgctttaatttaattgtcatatgataatgttattttatgctaccatgtttatgccttttgcttgagaacaagcaaagattcaagtgtgggggagtttgatgagtcatttattacctatttctagatattatttagtttagttttaattagattttagtttattttatataatattatttcctttttaagatagtttactacaaattgcattttattatatttcaggaatgaatattgggatggattgagtcttggagcaaaagaaagggacttggagctgatttggcacaaaaatacaaagattggaagacaaaatatgtctcccctaaagtcagaagcttggcacggcccgtgctagcattggcacggccgtgctagcattggcacggccgtgccaccctccagagttccttttgcttagattttaagctactctattttagcccgcagtctcttgtggaacattctagtaatgtaattgcttagattttaaatcgaatgtatgctataaatagagtagctagccatcacaaatattcatcttttcttggaatgcaatatgtgacaattatctttctaataaaagttcatttactttcttgttatttacttttatgctttctctcttcttctccttgtctacgatgaacattagtgagtagacttctcttgtcttgggattgttggataagtctaatgacataatcctaatcaaaccaggctttaaaccttaatcttatgtaaccctaattccttatctaaattcaccgctttaacatggataaaccattatcaaactgtggaaacgaaagtggagagtttgataattgtttatccatcatctcaaatatcaattcataaaacgaaagtggagctttgatattcgaacaagtgaatttagacaaagattgtaaaggcagcgaaatagtctttacaatctttgagacatatagtttcgatcttcaagggaactaataatgatcaagtcagtgaaataggcttggttgttagaggaaccaaaatctaatagtaatcaagtcagcgaaataggcttggttgctagaggaacaaaagagaaactgtcttgagaaattaggtctaacataaggttataagtttaatagtttggtttgtgaaggacttgtcattaggatgaaccaataattccaaagcttttatcttttcttttattatattatttgaaattaaaaacccaaaactttctaccttagaaatcttcagtctaatcattatctctaaagttaattgaattcataactccctgtcggaacgatactcttttcatactacttcggtaagaccgtgcacttgcggttttatcccatcatagggttttagactgattattagatacctgagagtgttctcaagggtggtatttatagccttctatgggcttggatttcggttgcttagtctccaagtaatgggggtatttatgtatttaggggcggtttctagaagattctagagattattgagg

SEQ ID NO: 3999 - DNA, 1908 bp, Medicago truncatula
  Intron number 1 from transcript Medtr4g036760.1 (locus Med tr4g036760) derived from phytozome v7.0 (chr-ID MtChr4; po s 9063015 to 9064922)
ggcgtttgagttctggtgtctgcagttttcaagaggtaaagttgaagattcaattttttgttttttcttttggttatgtgataaaaggttgcatgttgacttgctgaatgttgttttttctgtttttctaaatgttgaatgtttattgattaattgtgtttagttatttgtattaggatgtttggcgaatttgagtgtgattttagatttcaattcatgattgtgaagaaaaagttgttggtttaatgaaattgttgtgtggaatggttgctaacaatggatgtgtcgaaacccccaaacccaaagtgatatcaggaccatcttaaacattttggaggctctgttataattttgggccctcaaaattttggacactgaaattgatgtaggcaggaatttgggtccttaaaattggtatatgtagtaatttggacccttatacactttggaggcctcaaaatttggaattgattgatataaataagttaagaattttcaatttgatttaaaatttgggtagttaaacatttctatttattgtgtttggggggaatttgggccctcaacattttgaggccctgtgccatgactctccttgaacttgttagccggccctgagtgatattattgaggatgattttgtttctcgcatatgtataatatgaaaagtggtggtttagtatttgtcaattatataggtatggcctaaactaaagtcactggaggctctacctttagctagatatagccagtcctttttagcatggacacaaagatcagggttttaaactgcggtagcgattagctggttatggtgtgaatctttatattgcagccgatgcagcgaaattgcagttttgctgcctttgcggggagacctcaaaatcctttatattgcggctgcagactgcaattcaaaaccatgactaagatgattcacttgtttgctaggaatttccaatcatgtttagtagtgaaatttatatcttatgctgtactttgtctttgtaaattgctttgatagtgtgctgtgcaggatgattccctaatattttgtgtgcattaagttttttgtggcaatcaaagtataataatttcagtattccctgtattatagaactagagtcttatttttacttttttaaggcctagttttgttagtatcaagtttatggcagttgtttttaattgagataagtgtttaattcttaaccactggttatggagaagttatatggaagagcttccctgtattaatcatttcaactcataatcattgctggataattgcaattttattttgcttcaagttgttgttgaaaagtttatccaatttggctagaaatcgtagctgcaacttctaaaaactaaaggccatagctattagttgtcacttgtcacataataatggaagccatatgatgtaaccatggtttttagtatcttaccatacatatgatacaaaactgaactcaatcgatacaaattcctaatgtgcatctattttggacatgaatcccatctttaataccgattcacagtgatgaagttagattcgttctgataatcactacctaaactaattgtagccagtcagtttttgtcaactttgtatagtctgtcacttttcttgtcattttatttatgacttgaatcttgaatcattaagttctgctatgatattgtaacttataatttttgctgtgtcacttgttttttatttaaaaatgccatttttattggtaatgtgttttacgattcataataagattcgattcacaattctgagattctgaaaattagtcgtctgatttgccatttgaatctcgatttggtaaccatagttataacctttttcgtttcatattttcttaaatcattgattgttcatttgtcacttggctgcag

SEQ ID NO: 4000 - DNA, 2789 bp, Medicago truncatula
  Intron number 7 from transcript Medtr1g094210.1 (locus Med tr1g094210) derived from phytozome v7.0 (chr-ID MtChr1; po s 19424222 to 19427010 reverse strand)
ggaacttctgtttctcatgttgattgattttttgcaagtggtgagtggtgtaaattatgatacattattccatttacctttatttccatttaagtattcagttaaggttccatacacaacccttgtatggcctcgactggataaccaaagtttggagacaacaaagcatgacattaggcctaagaagaccttagccagtatttgattcttgtaacttaacccttttagaaagagacttggaggtagttgttatgtgttcaactaacttgcagcattaaccttgtgacaaatgtaatattattttttgtctatcacgcatattttaggggattatttccctaaaataattgtcttgtttgataatatataaaggacaaaacatttaatacttaacaatatcaattttgctatacatttgattttttttgttacttgttagttgtttaactcttcccttaccaaaaaaaaaaaaaaaagttgtttaactcttctatagctggtcaaattcaatttaattttgaaatcttccacagctggtaaaatttgtcaatgtttgttgtttacaaaatatttggtctcccaattgagtttgcttgtttgttagatagatgctgagtttctttgatcaatgacaatgatgctagtggctagagttatttttggtagaacaaaatcagttcaaagatgacagtactgtactgttaatgctttgaccaaggtagtgagtggtgggcgttagttataagccaaatataaaaatgaaagcgatataaagttcatcttttgtcgtttcctttctttaaatctttgcttttctcaacaaagaaagctgatttgtatctttcactatacttttcttttccttttggtccatgtataattttatgggatccacttttattctacatgttaaaatatctttttttgccctaagaatttcttgacacccccaaaaaaataaaaatggagcaaaagaccatgcgttaccaaaataggtagtatccaagaaaaaacaacatttatatttaggtaaaaatattacaaactcgtatttagtgtctgtaattaaccaataatttatatcggtattgcagtcaaacgatataaaccatcgaataacaattgaaagaatcacatcgcggtttcaaaaagtagagatattaaatctcaaccatctaatattcaaaggtcatcaacgactgtgattattgaccgcgtcaaatctatttccaaatttttacctaaacatgttatgtggatatatatccataattcaagcaaactcattcatcattcaaaaagttcacaagggaaacatccattccatgtttgccacttgaagtcaaaacaaaagaatggaaagtatcaaaagacaatgttggacccttatattggattatggaatttatcaagtcttgatcaaattctccttgatctaatcaaataaactagtcgtcatgtttggtttgtctttatttccttttgatgactcataaggcggtaaaagttagcttaatgataggccagattatcattaaactaacttggactcttttgtttgttggtgcacatcattttcttccaggtgggacacttggactctaacccatatctattatctttaaaaaatggataattaatgaatgaattagataatggacaatggatggtagagttgattatggaattatcatgcttatcctcaagtaaagtgtggtagataagaactaagttattggagaaaactacagatctatgtctttaatttggatttatgttgaaaaagtaccaccttgcctaattagcatttccccactacaaacaaatggtcatgagtaaaagtttcattaggaaacaaattaaaataattatcctaattaacattgtcaatagtaatattaagattgatattctttaaaaaaaaaaataaagaaagaatagtatgataaagataaatattttcggtgacttaaaatgcaagataccattcgggcacgccatggttgttgaacaaagtaaacaatatatttcactcactcttaataaccttatgtagtatttgctgtggattttatcaaactcacatcgatatgatactatgatgtgcggagcaatattaacaacactcaataacttgcatttaaaataaacctgcaaataatataccttcaaacaacttttccacaagtattaattaattcttccaactatttggacaagatgatgctttgttacatgctttatattcctattgagaaatttgtatgtgcttaataatattatcttgcattgtattcaaccgaactttgcatataggtagtggccggctgcttcatgcttcttttcttttactccgttttatttataagttccaatttgtttactatttttcgtcaaaataaatttatttactatttctcaccctttccacatacactacaataagtcataaactcatagactattaattagtacttttaataatgtaaagctagaaaggacgacatgattttattattttaaacatagtactatatctggttaattaatttacagataaagcaatattcttttgctgttgttagttttctgacctttccatggccatgccagatgcatatatacataataaatacctaaaaaatacgaacacgacaagtaattgaatacatatgtccgtgtcgtgttaatacacctttaatctgaagtgtctctcctacaatatggatcaatacgagcaggaaaaaaaattgattttaattcatacaatctgtaatataaatgcagct

SEQ ID NO: 4001 - DNA, 639 bp, Medicago truncatula; identical to SEQ ID NO: 3920
  Intron number 15 from transcript Medtr5g094260.1 (locus Me dtr5g094260) derived from phytozome v7.0 (chr-ID MtChr5; p os 37214783 to 37215421)

SEQ ID NO: 4002 - DNA, 1190 bp, Medicago truncatula
  Intron number 8 from transcript Medtr1g137770.1 (locus Med tr1g137770) derived from phytozome v7.0 (chr-ID MtChr1; po s 30590311 to 30591500)
ttattctttatcaggagtgagggtgttgctcccctgtaagtcttctgctccagaaacatatttctcgctatttataatctttagtataaacaacgaccaatttccttacatttgtaaccctctttctggagctttgaaatttcgttttctttccaaccagttttaaaagtaatggagtgacttgattttgtggaaaaggtttactacaccgaatgcatttaaaaacctcctatgaatatgcctgtactatgtctttttcaatttaaattgtgataatttttatatgcttgaagtaaaatatttaaatgactgttttttccttatccttttcaaccttatgttagtaggccgcctattagacatgtatatgtcagacgcaggcccaaattaaattaggcccaattgtaaatattagtatgtattgtgtatatgaatagaataaggatgtttggtgtgttttgggagagactaggctctctgattcctagaggagtggttactttagacagtttttatatttgcgtgtcagtttctgtattatctagcatttgtaacttgtgtaactatcctgttggaagttataaccgcaggctatcaataaagtgtgcagaattcatatgctctcttattcccaattatctcttgtatattctgcatctacaccttatttttccagtgggtattggatcggggtggaggagaaaaaagtggttgggaaaggggttttttgaatttaacaatagcagggcgtcatggccataaacactgctttagagggaccaacaataacaaaaaaataattcctgtttgatgattaatttaaatagaatcatatgcaagcatgtatttataggtcaggttgcatctaatgcaacaaagaaaggatacaccaccttttccctcttgtataattatgttccttaaaaagttattcttgatttgttccttttcaaaaattatacctgactgattgttcaaaaataataactttcatttgtgttgcaagaaaatatcaatcatgtatgtttggaggggggctgtagtttttcggaatgtgttgcatgccctttatgttaatttcttgagaatagttacacttgcagtcttcgcagaaattggacctggatgatcttgttcttgtctgtcattttgcagatactatttgctgtgtgattcaaaccaaacttgct

SEQ ID NO: 4003 - DNA, 2038 bp, Medicago truncatula
  Intron number 1 from transcript Medtr5g014410.1 (locus Med tr5g014410) derived from phytozome v7.0 (chr-ID MtChr5; po s 4608944 to 4610981)
gatcctgactcactcatctataaccttatctccaggtattcatccatctatgcttcggttcatctacaaaaccatgaaatataaataaataaaatcttatatttcaatatatgtaatatttgattttctttgtctctttcttttcatggccaatatttctctcaaccacatattctgttgattatcttctctaccaacctatacccgtcacagtatcactcaccatatctgcactacaacagctcgcatggattacacgcgaaaacaataaacttttttcgactactctttatagcattcacaatagagattcttaattttgagtacttaaactggtctcacatatatacataattcatttataattttttaataacattatctaataagcactcaatcactccaatgcagtatctttgacaaaagttttaaatgagtcccaccaataaacaaagcatgctaaacaagcattgcaaaatgattcatttaatgaaaagtattacggggtccacttaagaatgagatgcttaagtaagaccctaaaaaatttctccctaataggggtatatatatatattaggcaccgcatcttaaatcgttaaaacctaaccattggagatgatcctagatatcggatatgattgtggagataatgatactcgtatgcgtgaaaatctatacccgttactaaactagtaaaatttccaaaatgttatacttaaacattaatattacctacacaaaaggaactctggtctaatttcctattttgcgtttcttgtttcattaataattttgttggcatagtatagtgaaacaggaattagaccagggatgtatttaacaaaaaaaagtataaacagttaaacacattaactccgacgtccaagaataaaacagttccgctgcaactgtctcggcgtctttttgcaccgttggatatgtctaaaaatacatttttaatatggtacaaagacaactcaaatttaacactaaaatcattggtactatgacttcgaatgtgctactatgacaaccaatggcgttgccagaaccctgagtcagggggtgcacacttatgaaacactaacacttggacacgatatagacacatcgtcgttgatagtaattaaaaatatcaaaattgaatgtaaatcacatgtgtcggtattgtgtcagtgtcggtcaccaaacatatgtttgaatagaagtgtaattgctatagagatgcagactttttattttcatgaattattattattttatatataaaattataactattcattgtttttgacaaaaaattagtgatatcattgtcatagtatagttaaaagtagtatacaaaatactttttttttaagaaagtatacaaaatacttattttaattattttgtatatttaaatacatttatttgaaacataaagtacaaaaaatagagtaataaagaaatgaaagatctttttttttatgacaaagaaatcaaagatcattaaagaatacatgggttccaaactaatgtacaactaatgtactttggaaagattaaagaataaaacaaactatattaaataatgttaaatcaaataaaacgaaaagatagattgtcagtgtggtacaaggaaagacaaatatggatggcacaaaaactggatgtgacagtacagaagttgtgtatttgggtgcaaagaagagagagatttggtgcaatgaaggtgcaagactcatacctgagggggttcataatgaatcccctggacaataggtggctccgcccctgatgacaaccttactacgattctgcgaccactcaaatatgatattaatatcattttaatatctaatttctccaaagacaaaggcacaaaatatcaaaaaagactctgcttataagaccactttttatatttccaccaatgttccaacatatactactcaagaaaatttactcaaaacatagtgcaaaaacatctatagtcgtggatgctcataaatgtgactaactttggatggtttttattttataaaatacagat

SEQ ID NO: 4004 - DNA, 1534 bp, Medicago truncatula
  Intron number 1 from transcript Medtr4g036360.1 (locus Med tr4g036360) derived from phytozome v7.0 (chr-ID MtChr4; po s 8889993 to 8891526)
tgctaagtacgtttaaatttcacttatagcagcttatggcaattttcattagtttttttcgatatttattttcataagttctccaatatagcttataaaaacaacttatagcatattaaaaaagaatttaactttattttatctttttcaataaaaataacttatgaaagcttatgcaaatgtgcttaggataacaaatatttgtgttataagccgtaaataagttggttaaccaaacatgccctaactattgaaattttatgtctgagatctaattgccttgtcatactaactgtaattgaaattctttgttataggctattttgaactaattcataattagacttaaatgcatttttgacctcttaaattttaaaaaattacgattttgaacatctaacaaaaaaataacaatttcaccatctatatttaggaaaatatgttcttttgaccctttatctatatggaaatatgttctttcacccctttatccttaggagaaaataagctctcttgccctattatttttataaaatattgcgattttggctccctgttttttgacacgtgacatcttctcaataattttgcaatgttttgtaaagttagattgatattttttttgtcaggggtccaaatcgcaactttttaaaagtaaatgagttaaaaatgcatttaagcctaatcgattttatttttaagaataattcatagttagtagatcttttaagaataattcgtcatattggcatttccctactttatggactagcgccagcagttgcctttgagataaacactaaacaaaaagtctattttaaaagttttaaagtattgaatccaccatttttaagatcaaacttttttttttttttaattttttttttcttctaacaagtatctaagcatttctactctatccttaaatctaggacccataagaccaaatcatgataatcaagaaagttggtagtgatataattaatattatttttacatgttttttttttaagagataattagttaatttcatgttataacatttataaaatttaagattaaagtcactactaatcaagtagaaattcaccttgaaggagaataagtggggtgtctgggattcgaaccccgactcgtatatatattaaatattatcttttaccaagtgagctaagctcacggaaactcacattgattggtttaatcttatgtggggtttatttaaaaaaggtttgtctaacatgtgcaatattgcacatgttaaggtaactaaaagtagcaagtttttattgaaaccaacaattatttaacaaaaagttatatatttaatacaaaatgttcaacttccaatgcaaagttactattttaaatttcttaacatgtgcaaatttgtacatgatagaaaaacccatttaaaaattaggaaaatagttaattaatttatatttgcaaaggaaaattgggaattaattacgacttattgttttctttattggttatatttgcagaatcaaggcagaggaaattgtggcta

SEQ ID NO: 4005 - DNA, 2008 bp, Medicago truncatula
  Intron number 5 from transcript Medtr5g049080.1 (locus Med tr5g049080) derived from phytozome v7.0 (chr-ID MtChr5; po s 20897251 to 20899258 reverse strand)
tgctactggaaactaataatattctgaggaataaggtatatatagaacaactctatactaaagatttatttagatatgatgctcatgttcaatccttgtagatatttctttaaattttggaacttagtttattaactctgaagaatgccttagcaatttttgaaatatgcattcttttataaagacctaagaatcctaaatttgacagctacaatttttagctagagattcctttgtgagaagaacattttcttagtttttattgagagaatgttttgctttttagacttgatttacgaatgaaagtatctctccttttgtaggatccaagagaggttacatattctttacattcaatccacacctaccaataactaatttcatagcatgattgtttggattagatgtgagactgaaaaaatcacaatgagcctctgattttgaaaaaaaactaaatttgtagattcaacaaaatcatggtgccaccgtaattttgtcaatctactaatttaaaaaaattaataattgaactacaacccttgaaacaaaatgaccttaacacttgaccagcctaatgaaattgaatagtataagatggacgacacattattgatagggaaggcttttgtggagaacttatggtcaataaaggtgatcctaagatggttaaatattaacttatttaaatgtgaacttcacgaaaagtagtttgtttggtgaggtattcttccatgatcacaaaactaaatcaatactgtttggacacacacatcaaaagatgatgtttaaaatattcaatcattttttttatcaatttcctctttattattaaaaaaaatatttctttatgtgtgtgtgaccaaacactttttatttgatcatgtgatcatattagaatttctcttgtttggtatactagttagagcgaatcctagaaaggcatcttcgcggaacacaatgttagggttcgagatgggtgtttcatgggaatttgcctccaagttgtgcttagtgtgagggcactccggaggtggaggaacatttgtttgggtcgggtgaaaactacttatacttcaatggtttttgggtcggaaattgattacttcaatggtttaagttccctagaatgtcttctaaggtaatttgatctttattgtgagtttttgcttaagattggtcattttttgggagggtgaaaactacttatcttcatcaattgtaatggtttagtgccctttatagttatctcatcttattcaataaaaaaattgtttgctattcaaaaaaaataataaacaatgaatttcattaatttattagaggttgtttgaattcatttttacttttacaagctttattatcagtcaaattgaagtgcagaaataaataaagaaaaatgagaaattcttgcatggtctatcacctaacacttcatatttagtctcaaccaatgaaaatatgatatataatttaaatttaaaaaactgtaaaattaaaaaataattttttgttgttgttgttgttgtctctctagatcatgttcaaccatttattcaagcggtttcattaccaatatatgcaactgaaagtgcacctccattaaatttaaatgatgtgtcctattttcattggttgagactaaatatgaggtgttaggtgagagaccatgcaagaatttctcaagaaaaattatgtgaaagtcttcatcaaaatgaagtacaacaattatgagaaaataatgaagtacaaaaaataattaatgaagtaccaataaatatttcttttcctattgatgggactcatgggagtaattgaggaaaggtagggtccaatttcatcttcaaatttggaactgttttgtttgttttatgattttgttttggtaaataattgttttttttttttattgctcaaaacttttcaaaagtttatttttgttttcattgggtaccacatcatttgattaagcctataatgtccttgtgaatttcatagttggaggaaatta

SEQ ID NO: 4006 - DNA, 1763 bp, Medicago truncatula
  Intron number 2 from transcript Medtr4g109950.1 (locus Med tr4g109950) derived from phytozome v7.0 (chr-ID MtChr4; po s 24749377 to 24751139)
taagaggctggacgaggatactgagaatctagctcgtgagtattgcttgcacatattgatagattgatacactaatttgttgtttatttgtttttttttttttttttaaccattgatagaatagaacctcggtgtcgatttttgaatgagtagttatatggggagaatgatgaggggagttatctagacagtgttgtcctacagcttaagtattttcatatagaaaattttgtgtggaacatgtggtttggtagttatgtttttgtctaccgactcttgcaactgaactgagtcgtagttgtatactagagtgtgtaggttgaattgaagaacatgtattgagctttaagcactgctaacttttggagtatttgaagtcatgtgtctagaagtgttgctgctatactttttgaactcatgatgttttggtactattttcgtttcttgtttgattttaccgctcaaatttatgttgtataactccatgttgacttagagaaagaggaagacccagataaactaaaagagaaactattaggaaagatttagagattaatgagttggatccaaatatggtttgtgatagaacactattgcataatttgatccttgcagctgaccccacttagtgcaataaagcttagttattgttgttgtttcattttaccactcaaatttaagttgtagaagtccatgttgatttttagtccaagcacaactcaaaaaatgtttgcatagcttgtgggagtgtaatcttggtccaatgtcctctagtaagtatcgacggacttcatgaattatgatatggttcaaactcaatcacgaagaaccattttttttttctttctgcaaagttatttctgcttcttatgcagcttctaagttgaattattgttttagattttgaaatcataatgtcggtctagttccggatcatgcagaaaataggactaatatatggcttgtacactcaaggagaaataagaaaataacagggcagaattataatagctatatgttatcacagttatgtagccactgtttagcatttacttaattgtctgtggggcagttgtagggtggatttgaatggtatctgcactcccaatttctcttttctgcaacctcgagaattgttttctcaaaggaaagacttggctctaaggctttgtattggaagtccatctagcggatttatgcattgtgaactgtgtgtagaattcaatacaatttctattataaaccccatcagattatataatttgaaattcatttgtgcctcattatctgatctctctccctgcgtgtaattatggatagtaaagattgattttacttaaatcgagttttgattgtccttgtaattttgaatggttaacattagttcctttcacatctttgttgtcacttgatattctccataatttatgtgttgggttattatccttaactcatgcttgatgagatgttgaactgtctgggtctcagaatcattacttctaggttaagataaaaaaatttcccttggcttcattagcataaaacattgttgaacctgattgttcagttactttatttgttctcttactgattgtgcacgcagcatgctttggaatttggattcatgtaatgtaatagcatatctgcttaatagatagacgaattatgtccaccattatatttttttataccaaaattaaagcatctggtgcattttttctgcacatctgttgacaatcacatgactggaattttgtatgcag

SEQ ID NO: 4007 - DNA, 4536 bp, Medicago truncatula
  Intron number 2 from transcript Medtr2g102880.1 (locus Med tr2g102880) derived from phytozome v7.0 (chr-ID MtChr2; po s 23762912 to 23767447)
tgaaaaggtggttatcatcatacattaaaatagaagttttttcattatgattttagtttaactttgtatcggtgatcttttgacttttatgttaactatttttgctgattttgtaatatggtggatggttatatttatcaactaatttttggtaatatctgaaattattccaacgaaattatatctacttttttagtcattatctcattccttttatttatttccccgatctatgatatagctgtatatttcactccatacattgcatggtaaaactcctattgtctttacgttctgtatttcaatgtgtttttcgttgtttttggaattagatatgagagagttcctttgcaacaaggtttgtattttatcacctatttaattacatgaattttaatgtataagtatataaaattgtttgttttattgtttttatttgtcgactaatatttgttacctcacaagaattgctttgaaatccttcatatctttctatctgtttatttatctatatgttcatgtcttcttcttctataatgtaaagtaaacttgagtcattctcatgtaaactttgtgaagaagcttatgtaattattctcatgtaactagacaactttccaccccttaaaactttccactctcttgaaaacttttcattccacttaaattacttagtgtaacattgaatgtcaatatattacataagcttcctctaatttttttttcttacataacatttaagaagaagaaaaaaaaggacttaatccctctcaaattctatctaatctaataattaataatggagaatgatgatggtaatgatgtagttaaacttaagttacaaaaatcggccaccccttcttatttcactgtattatagtatagtatctccttttgtgctattatatatagggctgatttaaagcccccgttctaacgattccatgtataggcgttccaaaattgaagagattatacaaattaatcatctttataagtataatggaaattgcctttggaactctatctatctatctatatatctttgtaatagaaccttggattgttcttatgcttccattgtgctaatgtggcacatctaaaatagctccacaccttctcttagcaacaaaaaaatctcattcattcttatttagttggtgactttttatattctttagttaactgttgtgtatatatgttgctattcaattacattaacgtgagattttaattcatatattgtgtacactcatttgattgcttcacattgtaactttcaattaactattttaaaatatgtatcattatcccaagtaaaatgagtgaatgttgctgtactaatgaaaggtgaaaccgtacacccccttttaatgtatattttgcatattttttattagccttttaatcaataatgaataacattgattaggctaataagaaatatgcaaaatatacattcattggttattagtttatttatttgcatatctcttgattattcattggtttctaatcaatgatatgatagagactcaaattacttagattagaaaaatattttggctatacattttttttttatcgatatattgcttattagtttacttttctaacttttttattttattcctcaacgtggatgtgacaatattttcttgttgtcttttttttttttttgaaagaatatgtttttgtcatgaaatgttgtcatttacattttttagtagaaaaatattattagatattgaatggtaaattaattaaccaaaactaaaaatatgaatatgtttttgtcatgatattgaatggaaaaatattatagaacatagtattgaatggtaaaatgatattagaaatgacaaaataaaatgatcaatataattttataaaatattttatatttattcaagaaaatatttatattatagtttttctctcctctttttcattcttcatttcttgactattcattggtttttatgatatgattcaatttactcggtgactgaataatttagtcccttttatttttgggtttttatgatatgactcaatttactcagtgacggaataaattaaaactacttttttttgtatagtctaaaaatagaatctttatataaatatcaacaatgtagaacatgaggaagtaaaagttcaatctgttttcattcaaatattacaaattaaatatggaagactatatcttacatatataaaaaaaaacactattttagtttataaatgtcaagacaagtgtcaactattttttcataaaaaataataataaagatatagagaagcatggttgaagaatatgatgcaagttacacatatgcagttgcttgcgtaggaaacactaaatgaatgtatatggtaaagattaaaatttattgaggataaagggtaggacaattcattaagaaaaacaattcaacaaaaataaatttaaaccattaactacaatctctattttattttatgattttgactttaatttctaatacaaatgaatgacacatcgtctatgttaaaagtaatttttatctattccatgtattctatattcagttgatgtgagaaaaattttaaaatattttaatagtaattttttaaatcaaagaataattcaatagatctatcaaatattcaaatttattatattcaataaaaaaaatatttatcacccaaagttattcaaaattatgggaccgagaacaactatattaatcgtcttgaaaacatatatttatcaaatttactatctaaaccaataaacattgtcttctaaacaattctcttattttttttatataattttaaaacaaattttgtcactaaattatataagtgattatactaattaaccaaaactattaattttctcatttataaacatattttatgtattctaatcaaatccgtgcaacgcacggaatatatacctaatatttaatgattttgatctttgactgaagaggaaactatagataatttcacaggagggaatcttctcccttctcttcttcctccctctttcttcgtttcctattccctttcagattttttatttctctcattttattgttatctttgttggggtctaccatatttctcaacaattgacaaccatatggaggaacatgtaattggaaattgcaattgtacgattattatcttttaatgcattcttgtgcagattgtgtggaaggttttacaataattttctcatatgatttattaggaaagtcttttttttttttttttttggacagattaagaaagaaagtcttctttgatcctaacaaaaaataaatttcatttagtgacacaaataaaaagatagtagattttttttttttgacaagataaaaagatagtggatgaaaataattaaatgatgtatatttttatatgtgtatataaataaattattttttttgtggttgagaccttacaaatattttcctaatttggtcaaaatatattataaccacatagaggaatgtaagactggaatttttaattcacaaggaagacgtttttacatctattgcaaaagtcttttgacatcggctgtgtttcattccaatttaaaaagtatgttacccttcaatcggttcccctttcaggtacattttgaaaccgttgcgacaagtacatgcttcatgtcaggcacttttacaatctaagggtgaaaataggtcagaccgttcgacaggggtctatgaccttgcttgtttaaggcatgacctagcctttttgcaaaaagattcatgcttaagcttctaaaaaggtttgacttgggtacatatataagcctatcaaacctaacaattggcctatttaatatatagaaaaagagcattgctatttatctagagagtttttatcaaaaatttatcaagaaaaggtttcaaccaattaaatttgtgatttgtcgaaaatcaaaggaggtaattatggaaatgtgttagtaaatacattgtctaaaaaatttcttgatacattttgtcactgtatctatcatttcccatagaaaagagcatgctagatataacgaaaattatttcgcgaatgtataacgaatatgcacccttgtacaaattggctgtatagtttagcattgtctcttccctaaaaaaaaaagtttagcattgtgtctctctttgacgttttttcatgcaccaacaaaaggcacttgaatataggaataaacctgacaataattattaatccaaattatgcaagatcttttatctctatgactaaaccttagccacacatatagggaaacagtgggaatgttctaaatctaaagtaaaaagtgagtgggtgaagaggttgtcgtcagtgtatgtaaaattgatttattgtatatgtagctcatatgtgtggacgtgttgtttagcatgaatgaaatgtagataaattatatgttggctttgactagcttaattgtaattatagaagaaaaagttggatcgaaaaggtttttagattttatcatagcgtcacaaactgcaaagagcg

SEQ ID NO: 4008 - DNA, 2103 bp, Medicago truncatula
  Intron number 2 from transcript Medtr7g124470.3 (locus Med tr7g124470) derived from phytozome v7.0 (chr-ID MtChr7; po s 29231945 to 29234047)
ccttcttacgttgtgattatgaagcatatatctgatatctttgtttggtaatcctttttccctgtgagtcacccctaatatctaaaactaaaatgaaaacagtcatgtatttctagtgattttggatgtgaggaagaggacagttgttgatctaatccttccaacctgtagctaggaatcccaacctgtagggacaatgcctataatgcaggccgatgctttatccttccgaataatacacaggtttatgctactaactgcaggatctattttttgacaaaactatgcaaattatacattgataaaacttaaatggaagtcaaattgtgaaggtttttttaggagagtagttaagcggaaattaagacaagatacccacattacagaaaattaatctggtttaatgctgggatggtcaaccatggaagctgtatattttctttgaagatttatacgataaaaaaataattacaagcataaacttggaagatacatataccgatatacgaagtcacctagacgtgctgcggggccccataaaataaagaagtttggatgtatatattcgaataataaaaaatatgtatgaagggttacaactaatgtaaaagcacaaggtggaaatatagatttcactattactataggtgtgcatcaaaagtcagttttgaatgtttttgttctagatgtgtttatcgagcagacacaagagatggtgccatgatacatgttttttaacaaacggtatacttttaaattagaaatctggagaatcgagaaattcatggaaaaataattaaattagaaacttaaagaatagaaacaggacttctgcccaagttggagtaaatagagcatgtaagtttagtaagaaacactcaaatacaggtgaaaaccagagaataatacactataacgcaaggtaaacattatcactcaagatgctaaatagagggggttgtcaattataggatataatttgtgattgaacagtatcactcaagcttaaaggaaaaaaaaaattgccaaaaaaaaaaactattctaccaaaaaaaaagggaaaaatttcggtacaattttaatatctgaaatattgtatgaaattgaatgttggactagtaaaagctaacaataaattacatattagtgttgttgagatgagaatgttaccatgaattttttatcatacatgacaagacaaagattataaatcatatcactcgagaaacaatagaggtagctcttatgtattgtagaaagatggtaaaatcttggcttaggtagtttggacatgtgtgcagcagacccaaagaagcactgatgaaggttgtagaatggaggataatctctatttagaggtaaaagcctaaaagatgggcatggaaaacgataggtcaattaagagatatttagagatatttatagttaatgatatatctttaaatatgaataatgacaggacatcggagcgtcatttgatccatgtacctaaccccacttggtgtgggaaaaggatttggttgttgttattgttgtagtgatggaactagctcagaatatagaaagaatgttgatgtggcttgataggaaatctctatcactgaatccgtgtcaatgtaatataagatcagacatgcggaatctgtagatgcaataaaccccctgttctaggcatttgaggcacctggttctttccattccaatttccttttcacatgtctctaccgaccttaactaacgcttcatctctccttttatgtattatccatgtgactggtaacaaacttgggtcctaataacaaatagttgcaatactgaaaagagttgaactcaatagtagtattctataatgacagtatgacatcccaatacatgtccgctgacaattgaaatgacgtgtaatcacactagtcaaattgtcacaggtaattgactgtgctctattgtacagttggtcccctatgagtgtgctgaagtttttctgttgtattactcctatgcttaaccttttttagcagtgttttagtttttgttctgatggtggagtttgtatctgcttgtgttttaactattttatggcctattgatatgatcagctgaaag

SEQ ID NO: 4009 - DNA, 3804 bp, Medicago truncatula
  Intron number 1 from transcript Medtr8g065480.1 (locus Med tr8g065480) derived from phytozome v7.0 (chr-ID MtChr8; po s 12339132 to 12342935 reverse strand)
ccttgattgaggagttggatcatcttaattgccatgaaatgatagaatattatttataaactcaactaataatattactttgcaaaaaaaagtagataaataatgttcctttctaattcatcatatgttcctttttaacatcatatgttccacttatctttgtaactgaaacatgaatacctttttgacagattatgttcctttctaattcatcatatgttcctttttaatgtattctgtaatattatcaatgttctaattatgcaaaattgtggattaagatattactatgctaatcagcataatgtacgaatccccgaaaatggattcgaaattaagtcttggtaatattatcatcttttatcctttttacatgttagttgtgtagctgaaacataaaggcatatttgtttctttgtatttgcactattatgttaggcattgtagagaaaatagatggtttttttcttaaaacaacttgcataatattaaaacgctttgcaaatggatgtgataggaaccaaaaaatttcaaaatccgaatcaatcaaagagataaatagtagaaaacttattcaatggatgaagaaaatgaacttgtagaagagagtgaatctgagacttcatcggaaccaagctcctcgtagaaggagaagactctctctctctcttattatttatcacatattctcgcaacactctttattaaattatatcccttttcccttataagccctcacttggatctctatcaaaatgaaattaatataagtacaaatgggaaattgagccatctaaaagcatccaaggtagttttagacactattctattatgtttccaacattggtccacttgctcacaactacaagattgaaagtttttcttgcaaaaaaatattgaaccatgactttatgtagttaacaagcctgcatgtgatcaagtatcactcagtttaacatagcaataaaatctggaaataataatgtcaataatattgtacacaattaccgtctatttcagtaataactcccttttatttagttgttttccatttacagacattgataaatccctggcttcttgattgttacaacaaagtttttgagcatcttaaaatagaaaaattcctatcgatatgattcatgagaatatcgtgataggattcgctacaatgtgcattaactcaaatatttatatcgtgtatccaattttactcgtcccacgattttttaaaaccgcgtatttttgaaatacactttcagatagaaaaaatagtgttttggaaataaactttcagatgtatacctttcaaagtgcttgtgcaagataactttttgattcagctttctacgtacattcttgtttggagctttgttagttcttatcttctctagtctcattcagcaattatgatattaagacacctatgtttagtgcttaataattaacatgcaaattattcttgtaagagtgatccttttttacagcttttgtctccattatgtttttttgggcttcggttttcttgtatctagccatcgtcttcctcttcctctctctaggagctgctgattgaagatcatcaaatttgtatcacttagattcgatactagcattaatcctttattaatgttagtcttatgtgtatgccttcatgtaattcatattatttcataattaatataattttcaatttacttgtcaggaatagtagtatatatcagagagaaaataatttcgctgcaatcttttgctaatttaagactttgtaatcattgtaatgactttatctacatcgatcttcttttggatgaaagaaccatcaagtacaaattatgtgtttaagtttaatcgagaatgataaggtaaagcacattgaaaatggatgtaaatgtaatttttaatttatcatcattttgtatccatttttacatggaagctagtggtgtaagtgaaacagaaaggcatattagtttccttgtattatgttaggtattgtagtaataagtaatgaacaccgctgaaaaatatatgatgaaacaatattttttttcttggatattagttttcttataaaaaccttcattttagtactctttgcaaatagatgtattcaacatatgaagaaaaaaacttgtaaaagaggatgaatgccaaacatcctcacaaccaagttcctcgtagacggagaagagactctctcattatttatcacatattctcgcaacactttttgatacattatatcattttcagttataacaactcataatttccaaaatccttggttgtgtccaatttttcagcagcatcctatgaaaaaacatccgtgataaagcactaatcagttttaaacatattattttgttaagtgtccagcattgttccacttgttcaccactgcaagattgaaaggttttttgaaaaaaatatcgaacggctactttttgtagttaacatgccttcatgtgatcaagtatcatccagtttaacttagtaagcttataagagcgattcatacatttactgtatattttagtaataactccttccttttaactaaacagacttacactacaacatatattagatttagttgtttttcattgatagagtaaatgaatgacttgtgttgcaatctttcaagagaggacgaaattactgataaatatgtggatttttttaccaaagatttttatatggtatcttggtcataaaaattgtaactttttaatatgtagtttttaattggagtaagtattaacggttaatagatttccttcaatgagtgtatacttctcataaatatgttcaatgtcatctcagcatcagatgatattcattcttgtttaaataacttagcaggattgccgatgcaatctaatcaacaaattctgcttaataatgtctaaacactaaatagtttttcctttaaagggtaatattataaacatccaaccatttcagtgtctttaggaagccttgtggaaaggaagacagtaatttgaaagctaaagatgatgaaaaaaggtatttgtaacagccgtgacacacttatgtgagctatgcaatatcaacaattcagatcgatggcatgtccggcatgtatgactgtctgaaatcaacacgacaccatcacatttacactcaattactattattttctaaaattatccctagtgtctcttgttagtatatgtgttgttccattatctatgataaacagtcatgatccctactccactttctccttatcccttctcacattatattgatgatataatgtttttctctttcagatgctcatgaaatttaatgcactgaccaagcttatggaagtagagtcgaaaataaattgaaaaagagaagaaattgcttgaaaaaaggaggtttcgtcaatatagccggatgataacaagaaaaacataaacacaaattattcctccaagaggttctttaacttgttttgccaaaatatatgaggtacctaaaattgattttcaattaaataaagtgtcttatttgcctggacattggttgtcattatcttatgtcaatccgagtgtcaatttttttcctgcttatgcagaatataaatgatatatcactgaagttttgaggtgcttactatcaattcaaaccctcatacacagggttcagttcatacaaaattcaaattacttggaaggggttgaatacccttgcgatttacatgccaatttcactagtgttagatcatatcagaccaaagcttagtagcgggatacagtggtaagcaaacccaaaaagtgcaagaggcggtag

SEQ ID NO: 4010 - DNA, 2091 bp, Medicago truncatula
  Intron number 3 from transcript Medtr4g097850.1 (locus Med tr4g097850) derived from phytozome v7.0 (chr-ID MtChr4; po s 21013314 to 21015404)
aagaagctgttagtgtggagtgggttgataagtgtttaagccttactttcaagtgtccatgtggcaagggatatgaggttctaatctgtgcaaacaattgttactacaagttggtctagaagaatcagtatgcttatttgtgacatggatcacttttgtttatattctgttttagtttggaaaaagcttgtctgttttcatttgtagtagcacttggttgtcactagaagaaccaatctatatttgtagatccttacatttattcatcggctggtttgacttcgattatcttgcagtcttgtttaactgttaaactatgtatgaaccaagattgatttggccgatttttaagttacaaaactggattagcatttatgtcaataatgaaattcttagtcacagattttgggtttgcaatgttattattgagacagcttactaccttagcaagtacaaaacctaaatttacatgtgtcaacataaaacctccgcaaaacatgctatgatgagcttcaaagaaacaagaacaacaagcccttagcaacagaaaaaacatgccatattgctttcaattcaattctttgctaaattaattctgcctgcatataccgaagcaagtaagtcagaaaaaagagagacaagcaaataagtcagatcccaaattacattgataaataataccataataatgaaactcagaaccactatgtgaccatggaggtatgtgagtacagacaagtgtttcaaataaaggaataggtagcacatgagtactaacatcttttgcagaatcatatgtagctggtgtcacaagtatcctcaaagaaagtaacatgtgcagagatataaaaaggatgtgtagatggaaaataacattgataccccctttgaactctggactaccccgaaaacacgcactcgcttgatagaccgtgcatacaatctttcgcggccaggtggtagatcatgaacaaaatatgtggatccaaacactcgaataggaacaaaatacaggaggtccttatgaaacaagagaaatgtcgaatcacattatccaatattgaaaatgacttgtagttgatctaacaacagacgatgagaagtgcaatacctcaaattttgaaagatgcatgagcactgatcaataaggtacgagctgtatcgaatacgatatttctgctcagcaacactattttgttgtcgtgtgtgcagacaactagacttatgatttgtgccctgaaaggtcaagaggagtttcattgtgaagaaaagaattctttggcattgtaactaacacttataagagaaggtaatcaaaagcccattttatgtgcttattaggtaaaagaagaacagagcaaagatataaatatattaagaaggatttaactagcacttgaggttgccaatgactaatgttgtttctgaaggaaatagcaagtatatttatagttattgaggttctctgaaaatccaattccaagctaaattattatttgaaattgttaacgattaaatagcataagataatatagcatttggtgttgtcttaagattgtaccccaccttctcaaaaaatgggaaatacaaagcatctacttgcaaccaattgagactttctcaagtgcagagcagcttcatatctgttcatgcattaattactatttcataactgtgaaaacatgctaagacatgttttatttcattatgatagtgttgatgtcaacataaaccactctacatgtttgtggttatactttcaagttcattaactctatgctggcctctgctcaacaaggtgggacttgcattatctatctaccacaagatttgatgttgatccttgagaaagtcctctaaattctaaagacaacaccatgtgatgtttcatatgctcttgtctgaacatgactcaaatattatggccctcattcactgatcattatagttgccgatggtttgctaagtatcctttcatctatatatattcatggctgcaagcctttagcatcaacacaaatcattcacattccaactcccatttgaagttcaaaaactagtcttttctatatacaagtctgtctattttag

SEQ ID NO: 4011 - DNA, 3271 bp, Medicago truncatula
  Intron number 1 from transcript Medtr4g120740.1 (locus Med tr4g120740) derived from phytozome v7.0 (chr-ID MtChr4; po s 28117407 to 28120677 reverse strand)
ctgtggcaagtctacactacttgatacattagcaggtactattaaacttaattaagttattctcctgtatgtgattatcatagtatcaaacctaatagattggaagcctatttcatcaagtagtcatttatactccatttgtcctaattataagtatgatttaaaaaaaaaatagaaagacaattatatatatagtactacttttaacttaatttaaaacaacaatttgatatttaatttttttttccacgtaatttggtcattaattcacacatgttagcatgaatttccaagctttaaatctatgattttcttttggagcattatatgtatttaagacttagaactaacagaggaaaaagaaccaatgatttaaagtatgcaatcattatccaaacataggtgaatgaccaaaataatctagagaaaaaaagagatattgcatgaacaatttttgcaaaaaacaattgcccctaaatataagcattctttagaattaatacattaattcttatttttctaaacatagactattaatataatgaatttgtccatctttaatcaagtgattagactcaaatggttaatgagttcaattaaagaacgaatcttttagaagaacccgattttgattcttgagtggaacaatttctaatcaaactttattaccaactttcacccaaactctagattacgaggacctctttcttaaaaacgggatggtcggtgataaacgtcgaaggggtctatattttttgtgtgaaatggtatcatctatgcctattgcatttctaaaattggatttaaaactaagatatatggttaagttggaagagagtcattacaatcttatctaagtactctttgataaattaaaagagatatatattaacaatgtgatacttttgatttattttttaatttaaaatttcaaaccattaaaagaaaatgacacggaggagatctaaaaaaaaaaaaaaaacagagagagacacagtgagtttgatgggattccaaacaaaacgtttgtaaaggaaaaattgatgattcaaaaaaattatctcacttataataaaatttcctaaagataacctacatattattggtccttaaagaaaaagggcctgtatatagaataaaaaaaaggaagaacaatgttccatatttcgcctaaaaacaaattccatatatgaaattgtaagaaaaatgtttaaactctagatatatttttcatatcaacttaaaatatgagaatataagctttttttcaataattctttttaactccaaagtgaggaaataagttcttaatgcacccctattattgttcaggtaattaaatctacgtatgtaaaggggagttcgttttaaatactctcaagtctcaaatataaattactacaaaaaaaaaaagtctcaaatataagtaaaagttagttaaaaaaaatgatgaatttgatgaaaagttggactaaatacatcaaactttctttaaacaacatttttacttaaatttaataccgaaataatatttttcttttagcattttaaccagaaattaaaaaacatagttagttatatacgtggcaaactactgaacaggatccctaaaaaacaaaaactactgacagacatttgacgaaaataacaacatgcttaccgacagacattcgacgtttatacagatatgtttctacatcacctcaaaaaaaaaaaacctacatgtttaatttgtgtcgggtacatgcaatgcatgtgtttcacgatgccgtataaaattgagacgtctttaaggagaaatatcaatttagtttttaaatggtgatcttggataatatggattgtttggtaaaaaatattggattccaatattaacaaaattataaaatgatcacttaattttagaacctaagaggtattagatcatccacaatataacatctcatttaaatacttaaattcaaggttgttcattggcaggagcatccagctggatggagttggacctaaaattaataggggcatcaaatatttgtaggtgtagtagtatagttgttggggtgaattgtaaaaaaaaaattgaggttttttttttccacccttgttgcctaattcagattatgaaatttgaaatgttgtagagtgtttttacattttttggattctttaatctgaaatgttaaaaggatgcaagagaaatcaggaaaatgaaaaaataaattttcaattttgtttctcttatatgataggtaggtccaaaccaaaacttattataaaaaaaaagaaagaaaaaaaaaacaaattaagtggacaagataggagaccaactcaactcatacatatccgctaacaacaaaacaaagtgaaatcaaaataacacatattcttaatttatgattttaattgtcaaccaaaactttctatgcattcagtattagtcctgttcaattcaaatttgtttaatttatgtttaaactcttaaattttttaacaattttttgtagacgtgttaagaacattactaaaagttcatccgcaaaaaattattgcaaaatttaatttatatatatccagattttattacttttatctttaacttttatcgttttcaaaaattcatatttaattcgtttcattttaaaaaattataaatgactaatactgaatgcatagtatttttgtgaggactaaaacaactattaaaattaagtaaagactaaacttaaaatgcctcgattttataggtactaaaaacatatttaacccaacaaaaaaaaagtcagatgtggcatccacgtgtgcttcaccgtttgctcaatcagcaacaattaacagcgaggacctattttgctaacggaaaaaaacgttggggaccaaaaatttaacaaaatgtatgtagggactaatgttggaaacacacctatctatttatagggacctaaaacataattaactcttttttttattagttccatttttaatattagagcacgacctccaatttaattggaacaccgatgtttaaatgagtttgtttgtacatgtcactcattatgtaactaatacttaataaaccgtaaatatcttcgacctaacaatattaaatgggtccgaaaaataactccatatcatcaaatttgtaagaataatttgtctattattcataattatctaatttttgaaatattaaattaattcaattataatttatcttatcttattactatcattttcagggagattaagctcaaacacaagacaaataggggaa

SEQ ID NO: 4012 - DNA, 1937 bp, Medicago truncatula
  Intron number 1 from transcript AC233572_20.1 (locus AC233 572_20) derived from phytozome v7.0 (chr-ID AC233572; pos 90414 to 92350)
tggtagagaactgcacacaactaagagagcatggatatcttctttactagtattcttaaagggttgtgctgaaattttgaactctgtaagtttcttaatttcctatgaaattactttcaaatgtctgtttactcattagtctgtgtatgataattctctgaagtaatagtttaatatctgtatatagtgaacagtgtaatgctatagttgttaaattgtggcgcaatggtggaatgccggattttttaacagccagaggaatgtcggcgtccactatggtggcgctataggccgcaatggcgtgtttttgtgagctgttgtcaagttttgtttgttttcatgtcagtttagtgagtgttaccctgcctgccgttgtcaattaatattgtttaattgaaacaatatctcgagatcattggctgtgacttctttagtaacctcatttgacatctttcattgactctctgattttttatttctgtcaagttttctttgttataatgtctgtttggtgagcctttcttggtcttttttcttcgctgtgtgattctctcttggtgtagtgatgtcatttcaatcaattgggcaattgaactccatttgcagactttttcttttctgttggaaggatgcgtcagctaggtctctgcttccatatgttgttgcatggatgctaggagtatactgaaactacaaaaacgatgtcatcaattccagttgagtggttgaaatggcagaagacctcaagtattttttttttcatattagattgaccggatcattttctctaatgttggttgaagtagaattgtatttttcttttatatttaataattaaaactaagcttcgcaaatacctctttcaatgttattcatccgaagttgtgaaaactcctttttagatttatgatgtgccatagaatttggtcaaataatagctttaactctctttgcatagttgatggcacatgggacttgactttataaaatcttcattatatctacgtagatataccatggctcaaaattcagcatcatgaaacttacaagactttcaaatatggatatgcttctcattccattacatctttaactgtgaaaatttggggtatgactctttattatcgataatgataaatatcatgtttattcaagtagtattgtattttttttattttcaaaatgatgattacatagacatactaaagcctatatcgctgagagtgacttgtatacaagaacacatacaatgagcagtcgatggcatgctgcaacatttttaaaattatggtatgtataaacaatgtttagcaactcatcgttactttctaaaaaatttaagagcaagccaactgatatttgcatgccttattgatccaagggtttgaatttctgttataaacaaatgattctctagcggttcttcaacgcaataacttattttgtttactttcccattcatcgttgagttataattttttgcgcaaaaagtttattctgtcgtattaatgtgtagttttccaaaatgatttgttgaccggaaaactttattaacctaattgttactgattaacatgattgttgatgttataaatgctatattcactaatgaatttgatgaaatttatcaaacttaggctaggtgcagattatcatagtttctagtttacagttacgagtggcaaatttatgcaatatagtgttctatacccatattgtaggtattgtaggcccaaatcaaaatcaaaatgaacaatgcaattgacataatcgttactatgattgcactgcacttgaacacttacatttagcagccgatggatattttcagtgtttctcagcagaagttctttttatctgcttatgtggagtattgcgtagcagaattgttgttgttttgtggctaggtgtcttggacctgttttcaggcgttatag

SEQ ID NO: 4013 - DNA, 1605 bp, Medicago truncatula
  Intron number 1 from transcript Medtr2g080160.1 (locus Med tr2g080160) derived from phytozome v7.0 (chr-ID MtChr2; po s 18390536 to 18392140)
tgaagaagacaaactcttgcatctatctatatacggtaaggatagaatatgggtgattttagattggatatgtaaatatatatgtattttattatttatttattgtgtccattttcaaaagtcttattttgtgttcctttctggatggaccctctttgatgcgtttcaatttcaacattgaatagcctctttgatgagattcttgctttgagtacctttaacgctttcaattcctgtctttttgtatgtcatcagaaaacccttctaactaacttttcatttttggagtttttttttttcctttcttctttgcatgtgttgaattatgagtgtttgatggtgattgtgattctgggtattgaaaaaggttggatttttatgtttcttttactgctgttttgtttgtaaagattacaagttcagttttttatgctggaatcacggtgctgttattggtttcttaatttgttgtgtaatgtgtttggtagtgccacttttttgtctcctttttattgggaaattattttcttctcagtgcaaggttctaaattgtgattgcactagctattttattctgatctctaatatttgcatagctattcttgatattgcattccagtcacaaatcactatgcaattgcagagcccttaaacctaccaatttctactacagacctcaatttagaaatatgtgatatgattttgtttctaccactgctataatttgtgatacttttcttaatatgtatgttgacattatattgatagagtgaatttagggtaaattatggctcacatgaaagctatatgatttgactctgatcctatgtgattctatttgtttgaccaatatagcatcaagaattttagttccaatgaataacttaattgcaaagtacaaagttaattgatacaatttggctctattgttgctgttagtacccttcacacttgctccatttttttctttctttcttcgtgtgagtcagagagccctgctgaatttgttatatcttgttgaagtttattttgtattgcctgccacaaaacaagtgcacattattgatctgtttttaacttttctatgtatgtttgatgggtgtacaatgatatataagatgatggcagttattttaagtcaactacatttggaaaagaagactagtctttactaggaatgatgatataagcgaagtcttggatatgtgaaactctttgaactgcctatattctatacatcatacaaaactcactttaaatatcatttgaccattcatttgtttaggaaatatcccttatgtaaccagtgtcatccaccatcatttcctgttaatgtaaaacgtaggaaagttttgtgttatacctgaaaagtaggttattttggcttagtgtcatcaacggaatgatttttaaatgtgcatactaaaggcagaatcataatgtgttatttccccttctccgcttccaaatttctttttatttatacttctattcaattgtatgtcctacactcctactagagaaagcgcacaaagaaatgcgaaaagataactcactcttcaattgataccttgtaggtttgtttttgctttcatctaaggggca

SEQ ID NO: 4014 - DNA, 725 bp, Medicago truncatula
  Intron number 1 from transcript Medtr5g020450.2 (locus Med tr5g020450) derived from phytozome v7.0 (chr-ID MtChr5; po s 7734733 to 7735457)
tatttggtggttcttcaatattaagctcaaaaaaggttacttactttcttctgaattattagcgtgtaattctaggcaattcattctccttattctaaagtttctattattttatccttaagctcaaagttcaaactgtgtttggtagcatgatgacacatatagtacaagaaaactctatactcctctccaatcaaattgttaactattggatttatcaacctttgatagcttacaatttgattggatagacttataagtgcatgtttggatagtgagtttgataaaattacggtgacaccatgattttgttgaagctataaaatgtaacttttgtcaaaattacagtggttcaccgtgattatgttaaactcaccgtcaatccaaacatgtactaagttatatggcaaattatcatataaatataatagtttttttttattttttattgtatgttgagtaataatataaaaatatattgcagaatatcatataatatttctactttcaatgatgtttgttgaaagttgacctcttctcacttctcaatttaggtgatgaaaattacttttgttttactctattgaccagagtattccaaaataaatttgtccttctctagtagattttgttctttcattacagttaaggattcatgaatctgttatgttgcttaatatatgttctttccatgtctgatatgtagctgtaggacactcctcttg

SEQ ID NO: 4015 - DNA, 1969 bp, Medicago truncatula
  Intron number 1 from transcript AC233659_11.2 (locus AC233 659_11) derived from phytozome v7.0 (chr-ID AC233659; pos 43400 to 45368 reverse strand)
gcgccggtgagtgtttcagtttgtttgaatctgctagatctcgtttgaatctgcttagatctatgctaattttgctttcaatgctaattgcttgatcttaaagttttcttttttacttgatgttttcttttgaatgcttaggattttgaatcaggtattaggaagttgaaagacgtgaattgaactttgtttgtttcaaatttcacttgaaaattgaaatagtttacttgagctgaaacaaagtttttttgagggttgtgatttagtaaaccagatgctgatttagtgaactcttgcgtggtgacgagcttttgagtgttagttttatcctctgttggattgcagtttggattttaatcggattctgtagtttgtaggatttgttttgcgtgctcgtttatgcggattgaaatattggatgaatatgtctgttgatcaattggggagagatcttttgtacacgatcgtctctccgccttttaaacttagatctaggtagtgatttatagattagcagatgatgataaagtttgatgtgaataaatagcatcaaattgtcttgaaaacatttattggatttaatgagagtgcttagggacatatgagaaacatgcagggtatgtttgacaacaatgcagcataggtttgagtaaaatatctagtcaaaaatagaaggtaggaacgctggggtcccttttgcttcaaatagactatcacagtgcttctaagggttttccaaacgtatgcatatcgtgttttaaactagttgtctgtgttggcaaatccaaacgtatgcgtatcgcgttttaagctaatagtctgtgttggcagaatcttggtaaacatcgtatcgtaatgtttacatatgcctatgttcatacttgtcaagcgtgaattttgtattgagttaatccttgtgcagttttatgatgttcctatctcattgttgcaacacattaccctttatttcttgttaatttttttcctttgaatttggtttctttatgtgatggatcatggattcattttcgtaggaaaagtaaggatttatatccattgattaaaaaaggctgtagagatgttgattccattacacacactcttgacctccaatcacgtggtagaaactccaacaattgcaccacatctccctttcaactgaagcacaacttttgtttataaaaattaaaacaaaatatatggaatgcaagtttagcaagaggcagcaaaattttagtatagaagtgggaattagacagcataccagatcacaagtcttgtggtttcagtccatcatattaaatgatgggagatagacgaagacatgaaccagaagatcaaagtaggatagatgaaattaggatatgtttgcaatgtgaatacagtagtgtcactcaagtataaagaaaagtttaccacaaaactataagctctgcattgttgtgcaaagtgtgaacccagtgtcagatggtaaatagtcactaaaaagtaagttcaatgttgcaggaataaggatgcatcaaattaatcatcagaaagaaagttggagtagctctcaatgtagattttttttcttcttcccatcttaggtggtttgaacatgtgcaaaaagattcgtaaaagcatcaacaagggttgagcaaatgaaggatagtctaataattaaaagtagagtgaggtcaaagaaaacaatagatcaacttattaagaggaatttaaatggttgatcttgaaacatggtgtatgacaagaatttatggcatcgtttgatccttgtagtcaatcccacttagtgaggcaaaatactattaatacaaatactatttgtttggtcatatgaggcaaaattattctgaaccttaaatgtaggacaagtatttgtttgcaatctgatttttggagatttcagatctattatatgtttactgaactcggttgacaatgaaaatgaattcgttgtgcagtcaaa

SEQ ID NO: 4016 - DNA, 866 bp, Medicago truncatula
  Intron number 2 from transcript AC235677_13.1 (locus AC235 677_13) derived from phytozome v7.0 (chr-ID AC235677; pos 48136 to 49001 reverse strand)
ttcaagtggcaaaggttggtactttagattttcttttgagaaaatgtgaaattgtcttcttatttttttttgactttttgttgaccattgcaatagatagttcttgaatcgtgtgtgtttgagcgagtttaggagaggttaatttgaatagaattgattttgtagatatgattatgctaaaactgagtttgaagtgatctattgttgaacatttcttcaaaattgattatgttagataagtgcatgtttggtttcactgttgtgtttgagttttcttgggtgaagttgattttgcttccaaacttggatctaaagctgaaatttttgtaatttttcctctaaacataaaaattactttatatgcaatttaataaaaatgaaatttataaaatccgttgattcaaaatcaattttcaccattgtagtaagcatgaggctgagagtaacaaaaaaatacatttatttttatactaggcagaagtacaattaattctaatattttctactgtgaaaccggacacagtttgttggagaaacagactgggagtgattttgtagacccctttataagaagaggccacttgaaaatagtgtccttcacgagtcatgaattcacaaccgtgttgcaaataaatttgtagcgtatttgcttcagatctgaatgccagagtgctggtctattttttttttattattttattgaagtccagtggagaaactcatctgctatgcactttgtacggtgattatatgatatgtttcacataaattacatgttccatccacaagattcttaactagccaaaatgtattttgctctcgtgcatacaggctgcaaagagtgctggtgtgccagtaatatttga

SEQ ID NO: 4017 - DNA, 2015 bp, Medicago truncatula
  Intron number 2 from transcript Medtr6g099620.1 (locus Med tr6g099620) derived from phytozome v7.0 (chr-ID MtChr6; po s 22081681 to 22083695)
gtgaagatattgttgaaattgaagttaacaccatttttgtgttgttctatgatattgttggattttgatgacggaacaatgtgtgtggaacaatgtgtgtgtgtgtgtgtggatagacagaaaatttagattttttggaattcactgataagggaaaaccgacattgatattatggttatttcggtcaaatactaacactacatttactattttggtacaagtgtttttggttcaattgattcaatctgttaaattttggttgaacgtgtatattcgagaagttgaaattatttattttattattggtttgatttaactatttgatctcatgttcaatatctgatttaatgatttggtttaaggttcgatttttatttgtatatgtgaaaaactatatattgggaaaagtcaactctttcaatatatttcaattatcttgaacaattaattttcgcaattgagtatggagataccttgatttatcaactaaaaaaatctggttaaaaattgaactactaggacctctaaattatggtttaattgaatcttggttgaaccgcggtctaatcaagtttgagagaaaattatggttgaaccaaccagttgaccgttcgattcttgagtcaatcgattgaaccggtcagtttggtctaattctaacaacactgatttagttatatgattatgaatattagtttcgattaattttaatttttttaaataaataaatagagtccatgttaagaagacctttcactcaagaggaagtgagtcacaataatttaggagacaaataattgaacaaatatacaaatcatttaaaaatttaattatcatttcaaaatcaacaaaaaataataataattcttttgaatttactatgagttaaggaatgaaatagttaactttttctcgtgtgacatggatattttgtacgcacaactgtaaaaattaatatctcatattataattaatagatggtaaaactctcttttaaaaaatttaacgccgatatattctcaagaacgaatttaaacccataacttcttactaaaatggcaaaagtctcctactattttatctaagtgatctttgtagttcaccttagatgaataagtggtaactcatggcatttttttcctttattttttatttttttaaatttgttagtaactcctagtctcatatcatgttattccacttaatttagtacttactattatatttaggaaaaagtttcttgttttatgcgtgtagttattgttattattgacttgcacgcaatgtccaagattattatccacgaaagcttaaatattaaaaaacaacaaatacagcatattataaatatatattaagttccctaaaaaaaaaatattaagtgattttctctgactttttcgggttctaattttttttttatctattttaaattaataaaattttattatttgtaataaaattttgaaataaaaatacgatgtatattgtgaggtatttaggcaatggaaaatgttagagggttatttgggtcatacttacaacacaaatgtagttgtgacattaatgctattgtgggattaatgaatggtgtgaaataaatcagactcaaatttggttttaaaaacaaagcagggtcgtatattcgacccaaatacacttgaacaatgacagacaaatttttgttaattgtttgaaagtgaaggtatggatatgtaaagaaatgatgaattggattgttttctaatattaagtaacttgacaattgcctgttaatacatgcaagtttgttgcagaagaattataaacatgtatgaaattgattatgatttgtttgcatgttgtagaatttgaatcaagatgtatccaagtaaaataaaatattcgattaaggctcaaaccaaattgtcttaagcaagttcatggtcaaatcattgatcgttaccctagttccattttatcactcaattgtctaatcaatgtgttttattagcattgcaggaaatcattttaa

SEQ ID NO: 4018 - DNA, 1792 bp, Medicago truncatula
  Intron number 1 from transcript Medtr5g029090.1 (locus Med tr5g029090) derived from phytozome v7.0 (chr-ID MtChr5; po s 12074987 to 12076778 reverse strand)
gggttagtgcttttttcttataatttttcaaattaatcatgaaaaaaaaacatgaatttgtcttagtttgttcatgttcatgtttatgtttatgttatgtttttgttttgtgtgtttgatgtgtttgtcttttttgtctgttcacaattttcactctattcaaaagacatcacgttaaccactgacccttgttttgtattatcttgatgtgttttactctttctctttcttattaggtaacaaaaatatagtttatttggtcttagtgggttttgttaagtgtactagatctgaaactattatgttaatctatgcattggtttatgtttttatttgtttataagttatccacatgtgtgagtatgtgttttagatctggtggtcaatgtgaacatgtgtgtaatgtgatgtgcatgtttggtatcaggttaatttgtcgaaatcacggtgactcgcattgattttgcaaaatcacattgggccaccgtgttttcgagtaaccatggtgataccaaacatccaagaaatgacaatgacaatgtaaatgtcttttctttactgtttcttttcaatgcaataataataacaagtagaaagtagatgaagttaaggcttttggcaccagagagtgtcttccctaaacaaacaaacaaaaaatgaaaaagttaaagtgaaaaggaaaaggaaagggaaaataaaagcagcatgtatttatggattctgaaacattgataaagattttacctttgtttagattctattggcctaactttttcttcttggtagtttgtagcaattttttctgaactttctttgtcctttgttttactttcttaatttctttcttatcagcttaaagttttccagtttttatccctacatggatgtggacatagcatagagttttttggtgtttttatggggatggagcccttggttttctttgaaagtttttaattttcttatccctactaccaacattattttccttttaaagaattagaattaaagaaaatgataaatgtatgtttggttccagtttttggaggaggcaaaattgattatggagatgtaagtataattgattttgacatgtttggatgttctcgagtagaattgtctttgccttacggaattgactctaacgtgaagctagaatttgcagcttttgtttctacaaatgatttataactttttagcctcaaatttatttttcaacccacttttacatgaatgtatcaaaacataagccgcttacattcgatttactattaggcataataaatttacagaatcaattcattggaaattaatttgtctcagcgaaaccatacacacgctaaacattttctcattttgcatctttgaattattgtaatctttcattatctctctatcatataatagtatattttgccattattattgatttgaagttccctatttagcttttctataaatttatagtgcacatttgctttagaagtttcattggaatatgctattggttattagatcttgagcttttacttaaaaagtgaatatgtacattggtccataaatggtttgatttacatcaatctaattgactcttgacagtctataaatttgattcaattaagcacataataaggacttgattgaatcaattttgaacatcaatgtgattaattaatataaatagtctttgaaaaaaataatttttttgtttttcaatcatttgaattgccagcatttctagactaaagctgaaaagttgatgtgttttttaacgtttttcccccccacaggt

SEQ ID NO: 4019 - DNA, 2827 bp, Medicago truncatula
  Intron number 3 from transcript Medtr4g032970.1 (locus Med tr4g032970) derived from phytozome v7.0 (chr-ID MtChr4; po s 8063492 to 8066318)
ctattctttggcatatcctgactaccctgatcaaagtatgttcttgcttcatgttttaagtaaaactagagtttattaacttgttgagtaagatattagaaagtccacacacagtttggttccctaatgcatttggtccactgaacatttcatttttaacttggtgtagtacattgggtcaacggtcaactacaaagtttgttgttctttcattgacgagaaaacgtattattgtttgagattttcccacaatcatatgacacattttttctttcgagccaagtaaagaatttagagtaaatcatcaagttaatctctgaagttaatgtggtgagacatgtattttttttgtgggtttactctttattaagacaaatattaggcatagagagaggacgagctgtcaaaagtagggtatggacttaaagatcttgaaagaaacaatgaactcgacaactccattattattctttttttgcattaatgctaaagaatcccaccttttccacgaatctctgaactgattcaagatgacaagggaaaagggtggaatattttgggaaagaagaccaaagggagatggaatcccgcataaatatggtggagcattaaaatattctggaaggtgagcaccagacttggatcaaattttttttaggtcaagactaaatttgatgggcttgatgaaatcaagatgtaactgggaagaatgaataggcttgagattacttttggtcatctaataatgcatagacaagtttgagactgaaggaaggatctgtctgcaagttcttgatggaattaagaagaaaatagaaaatggtaatgggttggattgtggtagcaagacacattcttgggcagcaaagatgggtgataggacaaaatcattgggttgagacttgtaaaatctctccggggtgtagtagaggaagtcgccaaaaatgcaaaaaccaaatacaaatatgataataacccatttgtcgagatcaaggttgaagtcaaaggtggagatgtagcaaaactctaatcaaaatctagagcaacactctaatcaaaatctagagcaacactctagtcaaaggtggagaaaaacaataatcatcatcaaaattgccccacccgaagttgttcttagtggtggatggaacattatagacatgggaaacttggtgagttcaaactttctggctgagcctgaagtgctgaactcagatgcatgtagagcataacaaaagagggaaggtagaaataaggtgtagttgcttcgatggagatctggtcgattgtaacctgcccactgccatttagaccttattggccgcacctaatttgatgttaacattttgttgatgaaaaagggttttgccaaacgtgattcaagggtagacttcttcagatccaacacaaggcatatctagccttaacacaaattcttaccatgatcccatttgcctcggtataataacccctaaacctgctgtccggtttgtgaacgatgttcacagtcaagatgaccctgctgcaatgatgtgtagaaaagattgggtatgaccggcaaccattttggtgtggtaaatgtagcagtgaaaaccatcttgatgggacctaggagagccttttcacccgtcacccatttttggcttgtcacggtcaaaagtagcgggagttcagagggaagaggtctggttttccaatgtatattaaacaaacagaagtttatcatattgcaacatcgttgacagagttaattttgaaggggatggtattgttatggtaaacaacaacggtgagctaaagtagctgggatctgttaggtgagtgagttacccaacagaaatattttgataaataaataggggatggtacattggtagatggagaaattcattctggacattggataacagttgtgaaaggagtaatcctttgtgaaggggaaatactttgtagatagacctctatctttcacaaaggggaaacccttggtttggaaatgtatgttgaaacatggttgaggaaatattggatggtatactatcttagtgtgggtatgaatatatcagttcaaatagcttcagcttattttttcttttcccttctagaatatctgtctgcgtggcagattatgttggaagcagtttccgctactcagagtgagttacagggttaattacaagggcgtatgataacccctctgttcgtgtaggatatgaatcctgtataagtctttgtattctgtatttctaagatcaagaaatcacaatatgttttttcaattcactttcccttttctactagtgagcgagggtttgttggaacaaaaatgggtcatagcaagcttcaatacaaccatgaagttagagagtatgatggaattgtgtctagagtggactgcacaagagcagtgtaattatactagtgagttattatatggctcattataaagagtaagcattccctaaattactccgtgtttgagcataatagcagtgcaattatactagtgagttgttaaattatatcgctcattatacagagtagtcatcccctaagttattcctttgtttgagcattaattgacttcatacatatatttttaatatgaagatatttttcacaagattaaaagagctattcaacagtaagactcgtgatacttttcatacaagtttatctttgccttttaaaaattctgtagttatatccccatgaaattagagaattatcatacaaactgcaatgataacaaataatttgaagttagtaactgttatactacttgtctgtagagataagtcaaatcaaggtgtatcaaattccctct

SEQ ID NO: 4020 - DNA, 2144 bp, Medicago truncatula
  Intron number 1 from transcript Medtr2g104850.1 (locus Med tr2g104850) derived from phytozome v7.0 (chr-ID MtChr2; po s 24835977 to 24838120)
ctggaattcgtatgtatttaactttgaatttatctttgttgttgttgagatttggtcaatgttagttttttctatggttccggggaaggggctctggtaatttgaagttcggttgggaggtttggtaagtaaaacctggtcaagaattgctccttccaggaatacttatgaatgttagtttgataactatactcattgcataattggtattttgaggttgagttgaatttagttgcacatgtgggtgggttttgaatttttatgttaatgtttagttattagttactaggggtgtttgaatgcaaagaaccctaagttgcattgttgttttaggttatggaaatgcattgattgcaatagattggtgatatttaaggtttattagctacaggggttgtttgaatgcaaataatcataattgagttgttgttttaggtcatggaaatgcattgattgctatggattggtgatatttatggatttattagttactagggctgtttgaatgcaaataaccctaattgggttattgttttaggtcatgaaaatgaatcgattgcaatggattggtgatatttagggtttattttcacagtatctaggtgcttttgatctttaattgggataaaatcttgctttgttgattgctaagatcaataatagtttaacttggatggatggatggggaggatttgaacggtaatgagtggaaatggtatttctgatcattgatttattggatagttcaacaatcaaatcgaattctcttaactgaatctgctacatggatcacataactcttaaatttgatccatgtaatgtaattcattagagtaaagccttttaaatgttatcttctatggttttccctggtattcttatactcctttcaataaaactatattctgtaagattttacttgtcacattgggcctttgttgttcttttgccaatgcgtcgaaccaccttaaactagtttctctcattaaaggccttaaaatgcttttacatttctaaatacttttgaggaagaggtttttagacttgaagcagataaagccttgataccatgttaattggtaacagccaactcttctacaagataacatctttaggtgaaggtcctagaatgtaacaacttaggttaaaggcctcaaaatgcttttacatctttaaacaccctttgaggaagagttctttaggtttgaagcagataatgcacaggcgtaaatttccttgagctgaaatttactttaattatgaagaattgggtggaaggggtggcagctggcaaggactgaatcttgaccccttggccataaagccttgatagttgataccgtgtgtcaacagtaaactcttgcacaagataaattttgtaggtgaaggtcctagaatgtaacaatgaggttggaccgacattccttttcaagtacaattttccggttgacaatgtatcatctttggttcagtggtatatgaactctagcaaccctgttttttactttataaagaatggttttagtttatgttgtgaagagtatccattttaagtaaagttgacaataagcagcatttgttgaaaatggtaagaaattgttgtttatgttcagtaggatccccaaatggttttattctcattcttaaactcaaagtcatccagacagagtagcacccttggctgtctattaattttgatgtacagcaatcttagtaatagttaataaggacacagtcgagtatatagcttaactaaatgcttattcattaagttatgcttatacattaagttatttttgggaatttgattaagaacttattcataagctattttggagggattattgaaattaattgaaaataacttatgggtatgtcataaattactgttgtaaactttctaggttatttcagaattgaattcatctgcataccaattgaacaattatcaatattttatacatttttctttggaagaagagtcaatattgattggtttgaagggagcttctcttgtaaaaaagaatgaaatgtatattttatagctttagtaattgagggataagtgttcagtgtttacagtgaaatttatcacgaccgctaatataccatttgtgctgcaggtttagctggtgctacagctg

SEQ ID NO: 4021 - DNA, 2878 bp, Medicago truncatula
  Intron number 1 from transcript Medtr7g046720.1 (locus Med tr7g046720) derived from phytozome v7.0 (chr-ID MtChr7; po s 11581030 to 11583907)
tgtgaatttctagctaagagttgttgttttaaaaggtaattagagtgttttttttttttttttttcccttgggagagttatgattgtaaggtggttgtttggattactgtattggtcacatttgaatcttgtttattgctctttgagttaattactggtgtatgttaatgaggatcctgaatcctgattccacgtcttcgctgtaatgttttagttcactgtttttgtggaaatgtgtagaaggcacattgctggtccaatgcagtcatgtgagctaaatagattagccctaaccataatgattaacattgtggctagagaaaagaagttgcacattgtgtatgtatactagaccagatattcaaaacctaattactgctaggagaagctttgggaaacagtttcctgacaggaaatttccatgtttcttatttactttggaagtttaagattgcaattgattttgaacgccaagtcttacaataaatgaagctgtgcccattttcatcacgttagaaggggaaccttgtgttaaattgaagttatctagtttggctaaatgggtagataagatggatgatttgtatttgaagaaagacgaatgaatgtgttgtttgaaatccttctttacttatagtttggaagtttgaatgattaagtagattcaggacaaatatatgaagctatgatgcaggaacattttaagaaataaaatttgagatgtgttagtagttttatattaaattaaagaactttcgttattgcatttgcagctgtctagattctttggacattacgatgtgttatatttaagaaagaaattagttttcatttttcaattttcgattttaatagagaaattattggttttgaaaatacattacatatatgccctcttaattcttaagcatatgaatctgggattgctttcactagcgtataggaagtgtgtcaattgtcaagtcaattggacatattaactggaagaacaacgttcttggggattaaattttatcaagtcttcacggatgtttattgttgttatgtcttttgagtatgggtggttgtttgaattactgtatcagtcacctttgaattttgttaattgctctttgagtttcggtaggatgtttagttcactgtttttgcagaaatgggtagaataaacagattatgcctaaccttaatgattaatattatggctaaagaaaagtaatagcacaatgtgtatacatatatagaccataggtacaaagcctaagtacttttaggagaagctttcaaacagtttactaacaggaaatttccacactctcatatgtactatggaagataatgattgcaaaggatttcgaaactttaaggcttgacataaataaagttgttccaattctttccacgatagaaggagaatgttgtgttaaaatgaagtagcattaaaggctttaaattacactgagccgagtttaagttatttctctttttctgccaataagaaaaggtggatgatttgttatttgaatcaacaatgcatgattgtgttgtttaaaatccttctttgctttttgtttggaagtttgagtgattaagtagattcaggacaatacgaagctatgatgcaggaactttttcataaagaaaatttgtggtgtgctagtgcttttatattataaattaaacaaattttgctattgcagctgtaaggtgtttatattctggggatattatgatgtgttatatgtgtggatctcaaccttataaagcctattatgcttcaacctacttgaaagaaattataattttcagtttgggattttactagagaaattgtttgttttgaaaatacatattccctcttgactgatagttaatagtgagttgggttctgcttgatcctggttgtgctgctaattccctgctcatgtctgatttgggtaaaccctttaattctccagtgtagagattttatcttgataatctgtgtagatttcaagtttaattctagttgtttaggtttttcctagatataaaaaagggtccatctacatgccaataaatcgcacaagagtgtatttagcagtgtgattatccagctttttaggtgcatttggctgatttgataggtgataagctattatctataattctatatagaagttggtaataatgaacttattcaaacatcaggcataagtttgctatcatttctgttcatagattataaatttgtttctacttcatttgacaggagagtattgttattttagacttctgcttgcaaagcaagattctaaagttaagaacggaaaatgagagattgatgatttattggattttctaaggaagacattgattttttcaccatgattcatatttaggagacctgtaataagagttgccaatgaatggcatttctctatcagctcagagtgcggcaggtggtatagtaatcctatagaaagtcaaattgcaggtgatgtagtttgaagacctacaaacacgagatatttcaactcacttcctttacttccttgattaacattcagcatataacacagatatgatatgttatgacattcacaaaatataagttatatattgactggttttggttgggtttaggttaaaagactggttagttcaccacattgttgtgtcaaccaccaccttttctgttcttttttttttttttttgcaaaaattatctcttcctttcccgttcctctgcactgctggttgtgcatgtgaccacaccactctgcacctgctacccccttcccacatatgattatttggggcgtgtctatgttttgggtcatatgaaggtgaaaattggatgcattttttttttcatttaataaagaggactttgttaggc

SEQ ID NO: 4022 - DNA, 1503 bp, Medicago truncatula
  Intron number 1 from transcript Medtr5g034530.1 (locus Med tr5g034530) derived from phytozome v7.0 (chr-ID MtChr5; po s 14194621 to 14196123 reverse strand)
tgctcagtgtaatttggggatttcgtatcttcaaggttttcaattcctcaatcttttaatttttttgtagctgattttgttttagtatatttatctataattatgttgtagagaatggaattttgataatcatatatgagtctgttggattttgtgttttgttgctggttggtatctagacataggttctgtctaagcacattgctgttgtatactgcatacattcaaaattaggatgaacatcattctttttagcttatcctatgaagcacatacacattggttgacatcagacacgacagtgacacgtagacacaagtaatattttaggaaaatggaagtgattgaatataactaaatgtgtcagtgactcggtgtctgataccaaacacacttttgatccgagtgttggtgctacatagctcttatctaaaatagtttgtaggagacctgaccatgttttcattcattcaacttggtatcaacatcgttcttttaaacttatcctatgaagctcttatacatacactagacacaacactgacatatagacacattaatttaagaaaatggaagttatcgagtgtaagcacatgtgttagtgttgtgtcggtgtcggataccagtcttagaatttgtggttgagcttaacacaaccccacataactggcttctgccatatcacttcgaatgtaggattcttaacacacaccctctcgcccaagactggacatctggagtgtgaccctagtggcctgatagcgaaaatccgataggcgacccaacatatcttgaataggctctgattccatcttaaaatttgtgattgggcctaacacaaccccacaaaaccggcgtaaggtgaggattgcctccatgtttaaaaatatcttcaagtcatctctcatccaacgtgggactcttaacaaccagacacactttcgatttgaagtgttggtgcttcataaaacttatccatagtcttggtgcttcataagattgaaaagttattttagatgcatccgattcttccaaagtgaacaactcacttcaaagaataaagtgagtgatatcaactatcgatgaacatattaatggttatacacatgcgtaacaaatcatagataaatgaaataccaatcaatgattttcttattttactaactattcattgtagaagggctgaattcattatagataagctaatttggtgtttggattatacttgctaagaagttcttttgggatcttttgtataaaccgataatacagaagctgttgcaacaggcttcctcgtaagttcttctgtttgctattaggaaatgatatatagggcaagctgttactttttatagtagcgtgtgtatatcttttgtgaattttaatgagtattagtttatcctttgaatggaatggaaaagaaaattatgatgatagtttatgtctaacaaaggtatacctatgctatgcagttgaacctccaaacactgagcaagctttaaa

SEQ ID NO: 4023 - DNA, 6238 bp, Medicago truncatula
  Intron number 2 from transcript Medtr3g076610.1 (locus Med tr3g076610) derived from phytozome v7.0 (chr-ID MtChr3; po s 17736266 to 17742503 reverse strand)
aagcccgaatacgttgtacgagtgcgatacaatacgggtacgcggatgcatgatatttttaaaattcaggatacgatacaactaagatacgttaacaaaatatttatactaaaaattaaatacatgcaaaatatttgataaaaaaataagaattaattactcttcaatactatataatcataaaagtcacgatttacgaaaaataatacatgatcaaaataaaagttgtaaagtctacgtaaaaattatattttattttcattcataagtttggatatcaacaaatacatcaataaaaaaactataaacaaagtttatttaatgttgattgattgaatatcctttctctcttggtacttttatccaccaaaaatataatttttatttggttaatcgaaatacaattatagcgattcatatcttaaatttaatcatatacattcgcattcgacacatgtatgtctccaatttggagtatctggacttcataagtacatgcacaccctgggttttgaaaatttgcaccaataatcttattttttatttttttacattttgaccccaatattaaggttatagattttggacttacacccccaaaatccttacaacttagttttaagtttggtttttctttctaatgaaaattccaaaaagcagaaccaaggatcgaaaacatgacatgaccttatgatggtgcatattaagttctactgtttagcgatgttgttgtcatttggaaaacatgacatgacggaaattttatatagcttcatatttgttttttttttctttcttttgagacatttttcatatatgcttttttgtaactctttcatttttctctttccccttcttttatttttttccctttctatttggagattatagccatgatagttttctatctattatggataaaattactctttcaatttcaaactgctagaaattataatggattacataactttcactacaccatttatcctttttaacaacaaggcttaattgcacttttagacctctatcttttcaaaagttgcggttatggccccctaactaatttaaatacaaaacatgcccctatgttttgattttttttttgcagttttggacccccaatccattagtgaggtgccacgtgaccccctaaataatacacgtggcacctcactaatggactgggggtccaaaactgccaaagaatcaaaatatagggggttgttttgtatttaaattagttagggggccataaccacaacttttggaaagataggggtccaaaagtgcaattaagcctaacaatcgaaaaatgttgccagaactaagaaaaacgtcccctaaaggtataggggacgttttctcggcgtctcctatacgagcgtcgcctatagtctatggggacgttttttcatgttctttgggcacagtttttgaaaacgtcgcctaaaccttaggaatatgagacaattttttggggattctgaggggacgtttttaaatgttcccataggttgcttcaattaataatcgtcccctaaaatttgaatcttttaagaaattataaaaacgtccccataacttacaagcaacatttttagagtgtccttgtaaaattttagaatttttcaattattttagaaatgtaactatagcttaaagacaatattagaattgtcaattataactcaaacaagatcgaatttaacaatacaaccacaaaagatgtaatataataacatagttcaaacattaattcaagacataatagtaatcaaaatgtcaaacattacttgataagtttaatgcttcgaagtataagcctaacaaaataacaaaactatagttcggacaagtttagtggtttaactacaatccaaaatgtggcttaactacaatccaaaataaaacaccatccaactcaatcattcaagtttatcttgtaattcatcagccaaatcgtccacttcaaattcatcaccgatgtcattctcttgaattttatcatctaggtcatcctcttgaaattcatcatctaggtcatcctcttgaaattcattatctatatcatcctcttgaaattcatcacttaagttgtcctcaagaaattcgtcctcaagaaattcatcatctacgtcttcctcctcaactatgtcatcctgtacaacatcttcattgatagcttgctgcataagaacaaaatacatcaaccatagatattgttggttcaaaggccaatcaaagacatcaacaagtgttgtacctcgcacaaataaaaaccaaaacaacaagtaaaacacagtcaacatagccgcaaataggaaaccttttttacacatttcccttccttattctatcattacaagctcatttttaagtttctgcaacttatgccatgttatgcaacagagaaacaaacacaaaatgcagaaaaataaatcacaagtttgcacaaacaccacaaattgcataaacaaaatttatgcataaaattctgcaacacaatcaaaatccgactttggacatgcattttaagcaattcagccaaacaacataatcataagttcgcacagctctaatttagacccaacatacgcaagttaacaatttcagacacttgcctacattccaagtgatatcattactaacaactttttgcatatattaacaagcaaaatataactagtttaactcaattacaataacataatcaataatatttatatatatggttaccttttcaggacatggagtatgaatggaagtagaggaatgcatttgtgctctactatcctttggggagctgttagcatctccatgagataatcctagcaaatgttctattgagtccatatttaattgaggattgcattgttgtatgacggtcttaaacacattttgcaatctatcaatctgatcttgaaattcatgccttaaagtagatacctcttgactatgtgcttgattcaaagcattaatctcaacctttcgctttaaggaagttttagttatttttctcccataacaacgtaacctgccaggacgctcctttcccataacagctttaaaagcttcagtatcacttcctttcttttcatccatttcttgaagttgggagcaaaaaaaaaaattcaagaaaacattaactaatattataaacaatgtttgccaacaatattaagtaaacacaatttaacgtaactgtaattttttacatacaaatacttttccagtttcttcatccaattgctttcctctacttccttttcgagtttcaaaaaacatttctaattgagtgggctctcttttttcttttttcataaaacattgccttagggacttttaggggacaatttttgcacgtcctctaaaaaagtgttgccagagacaacaaatggtgtagtgttttagtccttacaaaactatatgatcatatattttaatataatattctagatatagtaacaaaaattatataaaattctaaaagttgaagcaacatcgactatatgtttatgtaaatagagatattttggatgaataaaatgtgtgatgtctttacgtagaaaaatttaaaattttgttggacgaaaaagtatgaacccatagatccagggtcatggatatgccactagatgtgatgataaagtgaagggtccaacaaaaaatttgaaaaagcacatgaacatataaaatggacttgttaaacttattgttttatttcgattataagatgtcttatttggggtcattagttttttgttggttggcttgtttactttaattattgcttctcctgattattagatctctacttgttttctgtcccttggtttaagtagtctgagtgacttttgtctcaccatccatttgcacttcacttttcatcttaatttttttgttgacttcaaagttatatagtttaggaaatcaaatataactttcacttttcatccctttgtttacattgaaatcaaatatatatctaatctttgaaaatatatttttcttccctcttcttgaataacaaatatatacataagagaaggtaataaggatatgcgatagaagaagtgcttaaagatcaacataacaatacaaaaaagagaaaaactaatggaaaaaactacaaaaaagacagagaaaccaaaggaactaaaacaaagtcaaaccaaagctctgaaccaaccagcaacaaccaagagcacacacaagaagaggaaaattgcaacgtggcatcgtgcccccaacacatcactagaacatgcttaatgtaacgccccaattttatttaattattattggttgatttaaagtctttttacatatgattttatataattatgttgattatgcggtgtgttatattttattaaatgagttattttactatttaatgaataagtgggaatttagaatatttggagttcaaggggctgatttggaattaaggagagttgtgtggaaataagataaaatagatgggaggaaataaataggaaaaactaggtttagaattattttcacgtacaaccagttttggagaaaagggagaacgagaagagggaagaaccaagagagtgttgctgatcgattttcttaaggtaagggtgagactagcattcaattatattgagtctgtaattctgatgattaaatttaacaagtgtagaattaattttagagagttggagaattaggttaaagtgaggaattgacgattaattgatgtagaattgttagattgatttagaaactgtgtacagaccttagataatccataggatgattaaaggaaccggttttaaggtttgaaccatgtgattaggtgaattttcgtcaaaattgcaattctgcccaagcgaacattcatcgctcgcctcccgagggatgatcctcaccatagcgagtgatgaactccattgctcgcctcgcgagcaacttttcttcgcctcgcgagttgcaccttgcagctcgccatagcgagcagatcactcgccatagcgagtttgaccagtgaggaaacatgattttgtgattttgtgatttagctccttaagtcgaaatttagatgattttgagtgtctgaatatgtataataatgattaggcaagtttttagattgagattgaacttgggaaagtttaaaaatggatttttaggtgaaaaaaagtcaaattcccgagagcaaccatttcttgttcgccaaggcgagcagcttacttgccaaggcgaatagccaaatttctgaactcgccatagcgagtaatgtccctcgcctcgcgagctcctgtaagacagaataccttgttcagggttttgcgatctttgtcgcatgagatgttatgagttgatccttcgggtaggaattgaggttgaatataatattactgatgatcagtgaagctgttacaatatgatttaatgatgatagtaatgtaataaatttgtatatgcatttgtgaattatataagatgtttaagttgatgttgattatcatttgatgttgttatatcttgagatgtttacgtgctgcctatgttgttgatgttggttatgtgaaatatttatatgccttatgtggaaaatgtatgatgtttatgttgttgatgcttttcatgaatattattatgttgtgaatgacttgtactgtttctgttgctgttgaatattgatcaagttgttgatgttggtctaagttgtaaagttgtaagttgtctttccaaaatgttccaaagtattggagtcttaagttgttgatattatctaagttgttgaagtcgtagttgaagctgttgttagtgactgtttatgttctggtgttttataagaggtgatgtactcttacgttgttgttttataagaggtggtgtactctcatgtagttgtattgtcaggttgacgttgtcatcgtcgaattgttgaagttgttgttgatgactaaccatgaaatatttatgtagtgttgtttatatgattataagataatgattatgttgttgtttatatttgttatgagctaatggtgattagaagtcgattagactattaatgaagcactatatgaagaattattattattaattaataaagtttatgttgttaaatttaattgttgaattatatgcttaatattattgtttgtgaaatctcacctcttctgcttgaaaatgttgctcttcgtatgagtaacttgcaggtgatcgagaataagtagctgttgattgctgtcgt

SEQ ID NO: 4024 - DNA, 1974 bp, Medicago truncatula
  Intron number 1 from transcript Medtr8g129520.1 (locus Med tr8g129520) derived from phytozome v7.0 (chr-ID MtChr8; po s 30633894 to 30635867)
acactcttctcatttctcaacttcaaattggtaatttacttacttacccctgttttctcttgtttcaatttcacatatgctttattatacattttagattgtgcattccacattcatcatgtttatatcacaaaaaacttgtttttatcacatggtgttgattatcaaattaatgtcaagttggcaacattttatatgcggtagtttacatgttaatattggattgccattttttgataatgattggaccacattgccatgattcaagagaaaggtgctagtgctgttacctaactcccacattgggagaattttttattaactacgagttttgtttcgatgcaaaatgattttatagatatttgatgaccaaaatcgttaaaaacaccttctctaatattctctttaatttttactcttttattgaatgaaatttataggagtctcaccactttaggtatatccattttttaagtgtaagacacaattgaatttcacgtaagaaatgagtaaatatattaaaaagagaatgtcaatagcactcctcatccgatgatatattatacattattcaatcaatataatacttcatttgatcctaattataagagaatattttttttaaaattcattgaataaatgatgtatttgatttatattatagctcatatagattaataattcaatgaatctaaaaaaaagattcttcttatatttagaaccggagatagtaagtttgttctttgaaaacacatgaaatgacgtaacaataaattattgaatgtttgtttaaaataaattttttattcttactttgcatataccaaataaatgtttttttcattaattacttttaaataatatgttttttcttcacgtagtcaacatagtaagtctggtctttgaaaactcattaaatgacatgacaatatgttattaaatgtatgtttaaaatattattttattctgactttgcataccaaacaaatattttttttaattaattaatttaaaaaatatatattttttcttcacgtaatcaataaattattttataaatatcgctctcctagtggtgatgcaaaatattaggacaaaaaaagctggcttttgctttctgacgcactttttttcttttagagcaagctttctaacgcactttgtaatctttagttcttggcccatgaaataagaacaccatttaaccaattcctcgataatcttttcaaagagtttccttttgcttgctaagtaacgtgttgatattgccaaagaaaggttttcatgggaagataatgttcgtttaaagtattaatattttaataaatataactatcgtgttattaaatagatgttcacgttagacttagaatggaaatactccttcctttatctttatcacttgctggacgaaagatagagattgatgaaataatgcatgagaaagtgatgtggaaccacgttttatttccattctcgcatcctgtattatacaagtaaagaagaagattaattattatactcgtatactataatttgcttgtcaaaataatattttctataatttatatttaggttaataggcttttaccccctgtcatatagacgaaatgtggtttaccatcatgtaaaaataaagtttagagatcccatgtaatttaaagattctttagttttagaccttcattgcatataactgtgcaggaattaatgggttaataggcttttgtgtagttcagatgtcggtggtaagttacatacatcgcatcaattgtgcactatgatatgaataaagtttttatgttccttggctcaaaaaaagtttgtatattgcttttaatgatttttagcttttatatatctttacaaggaactatgcattgcacataaaaaaattggtaaaaataaattgattggttatgtgttgttgtggggacagttaaggcattgaatcaagcaagactagaggcaaat

SEQ ID NO: 4025 - DNA, 3464 bp, Medicago truncatula
  Intron number 1 from transcript Medtr8g127900.1 (locus Med tr8g127900) derived from phytozome v7.0 (chr-ID MtChr8; po s 29701071 to 29704534 reverse strand)
ctttgactgccagcttggcatccactcttcttcatgtactaatctgatcaaatcactttatgccacatctcatccaatttctactatgctcttctttgtttacacgcagctttcatctaaaaatgaagtataataacacaaattattatgctccaaatcaatagctttttctttgtctattagtataattgtagtaataagaataactgtgataaacataaatctgaaatgaaaggtttcttttattatcatttttagtgcctaataatagataaaattaaataaatggctaaagaagtgtataaatgaacaaacgtataaaatacggtggacgtcggcatttagatgtgaaaaaacgtttgtgaatttagaagatttgcaacgttctggcagaaataggtctcacagaggggtggggtcaactgaaagatggggcccactttatccacaaacatattgctataaaaggtagttattcacgtggctggcatataatgttctattctatctaatttaaggtatatgatgttctattttatctactattttttcttctctaccttactttacttttttttttttttttgttgcagataaaatctcattagaatcatttttctttttcatgtttcaaattcaatgatattaattttatttagatagtaatttcttgcttcattcattagttaaattttactattgaattaatcaatatctcacgattggactaaatcatatatgattataattattgatttatagtagtagtgaaaaactcatttgtatatgatacaaaaccattttccttaaaaaaaaaaaaaaacatataaaatcatttttttgttaaccttccaatttttagaggaaatggatcatgataatccgaaattcggttgggaggtaagtaaaatatgatcatgaattattttacttaggaattgaactcagattcttttaaacaatttatccttggtgggattcattaactacttaaaccatattacttggttaattattttgaaattgcttttctccctttcaaaatttttcattcgacaatgagtaatttctttcaaaggcacctttcttgattcaaaaatgaaaatgtgtttgctttaaaagtatgaacatcaattcttagagaagtgtatcaacaaacaaattatctaaaaatagaaggactcgaataaagctatatttcataattttgtgtgtgtttgcatcatacattttacaattaaaggcaacatcattttccaaagtagcatcattgatggaagaactcttgctccaactcacattttggttgaaagtgatccacgatgtagaatcactcttcatcatgtattagcacaataaataatgagtttgttccttgaatatatagaggacgaagaacaagaaatatactacttgtatattagtttaaatatttatttgaagaccactgagaacaaactaaatttcatggctttcttataaacaaaaataagtctctgttcaaataacaaataacatcaaataagtcatgcattatgcaccactgagatcttaatcattttcttttctattgtgacatgattttattctcggtggttactctttaccctttgatcgaccattttctattgttgactgctacctcaactcatacaatatttttgttcttttaagttatgcaaagtcgtttacccaatacacgtaccgagataattcaaataagtcacgagattaaattttatatattgtccttgtaaataattatattgtcgacagctcacaatcattcatatgtgtaattttagaataattaggttaaaatcaagagatattcattaattttgtgtacaattattttacacgtacatccaatgatatattttcatgttaactcatatgtttttttttttttaaataaacttatgttttcatactcattaattaacgtaataaatgcatgtataaaataactactatacgcaacactaattaaattcttaaaccaatagtcaagatgaacaaatacatgtgatgataaaataatcactcatatagctaaccaaatgctatttgtcaatgtttactatgtactatagtattagtttttttctcaatttctatacagcccaccaaacaaaatgttttcaaacatgatagcctgccaaatatggcgaaataaaaattcgaatttgagttggccagccaatcacgctctctttccaacttaagctgaaaagttcacgatcccatcctactactaccaaattccaggtttaattaattaattattgcaggcataaataattgaaacaaacttttgaagattaagaaggttggaatattcaaaagtataaagcatttcccccatttttttcttgataatattaattaacctaacctatctttctctctttcctcacgattttataccaaagaatattattcctaactaatctagggctttttggacataatatagatcagtcatctttgtctttttggtcttcttgttccctttggaccggcttgttttctagcattttgtcttttgagcagaaaaatatacagcatgcgttattggaatttggtagataaggcagctgacaaagactttatagtatgtccaaatttttgtttataaccttatccttgatgagaagcaatatatttcaaaagcacaacacacatattgacaacattcatcatttgtagttatcactaagttgacaaataattaaaataagcagcctcaagtgtgcaacatgatcttcattattgtattatactcctatttcaaattggttgcatcaataaataactaattaattttctcatccttctttgtactgcacaaattaaaaaatgaccataacctctatctcaaatatttttaaaagtggattccagttgtgaagaaaagcatcaatgatctttttggatatgtgtccaattaacagctaggttgctttcctccctcgttatgaattttctagagttgtaaacattatcctcttcttcaaacccaactacctggtctggaatatattactgccttcataaataaatacatttctttttcttccttattttcattcttatttaatatataattttgaaaaatgtcaattgaatcttttatcttgattttagatattaatgtagtcatgatttataagatgaaataaattattttacgtagaatattttatcattttttcagacgaagtgacaaacacaattcgaaactcatacataaccatgaggttctgggtttcaacccgaataaatgatatcaactaaacaatattaacattatcagttgagttaaaacttataaacacaaatttataatttgagtatcgtaaataattcatggtgacaactagggtaccatggaagaatggtgggtaatttacctcaaccaatacacattagccacataagcacatttttaagtggtatcc

SEQ ID NO: 4026 - DNA, 5794 bp, Medicago truncatula
  Intron number 1 from transcript Medtr2g033440.2 (locus Med tr2g033440) derived from phytozome v7.0 (chr-ID MtChr2; po s 9102522 to 9108315)
cttaattaccaggtaagtactttcctttcctctctaaatagctaactatattcaaatatcttcttttgctttccataattagtagttactttagttgattatcaacatatcttaattagcttctagcattaatattgttggttataggattacttaatctagaagaaaggatggtattaggtccaattcctcgttgtcttgtttgataatattacttctgttctatcatatgtttttcaaatctcacctttaaaatattttctatcacatttttcatattttaaattctccggaccattttttttctttcaagcggttagatttcatttcactatctttcatattaattttttttcttgacgaaactatctttcatgttaatggagagagtccgtccattctctaatgatgttaatctgataagtgatcacaactcaaattcaaaaggaaacatttgaaagcttgttttattcttcgaagaaaggactttctcctttaaagaaaagtagaaggactttcttatagattacatcaagtttattgaataaatgatatatgtggattatattatagaccatgtacattatttatttaatgaattttaaaagtaaattttcggtaattgggagtttatacctttttcgatcttttgactaagattaagtatagtatctgatcttaacaataattgggatttagacaatatattgaaagttgattctagcgggtggcattcactttctcgtaatattaaaattttagtgcactcggtatcaaatatctttgaaaaagaaaaaactaacgtcaatgaatgtagtaggttcaattgataaaagattggttagcaaagtggtgatcaataagtacctctttcagtcttaaagcgcagctaaacttgtttacataaaaacaaaatttataactaaactttcatttaatatttcacaagtattagccaattagtcattgaaactaatgtcagtgaagtaaatgatcttataaatgtttaggatttttttttgaggaatttaagattttgtttttaatctctacataatcacatttttagtcgtaaggagctcctttcaaggacgtatctgggaattacgggattcgattcctaagaagaacaacgcttagccaatacacatgcctctacgcacgagctttgattggtcggaaatcggtgcaaaagcaaaaaaaaaaaatttaccttcaaattatgatgttttcatctccctagtaaaaataccacataaaatttgaaaattaccacgataggagtttatactatcttaaaaggtggtggcagaaggtgaagtcaattgtggattaaaaccagaaaattggtaaatgaagactttgaaaattttgaataattgagcggaagaatgtggatcctttgaatttgaacacccaagagaatgagagatcaatagataacaaaagaaaaatgatatttatttttatttcaccacaaaaaaaaaattatttttctctttctattatttttttgtcaataaaaaaagagaaaaagaagactgccataaacgtcgttacgaatgatagtacaaatatcactattcataacaaattacaaatgtaatgatttttttgtatattaaaatttgaaaataaatttcaaaacaaagaaaaatttgttacacatcataaaatttatgatactaatatttaataagttagagagtgaataaaaaggacggcacacataaatcgagaaatgattcaaatatttgtgttttttttttatcctaatgagcttagttgaattagtagaaatattgaataatatatacatgggttaaggtttgaaccctgaaattttgaacatctaacttattcactttaaaaagatgaatttctagcaactagatcacttgaattttttttttcttttcattttgttattttaaaaattgaaaattagtttctaaaggcaataatcaaacaacaatttttttttttgactgaacatctattttatctaaataaataatttaaaactctcttagaaattaatatattcttattaaataattgccatatgcattaaatatgcttttattggtcaaacttactctaaaaattttatatataaatatatttttattggtcaaacttactctagaaaatttatatattaatatattttgtaaatagagataaattaataaataattctgaattgattcaagtgataaaaaagtaggaccttaaatacgtgatccaaactcgattcattgttcttaattatcgaaaaaaaattggttagaaaaagagactttatgtgccaaacagattctccgacatatgttagtacgtaaacagcgttcgaaacttcatatttataaaatgataaaaataaggaaatatcaagtggacaccaaaacactcattctacattttaagacataaagaaatagcaagaacaatgtgatagatgctatatattgatgatgggttacgcgatatgaagagagaaatgaaaaggaaataaaaaattgaattaatgttggaaaattagaatattcaaatatctttgcgctacaaaaaataacgagttaaataaatttttgatttttataaatattttaaattttgcttttgattcttctcaaaatttacaacaagttttgatcttcaaatatttttcatcacgagtcttggtcttttttttttttaagataaattcatgtgcatcttcatattttttacaaagtcattatcaatgttataataatctctccaacaaaatttatttttttaccaaaatatgaatttttttacttaacaaaatatgaattaaatttgaatttttaagcgttaacaaattaaaatttcagatttatttcatcccttgtcagaaaatttaaacttttgcatttttttatataatgtattaatcataactccataagatcatttaaaatttcaaaatatatacatgagtttacttaaaaatataggccaaatactcgcacggtcctttaagttatatgtttataacatattagttctttacgatttttgttatcaattgatcctttaagttaatttttgttacaagttggtcctttaagtcatataatatttacactctcatctatcttttcagccaacttcgttaaaacatgcttatagaccatttaacattaagatggtaggttaaaaaatgcttatgatatcaaacatgattacttatacacattttcttcttcttatttttgaatttcaagcctaattgaacatataaatatttgatcaacaatattataaatcaaataattagtcaattttgttttgaatcaccgaataacacacatatgagctatagttttgagagcaatgaatttggacaaaccaacttaacattaaacatccacataaacaccttttaattatgtatgtttgatgaaattaggataatcgtgcaaatattttatgacttaaaaagacaaatttgtaacaaaaatttaaaggtctaacttgttatagtcatgtaatttaaaggaccgaaaatagtattgggccaaaatatataaccaaaacaactacgttaatcatttgtagattaaaacttacaccctccggtcacaattataaacaaaaattcatgttttatattcattcaataaatgatgtatgttgtttttattgtagacaatatacatcatttattgaatgattttaaaatatgaatttttgcttatatttgtgacctgagggtgtataaaatatttttaatttttattttttttttgtaatatttattgggatataaaaaacttatttaattcaaaaataaattaatttggttcgtttttccatttgatgatatcatccaaaaaataaaaagaaaaaaagaaaaatttgattggaaggtatcatattcgtcacatcactgtatacaaagagagagaaaacgcagagagagagagagagcactccacagctccgaaattgaaggggacgaaatttttgtatacgtagttggatttcatagatctcgtctcttctgggtatgtatctatttatctatctatgcatgtctctttttcattttccttctcttcttcatttatataaccctttttattccttactttctctctgaatttcaagcttgtgattttgtatagtttttacattttcggtgacccttttgacttatttagttttagcttcagctcaatgatgctactgtttcagtttcagcttaaagtttgagtttttaacttttgatttcaatttttgtgttgacccttcttgtgaagttttgtgttggaaaattgagcattttttagagtttgtatcaaagatgttaactttttagcttttgttgatatgggggaggttttgctgggttttttctgttgtgggtcgtgaattctaattgttgttaatgttgtatttttctaaataaatgttaattggttggtttataatttattgtaattttttttttcagacatgatgacatatgggttttttcttccatgttttaagttttttgaaagcattgatttttagggttttacttgatatttagagatgttaatgtgataaaaattgaacttttgattctgtttcccaattcacttatgttagctataaaggtggtaatttaattttagttatatatgttatcttagtgattaatcaggaaaaattaatctaatttaagttctgatttacaactccattttttagggtttaggggggtgggtgggaaaggttacctatgctagggaaaggatgttacatatacagatgataatttaattgtagcagtaatttgatgatatttgaagtagacctataatatagattctttgctatttaagtccaaaatccttgatggtgctagctagtcatcatcatgtatctctagatatgaaattgaattcaactttctgtggttctgcattaaaatcatgtcatttatgaattctaattgcagaaagaatgctaaattctacaagttttgtatatgaatgttctttttttaatgacaaatgttagtaattagttgttaaattgattttttctcctttgtccgggttttaacgcatacaagaagtttacctagttctaatttgacttaggttggctaaaagttacctagtttaagtttcttagacatggaaacagtgtgcctattccatgaggctggactttttcctagagatacaaacgaaggatgaaagaaagatgctttagatagagaagacttctatttactattattaaatttatgatctattgtggcatgttttatcttataattatttagattagatttctgttatattttgtttcaccgtcatgtacttttttcttaagacccgtgcttttgcccgggttcactaataagtttgcatgaaagctatgaactagtatgatgccgtgtgaagaaagtcattggtgtgttattttattaaatttcaaccaaatggaccattggttttctgggggtgtttgttaaatactgtatcaattcgagagtactaaatgatccgttgtacaaccttttcaatgacaatttgaaaagttttttgcgacttatataatgtaaatgattgaaaaaaaaaagttgaactgaatctgattaagaattggaattagaacatgttgaggggccaatttttttgtgtttatgtctacctgcatgtttgagtcacccctcatttctttaccaaccttttacgatctgcaattaagtttgagatgtttgttttaatttatattatgttttttatgtgctatcagataa

SEQ ID NO: 4027 - DNA, 2945 bp, Medicago truncatula
  Intron number 3 from transcript Medtr3g087690.1 (locus Med tr3g087690) derived from phytozome v7.0 (chr-ID MtChr3; po s 20943949 to 20946893 reverse strand)
caagagaggactatcttgaagatgtgcaagtttctctctcaaattccatatagcttgttctctttttattttacacggttatatatttatgaatagatagtatcttctttatcagtgtatatattctattcttctgaatttcagaggaacctattcaaactatattggtggagtgcatctcttatgtacattcttccgaaaacgatatttcccaaattaattagatagatttttaaaagccatcggtgtatgacatatcaaaacaatttattactaatatatattttagaacccataaatctctcaagtggagaagacattgtagtagcaaattgttggtctttttaaattcaggtcgcccgtttgagtcttgcatgttcgacatttatattttttccaataaacaaccaaaaagggtgtgagtatggttaaacggccatctttatctttatatataaaagttaatccgtaagttaatttttaacctaattttaacctagattttatgatgaattttacgttattacccccgtgttcaattaaacctgtttaattaagagataaactttaaaaatcgttcctcctattttgtttccaacacaacaataaacagataaacataaaaaaaaaaaaaaatcactcttattaacaaattcttcctatcatttccatttaatcaaaatgttattttcaaatgcttttgaaatcaaaaacaacagctcactactaaaacaatccaaatattgttgttaatttttcttctttgctcattgtgtttagcatttcattgcaggaaaacaattttcatagaattccttaaggtgcctaaagcaaatataaaggtcttctattttatttgtggattgagataatgcaaaagtttcacttgtttctaagtgttattgaaagttaaggatatttgatttattttttcaacctataaaaaaattggtgtttttgtcttatgaggaaagtcatgtgcatgggcctactattcaacatatggtgcttttgacacaaacaatacaacaagaggaattgtgattttgaaggctaaaaatctttcttttgggtcctttgagaatagttgatttttgttttgaaggtttattattgttatttaggtatgagtggtttttatgtaacataggtttttggaatcaagtagtgaccaatttgtataatgtcgattctatttgcacttgcaaattttttaattaagtttagatgattacaatgaagagaaccaattgtaattttgatatgtgaatgattggaaatagaattttagatcaatgtcgttgtctaatttttattttttaatattcgtttgtttcaactaaacaatttcatgtcatctcctactttattttttgaacttgcgtaagtaaaatgtataatactcttcatcttttatttattttaggattttttttaccattacttattcttatatattagtcgaaatgacctgtgcgacgcacgggtcttaagtctagtataataataattaagccaaccagaaaagggtaagattagggttaaaccagcacaatcacgtttagtataataaagataaagattaagattatgttgttgtttttttacttgtacgtaatcggaacggcggtaaaattacttattattataagttttattttttaaaattttcttttaggttgagtttggtaaagaaagaaatttgaaggaaagaataaagtaggaaataaggggatttttttagttattagtataagagaaagtgaaagtgaaagtgaaaagaaaaaaaaattaaaatattgaattcctttggagatgcgggggatcgaaccccgtgcctctcgcatgcaaagcgagcgctctaccatttgagctacatccccatatattctatttccttgttttattggacataaagtgaaagaaagatataaaacctacaattataaacttatccaacatgtatatgactttttggatattctatgaggggaagagcgaaagattagtcaaatgcactttttaaagattggctatattctctatcgcttctttccaataacgaaaaaaatacacatgtggtgtatgacttggtcatacaataaatgatatcatgagtacaaagagtattgcatatgtgaaggatatgattgacaaaagtagttgtccaccgtacaatctaacacgcatttaatgtgttatacatctcattactaatagtcatgatcattcatagattaccatgtttaaagaacttataagacataatttctcatcgtcaacgttaatacctgataccaatgccatcaatttccacaaaaactttccaagtagtgttacattttgtctcaagcctccgaacctaagatccactatcaaatggaggcgtgaatacaagatgtcaacggaatgatcagccgaacagaaaaataccaaaatcacgataggaaatctcaatgtaccataaactacacatcataacttcttaaaaccacaatgttcattcacaatatcagttgttttcgtacaaccaaacccacgcttaaagaattatacatctcaatactaatttatcttaaaatatcaagtctaaaatcaattcaattatattatcatacattgaaatatcttttttagtttttataaaaataaaattaaaataaataaaatagacatggaatgtgaggatatatagataggaacaagaatatctctcatccatccatgacggtagttgtacgcggtttggaaaaaaagcagaaagacatgaaagcccttgcatctctttaaattgacacaaaacgcttcttttctttatgagaatccaaatctaaatgctctctcatctgaaaccctaaaaccctctgtgatttgaaaccctaattttcgtgattcgtcttcttcatcaagaccttacccccaaattgagattttttctatcatct

SEQ ID NO: 4028 - DNA, 812 bp, Medicago truncatula
  Intron number 1 from transcript Medtr7g143080.1 (locus Med tr7g143080) derived from phytozome v7.0 (chr-ID MtChr7; po s 34266636 to 34267447 reverse strand)
ccatcattctaggacccgaagctaccaccaaaagtgtaagtattatttttgtttgtttatacgtattatttatttgtcgaaggaacgagatttgttgatgtattgatgttcttattatctattcttgtttttttcctccattgtttttgaccaataagaagagagaaaaacaaaattgtcactaaagatgtcatcaaatagatgtacaaatatcatcactcattaattaactattatcaaatgaacataggtaagggtttaactttaagagaatcttttgtcaaaaaaaaaagctttaagagaatctttttgttgcactagttttttttgttacactttggtgatacctttttttagacgatatgtaatacactactctcttttttaatacagttatcttatcactttttatgaaaaaaatagtgatcttttaaatattatataaattacaatgtactttaaatagtgtgtactttttccaatatgtgactatcattgattttgtattcaataatcatttttaattttcagattatctctcatttatttttcgagttaaatatctattttcatttctaaaaatttaacatatacttactttgatctattataatagtctgattttcttttttaattcatgtactaacatcaattgtgtattttagactctcatccaaaatttaaaaaaatatatatattcttataatttttaagagctacaaagaaaaaaaattgaaattcaaagatgtattatgataattcaattccttatcattgagctttttcattttcattttttcaggagaacaata

SEQ ID NO: 4029 - DNA, 5873 bp, Medicago truncatula
  Intron number 1 from transcript Medtr5g078980.1 (locus Med tr5g078980) derived from phytozome v7.0 (chr-ID MtChr5; po s 29278103 to 29283975)
gatcgtggttgttcggattgtctgtgttttgtttgtttgtgatgtctctagatatttttaggttgtaagccaatcaagcattttaggattagccaattttgtatcagattctttatttgttcatgatgtcatttgcttttattatttttcctatacatagtatatgtttctttcatcatttccacttgcacatttctttcaaatagtgttgtcaaactccaaaagattgtcatgacaccaagatttgataacatctatgaaatcaactcgattaaagaatcatgaagcgagttgttcgaataattcatgtttggtttgttaataatatcaattgtgatagacacccgttctatctagatatgattcccattgatgcgcctatttgtatataatgaatgtaaaaaaatgacattttaaattaatctaatttttgtatataatttatgccattatgagtaacttgggtggtgatgtaaatcgtggattgtatcgaacaaaagagaatgaatacaaactcaattgtataagtttcccaagactttttttattttcattttaatttcaatatggatgaataataactatattgtgtttgacaaattatgtattttaaaatctcttctttgtcttctcctgattttaataataaattataattatattgatacattgatacacgtaaacatcactaatatgtgcgtacacgttaccatctaaatatatttttcttattcactattgtctaatcaaatatccacatcgacacatatacatcttaatcgtcttaatctctatctctattataaacatttacttttttttttttttttaaagtacacatgacatcttcatacttcccatttcatttaatgtttctccatcaaccaatgaaaatgaatcttgacgtattccttttctattatccaatcaaaatggatcatgactcatttatttttcatgagtcaatcaaaattgatcataacatgattttttcactatagcaatttggtttttttattattttcatctacctcttcctcccataaaaaatcactgctttcaacgccattctattttcttttatttgtttattttttattgttttattgtttatttaacatttcttattgttatgttccattttattgtgatttcttaggttgatgattcttattcatattttcttttcaatattattttggtgtttatatttttttttccggatatttattttggacatgaaaccaatcaagagaaaagaagaaatgcatcacaaaaattagaatttatacgaaggatttctatcaccacgttcaaatataatcactttcatcccccttttgatttattttaatcccttaattctcacaattttttctatctatctattcttttttgtttaatttttcttatgttgttattttacttttaaaatctttctcttttatattttattttggtgatttttttttttgctactttatgcttgaaatggaaaccaatcgatatattagaagaaacgcatccattttcataaaattggttgaatcgataactttcaagtgaaaaagataagaaatacataatagaaaatcgattttatgacacctttgatttttttttttttagtcaaaattaaaagttccattttctttaactaaaagggagcaaggtgctaccttaaaattttaagtgcatttgcaaaaaaaaaaaaaaaaaaaaaaaacttaacaatcatttatattttatttccttcatcctaattaaacatttaaacattagttgggatgtcggtgtggcctcctgatgtctgtctttctccctgcttagcaaaaaaataaaattaaacatttaaacgagtttatactattattaaaataatatcacattaaatattattaatttattatgatttttaaatgaaaaaatattaattttttattcacgtcgtatttttttatccatcattcattctattattaaaactaataataacatatgctttaaaactgtattaatatttttattaattcccatatttataagcggaaagttgtaaaagtcttaaaatgacaaaactaaatgaatttttgattactcattaatcatgtttcaatgaccctttaattttcactcatgtttcaatgacaaccatcaaattattatcaatgttttcaatcaaatggactcatgtaccctttgtcttaatttttgaccaattagatttaactaaatcatcaaaggtttcaatcatacacgtatttgttaacaaacaaaatgtatgcttttccgttcaactttcaaccataacatagcatgttgacgtgacattttttcttttatttcaatgtctttattggtttcctttgattgtgttttttctatgatgctataggttcttggtacaaactcgaaggaagaagaaaaatttaattttgtttatggaaacaaaacaaattaatctaacaactaattactaacatttgacattaaaaaagcatttcttttctattcaattcagtgatagtctttgtcccatagttttttttatcatcatcttgaatttcatttgaaaatattatagcatttaatcaaacgatctttgttcatgtatatgaccaaatacgctaaaattaatttgtgataaaatatttctaagaatacaacaatgccttaaatttttgtaaaaaaaaatgccttaattttgttactaaagccttaaatattatattatatacattgaattttttcggcttattatagaagtttcttattcatagcaatttacaaattctttgtctttgacgaattggtaccaaaaaaatattaagcaaatttgttgttaattttttaaaaatttactttgaaattaaaccaagaactgattcccatttttattaatatggaatttatatttatattgttaatatatttcaagcactgacctttaaccacatatatatgagtaataccgttatttgatagagattaaatttaaattacaaatatttgtgaagtaattaattttttacctatcgaaataggaatttttttctttgtaaaaaaattataataatttaacttgacacaaatctaaattccataaactccaaaaagtataacaatttatactaccaataaaattaatgaaatgatctttctaaacctctaaaaaggtagttttatgcaaagagaaatgttagcaacacacatataaatttaaacacacgtttcaacgtcctcatttgaataaaagttggaaattaatatatcttaatgtttaattaacaataaaaaatagctccaaaaaaagcgcaccatataagtatgttccttttttttttactcatataaaaatattctcttttccactaaaaaaacatattcatttttttttaataattttatttaggtgagttggatccaaagagaaagcccctaggataaaaaaagatattacaaaggtatttatgtattatccatctaggatgtcctaacgatggtatcgagagttgtactcacactttaataggggtaggagtcaatttattatcaactaaatcaacatatatctacaatataagcacattctcaatcacactataaatatttttctttatctttatatttataatatgaattaaaaactcaataaatgaataattaaatgttggattaaatgaagaaatatttaccactaaaatcaataaataaaaagttttaagtatcacaatcattttcttaattgcaattatgcgcattcaactactattgattcaatcattaaaaatttcaattaataaatgctaaaaagtcataattatttaatgaaatagtttaattttttttttttatcaatcaaagaaatgcattaaacatgtatgaaggggcctgatatgatatgaaataaattaaactatctgatcctatcctacgcaggatatgatatgataggatagactcataattatttaatggagtagtttaatttaactagagtccgtttgatggccagtatagggagacatgatatgatacattaatcatattctgcttaaatttcatgtttgatgcaccaaagagataggataaaataaaccatttccctatcatatcatgactttcctttgtaatttatatcctgagtataggctaagttagaaattatcctgatgggattagaagatcattccttatttattatcttgatattctgccatttttaaatattgtcatttttaaaatagttatagcatgtattttctattataattaataacataccatttttacaatatttaattaattatgaaagcaattttttcatttaattataatgatatcgtgtttgttatcatgtgcacatcaaacacatgataagattaatgtttatcatgtcattatcatatcttatctctatccaactttatatcatatcacgcctttgtcatatcctgaccatcaaacacacctttaacagcatgaggatattacatcaaaattctaaataaaggcaaactagagttatatacatagtgagcttatttatcagacaagatatatcaatacattgttaaaaaagcatacactcagaaagaaaattatcttctgttaaaaaaaaaagaaaagcaaactatcttttaagggagagaaagcgaagtttatattcttaattgttttgaatctttacacaatcgttccaatattgaatggtacaaagtcaaaatcatattcaaaataaaatcgatttttttttagggaagatcaattttattatgtaaattattatgcattgaacataaaattaatgagtatgtatgtttttcaataaattcagtcgaaaaaatattttaataaaaaaattatatttcatctagctagatatgatttttttccgttatttttattatatagaaaatattaataataatttattttatatttattggcaataaaacttcttcacgcagtttctgtgagtataactcagttattggcaatttgatccccttaaaaaaaatattataattttttgattttttatttacaaaaataaatatataattcaattttttatattttaagataacaaattggtacttttacttctttttttgtcatcttcaccgatcgaaacacatgtcgacattgttgatactaaccgaaaacaaaagagtagtgaagaacacaaaagcttgaaactagatgcaggaaaccgaaataaaaggttgtcttggttttaaatttcttaactcattctctgtttttacaataaacggttcattcattctctttatgtcttaatgtgtcatttttcttactgctaaaacgtttgattttttacttatttaacttcttctttttttaacgagggattaattttttcccgtaaaaattcttttaatgtatgttagcacttaactaacacttttaacgccacttagttaaattaacaatatacgtgaaatattcaactatggaaattgattcaatgactatgttatctctatttgattttgtaagacaattaaatcagtctttttatttgcgtatgactaatttgatccctacacatttttgtcagggaccaaaatagatcttcatttttaccatttaatctaatacaattaaactatcaaattaagggggtaattgatttgactacttgcttctttttgttataaatattgtttttagtctcaatattttcatgccattttggaatttatatgaaaacttcgaaacttcaaaaacttcaaaaaatagggcgcgttaggtgatgtttccggattacataatccggaaaccccctaaacaccatttttcaaggtaaaacagttcgaattatataatccgaactgtatcagcacaaa

SEQ ID NO: 4030 - DNA, 1833 bp, Medicago truncatula
  Intron number 1 from transcript Medtr3g092630.1 (locus Med tr3g092630) derived from phytozome v7.0 (chr-ID MtChr3; po s 21817436 to 21819268)
agtcttgagaccatccactataactttaggtagtgaagacctgtcccactgaatttctgtttggaggtaaaggaataagtgtcaatacatttgaaccatttgcaagggtcgtgaaatgaggagttttgtgggagatgaatgagaaaaaggaaggcttgccagtaatttagacttttacaccatattccaacatccaagatccaaatggaagatattgagataatcaaactgaggaatcaccgtattgaagtatcgaggatgagacaatactaaatagagcagccttggtcatccttttcctcaacatccatccccttatgtcttgtctgtttaaaattgcagcattgtggataattaccacgaccaccctttccacgtcttcgtcctcgccttgcacaatccgaatgtgttaaaaatagtaacagagcctatttgagagtctgacttgagagattctttagtcaaaagaacaataaatgataaatcagctccatagtagtaacactagagttcgctagaacttcatttctaacatttcaaaatccccatgtaaaccatgaagaataaaacccttgtacattttatctagtttatccagtaccttttgagtgctctcagttataatcatcttcacttgctgaatgttagactgaggtttgttcagataggtattaaatcacacgatcatgtatttgtagtgttgctaaatgatgaaacagagacgtgaatattgataggataaacacacttacccttcttccaaatctcttaacaagattaataggtgcggtagtgagaactagaagcaatggatcaatagatttcttaatcaaggatggtaactgataatcaattttttcccattcttccttaatgaatcgtcaactttttacttggattctggaatgatcataaagtctctagctaagaagcctggctttaacaactgagcactagtccaatcaattcttaccattaagatttttagagaaattgatggggtccttcaaaaagcaaaactgcaaaagagatgtgatctgtttgacttgttgatccctccctacagatgacctcatgcgaaagaaaataagacaagaccgaaattttcttaaagaaatgcatatcactaggggaacctagacccattactcataccagatatcaattgtaatttgagactcataacaggctccagagaggccgacaagtagttttgtggtggtgtgattgaattctggcaatttgtagcttttctcggctgcttggctataatatgagtcgaacaaacaataattcatgatataaaatttgaaactttacagtttagactttagagaacctcaaaataaaaaatcgacaaacgagtttctaatgaaattaccaataatacagttcaggtgtaggtgttacaattcattattcacgccaacataaatttctggatgtagtgctgtgctagattttcttatctgaatgctcacttatcattgtttatgaactttttcataaaggattttgtaaatattcttaaacatttgtgcaacaaatgcatattggttcgagctacgtactatattacatggtacattcataatagctaaagttcctttttaccatgtctgaattttctaatatatcaaaggataacaaaaccattgacattaatcaattttatttatgcatttaatttctctaaacaattttctgtgtatggaatatatattgcatattgtttgagtgaataaaccttttcctagttcttttttttttctgattttaattccctgaaatttgtcaggaaacgtaaaaggatatcttcaaagactttagaag

SEQ ID NO: 4031 - DNA, 2074 bp, Medicago truncatula
  Intron number 3 from transcript Medtr1g016780.1 (locus Med tr1g016780) derived from phytozome v7.0 (chr-ID MtChr1; po s 3365327 to 3367400 reverse strand)
gagtgatttcagcttctggacaagattcaacttctgtatacttttcagaatcagaaggttgatcagattctgatgcatcttcagaatcagttgtacctgcattactttcactttgctctgaagttttacttccaggctctctatcatcaaattttacatgcatagattcttcaacacattgtgtttctgaattatacactctgtatgcctttgacctttcagagtaacctaaaaagattcctctttgagccttggcatcaaatttcttcagatagtctttagtgtttaagatgtaacaagtacatccaaactgatgaaagtaagagatattgggtcttcttcctttaaagagttcatatgctgttttctccaacataggtctgatatagatcctattttgaatataacatgaagtattgactgcttctgcccaaaaatgtttagctaaattgttttcatggatcatggttctggccatttcttgtaaggttctgttctttctttctacaaccccattttgttgtggagttctaggagaagaaaactcatggagaatcccatgtttttcacaaaaaagttcaaatggctcattttcaaattctccaccatgatcacttctgactttcaaaattttcaattctttttcagattgtatttgagtgcagaagctgctaaacacttcacatgcatagtctttacttttaatgaattttacccaggtccatctgctgtaatcatcaacaatgactaatccgtatttacttccatataaagatgcagtgttaactagaccaaaaagatcaatatggagtaattctaagggtctggaggttgatataatgtccttagatttgaaagaacttttcacaattttccctttctgacatgcaccacaaagtgcatctgaatgataatcaatgttaggcaatcctttgaccagttgtaacttgctaattttagaaattaatctccaattagcatgtcccaaccttttatgccatacccattttttatcattcattgacagaaggcaaactaccttctgatcagccagatcagagaaatttattttatagacattctcaactctctttcccttgaatgtaatggatttgtcatccttgttgactagtgtgcagttggtcttactgaacattacatcatacccattgtcacaaaattgactaatgctcaataggttatgcttcagaccatctactagccacacattattaattgagatggaggaattaccaatagtacctgtaccaatgatctttccagtttggttgccaccaaacttcacttctcctccatctttcattgtaagggtaaggaacaaagctttctctccagtcatgtgccttgaacatccgctgtctaggtaccatgacctttgtttctctcttgcccttaagcacacctgcatttttggccaattcagatttaggtacccatatcttcatgggtccttttgggttagttttggaggttttacttttcctcccttgtaccttagggtaaatgctgagtggcttctgatcattcaatactttaggtttgacaccttttggtattgttttctcagaagcagtagctgctttgttcttctgatccttttgttttggaattttagattctggtttaatcagattctgatgaacaggttctgatcttttcagaattttaatcttttgactcttaggatcagattttgtcattaccttgatcttaagattctctggctttgatgtgatcttagcctgtgaacctgaagcttcaggttttgactgaacagcagttatagcatttgtaccttcaggcacaaaggtggatttcaatccatccttgatacaatcacagtagctcttgagactgtattctttggatttctcctcagaatatccaatccctttgcctttgttcttgtatgtgctgtagatcatagaagcaactttgcttctgtctattccagccataataaaatcatccaaggcaatctcatgtttattgcctgaacctttatcacatttttcttgtagcttctgacaaagactcttgagtctatcttcat

SEQ ID NO: 4032 - DNA, 1586 bp, Medicago truncatula
  Intron number 1 from transcript Medtr8g031790.1 (locus Med tr8g031790) derived from phytozome v7.0 (chr-ID MtChr8; po s 6850107 to 6851692)
gagtccacatagagctgtaattcttaaaaatgaaggaaaatattttagaagtacacaagaaaaaaatctctttgaatatgtaattttgacaaaaatacaatttttaaagttgagttttgcttttgcttcatatattaattatatcttgtgttcatgtctattataaatgaagtaaggtggaactccaacttttttttgcctaaatacatatttttagaatcctaaacgatttttacataatatgtaggttggtaaattttatctcacaaaaataggtcacacaccgtctaccttgtggttggacatcaagcatagatcacattggcccaatccatataggcccattaaccaataaattaaacagacacataaaatgcaaaagagtaaaattatatgaggtcatcttttatccactacttttttttgaaaaaaaaattatttactgttcccatttaagtccaaaagtatttatattttatcatttttcactataactagtataattgtttggacaaataggcaagtaaaaaaatctataattaataaaaattaggatcatcgatatattatcgatcacataaagtctttttttaaggatctcataaaatctttgatgacatggaaaggtttgagggcatatcatacatagtcattgtcaataaccaatcgagaaaagtggaagttcaaggttaaggtgaatatattttgtcattttaagtcttatttcaacttgtaaaaaaaaaaaaagtcttagttcagacaaaaaaaattgggattagagtctccatcattgtggtgaaactacaatcctaagaaactttaatatttattgtaaattttcataccaataataaaattttaaaaattcaatctttttagctaatcaaatctggaaaagtaattgataattatcatttgttggattgatatttttacttatgtgataaaactgtgcgcttgcggcatatcacaaaaaaagataatccataatatctctctaattattgttctatcttcttggtgggttacacgtataaagggttgtcaaacatacttactaatagattaagaaatgttatttggcttgttattttagagtcttaataagcttttgttaaaaggagatttaaagttaatattttgatggcattttgatttcgaacgtaatggtgaatgaagttaagaatatgaagaatgagttagttatatttaaagttgattttgagaagcttatatggttcggtgtagtgagattattgggattcagtgatgattaaattgaattttccaacatgacgtaggtaatgtatcttgaaatgtgttaattcacccacaacaacaatgttattttttgggagttccactatataattttctttgaggtgaggactttttcaggtcgaccctctacctacattttaatttttgattattattgaaggattaaattcctttctcattggtgattttgattatttttcatgactttaatgtgtgtttagaagattacatgatttctcatttgtaatttgttgatgatacattgattatgggtaaaatagttggtctaacattagagaaataag

SEQ ID NO: 4033 - DNA, 2300 bp, Medicago truncatula
  Intron number 2 from transcript Medtr2g111450.1 (locus Med tr2g111450) derived from phytozome v7.0 (chr-ID MtChr2; po s 26427065 to 26429364 reverse strand)
ctgttgcctttacaacttcttgtgttgctttgctggtaaactacatcaaactatatctctatatccatatatatatgcaagcattttccattcaccaaaaaaaattatgcaagcattttcttttgttttctgcttaatctatttatttgttagatttgttagattttcagatgaagtgtttcctttgggtttttttttattttatggaagcctttgctgaataaatgagaaattttaatcaaatttatcaagtactttgaaaacaaatactaacagtatatccagtataaaataaaataaaaatttaacagtatattcttcctgatcacacacacttttatattgatttgaaattttataagacttacatttaatttcatgaaactcattttttttttttttggttataacatgaaactcatttaagtttcaataaacgagaaaatgtattaaaaatatgtttatgcttttagcactcaactcatttaagtttcaataaatgagaaaatgtattaaaaatatgtttatgcttttagcactcgtcaactttggaaaaaaggatccctcaaaaaaaaaaaaaaaaaactttggaagaaggaaaagaacaaaagtgtaacacctactatttttttaactaagttcaatcatgatcaaataatgtaggactaaatcacaaacatcaactattaaccatgattttgtataaagttcaaatcatgatcaaataattgtagtaataattccacaaacatcaattattaaccatgattctgtatctcctttctttgggtcgataatgacacattatgaaaagtaaaacgctgattaatataactccatcaaatgacaaatcattcgaagaattcaaccttaatttagaatggaataattattattcaaattttaattaccttatgatcaaacttcgaattactagacctctctaatctaaaaatcggagtgttaaacaatatatatatatatatatatatatatatatatatatatatatatatatataacacacacaaataaacactaactagtgtcttatagacaaatgttaataaactcaatagggaaatatccatcttaaaaatcatacatttaactaagaacctttcaatcatgcatttttattttaatattctctttgtttaacaattagtgtcattttagtaaaaaaaatatttcgaaataaatgacaatttcaatttctattgcaatattagttatttcttttcaattaaactctctaaatacgttactcccaacatattgcttctactttacatttatgatactaaaaaagacaacaaaagatagtttggtaaaataattattttcttttaatatttaaaatattacttctattttacatttatgatactagaaaatacaacaaaggataattctcttttttttttaatcgttggatctcttaatatatgtgtgaaaatctgaaaggaaattcattttgaaatggagagagtaatttccatcaagatcggattgaaattaggagatactaaaacaaatatgcagtgacattgacccaaataaaaaaaaataaaacaaacataaatgtaataagaaaataaaatcaacatgtgatttcaaaatgtcaatccatcataaacactttgtaacattttaaaaaaaatatatattttattatagttttttaatttttaattttttttagaaatgacaatagaaatttgtttaaaaactacttaaatcaaaataatgttttataaaatgatcctaaaaactattttgaatgtatgattttattataatatacaaacacaaaatagtatcaaaattaaattcatatcattttttttttttctgttttaaaaagtctagcagtgaaattcatacaatctaacggttgaagtgcagaattacgagtttgattcaacttcttaatgtatcaaatgtttttgcaactttttatcacccgaattgtacttacatgacattcatatcgattctttaattgacttgatttgaaatgattgattctataaagttaaatgtaaagtggtatattgtttgatacattatgtaaacgtgagttgaaaacaatttcaagactaaattctaagtttaattgaaaatcaattctactcgagaacatacaaacatgtcaaaatttattctacacatttataattaatttgggcgcctcaagtgtaaatcaaacatacatttttttgtaccgaatactcatttaaattttcacatttgaatttgcagggcacaattcttttaaccttaacagcaacaatcaa

SEQ ID NO: 4034 - DNA, 2224 bp, Medicago truncatula
  Intron number 2 from transcript Medtr6g006440.1 (locus Med tr6g006440) derived from phytozome v7.0 (chr-ID MtChr6; po s 878535 to 880758)
gacattccagtaacttggctgaagaaattctgaaggtacagaagtgctgattttattagtttctgattttgtaactaatgagctgttctattctatctttattatatatctcatccggctatgtttgattatttcaacgggggagataggatgaaatgacatcttttcaaacatatgtttcttataaatcaacagtggttagtgattagtgattacttcactaaagtctaatacttttcatttgagggagcatagatagaaagtataggatgttattaacgtacatagcatatactggtttgagaagcacgagttcacgattctattctccatcgtagtttcatttggcacatagaagttggtttttcattctgattcctttttcaaatatgcgatggagtattactgaaaaagagttgaaagtactttttgcttccactgttaaggacacaaaatcttagactgctaaatgccttagttgtgttattttatttaaatactttggctttaatatttggattcttgtcacacatgcctcaaagatctacctgccaaaggtatcataagactataaatacctgggaagagggggagttggttaagcttatatggtttgatataattatgttttcatcgatcataattgtaacatccccaatgtttatatagtattagtagttatagtataaatgtccctccttattttatcaggagcttacacaccaattaaaatagaatgaaaatgagaaaaggggtaaaatagtaattgtatcctagtcatataagtaggaaatctcactaaaataaataaataaattacatcttctctctcaaacgaaagaagaggggaagaatttcttctcccaattcttctcattcctccattaaatctttcaactaggtgagttttcttcttaaattttcaattcaaacctagaaatttcttttgaaaatgagaaatggatgttgaaattggggtttagagattcttatgggtaagggaatagagatgagttatgggctgaaaattcataagtttagaattgttattagtaattgcatgtgtaggaaaagtgatgggtatgatgaatattgctatgctcataagtttaaattttagaagagttgaaattccataatttcggtaattgaatgatgattttagggacctcaatagatttaatgattaaactatgttttatacctttgattgaacactacccttgactcttgattgatgatggtaaattgatttgggactgaaattgaattgtggaaactgttgggactgttttggatgtgttatgcagaaaaatagtgaagagcctgcagatttgcatgtgggcatcgatgtcaacactggtggcttcgatgcccaggctctgactgctcatttttgttgttttgatccggtttatggtgttcaatgatctgttatagttctgatgagtctgaaacatttctagtgcttgttaaaatcacctttattcttttaaaaatgtaggaatggacattggttatgtgatgtactgatgatgaatgagaattattatgttcctattaaatcttaggttaattagatagtaatagaagatatataatacacaaaaatcatggattaggtacacacacacaaagtatgaatgattttcatagattaactcaagaggtgtggagtcttatattgatatgaatgagttttatagattaactcaagaggcgcattttcatagttaatatgtatgagctttctagattaatttacgaggaataggttcatatattcatgtgtgtatatatataaaagttatggcagattgtgatgttctacactatagcattgttcaagcatttgattatatgttgttaagtaattattaacttatgaattggagatgtatggtaactgtttgatgttgatgcttagcctaggactaggatattagtcttgtttttagtacttctgtagactttatgggaacgcactttatgcaatcccttaatgttgttgtacatatgacttaatcaagtatataaccttcaagtatgtgtattatcctttggtatccattatcgatgtgtaacaacttaaatagtattttagattattgtttgggtgttttattaatattctctaaacttaaggatttcatgcacaaaaagtatttataatttattctcatcgacaggtatttttttcttgcttaaacttcaggtgagaagt

SEQ ID NO: 4035 - DNA, 3929 bp, Medicago truncatula
  Intron number 1 from transcript Medtr2g029560.1 (locus Med tr2g029560) derived from phytozome v7.0 (chr-ID MtChr2; po s 7892588 to 7896516 reverse strand)
ttccggtaattttcaattacaatgcactccttttcgttatttatctttttattggatttggatattatggcgtagtttgattcatgtagccgaggtagctagtgggttaaagcgtggctgtttttgttcgggttttacgagtttagtttagtttagggttctataggatgaattcatagggttttagtgttgagaatgggaattggaattgatattttatggatgctaatattaatatatatgtttggttccacgtttggagcagcaagaattgattctggagttgtaaaattgacattgacttgtttgtgtttatgttaattgtttgcatttttatggaattgataattaactgaccaagattgttgttcatggtatttattagtgatgattcttgtagatttacttcatagaattatttattttttcatttctaataatgattaaaaaaatggtgaaaaggaagatacatagtgtgaggaaacttaattctgtttagatttagattattttttatttcaagtgttcggtaagatactaaaatgtctttttggcggttttccaaatgacaaaagtaaaggctcaaattagtttttggttaactttgcggaactagggttataagttggtttttagttagatgaaactagaatcagaacaagatttctgattctttgcttaagaaatgaaattcactctagcatgaatgtaggagacggaaatatggatgccttgtggtgagcgagcggtgtctgtcgagtgtcatggtgttgagataatagtaactgatgagaattcctataaaaaattgtggtatcttacgtgaggattggatttggaaaataatctgtaaatatgataaatgtaagttggcaacttgtatgatgaataaaagaacaactttagtgctgatagttacatgattcagatatcagaataagaactctatgaaaaagtaccacagaatgagaatccaagagtatcggaaggagatagggattcttttttgtagaaatggaaaggaaacataacattacacaatcgtttgtggccgtagtcagagtcttatggaaaaagaggatctatttggcaaagatactgatatctgccaaattattttacagtaatttgttattgcctatattcgcgcgtagataccaatttctccattgtgtcggtatatggttatttattaatacatcttttggatggattactgatcatccgggaaaagctttttttgtcggttatatttttatattaggaaatattgctttatagtatagacaacataattgtacaattaaccgtaaaccctcaatttagtcctcaaatgtcacgaagttgattggtaaacaataagttctgggctatttaatgcctctcagggaacaaactgatgttcgcaaaatcttgaggatcagaatgggggttctggatacttttaattgtcctgatgcatgtgagttagttagatctaaaaatagtggttagccgctgcatcactgataggatttcaaattgaggtataggcacgatggtgctgtcaaatgattttgtttttaaacaatggacggatgatgatcatatacctagccctaacactttaattatcttttaatgaaattgataattaactgaccaagattgttgtacctggtattttcagttatgattcccgtagatttacctcatagaatgtgttttatctattagtgattaaaaagagtggcaaaaatgaagataagaagtgtgatgaatcttaattttattttgagaattttttattagtgttcgttaagatacaaaaatgcctttttgtcggctttgtgaatggcagaagtataggtacaaattagtttttggttaactttgtggtactacttgggctataagttggtctaagttttgatgaaactagaatcaggaacaagatttatgattttttgtttaagaaatggaattcacgatagcatgaatgtaccaaaatgaaaatatagatgccatgtggtgaaaggtgttgagtgctgtggttacgaaataaagttaactaatgagaactcatacaaaaaatggtggtagtttttgtgaggataggatttggaaaaacatctacaaaaaatgcaggtttgaaacttttttgatgaataagataacaactgtaatgctgaaagtgacatgattcaaatatcagaataagaactctacaaaaaagtaccaaagaatgagaatcagagagtgttggagggagacaaggattattttggtggaaatggaaaggaaggatatctttacatagtgatttgtggctgtagacagagtctaatggaaaaagaggatctattcagatactgatatctgccaaattatttttcaataatttgttattgtctttattttgtgtggagatactgatctctccgttgtgttggtatatggttatttgtttaatacatctttagcatggattgctgaccatcttgggtaaactttttttgtctgttctgttgttatatcaggcaatattgtattgtagtgataagacaaacataaccgtacaattaactgtaaaccctcaatttagtcaattagcaatatcaattaagtcttcaaatgtcatgaatttgattggtaaacaataattttttggctattttaatgttaaatggcagtaatcgaggaccaattgatgttctaaaagtcttgagggtgttctgtctacttttaattgtcccgatgcacttgcgtttgttagatctaaatatagtggtttgcctttgcatctctgataggatttaaaattgagttattgacacaatgatgctgtcataattttgttttctaaaaaatagtcggacaatgaccatatacctaaccctttggaattgttgtgcagtactgttgttgatttttacctttttcgacagtgctcggcatataccaagaccgaacataatggaatattctgttttgttctctttggtcaactcctcagtaatccatttagtggaatcaaaacgtaccacttttaaacttcatttcccattctaatttacgtgtaaagcgtcaaacatatatgtttccatgtcttccttccatctaccaagaaaaaacatatatgtcccatccttgtttaacacacttatcaaacactacctcagtgttcccttgggaaaataacacttatgttggaaatgtcttgtgcaaccttcaacggtctttttttatgtacccctcaaacacatttgttgatcagagctatagtcatccatagttgtcaatttttgaatcatataactttacaatactaggtatcttaattgagttaactcaaaaagttgcttctgtggtagacttggataggctcgtatagagtcacaagtatgagtacaatacaatgacagtggtagtgttttttaaaaaacccaatcattaacctcacagttgtagcacttgtctccatagatggatctagcatctcaacatatgaactcatctataaacaaggggcggtgttgtactgagtctgaacctgacagctcccagcatatctttgcaaggctgcaatgaatccaacaggtctacaaggtaagtgaacccaactctgatgagctttatccagctccaacgagggggcccagtcccaccatccttcactcttcagtaattttgtactccgtgatctatttggtctctgatctattctgttatgcctggaacttgaagtcaacttcgttacactttcacattttcaccacgataaatcatttcataatttctcgttttgatgctgataatctgggtggatgatcataaattaatatatcatgttcaatagtatggggattgggaaggcaatgacatggttgtaatctggactatctgatgatgtaggttgctgtactagaggagcagaaaaacgaggctac

SEQ ID NO: 4036 - DNA, 2250 bp, Medicago truncatula
  Intron number 4 from transcript Medtr2g041740.1 (locus Med tr2g041740) derived from phytozome v7.0 (chr-ID MtChr2; po s 11567783 to 11570032)
cattagtagttcttcaagcttttcctgtgagtaatgttacacttatgctaattatatttgttttagtcaactgtcgatgttcttgtcactaatggccagtaggcccacttgagttaatagcagtgatcgataaaaactggacaaagaatctgtgtgttgtggtacaagagtcgaaaagagacatgctttcttgctaaaactcattttgcatcaatgatagtgatgctgaaaagattcaagtggcttaaacatgctttgcaaaatatgttcatcagcggttagtggagttctaatagggaaagcgttgttatgtagtttgtgtcaatctaacactaactctagttcatcaagaaataacataatgtgacttccaatttggttcatcaagagacaactctcattctaatgtagatttatcaggtcaatcatttgatgatgtgcatcttcactaatatcttcttagacattattttttctttgttaaaccttcataatcttgatgagcaggtaccccttcttttgaactttcctaagctactcttcactatgatatctatacacagaaataagtgtaattgaactgtgaaatatgataatttttatccaaagatagaaaattaatttgaaaaaattaccttggattaaatgaattgaccaaacaatgaagtggagtacaactcttgctccgtctaagtttgcgtatctcatttgctccctttttactaattatgcctatatatggctgccattgccatgaatcccgcatttcataaaccaaatgaagagtagaagcacctgtgctacatattccaagcatattatatatgtgatccgtgagagtaagaatttaatctattttatcccaccatagatcatttaaaattccttttcgaacgggcagctctcctaatatcatcttgtctataagcattccattgattactattgatcatatattttgcaaagcatatttcagcaactcgagtattttattcttcatcattgattcaaaaatgattttctgcaatatcaagcatgttaagagttaaaaactcattgaaaatagccaatctcacacagtgagtcattatgaaagtcttaataaaaaatgtatcatcagacatcagtggaaatgtattagtatgcagtggaacctctgtaggtttcaatctatttttggcctcttcacatattctttcttgtcgaattttggccaaacagtgactccaacactaggaattcgaagtagatcctagatcactttgtacaatagatcctaggtacttaaaccaagaaacttgcctgtatgatgtgattctgaagttttacatatgaaacattactatactccttactctttaacagagaactcttaatttcaaagtttctctccttaactatagtttacacttggttcttctcttgagtcttgactcttgagaaacttttccttgaatgtgcttagtaggtatgaccatagtcgttgaactcttgagttaattcccaacattgtacgagtttgtgacccaaggtatcaaaattgttaactcatacgaaactgttacgttgtattcccgggtagatttgcattgattcatataaactcaaatagaatcgtgagtttgaggatgactgaacgaatccacaatataatgagtatcttcccctatacgtaagacgtacctgaattgatattggtttgatgtttttttaataaagaactcaacgcatcaaattacaaatgaattataaggtttgtagtgcacaaaacactgtaaaccttctgcaaaggaagtaagaatgttttatcgagtcttgaccttgttgcttccagcataaaagaagccatagtagaaaacataaacaaacccacccattgttgcaagtttgcaatggacccaacatgccagcaaggtcgatgagctcaactctgatgagttgaaagtgaccaactttaacgagggaaacccaatctcatcatccttatctctttagtaactttgagccttgtgtttcgtcaaattgttcatggattttgaacgtgttatgctgatcattttgtttgctgtgttgtaaacctacactgcagaatgtgaattttttcatcaattttgaattatgatgctatgtttgtttattcatgtaactcatacggttggaattattattttggggaactgttttaacttagtttcctgcatttatgtaccaccaggaatcatcaattttgcgggccaattttttgaaaca

SEQ ID NO: 4037 - DNA, 4210 bp, Medicago truncatula
  Intron number 4 from transcript Medtr3g041140.1 (locus Med tr3g041140) derived from phytozome v7.0 (chr-ID MtChr3; po s 11394570 to 11398779 reverse strand)
ggaaaaagctttggattgaaactgactcatctttggtaattttagctgcttccaacatggaccttgtcccttgcgctttaagaaatagatggaagaactgtcttgccattttaagacaaatgcaatacatcatcacccacatttatagggaaggaaacaactgtgctgaaaagcttgctttcatagggcttagtcttcaaggtatcactatttggttagaagtccctaacttcttaaacagcctctatggtcatgataggctagaattaccaaattttaggtttgtaaattgttaggaggttttggtttttgtccccctccttttgtttgttttccttctccatatatataaacttttgaggtggcagttctttgctgctcctcctttttggttaaaaaaaaataaatcaactatcattatttattctctatcaagtgggagaattcttgctatgtattgtgtaacgtgatggacataccctatcggtatgatattacttaacataatcatcatttcatgggtaataaaaatatattattagtttaactaccattctccaccaagtggagaaaatattattctctaacaagagaggacaaattctacatgtcaattaactatatcttataaataaatatattatttgtttcataactgtagatataaaattgttgtagagacttatattgaggatattaattatagtcttttctcataaattattattctcataaattattacacacttccatatccttttgtattattgtaaactcattttgtaaaagcaatatgtcaaaatcctaacattcttaacaactttgttaagaaaaatttatttataccactattctaaataattataaatggtatatttagacatatcttatattattgctattctttaatacttatggaagtttatgactattttctcttatatcctcaataataataaagtataagtctcgtgtatttctgctacgtgtaacctagttttttttcttctaaaatgtgtgtaagtattattttatcatttgagttttgagtgagtcactaaaattgtgaatagagtctcacatcctattttatagcactagagacttatgtcactcatatgatgataaaccttttttttatataatcatcatactctatcatataaaggttactatatttataaaattctttggaattttaattgtgaaaaggagatcttgttttataaaattcttaaaagaaaatttacattctctttaattctaaatgcagaatatgtggttaactacgaaactcaattcttgataatatctaccattgataaattatatattcatgggtttcgtactatcattaagttaccgcttgtgttaataattctgctacagtcatgtgcaaaatatgtggttgatttcatgaaacactattagttaaaagagtaataatatttgaacaaccatttgatacaacttttgtgacaacttcttttttctctcttttcattggtcaaaaacaatgttgagagaaaaaggaagagagagaataatatgagtatgagaaagaaagttgtcaaaaagttgtcacaaagtggttgtacaaatatcaattctctagttaaaattatataaccacttatgtagttatgttgatcatcttgcactagtaattaagtatcccactgttgaatattacattacaataatatttatacataagtgatcattaatgagaagaatcccacttatcattaatgagaagaatctcacttactcttgtttatatatatgtgggatcagtgggagtgtgtacacaacactatatattatgagctcaaattagaaatctcactcttgtttatatatacgtgagatcaagagaaatgtgtacacaatattattcacgtcattgccatatactcttataagagactttaaacatagtcttattctaatatattgagatatatattaaaattctttttatctcaataagcatcataattagatgtttaagtcaattttgttggaatatgcacaataacctctgagcatgcaaataaatattgtgcttctcttttaccaacattccacattttatgaggtaataaataataagtacaatgtacaatatcaatactcctatcgagtatgatattgtgttcttgaagtacttaaaaactaaccataaatgtttgttcattatagacattctagtagccacattaatccacattttattttctttaaactaagggtctatgttgatccatttcggagattcttgaatttcctattttcttatggattttcatagtcatatgatttgctaaaacttggattaattgaatgtcaaagaacattattgattttgactaaatataattactctttctttataggctatccctatcagtaattactatttttatacatacgtggatatatgacttttataaaattgaaaacccattggcagaaccactaaccacagacttatatatatgagtataattcataatgattttgggttagtgggagtttgttatagcatttttaaaatgcttgggccattctttaatgacacattctttttaattcaaatgtgtcattataaattcatcatttgttagaaaagtgagtctttgatctgtatgatttgttttccctatcgaattcaatttctgcagcattaaaacttacttctcttttcaatgtttagtgcttcaaccaaacatataattttaaaacttaaattctctatgacaagtgaaatttagtattcttttagtaattgagtattgtcatccaagtgagagattgttggattaattatttgattaatcaattatggattgacaataatcaattattataagttaatgtcataatataaattatggtctattctgataagcactaattagttgatgaatatgtgtgattgaactattctttctaaatggaccgtgatgggttggaacatttctaatatatgggttttaatgaaacggtgcgtttcaggaaatttctaaacaaactactaatcaaagataaagctaaaactaactaaactgaattactaaacaaaaaaaaagcagcgtgagttaagtcacgccaccggccaacgtagtgtaagttaagttacgctggcttataacacacgtgagttaactcacgttgaaagtacctagcgtgacttaagtcgcgcgagggtgctttcgtccattcagttggacatgagcgttttttgttgggagaagaacatgtttccaacttttggctgacttctctcctttgtattgttggactgccaacatgagtattattgaaaaactattacttttctcaccttataatcttctcgcgcgtcctatattttttattttaaattaccctttgtttggattttataaaccgaaaggtgtttctaattacagaatctgaaaatagttaaaattgaagtccaacatttaaccagacacattttataacagagttgttaaaaaaaacttttggattatataaaccgaaagtttttttacacaattcggaatataaaatccgaaatatgatctgaatagttaccttttaaaaagctgaaaaagtttcggattatataatctgaaacctttcaaaatctaagttttgtctagaatcaagtagaagttcagcgcctttagcagaagtcctgcaaaagcacatcattttggacgaaaacatgatttggagtagcaatctggtcatcaaaggtcgttaacaacatcattttcgtctggatgcaaagataatgttcaaaggtagtgttttgatagtataccattgattttattttgatagtaaaatcttgaagacatctattatgacagttcagcaatattagtgtgatcaacgttgataaaatacttcgtgaggtatcaaatgtattccaaaatcttatattgtcgatatatacttaatacttattataatatagattgtgagtccaaatattggtatttatatacacttcttgaattgatttcttttattgttaaattttgtttactgccttgcatgtgattcttgagtcatccaaggagttcagtcaacaaaagaaagcttcacaatattattataatcacagtaattgtaattaatgttataagttattgatattactgcaacttgttttcatgcttttaggaaaaagcacttattccaactatctcac

SEQ ID NO: 4038 - DNA, 4381 bp, Medicago truncatula
  Intron number 2 from transcript Medtr4g062310.1 (locus Med tr4g062310) derived from phytozome v7.0 (chr-ID MtChr4; po s 12032792 to 12037172 reverse strand)
ctaaccagttcaattctttggtatgtttttcctttctttttaattaactgtgttttgttctatattgcattcagaaaattgatttcgagtttttacctatattaagtggactgaaatatgttttaggaaaactctttggtacctcggagtttcgttttgtagctaaaattaatttaaaaaatttaaatttattttgaaataattaagcatgaaatgaaatgacttgatagcggaattttaacaaactgtaattgtctgcaatgtgcgatttaatacaaatttttggttaatagtggttatagcactctagtgtagcaaaatttgaacaaaccgttatttttcatgatctgcgattttgagttttgacattactggatgtatattaatgcttttcctttgaccgatttactacctggctgcaaaaatgttgtgaagttgatgtaagacctaaaagttagcactgattgatattgttatgtaattgagctggttttgaaattttgggcaaatttagtgtataggggttgtttgtttaaattaagactgcttacttaattctgcatattggtatcaattttaacatgtctaaaatttgactagtttaatgcggaagcttcggtttgatgggagattcatgggaaaacatttgtatcaattgaaagtgaaaactgaattagcatgaatacaatttcaaaactaattccattatacatagggctttttgtgattgagtttctcagaaaaattaagcatgtctccctcacttttagaaattgaacaagagagaaatctacggaaactgtaatggaaaccatgtgtaatcgttattctgaacagaatcgggttgaatttatatagattgagtcagttttagagctgttgtaattgcctgagacttgcacaactggcacttcaacagaaacaactttcactctaactgaaaaatagctatcagctatagcctctgtttctcctgtttctcattttgcaacgctatggggttctcttgtgtaacatgaatgatagcttcttgtgtgacttctatgctcttgtaggaaaaatctactgaatgttatgctcgtgtgatatatggatcctattttatttctttgattgcttggttgatagaaaggaagaggatcggatcctatttgcttttgattctacattgcttgaaatgatttacagttctataaaaatttgcctatttcttatcttcaatatttgcttaaatctggtgacataaaaccacatgcatcatgaatggagcttaggcaataaaaccacatactgtgctgaaataattacatgcttctagtattttatacatattactttatgttgtttcaatgtgtcatctgctgcttgatttatagtgtcattgtcgctagttttaagttttaataatggatgtttttctgtgttgggttgtatgcttgttctgtgtgtatgcactacagtggggtcaagctgtctgctgttattggtagtcttacttgttgccaattgctatcattaatagtttgaagttctgctagctgtgatattagtttgtaatgttttgagatcccttcctagtgttttctagctatgggatttatttttgcttgttattggtactctcttattattgactttatgatgaatatttctaaagtaggtaacgttttgccaatttatttaaaacaaatacttgtttatgtggccactccattcatatccatgtataactatccatatatttttatcatgcgttccgtattgtatacctataaaattgcgtattttctagaaataaatcagcaagaaacaatcaagaaatgttaaagcttaatgtctgcatctctaacaagaatgaaattgaatttctggactatttcctatatgtataatatatttgttttagttgttttgaaactgcttacaaagattattatacgagtcctcctactaaaccctcaaaaatccacttacttccttaagatcaagccctccaagaaatcacctttttatgttcagccaaaacttgttcgacttcctcctcctcattgtcctgtatctcttttctgtattttgaagtaactgttggtagtggcagcacaagcagtataagtctattttgtacttagggaagttgtgatggtgtctacatctggtagcagggaaagagaggtaagcatccagtcatttgagaggtaagtggggctttggtttaggcaaggcaattttgcagtatgtcaatgttctgtagtgtttagcagaggcaaggctttgtttcaattaaaatcaagtttcaggtctttagtaattaagttctattaaatgccaatgaagttaatttccatgatttcatttggagaaaataaaagtatatcagtgtatgcccacatttccatgatttcactgttatgcccatgctaataaatgtaacacttttccttttccctctttacactacctatgtgcaaaaatgttgtgaagttgatataagaccaagaagtttaaatcatatatatacaatatctcggtagttagcactaatcgccgttgttgtttagttttcctggtttggaacttttgtgtgattgggcaagttttgcgtatgggtgaggtttgttcaagttaaaactggtaaatttagtaaggttgcatattggtatcaattttcacttgcgtccaaagtttgatttgtttaatggggaaactttggcttaatgggagattcatgggtgattatgtaatcaaaatttcaaagctaattccgttgtacctagggctgtttgtgaccgagtttttcagaaacctaagcatatccaattcataaccatttcatcaaaagtagttttggacatggatgtggtttgaaccttctaaccagttgtgtgctcacctaattgtacctaatcatttaagttagatacacctccgttggacatctttttcttatatgttatgcctgttatattataagtggtttcttagtaatacgagatggaaggttcccagttgttattgacatgataatcttttgctaatgcatgatgcttactaggttgtgatttccttttgtagattttgaagaaaagtttttgtagtcaaaatatagttacagataaataataatctatgtacaggaaattaggagctaaaaaaggaaggacagattttctactcttcatttctctctagacagcagagtctagagtacctaaacataaaggaactacttttgatgcaaattacttaagctgatggaatatgctgcgcataattattagttaatagaaatgtgccaaataacaatcctaactaaaaactaaaactggaaccacatttttttactttttcttccgtgtatatctcagatatctagtttttcctattcagatagaccatagagactagtgtcttgttattgcaagcattacattacaaagtttgatattttgataagttcaaacgaagttctgaactgtcaactttaggtcatagtcacataattggtttgcgagaattcacacctgaattcggtggaaacagcgaaccatgcccagaacgtgtgttctaacctctcagacatgattttttggttctgcaaactcgattctggatgaagccaagatatggaggagcttttgctgtgattaaaattgattttggaatttgattgatgtgggatatgtatatcttcctatgttgcccttacaaatttgaggagcaatcgtgaatgcgacactgtatctgcggttacagtgatacagtaattggtaggttgaagacgacccttaattgggctttaagtaattttaacccggcccatctaagttgttgtttatcctgcattttttttaatatgttgattattgttttgttgcagggctctttattactattattcttttttttgttctacttctctatattattgcctctaaagaaacttactttattattgaatatatctttttttgttaattaaatatttttttagtagtaacgtaccgattattatattgagcgtaccgactaccccccctccccagtacctaattctgcgagagtcgcgaaccgcatacctgaattcgtaccacgtaccgaagcgaattccgaaccgtgtgactatgctttaggtttagcagaacttccttccttgacatgttgcgagtgatccttgacatacattctagtaccatcttgcatgaaatatagtttcattttcattccttatttgttctagaatgaaaaaacgtgaacaaatgcatcgttccagataacgtgatgcataattgttaatttttttagttgtaataaatttctaaatctaattgccgtggaattgttcttttacatcagagatatcaggctcttggactggacacta

SEQ ID NO: 4039 - DNA, 2343 bp, Medicago truncatula
  Intron number 1 from transcript Medtr1g019620.1 (locus Med tr1g019620) derived from phytozome v7.0 (chr-ID MtChr1; po s 4046794 to 4049136)
ccttgttcccactctctccctctgcttcgataaaggtatgagaatctgaactctttcttctaccttttcgttttatacctaatcattgttttttttttgagtttctttgttattatgcttttgtagtaagatttgtgtcaaattacttgtttattacttctcaaatttattaatttaagaaaaaattagtaacctttttgcatcttggtactctattcgaatttacattttcaattttccgtatagtttagttcagagcaaaattcctggggtttcttatataaaagtgattatttttatttgtaggtttgtttattttgttatgttaagcattctgggtatttgaaatttgtaatgggttgtctcatttttcttttgtgttaaaatcccttgaaattctttcttagtgtgtgtttggttctgcggtgacttaaatttgattttgaatgaattggttttgtaaaatgattttagataaaggtgagttcaatgtaaaatgttttatgtttggatgtatttatgtaaaagtggatttaataataaatttaaggctaaaatcaattgtagaagccaaaagctacaaattctagcttttaagtagaatcaattctcccttaagggtctgtttggattgacttatttgagctttactattggtataagttttgtaaggctgtttggaagaacttatgaaaacatcttatgacattgttcataagctgtttttaacttattttcataagttctcctagctagcttgtaaaatcagcttatagctcgtaagaaattaatttaactttattttatcttttgctattgaaatagcttatacataagctgcaaataagttgtttatccaaacagatcctaaatcattcaaacatgataaaattaattctacaacctttaaatcaattttgaccccttcaaaatttaaatcaaacatgtggttgatgaaatagtgaagaaagaaaggatttctgttacttttaatgctaggggtgggtttgggacaattggggcaggggtctattgtttttacaaactactgttttgcggggatggggcggggcagggatacctgaacccccgtcagggatccggagggttacaaggaatgatcagagactcgggttcggggacggggaaggcaaaaaccatccctgccctgttgccatgcctagttcagagggtctatctacaaaatacttcttgccatattataaatatgagagctgcagcctcataaaccaattccagtttctccctgccattagttatcagtcagttttctaattaaacccacaatttcttttattaccttttaatgtggagagtaatacccaagtttataacattttatacctttacacaagtttgtaataattagaacttccttggtaaattgtgtacaaactacaaataccttgatatacactagaactagaaatgttgagcaaatggatagttcttttcgataagtaaacatggtgcaaattgtgtattgaaacaattagacttttcaatggcagactttgtttacacgaagtcatatagtatgaacttgtataactcactaaataagtttgtgttacttttattttcatttttgtttcaaaagctttgtactcagaaaaccttgatactccttggaattaatagctgaggtgaatttgctaacagaacttatgtttttgtgatgtctgaacttgcttccttttctatcctgttgttgttgatattgtgctttatttggtttcagtatttattaatgggaattgtgtgataagctgaagatagtgtatatgaggggaacttccttatttgtgttgttgtgatatctgaacttacttccctttttcgatttttgttattttttctattgtgttcttgttaactttttgagctaagattttgatttattagtcatctaaattcaatctttatttctgaatttttgtactgtgaccttactctttgattgtttgaatttaaagtttacgactttgatgaaaaaaattcctttttttttattgggtaaggagctccattgtggtagaaaatgaatataacagtgtgacagattatgatttctatatattgttaagctctttttttacctttaagttgtttttaaatcctacagcagagctcgtttgcattgtgatttgattcttaaatgttgagactttaggtgacagaacaaagtagtcttaagatgtggttcattaaacttgaactctcgggttatcagcctttttaataactctatgaaagctgtcatttgtgattttcaaagcttatttacgcagttatgatagaaactgaattagtaatctcaaa

SEQ ID NO: 4040 - DNA, 1567 bp, Medicago truncatula
  Intron number 2 from transcript Medtr4g084030.1 (locus Med tr4g084030) derived from phytozome v7.0 (chr-ID MtChr4; po s 17556172 to 17557738)
tggatgtatgtaattcatctatgtgcccataagattctactagaaaactctacaagctatcattttgttattctctatttaactaataataattattttccgaagatctgctgtgtgttttagagtgtggtcagattgaatcgattgattatttttttcaaaaattttaaggtcgatcctaggtctgtactccgtcgtatgcttattttttaggtctgagtgtaacattgtaaaaatttgatatgacatgcaaacatatttaaaagtctatttgataggatatcatctttaaataagtaatatgatctaaatttaaatagactaacaaactaatagatcaatatgattaaacttaattttgatatttaacatgaaattttaaagaatttgattatatattatttcatatataatagtagcgaaaaattcacaaacacgaataagtatagaatcgcatattcaaaccataccctacaaattacaatgtctccaatggagttacgttcacaaaaactattaaacactttacgaacgactttcaaatcacaacgttattaaactcttattttttgacgatactttacaactactattacaattacaacaaactcgtttttgtttgacactcacgactaactttcagaattaattaaaaaaataaaaacgaactaactcttagaacgtgtgatgtattttaaataattttttcttaatgtgtgaacaataatatatttaattattttatacgaagagatccgtcaagaaacatatatttatttaatgattctgaaatcatctgtttcgcatgtgcttggacaatagaaaaagaaagaaacaattaaatattcaacaaaaattatttggagctacatcaaatacaggagaaagttaaattaatcttttttacttagctcaaagctaaatcgatacccattacctactaataagaataactaaacatttttagttttagatttgactaaaactttgtgcaaacaaattttactggaactaaagaaaaacctattaaaactcagtaatgattaaactttgaagatccttattttgtagggacacagaatatatctaacaaaatagaatgtctagattataacaatactccatcatttctttttaaatgtctctgttttctttttttaaatagttttgttcggatttatatttttattctacgctatttttttttgtctagattataacaatgattatatttttttgtcaataatattctacgctatttattttcaaaaagaaataaatgaaattagataatactctctccactctaattatggacttgtcttacttttttccacacatattaagaaaaataaatagtgaatttagagtgtccattttgtatataaagttttctaaaatgctaccttcgatatttattataaaaaacaattcactttttggttttattgaatagttgttgtatatggtatgtattggttagttatattatttattcaataaaacaaaacaaaaaaaaaaagaattgtttcttattataaaaatctggaaggtactcttgaattca

SEQ ID NO: 4041 - DNA, 3079 bp, Medicago truncatula
  Intron number 2 from transcript Medtr5g089220.1 (locus Med tr5g089220) derived from phytozome v7.0 (chr-ID MtChr5; po s 34639861 to 34642939 reverse strand)
aaggaagggactcgcttgtgtccaactgctaataggtaataataccttttgaaaactgtgcgaacattcactattctttccccatatgaaggggacctatgaaacatcgacaccggcacattgacactaataataatttgtgaaaatttgagaaaatagcacaagtaatttgtaatcacatatgtcagtgtcgtgtctatgccagactcggtcatctgacacctcttcaccacctttgatttgaagtgtctgtgctatggtgtaagggacaaatcttttcaactataaaattataattttatggctttcgtttgcaacttatttacataatgctttccataggattagcattgtgctatattgacattagtaaattcatttttgtttgtttgagcttggttagttcttatatcagtaaaggcagttgaaaaaaattactatatcacatattaatataaataaatatcgttaataacctatgtacggcatgccaaccacgggaaattgtgagggtgtctactggttactcaacctttgatcaagtagggagctgtgatcctttattggcgtgcctttcgacagatgctagtttcacacacagttcacaccctggtaggaaacaagtataggactctggcctcctatctatggtagcaggtttgttttgctggggcaaagctaagaaggatgacttttggaagatgttgtccgatgatcttgaggttgggatggaaatctgggagagaactatatcctacttagttagaaacctctactagcaaggagagaactatatgcattatttatcagggattcttaactatatagttcctgctagaataagacaacacatgagatgaggtggagtgaccgtagagtataataagaccccacatgttactttgaactcatgcatgtatgtattattccaatacattactctccattggtttcctatacgtgcttctgcattttttgttatgaattgctgaaatatcagaattttgtggcagttttttcactgttcccctaattttacaccacatgttgggccaccattattccttgctcgctttttttctctttatcatttcctaagctaaggtatgatcgcttcataagaaagaacagagttcacatcgataactccatagatgtttagattatgtagaatcctcagccaaaggaactcagggccgggtaatgggccagtacttggtttcacttgtggaccttctggttctggaagagaaaagtagtcggaagagaaaagtagtcagaagtaggcctgatttgtgcaaactgaaatccttattttttagatctactgatctagatttttataacaaacattaggattaatgagtttatttacactgaatctgtttcccagcacccactaattaatatacttccattgttctatctgtagttttttttagttggacctaaatatggtttatgataggaacatttagcgtaatttgatccatgtacccgacctcatttagtgggataaggcttgattgttgttgttctatctggtatttttttttttattgattccgcttaagttttaatagtttaagattcaaaaatgttgtttccttgtagacctttccttaacactgactttaattggcagccaattcataactgtaattgatttatctacttgttatagccaattactcgtgcattttgttttgccatgttgctgttttgaagattgaaatagcatttaccttttctatatgccaactaagatatctattatgtagcaactttgcttaccatttcttccgactgatgtttgcagcacaatgtgaaaatctctttgtagttggatgctttttatttttcatcactcattttaatataatcttattgaaatatataggttttttttttattaatctgtagtgatcactggagtctgtagtttagttcattgatggtaatatgttctttcttccaagtaaaaatgtcttttgacttgtaggtaactggacgtattctattatgatctctgaaataagaggaagtaaaggtagtttcatgatcctatatatatactgctactgttcggatttctagatcacttcactataggtttgacactttcgtatggagtaaattaactaattgactaggttagtaggttatatgcaaattagtgttatgtcatttatttgcatatttgtatactgaccgtttctgtgtattctgtgcctttctgtgtatatgatattccattttatacatgtttaaattgatatgctgattatgttattttggtgaaccccttcccatcctaaatttttaatcaatatgattgattgaacaaagatcgtcggccttagccagatttgatttgaattttatttgctattggattctattttttttaatgtctgttctaaactaaactttgaaaaacatttgattagagtgtttaggattatctctgtctcagtaaaatttacggtgaaaagggttcaactgtgtctcaggaaaatttatggtgaaaagggttcaatttgtcgttcagaaatgtagattggaagccaagagctttgtgccctaaacttttgtgtttggtattctattacaaaatagaaatacttgttcttaaagataccaatgattttcaacttctattaggaacttcataccttggttttaggcatgcttaaggaaaatagtgttagcaaattaacttggttatattttatgtttctagtgatgaaaacagcagtctttgttttttttttttttttttgaggaacagtctgtgcttttgttggggggaaatattattattattagtacatttttttagcttttatttatgatgtaaaattacatgcttaattggaagatgtttttagaataaaaaaatttgtgggctaaggttttggactttgaagactctgcatcacaatttcattgtgtagtttttttttgttttttttgtttcttcttttagttatcttcttaattacacatttataaggtaacatctcaactttacttgttcacaggggtaacttgacacttgttctacttccaagttctg

SEQ ID NO: 4042 - DNA, 1257 bp, Medicago truncatula
  Intron number 8 from transcript Medtr3g156900.1 (locus Med tr3g156900) derived from phytozome v7.0 (chr-ID MtChr3; po s 41287977 to 41289233)
agaaggtacaaatataatatctgcagatgtaattgcttatttgttcactacaaatcaccccttccccagataacataaagatatgctaaaagaggataagatatatacaacactaaagtatattatattgtgaatgcatacataatttgtaagtcaaagtatgctgaacacttgctagtttaagttaaactggctgtagttttaaagagctgtgacaagcaggaaggcatacaactttcatttaaaaggagattaacaacttcgccacttcctaagcgcatgtatgatattttctagtctagatttggcttaactatgtacatgaagtcttgaacctacaaatctcaatactaatatgaactcccaacactacttggaaggtggaataatgtgtatttgtgacaattatttatggttcatgatatgacgtatgtcaaaagcatcggaaatgtgcggctagcccaataaaaatacaactgtcattattcagtaagattataatctttacaacatcatgttcatcaattgtaattacagttgatacattgaatgagtgagatagtggggagttaatttaattctgctatatcatgacatgatagctttgtttttagcttattcggacaatcaactgttttttgtagctaagatttatttattacattgtataaaatttcaacccataaggaatttaagcacaaacaaggaaaacaatgccatattgtcagtagcttgtatatgttacggtctagttgtttaattgctgtttgaccaaaatgtaaggaattcagaacacaaatgggggaaaatatagcacatatctattaaaaaaattcttgcaaatttgctatgtaggtgttcaaaagttgaataattgctttatgaatctctgtaggtttgtcagtctaatcaattctgtaaggtagttgtgctttctgcagttttgtcaaccagttactatagctagtatgtttctgtttgttgatataatgtatttaaagctcacctcacccagtggaaaaggcttttcttgttgttgtttattattataccatgtcaaaaatgtgccactgaagtaggtttggacaatttaacttaattaatatggatgttgctaaactaaattattctttgaatttgagaaagaactggactaagcatgcacctttcctatttctcttcattgttttattgtcaaaaaattaacacgacttttgcaaatcaaatatagttgtttctcatttacgtttcttcagg

SEQ ID NO: 4043 - DNA, 2254 bp, Medicago truncatula
  Intron number 3 from transcript Medtr7g068450.1 (locus Med tr7g068450) derived from phytozome v7.0 (chr-ID MtChr7; po s 14046073 to 14048326)
ctgttttttcagtagtcgttgcgcgacttcgccatgtgatagttaattctttttaaatgccattttcatagtggcgaagaatattagacacatggattatatgtgtacttgcaactcttataatacaaatattagttttattaaaaaagttttttgtttcaatatttttctattcttacaagtcacgttttaaagaataatccaaattcattttcattttacgtgattttgctaatagttgatgtaatatataccaaatgtttaatagaaggaattattaggaaagaaaatatagttattttgtttcaattattaaaaaaaaatgaatgactgtaaaaaaaaaagtgaactaaatcgaatcaagaaatttaataaattatgatagaaaaaaaaatttaaataattttttttttaggattttttttccagttaattagtttaaaaatggaagaaattataagaaataaaatttagtcaaataaatgaattcaattactttctcatctaaacaatgaattttgaaaatgaaggaattcattcaatttacccaaacaataaattttaaaaatgaaaggaattcaattgaagcatttgaattttatcaccgtgctgaaagcatttgaagattacatgactaaaccattaccaatgagctaatattttttggacagaaagttatatttatcaaaatcattattgtagctgaaaacaaaattctaaaaagtagtattatcgaaatagtatttttcttatttgtgtatactaaaaacccataagaagtactaaaatgaggggctattaagactgatatatgagtttggttgagaaatgatataaaatattggagaaaagtgagagaagggaagataatagaagaatggtctcttttgttatagcactcgttgttgtttttggtataaaatagggagaatcatgatatatgtgtcttatgtgagatacatgatttgtgtgattcgagcaggtgagaatttgtttctttttgttatccagatgacttctaaaatagtaaaaaatctcatgaccaaacccatgtgcattttaaaaaggaggacaaatgaaattacacttttggtacaaaggaaaaatgaaaatttaacaacaataatcgatctcaattagaatatgattttaatttaatttatatacatttgtaaatgtttataccatgtcattaaatcataactgtcatatcataaaaaaaaaatttaactttatttcatcattgttattacttgaaaaaaagtcacacaaatgaataattgtgatttctttatggtgttaaactttttgaactaactctataaaataaacttttatagtatatctagagtttaatgtcttcgtgagcgtattttagtttatagagacattgcaatatgtagcgtccgaagtttgaatccaattgaaaattatacatggttgacagagaaagatatctgaaatgctgaatgttttcattcagtatgttgttaataaaatacactacgatagctgtatatttcagaatgtttatatcctcacaagtgcagtgttgtaaattttgtttatattgttttttgagaaattcttttttgtatttcagaagttttttgaaatatattattatattccttatttaagtgagaaatatttagttgaaaatcataattatgaattataatgtttttgttattagaattctcagttaagttatatttatttgaccggttctattctaacaaaccattcctataatctctatgagtcatcaaagcatatgtgcagtttttcatatagctatcctttaaaaaaatgagttggcatacttttatcactacttgactctttctcaaacgtgttgtttaacaaatatttatgctatgagtcggtttcaaagaaactgaattcttatcgtgcttgaaaatagcctatatatattgatttgaggacacacaagcagcactgaaatttttgatgataaaacctcacatgcaaaaataaaaatatacataaagaatatttagaactggcaaagaatatttatgtaataaggagtgtaactgagaaaattaacacgtcaattatttctaagttacacttcctgttacataaatattttctgtcaattctgaatcttcagcttgcctgttagcgttcacatgtctattgtctcattgtttttattttgcaggtcttcacagcatttcatcaacatgcagtaccatcgaagaaacctaggtttgatccaacccaa

SEQ ID NO: 4044 - DNA, 2594 bp, Medicago truncatula
  Intron number 3 from transcript Medtr4g109370.1 (locus Med tr4g109370) derived from phytozome v7.0 (chr-ID MtChr4; po s 24451975 to 24454568 reverse strand)
gatctaggttttgtgtttacggttacagtcttatctttgaattctggaaatttttagatctgctgcttgcgtgatttttcttctacaggtttaaaccgtgattaatactttctaagagaagaaaatgagttttacctgaagttttggttgaaacttttaatggaggaaaatctttggaaaaaaacttgaatgttcttgacggttttgatgattttgcttgcttttggaccgaaaataaatcggtttaccggttcatcttcatcttctctgattctttctctgcttctctgtgattacgtgcttgagcttgcttcaacgtttttgaatctgcgtggaaaatccctatgatcagtgcttgagcttgcttcaatgtgagctcgcactttgaattgtaggggaattcttcaatccggtgatgaagattcacacgaatctctgaggattgatgtgaaaatcaatgaatttgtgtacgaattttgttctggaaatcttagggttcttgtgttcttggtgatttctctgtgatttttttggtttgatctaactgacaagaaagagaaagtttgattctgttttttggtgaagtggcgtgtgatcaatggctttgactctgactcactgcttttatagctgacatgtgtgcatctgatcaaatgaaaaagtgacacctggacttgaaaaaaaagaatggtgcggccttggacttagaattaatttgggacctttctgcaaaattgaaaaattaagggactaatatgaaaataataaaaaggactaaaatgcaaattggaaaagaaactggaccaaaatgcaataaaaaataaaattgaataaaacgcaatttgatcaaacgtaaagcgaaacaaaaataaaattgacaaaacggactaaaacgaaccaatgacctaaatgaggtatttcaaagtaacctctctatgccaaaatttcgtgtgaaatgaccaaaatgcccctagggctaaaaatgacctaaactgactcaaacagacttgacactgactcagatgcaagtttgaaatgaatttaacaaggtttactgatgaaatgtaaaaaaaacaatctgaaaagactcagagacagtcacaaggatgaaaatgggtcccactgcaggaaatgaccaaaatacccttctgtatgactttttgcaaattttgaaataaactgtagaaaaagcaatgtaatgattcagagacacttttgaatgacttacaagacaagtaaagatatttcaaaaggttttatgcaagaaaaacataggtgaaattgtgattgaaaatactgcgaggcagagacaatttgaactgtgcagttgaaatttgataattgacaaagtttgaaatgaaattgggcccagtatttttaggtccaaaaacagggtataacaacttaccataaaaatgagttctttcttgtttgacgtttcagattcacacaatttctcctcttgaccattttctaaataattttcaccaaactattacgttttcacatatcagtataatctgtatacggttgatttttaactagttcaattccaaatttttgtgattctttaattttgattatcatggttcctgtgtcaaaaactccattgaattataaaaaatgattatcaccgttcttgtgtcaaaaaaactccatgatttgttgtcgtactttttgatcaatgtcaaatgttttataggctaagtgtatgtttggtaccacaaaatcaagatgacccaccatgatttttcaaaaacaacactttgtaggttctgcaaaatcatcatcgtgattctgatacatgctagacatatgctaaagaatcgataaatatatttttgaatattaacaaaagagagagttcatgaatgaaattaccaaatcccaaaagcatcgatgctgaagatgggagatcaaacaccccattaatatatttttgaatattaacatttcacaatatatattattaatattttgtataaaattgaagtgtataaatttgttgaaagaactgttgattgagtttagctcaattgatagagacaaaatattgtactcccttcgtccttaattataaaatccttttgaagattttttttgtccctttttataagacccctttgttatttccaattacattaattatttctttacatacatacccctatttattatacatctttttcttcaatcaacaataaataacaggttgaaaacataaactaacattatttcttaaaggataaaattgtaaaaacaaaatgattacaaacaactttaatacaaatatccactatcttaattcccgtgattttgacaagagggtcttatatatagggacggatggaatatagggacggatggaatagtatgtgagggtcgatgtttgaacttcagtcaccccacttgttcactttaagaggtgaatttctagtgacttgaaagaaaaaaaatgtttaatgaacttaacgtttttggaactggatcacctcctgctgcttttctactgccatgccatctctcctgcgcagttatgatgtgttggatttaatccagcggtggagacaaagagaggaaaaaggggcaagaga

SEQ ID NO: 4045 - DNA, 4787 bp, Medicago truncatula
  Intron number 1 from transcript Medtr7g070830.1 (locus Med tr7g070830) derived from phytozome v7.0 (chr-ID MtChr7; po s 14431775 to 14436561 reverse strand)
gaaagctgcacttttcatttttggtaaggaatgtttcttttacctaaattattgcattcaaatatatgataactttgatgtgtttgtgtttcattatgctgcctccactactaaaaaacaaaaattagtgagagaaattttgtgagggaaaatgtgaaatccctctttaattctgtcactaaattttgcgaccatgaaatttgtgaggaatttcattttttccgtcactaatttccctcgctaatttttctttttctagtagtgctcattttgtctctgaatggaacttttttctcctcaaacttccacctatcaattacaattaccaattttgaaatattcccactactttttatctatttgcatttggctttaagcataagttcaaattttcaattaattggcaaaaaaaaacctattctagatttcaattttttttcacttccactatatactccttttgattttaaatataagcaaaagtgaaaatgtatttgatactaattttggactaaatacgtttttacatttgtttatatttaaactcggaggaagtaagtatgaagccaagacacgggttaaatgagtttagacaagcatgactttatatcacataattaattaatttacgttagtggaaattatatcacagtttttaatttaaattaagattataaaaccatatttttttaatctcttttaatttgctgtgagaatattgacatgtatttaacaatatggaaaaaaaaattgcatttttaatcaaaattttaccacttaattttattttttgacaaatcacttattattgttttttgacacagaaaaatggaaacatatatcaaaattattcaagataaaaaatcacaattattaactcttttagagaagaaaatttagagagtgaaaatatgaaatttattactaatatcatcattaaatttaactagtagaaagaaaattagagaggaagttaataatttgcatctatattctaatatcggccactaattatatttttagtaagagattgcttcaacatgatcttatcactcgaatctaattaaattcacagcaatccaaatgagagcaaataatttcacttcttattcatgataaaaatagaatgcattatattttttggaaagcaataatccaaatgcatctaccccatttggaaagcaattgtggacagggccacatgcgcacattaactagtttgtggttggagaagtttgaaataatctttttttttttttaacaaacaaaaataattatattaacaatactaaagcaatctcttctgcccaagatgtatttaaacacataagatgattcgaccaccacatctgagtgcccaaaataaaattagtttttttagctttcaaccaccacaaagaatataactttactttttctagtaaccgataaagagagctttcttgatttttaaataacctactattgtgttcattccacaagacccaaacacatagaagccaaacgagctgtaggaaagatcaccgcgcttttagaccatatgtgtaataaataaattgggtgaaatgatctgaaataacctgagtatccgtcccatcaaaaccaatccatgctcgcactaaaggtcaaagagaagctaaagttgcgcacgataatcatctttttatatcttgagatgctcattttcattttttattgtcttggtttgaagaaagagatttaaatatactagatttattctctagttttattgttataaatttttctttctttttgtttttactaaaaatggccaatctccaccttaaactatttttgtgaagtactccatatcaagattatatttagcatatttaactacttttttaacacctttctgttcatattcatttaggtggaaatctatcatctaataattcaaatcaattaatcctctaaaaaaaaaagaattcaaataagtaaaatttaactaatagtacaattctctgatttaatattcgatctgattttaaagatagataataattccaagtgcagccaatccattgaaagtgatggattctcttctcactgccaacaaacaaattatatccgaggagtactaataatatataaatcataccaaccacacaaatcagttttatcatcttatggctacatacatttatttttttaacaaaaaatatacttttactttctagtattatgaccgatggcgacatcctctttcttgtatcggggtttttgtgtagtttcatcattgttattacttctataaagcggtgctcccttgcttaagcaccagatactttgtaactattgttggttgtttcattagtagcacgtcttgtgcacggtgaatcaccttcgttttaataccatattccattttggcttgttaatatatatatatatatatatatatatatatatatatatatatatatatatatatatatatatcaattattataaataattatatttttttttttaaaaagctaactaacccatccaaattgactcagaaagaatcgaacctcctttagtccagttttaacccgtcccaacaatgaagaccttcctacttaccgcaaggtgaggctccgccctttccctagaatccactatgggtcagaggagctactagtccaacttcttgagcagccgagatattgaacaacgaacgagcaagctaccttacctcaccttgagatgagagggaaggttgatttgactcgagttccaaacctgatctttaatcctacaccagttaatgatgcgatgggataagtttttttttcatcaatgatggaataactaagattcttttaaaaaaaactaagagatattaaggaagaacatacttcaagatctccaaccaaccacatggattaagaattatattgtttggacattaaaaatgcatacatcataatttcatgcataaatcatctatatttttctcaatcactctcaaacattaaaattttgatgataatgtatgatttccttattacgaattactgttaattgtctaatagatttacaagaatcaaaaggtatcctttcgtgttgcagtttcaatttttaataaaatatcttttactttagtttaatgtgatgtattcctaatcatctttttggtatatactagataatgtaaaataacatatattacgctctaaatggttgatctcaaaactactcatttatcttgaatatatattagcaggttaataaggacctataccttccactagtttttaaaattcttcctacacaatgatgacaaatcattgagctctcaacactacctcatagacaaaatttgtttaacaattacatttattttaatataaattggatgtgagggatatgtatccaaccaaactcaatgggtaccattgtgttcaaaaatgctattgctttatgtccaattagtgcttagaagccaaagattagggatgagtggcttgagttgattgttcgcttttaaatggattcgacctttgtctaacatgcactcaaatatgaacataaaatcacttccaatttcctttatctaaaagtatttttagtgcaacagtggtagtaagatcaaatcaaatgtcaactatacaaattgcagctctaattcaacatcatttcttgaattcgcaacattaattatcattccaatattccaatgctagtttagtgtgatgaattttcgtattctgcgaatctcattataggagacttgaacaatataaagttatttttgggaaactttcataaattttaattttttgggtcaaatttgaaaattgaaattaggggtcaatttgcaaattttgagggctcaaattataaatttgaaaaaattgcagggtaaaattggaattttaaaaaaataggggataatttgcaattttttgaaaatttattgggttcaatttgaaaatttgaggaccaaaatgcaaaatttgtaaaacgataagaatgaagaaatttcaaattcttagcttttagatgtcatttgaaattttctaaatttaacttgaacaaaatactttataaattttcatcgttttaaaaattctccaaattatcatcttaacaatgaaaagtgaattttatttttgaacaagcaaaaataaattatatcaacactgactgcataattgcttcagcacaaggcgtgccaaaacaatgaaaagtgtttaaaaagtcttttcgtcaaatttctttaaaaagtgtatatgttaccatttaacattgacgagacaagtgtaaaaagtgtttatgacaagaaacatgattacttaaacatatattctcccttttgtttccgaatttaaacataattttggaaataagtcattcatgaaaatcattataaatcaagtaatcgatcgatttcgtttcaaaccaagactgaataatacacttggatattctaattttgtgagtagtgaatttggatccaccaactttaatattaaatgtcaacataaacactttttagccgagtttgataaaaatacattaacgatgagaatatgttatgacttaaagaatcaacctgttaaaaaaaaaacttaactaactttttaaaaacatctaatttaaagggaaggtatttgataaaaaaaatgtaacaaaatgaaactgaaaaagtaactaagcactaaaagtgcaatgtactcttatgttttacatgtcatttaaccacaagagaatgattagtttttgaatacttgttttcagcaattgagtttagtgagaggttgagctactttgga

SEQ ID NO: 4046 - DNA, 2378 bp, Medicago truncatula
  Intron number 1 from transcript Medtr8g139050.1 (locus Med tr8g139050) derived from phytozome v7.0 (chr-ID MtChr8; po s 33819739 to 33822116 reverse strand)
caaaagaagtgaaaccctacactgtaatgtgattttgattttggtatcggtattctttagcattaaacattcaagataatacacgtttactcctataatattagtaattttaatttagatttcaaccttgtaatttgaagattttttcattttggactttcataattttgaatgtacaaaattgatgatataggagaggataaatcgaaattctctcaaattataaggggcaaaaatacgttaaattttgtaatttgatgtcatgaaggtccaaaaccaaataatcttcaaattataaggttataatctaaacaattttttttacaaaagggtaaaccataaatcgttaatattacagagagtaaacatattgtttttagaatattgtaatatacgttttaaaataagtattattttaatcaaaaaaaattgtttcaaaacggaggagtaaattgaaccggaataaaaaaaaaaggggtcttgttaatcgaaactctagtcatattgattaaagaattgttaaacaaagctccgatgatattggttaaagaatttataaataataatttcgtaataaaaatcgtgtgccaattaccttcatacatttcatctaaaagagataatttaatatcgtgtgacctattgagtaacatatcagatattaataagaacagatatgcacttgatcttagccaagggccgagaaaggtatgggttggaataagggctggcttctggttttatatcaactgtctaatcagtttctttcttcattagccgatgtgggacttttatgcagtaccattttgtgactgactcttacacaccatctgctgctatgtttcgtttcccttacttaaaattttaacgtgatgcctccagtattaaaatggtaaataaatatcatatctcaaattaaaatcaatcatacaaactatgaggccacacacacaaaattttacaaactatgcaatcattcatatctcagaagttgaaagctatgttcacaatcagggaattcacttaataacttatggctcttcccaagcattatcatcagaaggaatttcccctgttaccaattcagataatattactttaaacctacaaacactgccctatatatgctgaaaatcaccccttaattcatataagaggaactctgagttttgcttccaccaatatcagctattgtgtctaagcaatatcttataactgttattaggaacaaatagttactttattctcatgtagttatgcaaccaccatgtaccttactttgaagatcatccaccatgacaagtccttaatgtaactttttgaaattttaacttctaatccagaatcttcttaaatactagtagttgctaacaagtttttaccattctcaggatcgaaactttaagtcattctcccaacttatcagttttaatgctcgacttcacagtttagttggtacttttatcctcaaatttgaattatagctggaaactaaataactatgacttagctcattaagttaatgatgaactttatggaaaattttgcagttcaatcctcacataatacacacttggagtcggaggatactgaaaagctataaactatgacttataataaacacttgaacagatatattaataaaaattcaaatgtcttgaatttttggaaatattgtgtggagctgtaattaggccatctatatcataccttgatcaaatcaaagttgtagaacacaatgataggaataaaatgtggtattctttccatcctctacttctactacacatattgattgactacattactgcttaattcatgtattggttgacataggttagtcctaaatttgtatatgccattggcacgttgacacgtgttacataaatttgatgcgtgcattctaaggcaaccacatgcctgttagacacatggcaagaccttgttgggtatagtagcagaaagtacaattgctccatgctttcatcacagtaaccaggtcatcacagtaaataaatacatgctttcattatttcataagctaattttatgagtacatgactcaatctatatgcttccctttctttaataccacttgaatatatatgtatgttggaaactaactttttcattcagaaatttgacctagtacaatgaatctaaagagcttgtaagctccaactttttggcttcattgttttggacttatgtgttgacatctactaagtataattgttgatgtggttgaaagtggtcccatcccttaaaatattggacttatgtcttgacatctactaattaatatctgctgattaataattctgtgtttgaagaaaccatctagaaagtgactttataccggttgtttttttaggtga

SEQ ID NO: 4047 - DNA, 1255 bp, Medicago truncatula
  Intron number 2 from transcript Medtr5g069030.1 (locus Med tr5g069030) derived from phytozome v7.0 (chr-ID MtChr5; po s 24880113 to 24881367)
aaggtattttttcttttactttttactaattagtaatacttagtttgttcaaattcctctactctatattgttatagttgttatttcgataaataacttatttgctgcttatagcacaagcacatatatgataagtgcttccatgaagcacaaacgtggacaccggactcatccacatcaatagtaatttgagatttacggtatatcggcgctttaccactattctgtgtcgaaatttacgatagacgatacaaaacccaatacgattaagcaattttgatatttccgaaatatcggcgagattgcacaattccggtatatcagtcatgatgcacatatcggaattctgcaattttagcgtgtattttttatgataaaggccaaaattatattttatcgaaactgatgggtcggtcaaatgggtagccccaatataataatataatacctaaaacctatgatggtcctgtcttagtagaatcggaagtagagtttgaggatattgatttagatgattcaatagaagaagttgaaggatgtgcctcactatctgaaaatgaggataatgattatgttggggaagaggagaataactatatcttttatcactagttagaacttagaactaccaattattagttgttttgaagtattcagattttgagtttaagtatttttttaatatctgttttttgatttctgcaataatgtatgcaactatgcctcatgctttattagttgtttgaactcttgagattttgagttttatatcaaatcaaatcattttcaatttctattgatgtagcttttgtttctttattttttatttctgtttatgtatcttttatttgtgtttagcatgctttatatgcccgctacgcaatccgctatttgtcatatcggatttttggcgatccaatattttccgtgatcagatattactaacagagtctcagaaaacttatgccagtagataagctcaaataagtcaatccaatccggcttgtaatttatcacataacaatagcgcggtttgttaatattctttgtattggttcttatggacaagtttatcaaacagatagctttttctaagttgtgtacttgtgtttctttgtttgttaaaattaaaaaatgggcactgcattgtttttcttgttttaaagtttaaaatttgacaaatgtagtcagtctcatttaccttgatgctgaagagtgtttttttttttttgttgttgttgattgcaggggctga

SEQ ID NO: 4048 - DNA, 3162 bp, Medicago truncatula
  Intron number 1 from transcript Medtr4g104540.1 (locus Med tr4g104540) derived from phytozome v7.0 (chr-ID MtChr4; po s 22873285 to 22876446)
ctctggaaaatccactttgcttgatacacttgcaggttcataactagttacttcattcttattatgctgctatatatgtttctttgtttgtgacagtacttttttttttttttatgctatgacttgaattgcccaaacatgagtaaattcaaggttttttaaaaaccacaatatcatgttatttggaagaagaaaaaatgttcaaccttttattggtttgatggtttctcactatggtggtacacaaattcttttattcaattaggattatgtataattaaatgtaccaaaattggatatttcccttttgagctttctttctgagactgtttgaagcttaattgttttgtttagtgtattgaatttactagtttgatgtttaatttttgttttattaaaaaaattcaactcaattctggtgacactaacctaagggcccttgttttaatggtttggtctgtggtggggtatgatattgttgtctaacaataaaaaacattacaattatggaccatcccgaaccaattctgtcaagtcaaaaatttatttgctattttgatgatatttggacttatttttgtacttcttaatcaccaggaaaaaaaattggggtttcttataaaaaatatacagatatttacaaaaatacgttagtgacctttccactatacagctacaaataatgaaggaagtggcattcagaaatccaattataatttaactaaggcattatgggaagaataatattaaggtagttaaaattgcttatattccctcaaaataaattgctcatattagagaacacaaaaggttaatgttttttcgcttaggacatgttaaaggtcacatgttaaggaatctatagatgcgaagggctcccttcatcctttaatataagggtattttgtccaaatcataagtattaagaaaaattgtcgcagtaataaatttatgtgaaaaatttgtaactattactaaattgtctttttaaaaataaatttatttaatgttgatttttatattctaagacagttggtagtattatactctttccgtcccaaattataggatgttttgggtatttaacatgtattaagaaatctaattaattttctatgagaaagagatattatgagttattctacaaaattgtctttaataaatgatataggaaagataaattaaaaaattgaaaaaagttaaagtaataaatagttaagggtatataggaaaagtaacattaagtttcattggtattgtaaagagacttataatttagggttatgttaacaagtgctctagtgcccttaggacacttgttaaggaaatcgaaattaatatgtttacattggattcaacaacattttgactttgaaaaaataaaaattcctcatttttcatcatttttcaatataatatttttatttttatcctcttaaacaatgccctaaaggtactctttagcatttccctataatttaagacaatttttttctcaaagcaatttataatttatgacgcagggaatattactaaagggtatagatggaaaaaagataaatgaatgcatctaaaaatttataaatagtattatatttaacgacaaacctatttttttaaatagtcttataattagacacgggtgaaatatttattgaagaaaaaattcttcaaaatattttaaaaataaattaacacaatttttaataaataatttatatctttgcgacactaagatgtgtatttaccttttgcttatcttatcttatgataataaggaaaagaggggtgcatggagtattgatttatttttttaaatctcgtttttatctttttcttttctactgtgttggagatttgctcttattgtagagttgggtaacaaagtggcggtggcaactgtttctgtctccaaaatttatttccaaatctttgacagctgcctttgaaaagaacaagttaatagtagctctctatctttatgttattaaattttggtggttggaattgtgtgattggaaaattatattcaatcacataacctaacttaacttgtggattttgaaaagggtaggttcaattagcatgagaatctaggtgtgtacaattaatcaagtatatttcaatagaatttttttatttagtcttggctaaaatatggttttatttcctgcaaatatgcctcgttttggttttaattcctggagggattattttcaaaaacaaaaatttttgcagggaccttttttaaaaacaaaatattttgcagggacaaaaaactacaaaattggttcaattataatgtgtcacgtatgcaaatcatcacaaaaatggggtcagggactattttcaaaaacaaaaaattttgcagggaccaaaaacaatttttttttttacagggaccaaaaccaaaacgaggcatatttgcagggactaaaaccatattttagcctttagtctttaatatagattaaatgcattattttttatatgaatctaaaaagtcaacttccttttgtaatagagaccgaaaagaatatatatccaaaaaattattgcaaaagagtttgataaacatatacatttcattaccttcataagagttcttttatctcaattcttagtttttaaaaagaaatggaccttagtttagatttgaaggcaagtaaagtttgattaaacaagtgattgaattcaagtgttaataaggttcatcaaatggcaaatcgttcggaaaaacgagaaactttagtcatgttacccaaactacggtttataagttatagccatgcattggtgtttttccttttcaccaattatcaaattccatgaatattgattgccaaaacacactttaaagccccatggcccatgctggggaccatggtttttgtcttctcatttgcactataatggaatttgaccttttcacctaatcatcacatatcataaatggttgagtgttgcataatctatcatgcttatcatccagtgttagatgaaattaaaatcatattagcatcatcattaatcacaagataaaaaaggagtaacaaagtttaatcaataatacaattatccatatgcaatttgctagttgatacataacttttcagggctaatctaaatgtccaaatgctgttgcaggtagacttgcaaaaa

SEQ ID NO: 4049 - DNA, 817 bp, Medicago truncatula
  Intron number 2 from transcript Medtr8g105470.1 (locus Med tr8g105470) derived from phytozome v7.0 (chr-ID MtChr8; po s 23307861 to 23308677)
acagatttgttccaatcatccgtgaacagttgcaggtggtttgaatttctcatacattttaaagatttttctattacattatctgttaatctaatggttaatttttgccccttaatataacttttcaccctaaatgttgatcctatacctactatcagttacctgcttttttcttcttttgttggttatatgttttggcgtatcctgtcttgattctttgcactccattattaattttgattcatcgctggtttagacatggtattgaaagcctgttcactttagcattatttaaagggaaaattttcctttttcttttaaaaacaaatcactactacaagattttaggtagtttgttcaagctttcgaaagaaaaaagttggaatttgaaagaaaaaaagaagagagaaacagatatttaatttttttacctgtcaagtaacctaatggttagaaattcacctcttaaacgtgaataagtggggtgttcagggttcgaaccttgaccccgcatattataatgcattgtccctgtcaactgagctaaagctcatgggaattattctaataagctgctttgagtagtttccaatgataaactgtaattttaattacctttaaatgcaagaaaagttttactaaaaattgcaagtttttaacaaattgaaaaatagtttctatcgtatgtaaaatccctaaaaaggaaatcacatatacaacttggcttaaatgcttctgtgggtaagtaacaggtactatacatgacataaactccgtatatttactgatatatactggctgtttcaggactgggagg

SEQ ID NO: 4050 - DNA, 1595 bp, Medicago truncatula
  Intron number 5 from transcript Medtr2g033780.1 (locus Med tr2g033780) derived from phytozome v7.0 (chr-ID MtChr2; po s 9311911 to 9313505)
aacgacaatacaaagaggccgctgcacagctggaggtatctatatataatatcattgcagttttttcatttataactgtgatttttttaaatatttatttactgcatggtgtttgtcttggggggatggtgttaattgtgttagaattagaagcaagtctaccgtagttctgaatgtgtgtaatggaatgatgcttatgattactgtgtaagttaataatgtatttgtagtttaggagttggggcttgtgagtagggtttaattatggtttatttaagattacatagtttagttggttagatcatagcttttgaacattagcaggaaacctgtgctgtggagctcaatgtcgcgaccttattgtgcatttataaaaggttgattccacaactcaaacttgtggccttctagacatacagtagctactccaaatattgtgccaagggtcctgtctggatttttttgaaaatgtgttagtattgaaaggtagaatataggggagtcaaagtaattaggattagttaaggtatgtaattagttagaggagactcaattagataaatagggtagatactaaaaaaggccaaaatggatattcaagtattaggtttttatattgagcctaactcatctacaaaaccagcttgtaaggttagggtgtaactctttataaattcttttaaggccttgtctctttttataaactcttttaaggcctcatctcttttcaaattgggttttagttttttcccaatatcaggatatcgtgtttagagagagaaaaacctttgtgaaggttaaagtgtaagactcatgaaggataattctttctttctccttatttccattcagttgcgtttaatccataaaaataatctgatcatttactttcgaaggttcttatcaggattgttacgaacccaaagaaattgaaatgaaagaatgatagaaagatcaagagaatagaatgtctaaatgaaaattgaaaagaaaatggagaataaaattcatcccaagagtttctcctttcatatacaactatgaaatgcgctgaatcctccttttacccatctattcgtatttttcctatttatgcatgatatcctctctaactacactttcctaactatttaaccacttagcttctctaactgacatggagggatggcaaaaggttgttggatgttttattttgtgtagatatgtttttactttttggtaaaacaaaatatctttatacttcatatctgccttttctaatagaaacacagttcctgttgattctgtgcttttggatgcctgcctcgttttttcttttagcttctggataggttactttgtcccccctggtgagacatagcttggttattgtcgttgacttttagcttctggataggttcagttgtacttgctccttagtaaataataatcttttatgaattccttagttttcttctttctcagggagaaagtaggcctctcgtttttaataaactaatctataaaactaaatattttattatttttgtttttgccttatttttatttatttatttatttatacagtaatttgtatttcaggcagtgaaccagct

SEQ ID NO: 4051 - DNA, 2770 bp, Medicago truncatula
  Intron number 1 from transcript Medtr8g137640.1 (locus Med tr8g137640) derived from phytozome v7.0 (chr-ID MtChr8; po s 33013049 to 33015818)
gacatagcaaatgtacacttatgccactaaaaattcatacttatgcaattttaattcttttcaatgaatttttggatgaaaatgccaaacccattttttttttgcaacaatagaaaaatgaaaaaaaaaatttgaaggaagaaaaatgaaaacttggcatgtgtattataaaaaaataaaataaatgaggctgaaccaacaacaagacaaaagttgtgctcaaatttgtgtttcgaaaatatataatacacttaaaattagattgttaaattaaattatattaaattaaataaaataattttgtcaaagattgaattaaagtatattaataattacatcagttaataataatttatttatatccttaaaaaaaattaattatatagaaccaataaacttttaactaaatataataaatcatattttatttttaagtcaagggtatttttgtcttttcaaaaaaaattgcatctctttctcttctatttctctcttctttctcttataccaaacaacccatcaaatctactcaatttctcacctttttctctcttctcaacttctctcttacctatttttctcttcacaacttctcttataaaccaaacacaccctacatgtgcgaagaaatggaggggagttgcaattttttcttattttccatatttctccgtggttttgatatgtagccactatttatttaattaattatgttgtcaagtattttgttggtgtagcactgtagctggtcgttaacgaaagcaagtctataaggaagccaaaacgcaactgtatccctcttcctatttgatccctcttttatatataataataataataataaaattaaactattgaaattgaccactatgaattgatttaattgaccaaaataaaatattttaaatcattaactaagaaaataagttaatcaatttacatgttaagaaattaattatttgtatattattttttaacattatttttatatgaagttaaattcaaataaaataaattgtatatcaacttttttgtataaggagatttcagtcatttcaaaaattaatcacatttctttctcctctatttctcccctttctctctagtaccaaacactatgtgaaatccactctatttctcatcaacttctctctttccatactctctcccacctctttgtctcttcccattttcttctcacaaccaaacacatccaaaatttcaaggcttacgcaactctctagtaccaaacactatgtgaaatctactctatttctcatcaacttctttctttccatactctctctcacctctttctctcttctcattttcttctcacaaccaaacacaccctaaaattttaaggcttgtgcaatttggtgtagctagctagctatacacattcaagtctttccatagaaaaacctgagaatattacttgctatcggccaacatgtttttctaaactttccaaagtaaaattgtgtatagtttattttgggagattacagagctgcttatgcagcagaaaacacatttgtacacagccgtgtaaagtattatccaataagttctcgtgagcttaattcagttggtatgaacaatgcataatatatgtaaggtccggagttcaaatctcgaccaccataaaaaaaaaaaagtagtatccaatactattaattcagttccaagtttatagaatactattaattcagttccaagtttgagggattgcacgattatatatacccatctttataaattataatccatatgctcattttttttttgttgatacaaatatgtacattattatttatatttatggtgtacaaacgaatgaatccaaaattcccaattgagttaaagatgtagatctcatgatggacattctgtcggcagtcttcagaaagtagaagatacaacaataataataataataataatctatacctattaataaaggaaatacttttttttggtgtagcctttttttaaaaatcttaaattgcccttacacagttatctatcacacttaacctgttagtgataaaaaaaaactgctgcctttctaactcaaccgctactacgctacactttaccaaaacatttacaaacaacgctttattcataaatacaattttcatctacactttttcatagaaattcctcataatctcaccttttctgcctgatatctacaatttctaaattgccaaattgcatcttataaacatggaatgatgatttgcctaactgtgttttgacttttgtagtttttgagggtaaaaaaactgaattatatttcttttgttcatattaatttcatactaatttttactcgatccacaacacacatgcaggaaatgggaaatagcacaacacatcctattcttcaatatgaactatgacatatttacacatatcacatgggaaagattcctaggctttatgtaattttgcttggtttaattgtttttagttcttggtaataagcgcaagagcaatattgattcattgatgaattcaaaggtacatctaaatttgatttttccggttcatctatttttttttaaatttacatgtgtagatgtctcagtgttgtttccaatgtatgcgtttgtgcttatagcgaatatcctatcaccatctcatatatgtggatgacttttaggttgaatttctctcatatcattgtcgtctactatttttatctctctaatagtgacaattttttttcgtgtttccacatgaagcagtccacaagttc

SEQ ID NO: 4052 - DNA, 2276 bp, Medicago truncatula
  Intron number 3 from transcript Medtr6g067190.1 (locus Med tr6g067190) derived from phytozome v7.0 (chr-ID MtChr6; po s 12408625 to 12410900)
cttcttttctcgagacggtaatgattccttccttatctacttaattaagtgttttctaaaataaacagcgcgtctcttattgtcaacttaatagcagcgcgttccataatgcttcttttctcgagacggtaatgattccttccttatctacttgattaaaatggtttcaaataatctgatctgggaattttcatccgtaaaaaaaggcattcattatgtgacctttcatgaggcatttgatagcaaacaatttccaaatgcttgacagttgacatctttcagagacatctttgatagcatatagaatcgtataacattttgtacagaatattatgataatttgtgtcaaaatcaagatattttttggacatgggagagaaagttagaattgtaaattgtgtgatcgtaacatagattgtggcaaaattccaagtagaaacctcaacaaccaagattttccaccaaactaagtaccgccgctctttaccacagacctttatgatccccctactagccaaagttgtttctcgttatttagcctcaacaatataattcccagtgcccttttttttcctttcctgagacatggaatactagatggagcttcaaaaccggaagtaactttagtttgtaggtggagttctcatacctctcagcaggttttttgttattctacgcagtgttgtcaaatatcggccatgtcaatattttggattttcgccatggtttgcatttgcaaacaatatcactgactctaccaggtcccaggtatagtatatcaactgctttgagctaggagttaaaggatttggaggtcccgggttcaaacccaagcaaagaagaaaaatacaaacaacttattactaacaagcaggaagtaatagttttatctttctctactttatatttctagtctaactcctttttcactaaacctgcacacaaattcaaaccagtaaccttgtccagtaccaaatccataacactcactttccatataccaaaagtaaggttcctatcaggaattcctttcgacttgcccttcaaattcaccgtctttggtgcctattttatgtttactatgaagcgaattcagtccttttattcccagcagtccaattacttgtcacataatgtgcaatcgtttcataatgtatcagttccatgctttaggaatgccgtcatgatagcatttcatataaagaacaaaccactatggcgtgtttgttgaaaagaaaacatgtaattcaatgaagttaattacatttagtaataaaatcttaacatattttatgtatttgagataaactcataggatattattgagtgagaaacattatgtatgtttgtgtgtactaggttcaaagtattctagccaatttgaaatttataaatcttattaccataatgaatctcattttgaagcatgtaacatatacacactgggtacatgtatatgaagtttttcatttacatttgtttcttgttaaagtgtgagttagtcctaaccattgttgttaaaatcctcatcagaatcctaaaatccaatgattttgcgattttctgatgccttaccgatttgaaccgtaaactatgcaaaatccgtttgaatattagtgtgtttgtgatgcgatgtatgcttgtagcatctaggttttgaatattatgtgggcttggttattttatatttgagatttgggactttgagtcatttatgtttaagttttgtagtttgttttatgtttaaaatttgactttcagttgtttatgttttaatatctgagaattggttgttttacgattgctttaagattttaaactttaagtagtttatgcactttatagtatatatttaatattatttgagtaaaatccttcaattttggtggcgatcttcgattttgcgatcatgccgtcccctttggattctacaatatcaattgagtagaatccttcaattttggttgcggttttaggttttgcaatcttgctaacctctttcgatctaaatcaaaatattattttgacaaacttgttcctaactcccaaggtttcctgaaatgtgttcgtaatttttttcaatactggttgtgcttccttttaactttctttctggatacatcaacaataatttttcacaaaagtgcaattaagctaatatttccatgttgaaatgggaaattgtgttcttttaagctatatgtgatgaatgattgtaatatcattattcactatttttagacaagaaattgaagctgattacattcggcttctat

SEQ ID NO: 4053 - DNA, 366 bp, Medicago truncatula
  Intron number 2 from transcript Medtr5g064830.1 (locus Med tr5g064830) derived from phytozome v7.0 (chr-ID MtChr5; po s 22545203 to 22545568 reverse strand)
ttcagacagaggattcttactcatttatctttacagtaagtcatatgttattccttcactaaacttaagagttttattattttgacatgcaaatttgacaacgatttagatggttaatgaagtttaaactgatgtcaatgtgttgtaaataattaactatcactgaacttaataacttctaaaagccacaaattgtgctcattggtttggttgatttgagctttcatttcattggactagaaaaaaaaaaatgtagtgatcaaatttgagatggtaggtattctgtgttataaaattgaaattatgtgattttttgttaataattgaacaggattacaattgttccattgagttcttccgttcgcc

SEQ ID NO: 4054 - DNA, 8312 bp, Medicago truncatula
  Intron number 4 from transcript Medtr2g087920.2 (locus Med tr2g087920) derived from phytozome v7.0 (chr-ID MtChr2; po s 19739993 to 19748304)
aggatccaacagcagttcagagaatcaaacagaaggtatgccatttaatatatcctaattttacaaacccacaattaagaattgtagaataggaaggaagaaagaaataaggtgagtatatgaataatgaatgtgatgaggatttggctcctctaaaggttaaagtgcagagttgtaaccgcaatcaatggtctggatttaaacaacttcgtaatttgttattcatgtgcatgcacaaattacaatctataagtgttgtctttttcaataagtggttattattgtacgccgtactctatcgttgaaaattgcacccccctcattttagagtagacaaattcaaaatctgacatccaaagagagatttatactccctccacaaaggattctccctttgtcttacaaactactttattatataaaaatctccattttctatcctcattcccccatatttgaagttggtatcctgtgtaactaacttctctattttatcttatctaatatctcaactaactgtattttctaattgttcccttgactactatcctaatgccacctcttcaaaattcatctcgcttgaaggtggagattggggagtcctgttggtcatctccccatcatgcatcaccccttgactcttgatagagcctgtgatgggttcaattaaacaagatgaaggaaatgatagaagaaagatatgaaatgatataaaaggatgaaatctgcaattgcaattactaagatccacaattacaggagaatgacaaagtatgaaaaatgagtaacaaactggtagtgaactaccagccccaaaagcacacaggcttttcccaaatcacctattgtgaccccacaagatcttaacagaaaaaatagtgaatgaatccttcattcctctgacacagtatatatagcatcctcatgcattcttttccacgtcacccttcaccccttttgtccttttcctagtgtaaactttccacacccttggttgaggcccatagtctaagcccactccatttgctgcattcctatcaattccctcctccttagaaacagtcttgtcctcaagactaaaatcaggaaattgtccacgcagaaattcatcatcctcccaagtgacatcatccaaagtcttgtttttccatttgatcagactttgatgcacttcagtacctgcctgcatagttactctagatcccagaactttctcagggtacacatcatctgcatcattaacttccagttccttaggtaaatcaccttgcacctgatactcccctacagccttcttgagtagtgatacatgaaacacagggtgaattttagattccagaggtaacttcaacttgtatgctacttcaccaattctctgtgtaatctggaaaggaccatagtaccttgcagctaatttttgattgattctcttcacaacagattgttgctatgaggtctgagtttgagaaaaacccactctccaacttcaaagcacaagtctctcctcttcttgttagcataccttgacatttgttcctgagccttcatcaaatgcaatttcagctgtttcaaggcttcatctctctcactaagttccaaggctacagcagcgactttcgtttcattagagaggaatctgagtatagtaggaggttgtctgccatagaccacctcaaaaggagttttcccaatagaactgtgataggtagtgttgtaccacaactcagcccaatggacccaaagagaccatgttttaggatgatcagaagcaaaacatttaagataactctccaaacacctattaatcacctcagtttggccatcagtctccggatggtaagctgtactcatcttgagtttagtcccctgcaatttgaacaactccatccaaaaatggctcacaaataacgggtccctgtcactgatgatggaactaggaataccatgtaaccttaccacttctttaataaagagttcagcaacacattttgcagtataagggtgtttaagcagcatgaaatgactatactttgagagcctatctacgaccactagtactgcttcaaagcctctagatttgggtaatccagtaatgaagtctaaggataaatcctcccagacagcattgggaataggaagaggttacagcagtcctcctggtgaagtagcactatatttctgtctttgacacacatcacaagctctaacaaagtccctgatacgcttctgcattcctacccaatacaaattatcagataaccttctgtatgtcctcagaaagccagagtgtcctccagtgggtgtgctatggaattcttctaacagtaccggaattgaaggtgactcaggtgaaattaccaatctgccatgataaaataaaactccttgtttcacctcaaatcctggtttcttgtctggtgcctgttgtacttcttcagtcagcttttgcacataaggatcattggccaattcatccagtaacttctgcttatcagcccataaaggaacagagacaatagtattcatctctatttcatcatagcatctggacaatgaatctgcagctctattttccaaccctggtttgtactttacttcaaactgatagccaagcaacttggccagccaacactgctggtcaggagatgagattctttgctgtagaaaatgcttcaagcttttgtggtctgtgtacacaatgaactccctacccagaaggtaatgtctccaatgttgaatgcataaaacaagagccattaactctttctcatacacagattttgctaaatttccatctgaaagtgctttgctgaaaaatgcaactggttgtctttgttgcatcagtacagctccaatacctcttcctgcagcatcacactcaacctcaaaaggcaagctaaaatttggaagtaccaagacagggggagatgtcatgattttcttcatttcattgaaagccttcacagcatcttgattccaagaaaaattatctttctttgttaactcagttaaaggcttcgccactttaccataatccttgatgaacttcctgtagtacccagtaaggccaaggaatccacgcactcccttcacattctttggttctggccactctaaaatgcacctgaccttctcaggatccacagccactccttccccagaaatcacatgaccaagataatcaatttgggcacaaccaaatttacattttgactggtttgctacaaagcaattatccatcagcacagataagactatcctcaaatgttgttgatgctccccaatatttctgctatatatcagaatatcatcaaagaatacaagaacaaattttcttaaatatggtctaaaaaaaccattcatgtggcctaaaaagttgcaggggcattcatcaatccaaaaggcatgactaagtattcataatgcccattgtgagttctaaaagctgttttaggaatatcactttcaaaaactctaatttggtgataacctgattttaaatcaattttagaaaacacagtggctccattaagttcatctaataattcatctactataggtatagggtacttatctggaatagtttccttattcagtgctctgtaatccacacacatcctccaagttttgtccttctttttgaccagtatcaccggactagaataagcgctcatgcttggtctaattactcctgccttcaatagttcttcaacttgtctttcaatttcttccttttggtgatgtggatacttatacggcctaacattaacaggaccatgttctggaagcagattaatgcgatgcacctgagtcctctttgggggaagttggatctgctcttgaaaaacttcactaaattccttcaagatggtgttcaccccttcagaaaccaccattttaccagcttcaattgatttaaaatgtgaccaccaccagtccattcccaatctgctatgagtatcttccagaaatgtgttcacgtagctttgcctaacatctttgttgccttgaccctgcagcttcacccatttgtttccatcagcgaactccatagtgagtgctttccaatccataatcacctgaccaagtgtgctcaaccatgcaactcctaacaccatatctaaaccacccaactccaaaaccagggcgtcaataactatctcaatctctcccatcttcatacgaacacctttacagattcccctagttaccactttatgtccgtcacgtagcttaatgcatcttgctgctaccggtgtgatgaccagacctagcgccgttgttaccttcggagaaatgaagttgtggcttgccccactatcaatcaatactagaagatcaacattatcgattttgccctcaaccttcatagtacgatgttctcccaggcttcccaaaacccccatagacttgcattccacctccacatcttcctcgctttcttcatacgcatcttctaacgtgataatctcgccgtcttcatttattgtttcgccttcacccaagatcaacactcttagcgacttctcaggacatttgtgtagtgtggggtggtacttacccccacatcggaagcataagcccagggctcttctctcagcaatctcctcatttcgcatacttcgtattcctttcccattttcagaatttccagatctagactcattacccccctttctagccgttgatgcacttgaagctgtaggattaccattagatccaattgaacctgttttgagtcgggttagatgtatgtgttggatccctcaggaatgacccatttctcccttttgctgacccggcccaaccactttggcccaaacgctcgtatccacctctcttcagaacacgcttctctccatcatcatcttcctccctcaattcttcttccacgtccttcgcgattcgcatcatctccattctactcagaggatttaacgtacgaacccttcggatctgtggttttaatccactcatgaagtatcccaaatattgttcctctggaagcctccccacttgagatgacaataattcgaaagcttcaacaaactcttctacactccccttctgacgtagagtggatagttcctcgaacgggttctctaagcgccttccgccgtaacgagcaattagcgcgcgcttcagtttctcccatgagagtgcatcctctgtttccatcaaaagattgaaccaatgaatggttgaaccctccatgcttaaccttgccagcttcacacgcatgtcatctgcactgttttgtacatcgaaatagatctctgctcttgtgatccatcccactggatcgtcaccgtcgaacaacggaagcttcactttctttccggcgagacgtgattcactctgacttgaacttccagaagatgtttctccatcaggaacagcacctttggaactgatctgcttgctcaattccgtaagaattaagctctgctgatgcatctgttgagcatgttgttgcatctgggatgcgaggctttgcagtgtggttgtcacggtttccatctgagtttccaacgcatctaaacggtcacccatcttaggttttcttggcatctacaattttccggtgtgttggtggttttttgatccggtaggtcggaccaattgatgggttcaattaaacaagatgaaggaaatgatagaagaaagatatgaaatgatataaaaggatgaaatctgcaattgcaattactaagatccacaattacaggagaatgacaaagtatgaaaaatgagtaacaaactggtagtgaactaccagccccaaaagcacacaggcttttcccaaatcacctattgtgaccccacaagatcttaacagagaaaatagtgaatgaatccttcattcctctgacacagtatatatagcatcctcatgcattcttttccacgtcacccttcaccccttttgtccttttcctagtgtaaactttccacacccttggttgaggcccatagtctaagcccactccatttgctgcattcctatcagcctgagctaatgcaatcagcccaaataaggatttggttaagcaagtgtctagtggtccttaggcgtgaaagttttacaccagttgagagagaaagggagagtgggggaagaatgaagtgaggtaatgtgtgaaataatgcactggcagagagagagtaaattagggaatcatgtggagaattcagttatcatatataatcagaagaggtgtggggagaaaggtagcttttggcattcatttgagaagataatgttttattgtctgcacttgaaatgttttcagcagtagcaatctagcctagaggatatcgttgtttgaaacttggaagttccaccttcttcgcgcatgatctgtactttttgtcgccctttgtgctgctcttactgccccgttccttacttcctgttactcaatttgtgtatgcttggatagaggaaccccaatctcttccgggtttcatagtccactacactctccttctctggcattcaagaatctgttcgatgttgtcgactgtggaaacattcttcttgactttgtagagatgaatgttgtgttcacaggccaccttctcgagaaattttatttatgtttctgaagtttcattacttgactagtcgactccatggctgaacataaaagctaagaattctcatccaagggtttccctttctcacacaaactatcaaattttcttaatctcttttctctctcctgattactctcatttatctaactgttatgccacctggtttactaagtaactgacttaacattctgtccctaactaatatctaggaatgaacaaagtgaccagttacagggccccaagcgcaaccatatccaaaccattttttttaaatcagcaatttggaaaaacaaattaattggcccatttcatattcatacatgggttgtctgatttagtaaacctgactagtgaagttgaggtccatatcctaacttggttgtctgattttcagcctctcttgctactctatgttcccccagttccattattcttgttgatttgcagtactctccttgcagtcagaagtcaaaattgcaaacccttatcccaatttgaatctcaatctgcggtcaagattttattcactcgagattcattcctcaattcccatacaccttggcaccttcagattttgtgacaccaagtccagcagcagtactcgtagcattcctccatcctttttgttttgcaacaaactttactggaagaggctggagttggagaagctatagacagatcctgttgttgagaacccttgatgttgtgggagttgcaccatagcccagaggtgggagtgaggccaatgaatttaggtgtgtgtggtgtgtagttgaaatgggggaggaggggaggaagagagtattcactggtgaggggaggggaggaagagagtgcaggatggagtaccagtgtactactagtgatggccaagggatgacttttgtgattccttcatttgaatgatgaaggatcctggggtgtataattctgacgtgtgagatacaatacaaagatgcaaagaaaaaaacaagaccgttttgaggtactgggaggattgatgaaactgaattggaaatcaaatcttgtacaaaactggttttgaaatcggacatgggaccggtttcagaggatatgtgatttggttttgaaatccaatcttgatcaatggttaagaattggatatgattaggttttcggaaaaaactatccatcaactgctattaacatctctttttctattatcaagcaatctctactccctgtgttgaacttgaattacctgttgatatactacattctatgcagtggtttgatttaggtgctgtggtgaatatcttttttaattaacttccaccttacatccattatagtggaaatatttacatttctgtcatgtaaaatatttgaccctgctgccaggaggctaatgcatgcaaacaatgatttgcaagttatatctattgattgagtttaacttttttgtttgtttgtttaacctacagtgattttctttcaaaatcaattctttttgaagttttttgttttcttcctacatcaagtaatataaatttctcaaatgcaattaatattttttatagttgcaaaaatgtcctaggaagttcatatgggttaattttgattttttttatttttttggtgtttgtttaaccaaagtgtatttcttttgaagtttcattttcttcgtgcctcttgtaatataaatttttctcatgcaatttttgtacatgcaaaaatgaaacaggaagtgt

SEQ ID NO: 4055 - DNA, 2435 bp, Medicago truncatula
  Intron number 2 from transcript Medtr3g029440.1 (locus Med tr3g029440) derived from phytozome v7.0 (chr-ID MtChr3; po s 7755489 to 7757923)
cagctgggaagaacgatagcctctacatcactgttagttggagttagggtttggttgcaagaatgaaggtgtaatttggtgcagtggtggatgttttttggttatgggggattaagcttttttaggtttggtcttaagtttttatttgatgggagttctgtagttttttaaactacgtttttttcgtttccatgcaatttctattttgtaatcttgaattctgactattcagtttgaggtcatgttgcttaattaatataattgcattttacttctatgccaatttatttttttgccaatctgttgtgaaattggaggttaagcgaaaatataatggccccttaccaacatgggcagtgatacttcacgtgaattatttattcttcatcagttaatatgcaagtgcagaaacaatcaaatgggttagttgcaccaaattttagtgtgttgttgtttttacttgatttatatgcttaaatatataaacaatcaataattgcactttgtctggatacaatttatcatgtggatgatttcaaagtttttgatgttagatcattgctctttgcgttggaaacaaacttcatcagaaaccttgattctattggttgtgattatgatcagaagcaatgaattcaacattaagtgtgttctatgtttaataaaaaaaaaatattaacaagagtatataaaacccataataattaatataggagagatggaaaggtcagtcaccatgtttcaaattcacgaagccattacactttcaaagtgctgattcagaacctgatgtaaaacttagtaaatgttgaaaatattgtgttcaaaattgttaaaattaatttattgtctatactatagcgaagtattgcttttatagtaatgctgatttttatacatttaactgttattttgaatacgttaacactaataattttaactcacgtgatttgaatgctgactttcgaaataattaaattacaaatagatgcaagaaactcatctaatagtgtataaacctgtgactattaaaattacttttaaatgtttatagtttaaattgacccacaataaagtatataagaaattaggaatgtgaatatgcatgactgttgtgcttcccactgctttagtttgtattgtaaacatacacacaatgaagcttttcacgttaggcaatagttttggtactctctaccttttattaaatgcatttgggaagttgtcgtgattaatgttgatttacattggttgccagtaagtgaaagggccatatacataatttggtcttgatgatttacattcagctatttttgctgttctatttttatttatgttatattgctgtaatgacctttagttatttatgaaattcagacttttattatttatattgtagtgctcattttgtgaacacctttgatctttaagattttgaacattattctattattagaagatatatttaagctaaacagacccgtgcggcgcacgggtcatctatctagttacaattagttttgaaagtgtatctattatttggaaatgattatgtttagtttggaaagtaatcgcatcagtgtaaccctaattgacagtttaatttcgaattgggaaaatcactcaaataaatagtttaaaaattgtatatgttagttggaaatggtttcaaagtgttgatttgattcactgcatgtgtgtgataatttttagtactttcgcctgttacttaatagttctctgtacttaatggttttccttcattgtacacacataatcaactcgggctattatatatattaacctatctgaaattttcagatagaaaatcaactctattattcaatgtgcataaagatgaaaagaaataagtttgatgctatcaatcttttgtattctgcttcttattgcttcaaatgagagccttattatagtacaactttttaccccaatgtttcaatgacagtcacaaatgtccttattatagtatgttttatataaaattatgccaaaaccattttggtgtggaaatgatttctgtgagttggacttcaaaaccttatactaattacaataattttgttaagcatattcaatgacacttcacattaaaattgtatccgatgtttcatattatattttgtatttcacacgtgtacacactttaatgtctgatatctgcacaacatcgacacatataagcatatgtataattcttattttctcaaattattactgatatcaccgtgtccgttatatgtgttagcatcactgcttcatagatcatatccttaaaagttaaaattaatattgtattttaggagtaaacagaagttatgttagttttagaagacaaatatatgattctaagaagagtataaatgaaaaaattagaactactatctaagaaggcattaatggtttcaggttgaata

SEQ ID NO: 4056 - DNA, 2657 bp, Medicago truncatula
  Intron number 8 from transcript Medtr5g106840.2 (locus Med tr5g106840) derived from phytozome v7.0 (chr-ID MtChr5; po s 43045554 to 43048210)
ttgaagatattatcaaggaagttgatcaagataacgtaagtcatttacacttgtgccatgcattgacataggaaaccccagtaggctgttaaaagaccttacagtttatatatatatatatatatatatatatatatatatatttgtgcgtgtgtgtgtgtgcaccctcgggtcactattataagcaaaatttcactttttagattcaatcattaaatgatgtatgtggtcacatacatcatttaatgaatgaatctaaaaagtgaaattttgcttataatagtgaccagagggtgtatgtgtgtgtgtgtcctcctggaaagactgagtttaagtacaaaaactggagtttcatttttaaagcttttagcttataagaatttgttatctaacatctcagtacagcaagaggcttaaatccttttaactacggattaataaaaaatatcatatctaatttgtttaagtacccattaaaataactgtagttgaaacttttttgcataccaagggaagcttgtatttatctttttgaaatgaatgtgcagtatccaagatatattataatagttaatattcatcataaaaattatttagtttcttaaaatatttggtttatactcaaagcaacaaggataaattaattgtttgagtatgttgtaatggggctatgttgtgatagtttaaaacgtctaaaaatttatggcgataaatagttctaatgattgctgttattattgccaaaatcaatcggcttttattattgactgaccttgcaaatataactttatcttcatggatatgctaattaaattaactttaggcatatggtaccctcctccctccaaaaaactgcgctgcagaacaagtttgttattttaattactgcaagaatggcaaacctcgaattgaaatgtgaattaggaaaatttcacgagattttataatgttatgctttaatagtgagggttggtgctgaaaagggtcggctacgtggtagtgtgttattcacacatggctgtgtataagaagcagaaacagccgacacttcaaataaatatgtagttatactaatgatcatcgtaatgatttcctgatggttaataattctaacgagtaatgaaaatggaattctagcaacatactctttcaaacatactttctattattgagtgagtttcatgtgaattccattagataagcttgaaccactctctgaattgtgatacatacatatagtgagacccacatgaaattactaaagaatagagaatgcattaaaatgtatgtgtgaagagtatactattatcagttttcgttcctaaattactgataagtacttgcacatcaaattcaccgtacttttagatttttaactaggtatgaatgttaagcaaccacctatatcaaggaagtattgtcagaggtgggaattagaggttgttgagagttgtctgtgatggaattttcctcaacatgcacacctggcagttaggggcaagaaacagatttggccagtgagaaaaaattaaaagagaaaagaggaaaggtaggaaaactgcgagtgaggtttgtgaaggaagtagtgatagatgtactttgagagaatatattttcaataacttttactgaacactatatacacatattgtgttatttctttatcaaaataatatcacgtatttatttatataaaaaaagtctgaaaacaactatcccacaactaatctgtaaaaaacaaccataaaagagttagaaacatgtatatctgctatatttacttttagagtcatctttgatactaccaatggcaaatacaaccactaaaagagttttctctactatgaatatcgtcaagaattggatgtgaattcatgagagataaatggttgaatgattgtatagttacttttattgagagagattttttataatgttgaaaatgagaaaaacactgaatgtttcttgaaaatgaaaaatcctatgaagagaacaatttatgatatgtatatttttttttttggtgagcaaaagggagttatccccattatatgtatatttatgcttccaaaaatgaaatgttatataaatatatatagttgatgctacatatttatcggtattgcatcccctacttttttttttttttttgataaatattgcctcctccactacttaaaatttgtggatcctccactagaagggaggtagcaagcccctcgatatgcttgcagtgtctctacatattattattttttccctagagttctattatctgttcttgtatgaatttccatttatgagtgatgtcttggtatgagaagtgaataagggatttttagctggtttttcccttcaatagtgttgtttcttcaggttcctaccacctagggacgatagatgttgacaatatgaaatatgtatagtatgcactatgcagttaggacctatgcttgatctatctattagatgttttatgatcaaagacattatactagtgaaaagtaattaattgagcaaaacaatatcacaccttaagtaaactataaatatcaaatgcctgaactctaatgatttgacaagtatgtttatattttgagttccttcccctttatgcaattatgcttcatggttttggttatgttttttgttttagg

SEQ ID NO: 4057 - DNA, 1220 bp, Medicago truncatula
  Intron number 3 from transcript Medtr3g083400.1 (locus Med tr3g083400) derived from phytozome v7.0 (chr-ID MtChr3; po s 19577981 to 19579200)
cgctgaaaaattgccggaattaaggtaacaaacaatcatatgcttgtctttttcttttataaaaagttgtggttgctcatagaacctaaaatcaacatcatcttagtcaaattttaattagtacatgctttattttatgattcaagctttttctattatgtttattgtcataagtagttacctcaaatatggaattattatttcttgttgaagcttatgttcatcgatcctttttctaccattggttgttcactggatggttttattgtttaaattacaagggattagattgcttaagagtattactagggtttttaatggtaggaatcttgagagtctatggaaaagagaaaatgttcaaactaaaaataaattttgtattgatatgcgaaagttcattacatcaaatgatagaatgagaaagacttgtccccgtgagtttaattcagttggtatggacaatgcataatatatgcaaggggttggggtgttcgaacctcggatacttcacttctacatatttaaaatgtgtaagcttccgtcattagaattgactccatttataaacgtatgttcatgtcatcataaaccaaaaacaatccaatcaaccgaagtattaaaaattgtcttcaatgagaacctttccccaacgaattgtgaaaactatcttaactcatcatcatattatccaataacatagttcctctcaaatccttattgctgcaaatcttatgaaccttattttcatttaaaaagaatcagaatcattcatcaatatgagtattttatcgatgagcacatgaagctggttaaagcaaacaacttctcttgcaaggtaatttcatgttgtggacctttgaacaaaagaaaaatgtgcacatcacaaaataatggagtcataaatcgacatgaaactccaagtttttttaaattgataaaattgagactgaactaggggaaaaatttgagtcgaaatttaacaagaaatgagacgaatcaaaccgagaaaagtattgcaacgaaaatgaaatcagaaactgataatcaacaaaaacacggaaaatcaacatgaaatcagctccaaaacatcaaactcgttcattcatccaactaactcctacctagtgtaaatccttatattttttccatatcttatatcagcttcaacatttacatgattttcagaatcaacatccgtctcaacattgtcacctccagtt

SEQ ID NO: 4058 - DNA, 2891 bp, Medicago truncatula
  Intron number 1 from transcript Medtr3g150660.1 (locus Med tr3g150660) derived from phytozome v7.0 (chr-ID MtChr3; po s 39740866 to 39743756)
ggagtgttcttgccgctattcccaattctcagaaggtgcaatttcgaatccctagttttctaattcgggttttattgtgtgttctttttgttactagatctagattttttgaatcattgaactttaggttagtggaaaatcaatgaattggcaagtccaaaacttaatttttaaactcttttctgcagcaataagagttgccaagttcattgtaaagattgtattcctaatcttattttttcttaagtaactattcatcgatgcgacacacagattaccttttgctatatataggagagagaatcaagtgagaactcatgcttctcttgcacaagctctaaataacagccgctcaatcgaaattaatggtctgatctcattaaaatgtcacgcgtctccatattctcatcccctaccttcatcctcgcttgacatatgcgctcatctttctttgatgcagctacaatgaattgcttaatcaaatttcaaaatgtaatttgattctaatcttttctaaaaatattgtttccaggccaagtaaaaaaattaggaaatcacaaaaatagttgagactaaacaaaaacaaagatgccacagtcttgtatcaatgaaaagctcgtggttataatcatttaattcaattaaataaaaggtggaaaaaaattgtagggtagtcttagcgttgataggtaatggatagaattatgcaatgccactcatgagagaccatcgattagagcatacaataccgtgttcatatgacagagtggatagtattgttcaggttaatgaacaaaggggaaagattgaagatcactacattttttttaatcctaaacattgattttgaatctttgattaaacagctactattgatggttcatatgtatcacaataaatataggttatcacttaatatgctccctttttttggcacacacttaatatacttgttcttattttgttttctattttataatatttagataggaaaccataaaaacaattcagtacgtctttcaaatttttttccgaatatttcaaaataggaaagggaatgaaagcaatgtgacattttttgtaattattgataaaaattggaaattcgtaaatcacacaggtcctttagtggtcactgtgactaggccatgctttggcatattctttgcgattgatgttgtgagtcagtttcataagttcataactctcctagtggtgatatctgggatgcaattatctgaattttgtgatactttaaggtctctcccaggaaggatttagtattagtatatcacaggcaatgttcataaaattacagtcgtgtataacgttgttgactgggatggatctcccaatcaagtagaacatagttgccaactcatgtggtgaactggagtattgagtcataactcgctctacgttagaacttttataaatagaacaactccaatatgaaatgtgatttatgttaattgttgaaatttggggcctaactcatccttaaaaaaccggcttgtattagtattagtatatatcacaggcaatgttcataaaattacagtcgtgtataacgttgttgactgggatggatctcccaatcaagtagaacatagttgccaactcatgtgctcaactggagtattgagtcataactcgctctacgtttgaacttttataaatagaacaactccaatatgaaatgtgatttatgttaattgttgaaatttggggcctaactcatccttaaaaaaccggcttgtaaggtgaagagtgcctcctctttataaactcttctcaagagggctatctatccaatgtgggactaaatccaccccctcaaagccaacacaatgaaggtgttggaggctgcaatgaaggctaaccaaaggtcgcaatttaggcgactaggggcggaccgcaattaaggcggaatttccaacattaatctgtgatgatctaccaacacctcatattgcttcaaatctggctttccgtacgatattaggatgagctaatagaaaaggacagcaggaggtattaggatgagtttcttcaccttgagtgaaaatctgaaaatacttcagattcagagttcatcaccttgagaggaaatctgaaaatacttcagtttcagagttcggagatataaattgaaatcttagaaatgaagtacgactacatgatggtatttttttctacatatgcacaagggctttaaatttataccacagataagtttaacacatgatattccggtaatagcgtaacatgatgaaaaatttgaaaactcctatttatagaaccttataatgttgcagcaccgattggagcattgagtgggctaacgaatgaattttgctttttgactttgactatgttttattacttaaactgcttaaattcaataagtaactagctatagttttgttctctgaatttttagctaatgaattgtgagtttcaattcctttagatatctttctggcttggtaagagacaataaaaatctctttacaccaaggtttggtttgatgtctttttaaaatggggttgaaaatcttaacagcgactaaatgaaaaacttcatgagactgtggtaaattactaaataaattccgaactcactatttttatattattgcacctctattatactgctaggaaaaagatgctgcattaaaagaaaattctattcagaaatcagtgtcttccttacatagacttaagactccatattctgttaaatgatcggggttattgactcacaaacgtgcatcttattgcgagctgtatgaccatcatattagctagcaaagcttttgttttcctgttaaactaacttggttagtattataggcaaacacatttgacggtggttcagctgacagccc

SEQ ID NO: 4059 - DNA, 4226 bp, Medicago truncatula
  Intron number 3 from transcript Medtr2g013960.1 (locus Med tr2g013960) derived from phytozome v7.0 (chr-ID MtChr2; po s 3363429 to 3367654 reverse strand)
gcaagaggaactttcatttggtttgagaattaaaggttacttacctcagatttatagtagctatttaactgcattctctctgagcaaacaatggctacatatctcaaatttaaatggtttttggctattgtttaatagagattattaactgaaacttgaaattgacttgatagttgaagagtttcttcctttgtttaaatttcaatttactctcctttttatttatcatctcctcacaaggggttgtgtgtttgtgagcaacagatgcctatggaaagctcaaacttactctattataataagttttagttctattagttctatatttattaacattagctcttgagtagtgttttgtacataatgtcgatatagtatcaggtaacaattattttaactcagaaatttataatttggatttattttgcctttacattcatatttgaaatctaagttttcatacttttattcataaacaaatttaatctgtcaaaaaaaaaaaatcataaacaaatttaaagtatgatggcttttagtgtggactgcaaatgtcaaccttgcttttttagtaaattttaataactttttttttcattttttattatcgtaaaatttattttttactaaaaatgacaaatgtctacctttaaaccaatattaagaggtttatattagattgagctttgaaggatattagaagtataatagttagttagttggttaaaaaaattataatagttggttagtatttgttttttagggaagttagttagtatattaggtagtacttggttacatagatagttagtttattttttacctcctaattgtgttgtgtgagagtagtggatttattttgcaatcctacatttttcatttattatcttagaagggtgttaaccttctattgtccaaattaatctcttaaaatattttggatgaaagggaattcaacgcaagtgataaatgtgttcaaagaaattgcttttatagctagatctaaaaaaattgcttgtatgtattttgtttatttcagaagtgacacaaacggatactaatattggatgtcacacatgataatttatggtcaaatagtgacttttgaggggtacaaacgtaagattaaacatagtgataaatgtgttcaaagaaaacatcatgtaggcagacgaaagaattcaacattgcttacaaacaaaccgattaaactttattggctaatcatgatcccctaaaaggatataattatgagtacaattatactactataaataagctatcagcacaatgttttagcataatttagtgccttttctcaggtgttaaattctcatcaactaaatcagccagggataactgtaaatttgtaaatctcagccagagcagaaagaaaaatcaataaacagaaatgattggtacgtcaccatcacaatcctacagtgataaacaaaagatgaaagaaaacaagtcgctccctaatctgtctgtgttacaaagaccctatcaaacaacctagttgagtataatgcaaaccagaatcataagaaaaacatgaaaagattgcaactacaattgccacctatagttccaacttgtgtgaacaaaaactattactttatgcaataaacataatcatataaaaaggatatatacatgccagggatgataaccattaaattgattgataatttcattacctatggcattgagcagacaataagatgatacaaatctacttaattatattgaacaccagcatctaaatagcataaacgaaattatccacaaattcgcatccacaatttaactaagtacatagaacatccaaaaacaaaattgcacagaattatatatatatatgctaggcattatgaattcattcatcagaaacaacataataaaatctaatagatatatcaaaaagtttgcttaacattaaaacaggacaaaattaaacagaatttcgatatactagttttccaaaaccagaataataataaaaaaaaaaaacaagaaattaagattgaagaaccctaatcaacggtctgcataatatcctcaggagcaaacttagtacccttctccttatcagcagcagcacgacccttagccttacgatcaagaagcgacttacgatccttatccaatctgagcttagtgataacaacctttgaaggattaacaccaacattaacggtggatccattcaccttctcccttgtgatgcgttcaatgtgaatcacccacttgcgacggtaaacctgagtaaccttaccttcacggcctttgaatgttccacgaacaacctgaacttcgtcgtctttgcgaacaggcattgaacggacgttgtacttggatcggagatcggcggagagtggtgcgctcattaagacacggcggacgcttgatggcgccgtgaaatgagccttacggctctttctacggctgctggagactcttgggttgaacttcattttcgctctctcacagattcagctgctgctagtgttggctagggtttctgtgttgattttttgcttgtatttattgtattcgggtttgggtaattagggttttggtttatgggcttcttgggtttctattgggcttaaactatactgggttttgagggtataagggtaagaaaattgttaagtctatacccacaacaattgttttgttttagaaaaatatatattgtcactctcaaatttatctatatggtgaaaataatattgtaaaaacgactttttacggtagtaactagcaattataaaagagaattgttgttcccacatttagtttggttgtgccacacgagtaaattactcaaatgttcctcggcagttaactgccgaagttttagaaatacggctgtagttaactgccgaagttttcctcagcagttaactgtagccggtttcataattcggcagttaactaccgaagggcatttgggtaaattactagtgtttctcagccaaaggtaatgtgtcaacagcaattctcattataaaattgactttagaggtgaagataaatatgaacatcaagtaacatgaatgtttttaaaaaaaaaaatataaagttacaagaatgagtgcggtcgatcactatggagtgagcaagcttgtagcctcgatcaagatttggtggtctagatttaatttttttctcctttgtagaacttaaatcttgggcttctaactgcttaaccctttgttccaatcgttgagctatcaaaacccccataaagcacatgattatgtagtaaattatacatacttttttagatatataattatttttatttttatttttttgagcagagatatataaattaaattaattaatcaaatgatattgaaatgaaacaaatttgtgcatttcatttgtgattaaagtctcaatacatgggcgtgaccgaaaaaatagagaatctcaatacaaggtggacaaataaaaaaaaaagtgagagactggcaagtaaaagatcgagacatcttagttaaagagtgagcaacctaattgacttatctcagctgaaactaacctttaatttataatttgataaaaataaataaactttctatatcatgtgacaattcttcctagcataacctgtgctcatttcttttatgtgttgcccaatttaagcaagtgtggtctaagaagcaaaaactaatgctcctaataccagccattttttcaactacaattgcatcacctagtcgtggaaatcgtgacctggagaccacaaacatgttgcttgcaagttgcatttgcatgtataggtaacagtgtaccataagcaaagaactcaaattttgtttccttttactcaacaactaattgacaacagtgtttcacatgacttcattatatcattatcatgtctttgctgattgctaccttgtatataccagaatatgccatcttaatgttagttaaggtcaactaaactttgaagttaacttaaacacattggtatttcaatcttgtactcaacattcaacaatgccccttaacgtgttctttcaacctaatttttgttataattgcctctataaatgttacgtacccttcacaaggaaacaaaattaaaacatatagtgtgattgaaaaatattagatatggcgagattgaaaggtttgatgttgtctcttccatttggatttgtgttgtttttgtgttctactttcagcatagtacctggtgtcattgg

SEQ ID NO: 4060 - DNA, 775 bp, Medicago truncatula
  Intron number 1 from transcript Medtr5g089190.1 (locus Med tr5g089190) derived from phytozome v7.0 (chr-ID MtChr5; po s 34613171 to 34613945)
aagaaaggtgttccttggactgaagaggaacataggtgagtttcatcaacctagaatcttcaattgtctttttgtttttgttcttttactcctttctctatggaagttttttcttagattatggaggaagaaaatatatactactaaaaaaggttgaagtaagacagaagttagagacggaaaaaataaaattggtcactaaattagcgtctgtaacacttaacgatggaactagagacaaatttctctttttttccgtctcaagatttctgccgctgtttcaatttttctagtagtattgatattgaaattttgctaatgaatcaaattcatggatatactgaaatagcaactcaatttttcatttcattttcctagattttaggtttttaatttctcataaaattctaatcgacttttataacagctgatttgttaatctagtgaaatattttgattttagtcgcagtcacgttgtgatctttgagattgcgaaaaatcacaatcacatgcagatgatgcagcctcaattgtatctgtgctacatttttaaagacggaaaaaaaaattatatttcggactctttttaaacggaataacttgatcattagtttggataagtatattaaattttgaacttcatgcaaaggcacaaatcaattgacatgttaaattgagttggtttaagagtttgcctttaccccttttaaaagttacttgttattgaatttactctttgtgcatgtttggaattacggcgtacagacgttttctg

SEQ ID NO: 4061 - DNA, 1043 bp, Medicago truncatula
  Intron number 1 from transcript Medtr3g068850.1 (locus Med tr3g068850) derived from phytozome v7.0 (chr-ID MtChr3; po s 16337204 to 16338246 reverse strand)
gcataagtaagttgtttttcatcttttctataccctttaatatgttcgtgttcattggatttatgggttttattgtggtttatgatttgtatgaattttttgtgtatgccaaaaccaaaagggtgtttttccattgctatcatcagctcattgtaattgtaaatactttacatactaagcaaccaattagacacctacgaagcacaaatactcctcgggtttggcgtgtgtctgacaccgacacatatgattacactgaattatgtcattttctcaaattattatcagtttctacgtgtcagtgttgtgtccggtgtccatgtatgaatatgtgcttcatttggtatgcctgatgttcctaatttgttttacaaatgctgagcttggagactggtgggaaaggcaaggttttttgtggttgatggttcttatattctacagtcatactttgaaaaaggggttggtagtgaaattcttatggtaaggtcatagtaagtagtaaccgttgcagtcacatcaggactgctgatattttggagaatcaaggttaaatgcagcctcaaccgcgaccacattgtggtttcacatgatgaaaaactgttatgtcgtgactcatattgcggtcaggacctttatttaaacctgggtttcctagtccaatctttagtgatcaaagagaagttgcatagaaattttattcacctcactcgaaggagatagtgggggtttgtacttgtgatttgtaagatgtagatgtcatgctccatttggccaaccctgtggagtttaaccttttaagaagggtgagattaacctaaatttagaaaaaacgagaaaaatatttttttggcagctatttgctgctgctagattgattcactcatgatatcatttggtgcattttagtatgaatgtaaacattttaaaaccatggttcttacttattttgctgtttatttatttttgtagcattgtagctcactttacaaagaatctgtctgattgtgcttgcttgtttttggtttactagtgaaagaaaagag

SEQ ID NO: 4062 - DNA, 2022 bp, Medicago truncatula
  Intron number 9 from transcript Medtr2g126220.1 (locus Med tr2g126220) derived from phytozome v7.0 (chr-ID MtChr2; po s 30533405 to 30535426)
aaagtaacatttactccctccgtcctttattataagaaccccatttgaacataaatcacgaatattagaaaaataattgcaataattaatctgtctaaaagctgtgtttcttttagagttgtgctatatagcacgacacaattgtcgcaccatatgcacgagacatttactacttgcattttgtttcctaattagtgactccttcatgatttctagcgttttgttttttaattctagtattttgttttaactaaaaatgattaaaaaaacaatttttaatattttatatgtttctatccataaagcagtgatgattgatgttcaaatctaaatcaatacttttttttttgaatactgtaacaagaaaaaatataaaatgatataaattaaaaccgcaagtcaatctaaaagaattaaaaactacataaagccgaatattatcgttttaaatttgagatccagagtcaaggatgttgaaggtagggtgtggctaggtgttatgtgtaggggggtcttttttggtgtttattttcggatattccatctatacacgacgccttttgtttgtattctctgaattatcagtctatgttcgttttgagtagggatctggtttttattaaaatttgttgttaaaaaaaaaaacccaacaatgatactttttttatttgtaaaaaaaaaaatcacgtttttttttaaaccaaaacactaggaatcattttcatttcttgaaaagactaatataaaataggcttattcaatcacccggtcccttaacttaattgattgtctcaatttggtgtccctaactataatttgtatcaatttggtcctctatgttttgctctgttactagttttagttctttctctcaaaaaacgtgaacagaaaggactaaaactaggaacggagcaaaacataggggactaaattggtacataagtttacgtttttttgagagaaactaccagaaatgactaaaactagtaacgaagcaaaacataatggaccaaattgatacaaattatagttaggggaccaaattgagacaatcaattaaattaaaggaccgggtgattgaataagactataaaatactactgcaacttatgaagaaagaaagccattaactaattaaggattaaccaaaatgcgtgaggcaaatgcttcgagtatgctgtgcgacaaatgtgtcgtgctataaatcattttccttcttttatttatccttacaagatatcataagagagaaacatagtatacatttttccaatatttttgtaaagaaatcattaatgcgtgttgaattttgaaaatggtcttagattaagggacaaagaaaagtttgtaaaaggtcttatgattaatctgtctaaaatagttgcagcaatatgcatatggagtatttttttaaagctaaagtatgtgaaacagtgaaataggtatgaaaatactttgcaaaatatttcttcctcatcaagctatttggttttaaataattgaagccaagatacaatgtattctgaacaagatacacatggtatgatgattaagtgtgttatgtgacttccattgagctggtgggtagacataatgagtgatattatcatagtttattttgaacttcaaagtaaccgctgcaaattttggattagaattttattttgctgcataatttatcctctagttacttgtcatattctccacatcttctagataccgctgcagtcagatctttttattctttgtacttaattctagctttaatatcacatctcttctggtagtttcaagttattattcatacaagcaattcaaatgataaaaaggctatggtcccctctaccccccaaatgcatattaccagaccgttagagtgctgctttgtgcatggctaataattcaaatgctcagtctacaaatgttgatggctaaaaatttgaaacacattaaagaagtaataacatcttgacatctactaatgcagctggaagcagtgaagacgaagaaactgaagcacgt

SEQ ID NO: 4063 - DNA, 2547 bp, Medicago truncatula
  Intron number 2 from transcript Medtr5g026280.1 (locus Med tr5g026280) derived from phytozome v7.0 (chr-ID MtChr5; po s 10588189 to 10590735 reverse strand)
tattataacttcttcaggtattattttatcttcaaacaccctttgattgcgagagtgccaaatgctgtataaaagagaagctagggatataatagtgggtttgtcagttttgtatatgaaggagatgagccagtcaatgaagtctgtagtgcgagaaatttgaaaatttatccctaagtttgaaccaaaaagttctctacgagtcctgtcacatttgaggaatatgtggtcgatagactcaatactttcttcacatctgggacacagtaaagagcagtttattcctctcttgtcaagttcttctctgacaggtagagctttgttgagaattctccacaaaaaaaccttatgacgtatagcagagtagccagattttactgagtagatcccttcattagtgaacatccacattaaggaatcttgttaatttatatgagtgatggggatttgttgaattagatttccttcaaaagccaggaaaacatgctcaattaggtctttgttccatctggggggttttgaagcataatatcctgaaccatgttgacatttgggattccaggattttgagtgaaaatcttgaaaccattttgttggggtatccaattatctgcccagatatttatagaagcaccatttcccacttgccaacaacaacccttttttagaatccaaatagattgctgaagacttctctaggcataacttggagcaactcctactgtagcctggagtacatcatttgttgggtagtatttagttttgaaaactttagaaataagagagtgctgattagtatgaagtctccatatctgtttggccagcatggccagattgaaatccctaagatttctaaatcctaaaccaccatcaatggttgatttaaggattttgtccttcctgacccagtgaattttcttagattctccatcactgccccaccaaaattgacacacagccctttcaattctatcacaaatttcttgaggaagcaggaagcaactcataacaaaaactggaatggcctgagctacagcctttatcaaaacaccccttcctgcaaaagatagatttctctctttccagcctttcaacttctttataactttatccatgatgaaattgaaatcttgcacctttgatctcccaaactgagtgggcatacctagatacttagtgattttggtagatatcgcaaagccttgggttgaagaccatttctgatttatccaagttgaccttttgccctgatatactttggtagtgaagaagagtgttcattaaaaacctagcttcctttggatcagatctacaaaataataaactatcatcagcaaagaatagggcgggggggggggggggggcggcagatggagcaatcaacaccccttgaaatttaccatcagcaagccctttagtcagaaggcctgataaaacttctacacaaataataaacaaatagagggaaagaggatccccttgtctcagaccacgttggggattaaagctattaataggttgaccgttaatgaggatagaaaaagagacagtggttacacacctcatgatagtatcaactaggttaggagggaatcccatagttaaaagggttttatgaaggaaactccactcaattctatcataggctttggccatgtctaattttataccaactaaacctttcctggtattagtagttttgtaaatcttattaaaagcctcaaaagctactaaaatattgtctgtggtgagcctattagaaaggaaggcaatttgataatcagtaataacaaaaggtaagacttttttgactctattggcaataactttagtaataatcttaaggataacattgcaaagactaataggtttgaaatctgaaggaagaataggcttattaattttagggattaaagaagtataagtattattaacgtgagttggatcactccctttgtttaggatttggagtgccagttgagtgacatcagatccaataatatgccaataagtttggtagaagagagcaggcaatccatctggccccggtgaggatgttcccttcatagatctcatagcaaccttcacttcctcagctgtaaaatctgcactaaggtcttctttcattatttgagggactctgttgctaaccacttctagactattctgcacatcaactaggttagatgtagagaaaatattatgaaaatagtcagtaaaaatatcatgaatgtgattttcttcttgccactctttgccatttgtgtcagtgattgagtgaataaaatttttcttcctcctttggttagctttaaagtgaaagaattttgtgttattatctccatattttagccaccgagtctctgccctttgtgaccaccatatttcctcctgcaataaggcttcattgagattgtgctcagtctccttaatcataccctttatctttgtattaggagttttattattaagctgcattagctggtcttgaagaaatctgattttctgaggaataattccaaatttgcaggaaccccacttgtgcag

SEQ ID NO: 4064 - DNA, 1929 bp, Medicago truncatula
  Intron number 8 from transcript Medtr1g127070.1 (locus Med tr1g127070) derived from phytozome v7.0 (chr-ID MtChr1; po s 28519131 to 28521059 reverse strand)
aaatatagataaaaacgtgaaaattgaacaatcaggtgatctagatttgctttatgaatactggaaatctatgatattagtattcatgtcttttggccgataaatatttagattgttattacttttttaattttgtagaagaatcaggagaagtcagatttgattatctatgattttattttattctctttattattattatttttttgattatgacattattagtctttattaccattgtagtttcttttcctatataaacagtccaagactgtagtaataagacatggaagtattattcaattactttcattatggtatcatcacgagctctaggttaggcttctgctgtaaagtgatccgcagcttttacggggttcagagcatttcacgacctgttttttcatctccctaatggtgtgcagcaatgcatgaaagacaataacagcaccagatctgccgctgaagagaaggcggctattacgagtcgtgcctgtagtgatggtcctatggtgatggaccagaagtagtcaacaacaacaacagcaccggcagctgcagacccgttgtcaccaacaacactggcagcagcggttagggggtggtggctagggcagtttctttggtagaggtggtcccaacaatggtttgtccaatttttatggctatgagggaccttataatggcctcgaggttgaggttcagcgtctcaacagaaaaaaatcacatggagtggtcccaaaacgtaagattgatacaagacgtaaaggaaaatatggtttcatcacaggggaggtgcaaatgcctacaatagcagatccaaattacaaagttttggatcaatctattcgatgtagtctctcaggcctcttattttattctttagaaatagatatgtcacctttacatctttgcttaatttgataatggatgacactttcatattaaattttgcaagattggacaggaaatttcccttttagtccaccctatgccttaattatttttcttctctataaatttcatatccacagttttgtgttaagattctagttttcacttacacattttttgtaatttaaattatagatatttttccaagtcggactccttcttgggccttcttgcctcttttcagttatctggtctcccggataaaaggattttgatcccttggtcttcctgggtagcacaactggtttgagcaagggaaaaagagttggaggtggttcaaacccggacgaaggagtaaatattaatctaacaaactaattactaacatttgctagtaaaaaaaaggccattcctttctcattctttgatcagggctactaaatcccatgaaaagaatatccaacgatggacccgacatgctgataccatgaaaagaatatcgaggcctaactgaaccttacaaaaccggcttgtacggttaggagtgcctcatctttataaactcttctcaagaatcctatctatccgatgtgggactaaatcccaccgagtgttggccgctaacaatccaaagctctcctttgagctcaattctttatttgggttgcagtaattgaaatgttgtaggtttattagctgcataaggttctttcccttgatatgtctgtaatctatggtcctgcagtggttatcatatgcaattccgtatgcagcgtttttggtgaatgttgggtgtatcccactcctatgatcctcaaacaattcttgataaatacctttcatgattttggtagaagttgtgaagtttttttcattttttatttttttatattttaattttacaaaaataaatattgcaaagctggatacaaacaaggcctccacaattagtatctcattgtattctcaggggcttacactatcttgtcctatatttcagctccctgtacactggatacaatttcctcagaggtt

SEQ ID NO: 4065 - DNA, 968 bp, Medicago truncatula
  Intron number 1 from transcript Medtr4g108070.1 (locus Med tr4g108070) derived from phytozome v7.0 (chr-ID MtChr4; po s 23799604 to 23800571 reverse strand)
ctaatcttgaagattttggaactttggtgctagaggtgtgttctctcttctaggcttgaatccttttagatttgaagtttagaattgatatgatgggtattgtattatgattgagaaattaggttttcatgaaaatttcaatttcaaggatgccaaagtgttggcttcgaagtggatgttgagtaggatgcacattcctgtttgtttattttttgaatttgaatacataggcaaatagttttattatatcaaacactttgccgacaggtaaatactatcgggtaccctcacactcaatagtatttacaacagctaaaacgaccaagatgattaacgtgtgttccacctttactctctgttcaagatttattattactgaattgtaattgttagagatcatgcggacaattagttagtgattatggactaactgaacaaggaatattatagttagttagtgactgatattatggttgtagttagggaacccactgagatgtagtctcatcccattccattttattttagtttcagatagacaggtgactgttgttgcagctcaaggttttattctttaaaaatgggttcaagactttctttctgtatatttttttgtatgtaatgaatgaattttgacttcttgtgtaccctgagaactgaatcttgcatttatgtaaggcaagaacttaatttaccctgtaatttgagttattttttaaagtatccaatatcagattttaatatccagtataatattctagagaattatatccgggtgttatagttatattcttatagaccacttctgttgtaggttgttcgtttgcaatacatgttagggctgattcttacaattttgtgtggctaactcggtcaggtttaagcctccgatcttttttaacctttttttttaatctatttagtgtttgctgcagagggttcaccatcggcaccccgttttcctaaag

SEQ ID NO: 4066 - DNA, 2074 bp, Medicago truncatula
  Intron number 2 from transcript Medtr5g073430.1 (locus Med tr5g073430) derived from phytozome v7.0 (chr-ID MtChr5; po s 26375218 to 26377291)
gagtgatttcagcttctggacaagattcaacttctgtatacttttcagaatcagaaggttgatcagattctgatgcatcttcagaatcagttgtacctgcattactttcactttgctctgaagttttacttccaggctctctatcatcaaattttacatgcatagattcttcaacacattgtgtttctgaattatacactctgtatgcctttgacctttcagagtaacctaaaaagattcctctttgagccttggcatcaaatttcttcagatagtctttagtgtttaagatgtaacaagtacatccaaactgatgaaagtaagagatattgggtcttcttcctttaaagagttcatatgttgttttctccaacataggtctgatatagatcctattttgaatataacatgaagtattgactgcttctgcccaaaaatgtttagctaagttgttttcatggatcatggttctggccatttcttgtaaggttctgttctttctttctacaaccccattttgttgtggagttctaggagaagaaaactcatggagaatcccatgtttttcacaaaaaaattcaaatggctcattttcaaattctccaccatgatcacttctgactttcaaaattttcaattctttttcagattgtatttgagtgcagaagctgctaaacacttcacatgcatagtctttacttttaatgaattttacccaagtccatctgctgtaatcatcaacaatgactaatccgtatttacttccatataaagatgcagtgttaactggaccaaaaagatcaatatggagtaattctaagggtctggaggttgatacaatgtctttagatttgaaagaacttttcacaattttccctttctgacatgcaccacaaagtgcatctgaatgataatcaatgttaggcaatcctttgaccagttgtaacttgctaattttagaaattaatctccaattagcatgtcccaaccttttatgccatacccattttttatcattcattgacagaaggcaaactaccttctgatcagccagatcagagaaatttattttataaacattctcaactctctttcccttgaatgtaatggatttgtcatccttgttgactagtgtgcagttggtcttactgaacgttacatcatacccattgtcacaaaattgactaatgctcaataggttatgcttcagaccatctactagccacacattattaattgagatggaggaattaccaatagtacctgtaccaatgatctttccagtttggttgccaccaaacttcacttctcctccatctttcattgtaagggtaaggaacaaagctttctctccagtcatgtgccttgaacatccgctgtctaggtaccatgacctttgtttctctcttgcccttaagcacacctgcatttttggccaattcagatttaggtacccatatcttcatgggtccttttgggttagttttggaggttttacttttcctcccttgtaccttagggtgaatgctgagtggcttctgatcattcaatactttgggtttgacaccttttggtattgttttctcagaagcagtagctgctttgttcttctgatccttttgttttggaattttagattctggtttaatcagattctgatgaacaggttctgatcttttcagaattttaatcttttgactcttaggatcagattttgtcattaccttgatcttaagattctctggctttgatgtgatcttagcctgtgaacctgaagcttcaggttttgactgaacagcagttatagcatttgtaccttcaggcacaaaggtggatttcaatccatccttgatacaatcacagtagctcttgagactgtattctttggatttctcctcagaatatccaatccctttgcctttgttcttgtatgtgctgtagatcatagaagcaactttgcttctgtctattccagccataataaaatcatccaaggcaatctcatgtttattgcctgaacctttatcacatttttcttgtagcttctgacaaagactcttgagtctatcttcat

SEQ ID NO: 4067 - DNA, 2281 bp, Medicago truncatula
  Intron number 7 from transcript Medtr1g008510.1 (locus Med tr1g008510) derived from phytozome v7.0 (chr-ID MtChr1; po s 786940 to 789220 reverse strand)
ttaccacagttggcaacttcagaaaaccactccaggtaaattttaacttgcctaatgtaagaatacatattattgattttatgatgttgggactgttcggtagatttgaagtctttaaattagaacacttacatatataatataaagttaagataaccgcttaatgtgaattcagattgtagataatcaaaattttctcaaactaaagctgtttaattcttagatggtcttatatttacaattttgcaacagttaaattgtgatagtacttatattttaaagggataagaagaaaataggagtacttagcaggtcttaaatggtaagagaagacagactgatgtgtagaagttcctgaaatttattttaaccaatcaatccaatgttagagggattttagagcagattgcttcgtcacattaagtgatgaaaatatgtatcctttaggtctgtgaacttacacaagtgatagagcaatattgaagggataaaagacatacacatagttttcgttgattttactagaagactaatgatagggagagtgccaagagaggttttgttgaaagccttgtaaatgaaagatgtttggattgccttgcggtccacatcacatgatgtggccgcaatattgaggttgctgcagtgtctgcacctgcatcagtctgcaatttccgatgattgtaaatcacagtaaaaccacatcacagggcgcaatgtagtggacacaatggctgcatcacactacatcaggaaacaacacactatgtagtgatcacaaattattcttctagcttcctttttctttagggggtattttacaagtattagaggttcatgatatcaaggatatgtacgaagggatggcaacttatccgagctataaggtttctcaacaattaatgggatacgccaaagcctcaactctaagctcctagctttttatttggtggaaaagctcctagctttttacctttgtcttgatgtacttattatggagcacattcaagagtcagcactgcaatacatgtattttgtaggtgatgatttagttgtacatattgagttgatagaggaaatcaacaagaggatagagatttggaaataaactttagaagcatatgactttcgtttgagtagaagtaagacgattcatatgggatgtaggttattaaaagtagaagtagtactggattagatgtgaaaattggagaccatatcataccatagcttggattcaacatctcgagttaattgtccaaagtgagggagaaatagagagagatgtaatccatataattcaagtatataggggaaatcgttaagaacgactagagttcaatgatttggctatagatatgagttgtgagagaatattatggcgccatttgatctatgtagcctactctacctagtatgataaggcataggtagttgacacgatggactagattatttgctgttgggacgtaaatttgttttgctctgttatttgtgctgggttataaacttataattgtaggattgagaagtgctaagaactctctctttccaacactcactcttatttgatgaaatcaatgtgggtcccacctttttatgtgcgaccaatgtttttaaaaccggaccggaccaagtcccggtccggacacccatgcagaactgctggtcttaagaactggtgggacaactggaaaaaccagtatgaactggtgataactggaaaaaccggcgaaccggtcgcggtttgttaaaaccggacagtctcgattttttcctttaatttctttaaacaaaatctcagtattcaatttaaggctgttggaaactgtttaaatcaacacatttgcagaggaagatttagaaacagatttaaagaatgagaggatgcgaagcggagaatagagattagatgaaggagtgtttttggagggtgtttattttcaggtgttctgcctatatacggcgcctttactttgtattctctgtttcatccgtctctgttcgtcttgagcagggacgtggtggttaataaaatttgctgtttaaaaaaaaaaaaaagatgaaggagaagaggacaaagcagattgaaaatcaaacatagatagtggtcggatgagacaaagtttttgtcattatgaatactttctcaaagtttaaattgcatagaattttcttccaatatataaatgttatttctgctgtgcgaagccttggtcacaattttgataatttttattgtgcagatcatcacaaatagacatctcggagaaagagttag

SEQ ID NO: 4068 - DNA, 2515 bp, Medicago truncatula
  Intron number 2 from transcript Medtr3g123050.1 (locus Med tr3g123050) derived from phytozome v7.0 (chr-ID MtChr3; po s 30758756 to 30761270 reverse strand)
caagtaatcgataatcagtacaggccgtctacaaggtaatatgaaaaataaattggaaaattaaggatgattaacccataaacttattatgtttttcataatggtttcgtgatacaatttttttttttttccttctaaaatatgtctcccacaacatgcaaaatataatttatttattgtactttaatatatgatataattatattgaggcagattttttttacttgtaaagaaatattgttttatttgtagttcattttcaaagatcaatacattattaatgattgatttgttattagtgccttaagttatttattgcagagaaaaaatagatgaaagacataatttttttttatgaaagacataaattattatttgcatttgaagttaaaagaaatataattgtatttttcattttgaattaaatcttttcaaacctaaggtaagtctcatctatcaaaatgttgactacgtcatacctacacaatatttatacacatgattgtattcaattatattattttttcaaataattataagcattgatatgtcggtatcgtgtatgtgcttcattctgaatttgcacaagtatatcagtgatcaatcctaaccacaaatcaccataataacacaatatctatttattcatcattgttattattatccgttttcaattcatatttcttaatttttgtcacgatacttgaaattttatgcatgttttggtgcttgttgtctttttaatttcagtttatactcgcaagtttggaatcctgtcccgcacacatttgtcaatcaagcaccaactagttaccatcctgctccacgcaaatatgtcaatcaaacaccgacaaattactttcctttatcatattattatacaaacagaaattgtaattaacaaagaagattagcagttccttaaaaaaaaaaacaaagtagattagcagtatgtatagatttaattttaatttagaggagacaaaagtcatttcagcaacatatatttgattttaatttggttgtggagttgaattatttttgcttgcatagttgattccaatttaaagaatgaatatgaatttggtgccatctttcttgaaagatgcctaaaatatttctactgcactataaatttccttgcactttgcatattaaaccagtttcattatactttaacccctacatttttagtttttaccatcatgcataccatgcagttttataatcactgcatattataatacatgcacctatactatcatacatacttgcatattaaatttcaaattacacatattattgcatattaaatctcagaattacaaactttagcacgtacaacttcgaatctcaaattacaaatcagatagttcacttaaaattataccaaataaatttttaatataaattaaaataatagttcacttaaatgatttttttttttttgggaagttcacttaaatgacttgataatacactcaaatgacttgataaaaaaaataactttcaacttcaattttttttttagggaacttcaaacatctttattgacttgcatcacaaattcactatgctaaaatcaaataaacacatggttagaatatagaccattgaatttatttccaatttgaatatattgaattaatgttaaccttagattgttttcattatggaaaattctatcgtgaagtcgtgagaatgacttttctgatgaagttaaccatatgacctattattgagcatttgtgtatttaatctatgtcacatcggattatatggtgtattgcatatttactcataaggtgtgtcatatatctttacttattgcaattgagtcctgattaaatcaaaattaaacatttttattattattttattttgtaaatcataaatcttattcatcaaaattgggaaaaacttttcagctttcattatccctatccatcatcgattttgttcatccctttctctccaaaactcatctgctccaacacaaaccataccgtcttgctcaatcaaaattcatcttctccaaaattcatattctcgacccctaacaccgtcttgcttaatcaaatcgatcttcacatccgtttttgggcttgattggggcggttgtggctgctgttactgtcggcagttgctattgttttcctgttggtgcgttcgggtgctggtgctgtctgttttgaggagaggtcaagttttttggatgttgttttgggcttgcagctgtaattgttctgttgtgctcatgtttatttcattttcaattttctgtcatggcatttttttttactgtcatgccttttcttattttggtgttagctcccttacccttttaggtacttcttgtgtcggggtttatgatacttatatgctaaatttaaaaaaaaaaaggacgaacgaaagcgaacacgaaggaaactaaattttcacttttgtgtgaattcatgtttgtatgaagaaggacaaccgagacaaaactaactatacttttgtatgaagagat

SEQ ID NO: 4069 - DNA, 1280 bp, Medicago truncatula
  Intron number 2 from transcript Medtr8g122080.1 (locus Med tr8g122080) derived from phytozome v7.0 (chr-ID MtChr8; po s 28462760 to 28464039 reverse strand)
tggtaggtgagtgttgtagagagccaagtagtgaagttctttcctttggaatctctcaataattgattttatttctgtacgttttttttgtgatgataactatcatattatgtttgtatttgaggttaaacttctatttgaattctctgactagaaaggttttaatacttttagatttgctattttgtttaattacatgcagtagtgttggttgcaacttgcaactccaacaaaaattaaataaaaagtatatacgtctactttatatatatacaactttattcccgtttttggaaacggcatctgttatgattttgtaaaatcttgaagataatcttagggagctaatgatcttgaaataactcttattcattgtacatatgctattccaaagctattaaggtttgcaatgccaacaaaaattatatgaagcttttatatgagtatgcagatgcatgtttatttagtttttagcattcaaagctaaaacataaggttgagaaggttttttttaaaacagaatgctcacgggttcattttaaattttatatgattctacattttatctctactatcaaaacaggtttctcaagcatacaacaatatgtgcttaatatgtcctgttattgcatatgttctatcattaaaatttaaaaatatgagagattcagtgaaagcctgtaactaaaatacaggggtagtggatgtaattttctagacatttatcataactatgtgaagtgtgaacatatttgaaggtagttgttaaatctttgttataaatggtcctattgttcttgaatcaaatattgatgcgggtaaactcttcttacttagtctcattttatatttaatctactaacgattataaaaaattactctggcaaacatggactaatgatttagattgcattaagctatgtaggcttatttgatgcttttgacatattttaatttcttactcttactcttcctcttctattttttattttgtagaatagaaaacaataagttaatttgagttatttctggtcttttgaatggataccaatactgatgagttctctttattcaaatcaacgtatttgatgcatttgacagattataatttctcaccttattcttccttttctattttttattttgtagaatgtaaatcaatgatttgttgatttgagtttttctggtctttggaatggatgctaatactgatggtaaagttaatattcttctatttgttttatatactaaattcctaatgagaattaagatagattgca

SEQ ID NO: 4070 - DNA, 2617 bp, Medicago truncatula
  Intron number 2 from transcript Medtr2g125830.1 (locus Med tr2g125830) derived from phytozome v7.0 (chr-ID MtChr2; po s 30390099 to 30392715)
accaatcagcagagatccaatgtaagttctttattctttgacattcacaatttattttgctatataagctattcaaatgccattgttctattactcaatttctttaagcctattgaaaaattcctgtcatcaatgatttcacgtgcattatttttgtcctacttcggacggaaatgatgtgttttaggctttagcaaacatgttgatgtcatactgtttgtgctttgtagtgtagagagtacacactcaggtgccggaagtacatctatacactatagattatattatatgagtacatattcggggccgtcaataatactaacatagcatgccaattctcaactctcctcccctgaccttgcacccctcttgctagctaatgtaatgggcacagcccttcttaggacctagccttgtttgttgcttccccctcgtaccaaaatgaaaacatggtaattgtttaggaatttggcgcattgacatacttgaaatttgattagtaatatactcaaatgcatttactttaagaaaatacattggtttaaagaactgtgaatttgactttgtttaaaataatgaataatctccaggtaaaaagaacagacttaacattcattatggtaccctgaagaaagttaataacagtttaatccctcaatcgcagaaagtggcacaaatttggccttctaaaaatgttacaacaatttagttccagttgatatcaatttatccctcaaatgtagaaaataacatgaatttagtctcacctatgattcgtaaacagaagaattcttttgaagtcatttttcatgattgagggactaaatctggactttctttgaaagacaaagttgatgtcacctcacctatatctttagaggacaataataggtgcttactctaagaaataaaaatggatacgaggttcattcaatttgatatgtttaactagacccttattggtttctacattactctactcagaatggcattgtttataaagattatgttaggaggatctctggtaagatcttggccagaaaggggatttattcgcccctgaagttttatcgatcacaacaaaagaattacacaaaagagaactatcttctttcacaccggaaattccagtttagctaagcaatatttatagaaggttggaaacaacaatacaaactaacagaataaaactaactaaacataaataacaacctgcaaaacgatctaacaataaaacctaaacacacaaatacccgtaaaaaagaacctaaatacatattaatctctatttatatttttttccccttctttcagtaataaacctttagagccttctctgtaggaagagattcattaaaaatcagtaagtgtttgctggtgcatctccgacctcgataacaaccttgatctcgacaattggttcatcttaggcttctgcaactacgcacagatcttttgttcttgtgtttccatgattgtctcttctgaccagtttgattttaaatttatttcttgccttgttctcgcccaagaacaagattcttggtggttgtcttcttcataaatgtgttcttgtggctgtgacaaaatcctttttagagaaggttgtgcctccaacttgttcgactcacccaaaactcgtaggttagtgttctctccctccattgttggcacctcgtaacaaccaccgtttccctctctaattgttctgatcagatctgtggaaaatgaatctcaatttggatcttggttttcttcatgctaagaatgaaaccaaatcattgtctcatcatccgtgctcatgtacaacattggttttcttcagccttagctatcaaaccaacagggcctgtccagttaagttctggcagcgctacccttttagcccacatgtcctcccactccggcattgctgactctccccgaagatctggctggtcaaactaattgttaggaacccgaaattttaattgaaaacaaaagactaatttattgaaagattgagaaagaataagatagttatctctcctttaagggtctcctcttctacaatagagccattgatctattcacgcaaaataatacaaatctgaatcatatcccttctgtaactcattaacctcctatgtatacatgataaccctataactatctcattaattaataaattcctcaactaaatccttcttatcctacatcctaacaaactccttatcctatattctaacagattcattggagcttccatttccaactgctagtttgcactttacagcatttttttttttagaaacttgatcatataccagtccacattgtttaattttcaaaattcggttattttttatcaaggttctgttggtttatgtcaatatgggattctatggggaaaatactgataagttcatgcattcaatatctggttcacacaatcaaaagtgcgtataaactgacattttcatcattagatttccgaaaactgaaactgttaaattactacataaagcaattgaaattttcatgtggcaaagtcgactaacttgatatgtatatatcatagtctggcttctattgacaatctttttttgatgataaacagctgtttcaaggtcagaag

SEQ ID NO: 4071 - DNA, 1607 bp, Medicago truncatula
  Intron number 1 from transcript Medtr4g157000.1 (locus Med tr4g157000) derived from phytozome v7.0 (chr-ID MtChr4; po s 39012140 to 39013746 reverse strand)
gttctggccatttcttgtaaggttctgttcttcctttctacaaccccattttgttgtggagttctaggagaagaaaactcatggagaatcccatgtttttcataaaaaagttcaaatggctcattttcaaattctccaccatgatcacttctgactttcaaaattttcaattctttttcagattgtatttgagtgcagaagctgctaaacacttcacatgcatagtctttacttttaatgaattttacccaagtccatctgctgtaatcatcaacaatgactaatccgtatttactttcatataaagatgcagtgttaactggaccaaaaagatcaatatggagtaattctaagggtctggaggttgatacaatgtctttagatttgaaagaacttttcacaattttccctttctgacatgcaccacaaagtgcatctgaatgataatcaatgttaggcaatcctttgaccagttgtaacttgctaattttagaaattaatctccaattagcatgtcccaaccttttatgccatacccattttttatcattcattgacagaaggcaaactaccttctgatcagccagatcagagaaatttattttatagacattctcaactctctttcccttgaatgtaatggatttgtcatccttgttgactagtgtgcagttggtcttactgaacgttacatcatacccattgtcacaaaattgactaatgctcaataggttatgcttcagaccatctactagccacacattattaattgagatggaggaattaccaatagtacctgtaccaatgatctttccagtttggttgccaccaaacttcacttctcctccatctttcattgtaagggtaaggaacaaagctttctctccagtcatgtgccttgaacatccgctgtctaggtaccatgacctttgtttctctcttgcccttaagcacacctgcatttttggtcaattcagatttaggtacccatatcttcatgggtccttttgggttagttttggaggttttacttttcctcccttgtaccttagggtgaatgctgagtggcttctgatcattcaatactttaggtttgacaccttttggtattgttttctcagaagcagtagctgctttgttcttctgatccttttgttttggaattttagattctggtttaatcagattctgatgaacaggttctgatcttttcagaattttaatcttttgactcttaggatcagattttgtcattaccttgatcttaagattctctggctttgatgtgatcttagcctgtgaacctgaagcttcaggttttgactgaacagcagttatagcatttgtaccttcaggcacaaaggtggatttcaatccatccttgatacaatcacagtagctcttgagactgtattctttggatttctcctcagaatatccaatccctttgcctttgttcttgtatgtgctgtagatcatagaagcaactttgcttctgtctattccagccataataaaatcatccaaggcaatctcatgtttattgcctgaacctttatcacatttttcttgtagcttctgacaaagactcttgagtctatcttcat

SEQ ID NO: 4072 - DNA, 3864 bp, Medicago truncatula
  Intron number 14 from transcript Medtr7g140700.1 (locus Me dtr7g140700) derived from phytozome v7.0 (chr-ID MtChr7; p os 33928975 to 33932838)
taaaggttagtcttttgatttttgcctatgacagaggtctgttactaaaccaagttattgctttagatgtatgtccttttatgtcatatctttctggtttattatttgaatatagtgcgtacaatatgcagacatagagatacatgtatgcagattttgttggctattcctatttttagtctttttatatattgctattatactgaatgtaagttcaagatgaaaatgtgaaacttaacttttttatataatagtataaattcattaagacaaaggagattatggttagagttaaaaggataagaaaacctcttggaaaaaaggaaaacaaacgatatagaacaaagagagcatgaatgaagatattagggttactagtcctgttcgtcttagtcccgtgaatgtgtgccatgaggacaacacattgacctaattagcatatgttggtacaaaaagtgcattagattattatatttgaggaatatgctactaatactataaatcttgtaacgttgtcattctctccttttcctttttatagtctaaaccttcagacccatttaatggtcaaaataagagagaaatgatggataaactatcatattgtgccttaattcaatgtttgttaagtaacatgataggattacttaattcttttgcctattctattttgtctatatatttaaaatttgggttaatatctcaaatagcccctgtactttggacgaggtcagaagataggcatataaaacaaacacacagatcccacccttgtaattttttcttcatattttgaccctcatataaaccagccagcagaatatgatgacgtgtcactgacacacgaatatttttttttccttccgtttttcttttaatccatgtgacatacacatcatttaacctttagtttttactttattttcatatatatatatatgtatatatactttggtgatttggtgttaactttgtcggcattcgatggaaatcgcttcaaatatcatatatatatatatatatacaggggctgttaacttgcacccacctaaaaacactaaggtgcaagttaacaagctgcacctactagttatttaccaaaacacccttttgtctatattcaaattaattttaaaaagaagggtagctttgtaactaacttaaggacatgattgtgttccaaaacaccctcttgttccttaatactctgagcaaaaccatctttatcagaccataatatcaatgaagcaagcatataaataagtatcaattaccaccgactagcagaaaatcaacatgtagcacagcgagagaagcttggaagagaaaatatataattatagggtatgttgttgaaatggtgttaacataaattaatattactaaggacgaataagaaagaaagaaagacttgacagaaaaaaaaagaatgaaagaaagaaagatgacgacgacaaggagatggagtaagaatgatgatacaaacctgcgatacctacgatgcgtgttctccgtgtgaaattgtttttattaatttaataatataatgacaaatctacccttctgcttaaaacaggtttcagggttataaatatgttttttggtaaataactagtaggtgcagcttgttaacttgcaccttagtgtttttaggtgggtgcaagttaacagccccctatatatatatatactttggtgatttggtgttaactttgtcggcattcgatggaaatcgcttcaaatatcggtaatataaaatataagtaaaacttttaattcaaaatgtcaatataataaatatattctttacaacaacaacaacaaccaagccttatcccactaagtggggtcagctaatatattttttaaaaaggtaaatgtcaaatataatataatatactgtaacaacatatatgttgttctctttcaacatttcatagaacttagaatacacagtgcaatgaacggtagcgtgtatcttgtcaccctgtatagaaatttgtttggtagttacaaacaataacgcgtcgattaaaaaaaatcacagaatccgaaaaacaaaaaaaatattattttccgaggcttacataatccatgaaaaccatttatatagctgtccctaacaacatcaatctgatagactgataccacaacctcacaacacgaaccacaatgattagagagttattgtgaagggaaatttgtgagactgaatcgtaaaaccttcaacgatgcaagagaaaatagaaaatattggtatatcaagtgtgtagtgaataacaaaatatcaatggtgcagtagactcgttgtcctatatagttttgaataacaaaatatctcacaaattctatgatccttacggtttgtgttctttggctgtggtatcagtctgacgttgttagggacaacatgtcacaatccatagaaatggttttcttggattcttatgtaagcctcgaaaaatacaaatttttcgtttttctctttttgtgatttttttaatcaacacattaatagaactaccatacaaatttctatcctgggtaacaagatgcacactgccgttcatagcattatgtattctaaattctatgaattgctgaaaaagaacaacatatatatgttgttactaatatattacattatatttgacattttcccttttaaagaatatattatattgacattttgcaataaaagttttacttatattttatatagtagtgttatattgacatccaaaagccaacaactttccacacaccatatgtctcttacattgagctattaaggctggcatgcgtctcaagcaaataaaaatgattacataaattgatttgtacactttaccagataaaaatacagtgtggacaactattaggttgttcatttatcatttccctattttatattaccgatatttgaagcgggtttccactgaatgccaacaaagttaacaccaaataacctacatacatatgtatgtatgaaaggttaaacgatgtgtcttccacatggattaaaagaaaaatggaaaaaaatccagtgttagtgacacgtcatcatattctgctgactggtttaagtgagggctaaagtatgaacaatccaaaatcccaagtgtggaatctgcttttttttttttttttttttttttttttttaatccaaggactattttcaaattgacgttcgaaactgctggtccatatcataaacatttgaagcctccaagctatcatgagttgatatttccgatgcttaataaggagttggaatacagtgataaattttttcacaaagttagctgtggttttttaatagaacattgcatccaagtggccttttgtactctttgcagccggaaaagtgacctcttcagagggcatttttccacttcaaaagcaatgttatgtcccgggtgtttggggtgcaactagaagcttccttttattcctaattgatgttgtttgaccctagaaatttctcccgtagtaagtaacaatcttacaaaaatcacatgtaaccctcttcctatacttgtcctttaaactattccatctccatcctaattaatattaggtgtcatagctgctggaatctccatcctaattaatattaggtgtcatagctgctggaaggtagtgaagtttgaatttgattttttttaatctaaaaataaatcctggtagagtactacaatgggaaggataaattaacaattgagaatttttaacaaaaaatagtcacacaactaggaacagccaaagttgtgtggacggtcttccttctaaataaggtttacaatttaaagtgggtttacttgatatggcaggctgtgaccactgaagatctaaattcaaa

SEQ ID NO: 4073 - DNA, 4484 bp, Medicago truncatula
  Intron number 2 from transcript Medtr7g021400.1 (locus Med tr7g021400) derived from phytozome v7.0 (chr-ID MtChr7; po s 5214797 to 5219280 reverse strand)
gtgtgttaaggaggtgaaatccactggattttctgcttgaataattaattcccattcttcaatagacatggttcttcctttaatctcatacgcaggagtatctatttccatatttgacgatgaaccaccagcagaacttgagctttccattgatttgaaggagttttagggttctacggtgttttgagaggaagagtgaatgcgcttactttcgcagagggttgagaagaaaatagaaagtgtttgttgtgaagtgagtagtgtgtgaattgacttagtgtttttaagtaaaacgtttacaattcagaagagacaaacaaacatagcattaatgacaaattgggggcgcgtgttagtatgttaaaaagcaaataaaacatcattgccttttttgttatactccaatacaaatagaccacgtcagagactcttcagaaaactaccttttgggtaatgggacagctgttacaaaaagtaactgccaacgttcccactaaccttgctatttagaagcaaagaataccacttctgaagttttagtgctgacgtcatcttcagaagcacattttcctcagaatctcagttaagagcttctgatggaccagatgcttctgaatagacttcagaaccaaacttcttattcagaggcaagcaatttttcaatcagacacaaaatgcatgttcaaatttttcttaataaaatcaaatctttcaacagataaaggttttgtaaatatatcagcccattgatgttcagtatcaatgaattgtatatctaaaatccctttttgaacatagtctctgataaaatggtgtttgatttcaatatgcttggctcttgaatgtagaattggattctttgacaaacaaatagcagcagtattatcacaatagatgggaatattgttagcattaatctgatagtcttccaactgatgtttcatccaaagtagttgtgtgcaacaacttgcagctgaaatgtattctgcttctgttgtagacataacaatagttgcttgtcttttgcttgcctaggatatcagattctctcccaggaattgacaatttccactggttgattttctttcaatcctgtcaccagcataatcagcatcacagaatccaatcaacttataatctagggatttcctatacaggagtccaagattagttgttcctttcagatacctgaagattctcttaactgcagttaaatgagattctctaggatctgattgaaatcttgcacacaagcatacactaaataaaatatcagatctagatgcagtgaggtataacagagaaccaatcatacctctgtatagcttctggtctactactgttccagtatcttctttgcttaaggtgcaggttggatgcattggagtgttcatcactttacaatcttctagcttgaacttcttcagaagctcctttgtatattttgtttgatgaacatatactccttctttactttggttgatttgaattccaagaaagaacttcaattctcccatcatactcatttcaaattcatcctgcattaacttagaaaattctttgcaaagagatgcattagtagaaccaaatattatatcatcaacatatatttgtacaatcaaaatgtctttcttaagagtccttctgaagagtgttgtgtcaacttgacctctttcaaaatcatttttaattaagaaattacttagtttatcataccaagctctgggagcttgtttcaagccatatagtgatttcttaagtttataaacatggtcaggatgcttaagatcctcaaacccagaaggttgtttaacatacacttcttcttcaatgacaccattaagaaaagcacttttaacatccatttgatataatattatgccatgattaattgcgtaggatagaagtaacctgattgcttccaatcttgcaactggagcaaatgtttcagtgtaatcaatgtcttcttgttgactgtaaccttgagcaacaagtctggctttgtttctggttacttctccttgttcattcagcttgtttctgaatacccattttgttccaataatgttcttttgaaaaggtttgggtaccagatcccacacatcattcctttggaattgatttagctcttcttgcatagctaatatccatccatcatctgagagagcttcttcaacagttttaggctcaattattgaaagcaatcctattaatgactcttcttgtctgaaatgtgatcttgttcttctaggactatctttgcttccaatgattagctcctcaggatgtgaagatttgtgcttgaatttaggttgaataacctgctgagtattatcttaaaaatcctcagaagcactttcattctgtactattggactaggttctgcttctgaattagactcagcgtctggagtgatttcagcttctggactagattcaacttctgtatacttttcagaatcagaaggttgatcagattctgatgcatcttcaaaatcagttgtacctgcattactttcactttgctctggagttttacttccaggctctctatcatcaaattttacgtgcatagattcttcaacacaatgtgtttctgaattatacactctgtacgcctttgacctttcagagtaacctaaaaagattcctctttgagccttggcatcaaatttcttcagatagtctttagtgtttaagatgtaacaagtacatccaaactgatgaaagtaagagatattgagtcttcttcctttaaagagttcatatgctgttttctccaacataggtctgatatagatcctattttgaatataacatgaagtattaactgcttctgcccagaaatgtttagctaagttgttttcatggatcatggttctggccatttcttgtaaggttctgttctttctctctacaaccccattttgttgtggagttctaggagaagaaaactcatggagaatcccatgtttttcacaaaaaagttcaaatggctcattttcaaattctccaccatgatcacttctgactttcaaaattttcaattctttttcagattgtatttgagtgcagaagctgctaaacacttcacatgcatagtctttacttttaatgaattttacccaagtccatctgctgtaatcatcaacaatgactaatccatatttacttccatataaagatgcagtgttaactggaccaaaaagatcaatatggagtaattctaagggtctggaggttgatacaatgtctttagatttgaaagaacttttcacaattttccctttctgacatgcaccacaaagtgcatctgaatgataatcaatgttaggcaatcctttgaccagttgtaacttgctaattttagaaattaatctccaattagcatgtcccaaccttttatgccatacccattttttatcattcattgacagaaggcaaactaccttctgatcagtcagatcagagaaatttattttatagacattctcaactctctttcccttgaatgtaatggatttgccatccttgttgactagtgtgcagttggtcttactgaacattacatcatacccattgtcacaaaattgactaatgctcaataggttatgcttcagaccatctactagccacacattattaattgagatggaggaattaccaatagtacctgtaccaatgatctttccagtttggttgccaccaaacttcacttctcctccatctttcattgtaagggtaaggaacaaagctttctctccagtcatgtgccttgaacatccgctgtctaggtaccatgacctttgtttctctcttgcccttaggcacacctgcatttttagccaattcagatttaggtacccatatcttcatgggtccttttgggttagttttggaggttttacttttcctcccttgtaccttagggtgaatgctgaggggcttctgatcattcaatactttaggtttgacaccttttggtattgttttctcagaagcagtagctgctttgttcttctgatccttttgttttgggattttagattctggtttaatcagattctgatgaacaggttctgatcttttcagaattttaatcttttgactcttaggatcagattttgtcataaccttgaacttaaggttttctggctttgatgtgatcttagcctgtgaaccagaagcttcaggttttgactgaacagcagttacagcatttgtaccttcaggcacaaaggtggatttcaatccatccttgatacaatcacagtagctcttgagactgtattctttggatttctcctcagaatatccaatccctttgcctttgttcttgtatgtgctgtagatcatagaagcaactttgcttctgtctattccagccataataaaatcatccaaggcaatctcatgtttattgcctggacctttatcacatttttcttgtagcttcagacaaagaatcttgagtctatcttcat

SEQ ID NO: 4074 - DNA, 752 bp, Medicago truncatula
  Intron number 4 from transcript Medtr8g127980.1 (locus Med tr8g127980) derived from phytozome v7.0 (chr-ID MtChr8; po s 29771309 to 29772060 reverse strand)
cttctattttacaagataggccaagaagttcaaaagtaaagtttacattttttgtcctcttattacatctatttttctcttgtgaaagaattttatgttccattgcttttatgtatggtagttgagacagttgggctgggtttgctctatttttcctttgtcatacatttatgatattttttgttcaatttcgctatcctgcattgcattaaagacttaaatgcattcgtgagatttctatttgtagctttcttcattagactttttttcttccaaatatttttatatttatttgagatttcatgaaaacatgcatatttataaattatgaatcagctagcaaatcttgtgatatatatgacaaagataatttggtcacctgagtgaaattattaatgatactggccttggctctagataaaactctgcaatactgtatcttattagctttctcagttcacgggttacttgcctcttattacttctactttacgaaatgtggttaactcagcagttacaataatgataacatttatagaatactgatgtcagaacagtttcggcacgtaatttcatatttgtaagtaaaatacacctcaatttgaacaagggctttggctagaatgaagttgtttatctctaaataaaagccaccttacctccctccccacacccgctgttagcaccatgttattttgagtttgttatttgtctccctttcacatcagaatacttagtttgttcaatttcag

SEQ ID NO: 4075 - DNA, 969 bp, Medicago truncatula
  Intron number 2 from transcript Medtr5g041500.1 (locus Med tr5g041500) derived from phytozome v7.0 (chr-ID MtChr5; po s 17758316 to 17759284)
attctgtttgtcacagtagaccaccggtaagattctcactcacttgtataaatggtactttgtgtgtatgattatgaatgatcattgattggttttatatataaagtgatatcataccttaatagttagttaaacttatttatcattaaagaaatagtgtcaaacattattatatattttgtataaatctctatgcaccaacgctataaatcttactatgtattgtgttaatttttaaaaagattttacaatatatatgcctaaattcagaggaggtgttaaacacgtgagatcatcacattaggttaagagtgagtgagtctccaacatcttatactcttaatgttgttattaccaacgtaacacgtcttgtgattacaccgtcaagaactttttaatacgggtatccactctcgctctccatcaagccgcaccaccaggcttatgatatcacaagttatagagttcggagagcgttcaaatcaacaagttaatgatttaggatcactaagtgatcataaaccacatatgttcatgcttaaggaagactaaaatagttgggatcattatattaaattaagagcatccacacaaacgagttgacaaccactaaaattttaagtcaagagggatttctaaatctaaaattttaaggcaatagagatatgataaattccttaatgtcttaatcaatgtatatattccttaatctaatttgaaacttcccactcacacatgattaactacatcaacttagattctcttggttttaatttagagattaatttagtagttgagtttgagttagatttctagctttttttagatataaagtaatcatatagattggataattgtcggcaacccttgtttggttgacttaatgtctccacttgtttgattctcaattttcatgttaatttaatgatttgtgattatatatataatagagggaagaagctgacgtgg

SEQ ID NO: 4076 - DNA, 1185 bp, Medicago truncatula
  Intron number 1 from transcript AC233683_15.1 (locus AC233 683_15) derived from phytozome v7.0 (chr-ID AC233683; pos 95190 to 96374)
ttgaaaaatcgatcttggtattgaataactattaaccttaacttttggaatttgatctaataacttttgacatattatatttccgtctttgttacaagagtattaacgcacatcaaaccttcaatggtcatggtctcatggattcacccaagacattaaggggttgcgatcaaataaatgaattaggttccaagatattaggcttagatactttgttaaaccgtcatgaaactaaatagagaaagagaagggaatcaaagaagacataagagcctgtttgaaacacttctcaaaaactctttttcagtttttaaaaacttgaaaaattaaaaactttttttgctaaactattttttaaaattacagttttggaaactgttttgaattttttagttttggggactaaaactaaaacatgtaaaaggataactattgtgagaagaagacttatatatttcaaaaactgaaaacaaaaactatttcaaaccggccaatcactactttagctatttttacttccttaataataaaccaattgtcatgtatcataattataatcgtagtttagtagttttttccaccagtgaatgaaggacacccccttattaggaggtatactcgacttattcatacaagagcaatttttgttttgttacaaagctaatcaaagcaaaagaacaaaacaaaacaaagcaaactactctatatggaataacatataggagaaattaattattaattttaatttttttttcttctaattaaacatatatttaatataaaaattcatcttcaacaagtcaaccctaattttctctcattaatttttctcttccattttcttcattgagggggtggttttgtatcaatttgtttttacctgaaatcacgcatcttaatctttttatatttatttcattcgaaataagtgattttcacataaatctagatattttctttgtgatttcgttgtctgagtgaggtgacgtgttgttcgtcatcttagtgccgcattgtttgatttctcgtcttgttgtgatgttcatttgatttctatcggaagatcaactattcaatcaatgatttgaacgtcaatattgtagatccaaaaggatgagtattctgatcattttaattttatcttattatttgtaggcattttgcccttgtttgctattaacttgg

SEQ ID NO: 4077 - DNA, 1993 bp, Medicago truncatula; identical to SEQ ID NO: 3945
  Intron number 4 from transcript Medtr5g107040.1 (locus Med tr5g107040) derived from phytozome v7.0 (chr-ID MtChr5; po s 43174747 to 43176739)

SEQ ID NO: 4078 - DNA, 4744 bp, Medicago truncatula
  Intron number 3 from transcript Medtr2g018560.1 (locus Med tr2g018560) derived from phytozome v7.0 (chr-ID MtChr2; po s 4936319 to 4941062)
tcaaagaatttttacaggtttgattcaaccctcatgctttattcttccagtaaattgctttttttttaccatgttgctaattcttgcataaacacatagtaaatttatttaatttcatacccgtctttgaaaggaattaaactccttctcttaaaattacaatgtcaaactcttatcgccgagaaacgtcttgtaaaagaatattcactgttggtatggtggagagagtagtaactttcaattcaattttttacgtgcttactttaaattaagctataccccctacccctctgatcatgaaaaaatttcaaagctactaatacattattcgtaattaacccaattgtctatgtcaaagaagtgataggaatttaagcttttctcttttgagagaagtagattttttgggatttctgaaatttttatttatttggtaaattttcttgaattggttcttccacttgttataagttactaatattttttgaaatatacattacttagaaaactagtgtgaccaatgatgcttgctaatttcagtaatttgtaataatatcaccaaaacatataattttacttatacaattaacgcattaacattgtcctgtttatagggtggaaaagaaaaccaaaaaactgaacgaaactgttgaacgaacggaaaaaaaaaaccgaatcattactaaaagttttggaagtgaactggaacagtttggtttggttcagttcaattttgttcaaaaataatttggttaggaacagttcaatttgattcgaaacactttggtttgtttcaatggtaccaataataacaattggttcatttcaaaatagttcgactcaattcaaaataatttagttcggtttgaaacaatttagtttggttcaactaacagttcaattttcatcaaaaaccgaaccatatccaccctttcctctttatatactatgttacctcgtaaatatacacctttcttcttaaacctaaggtagccttaaaaaaaaattgtcccccgttgaattgggattttgattttattattaaaaaaaagtaaacaaagcatagtaaggaccagctcttgtcattaatcaaacttttatcaataaaaacacacaactactttatgaaagaaaggagtaaaagatgaagagactcagacaattcatggcacctaattatgaaaaaaaaatggggcaacaataataggtacagtgtagttgagagtagatatgaaaactaataaagacccaaccccactgaaatttacaacttaaaaataaacaaaaatactctaaattaacaatttttttttttatttagtcatatcaagaactggtaaatgagtagtatttagaagttagattagatgaagtaacaatcttgagttaaatggcacctctataactatgatatcttttaaattaagctaatagaaacacatatgcatcaatcttttaagagtttttaacttttccaagaattgaatttaaagtcaaaactatttgttaaattgaaagagactcgagccgttttatatatttagacgctcttataaaatatccatacatatttgaacatattatatcatttataatggatgtatgaaatagcttaaattaattgatgtccacttccaaaaatattcttatcatcaaataattcagtgggaagaacttggttagaattttattcttcgttcacataatacaacacagattgttgaaagtaatagagacaacccagccattttgccaagattatcatgttgcattggaactagagagctacggttgatgttaattttagcagtatttattgagtttatgagtaattaactggaccactgttcataacgtggtctgtcatgtatttctattttaatataaactctattatgagaaatgaaacctaaaaagaaaaataggcctctgtggcctctaatgaaaaagagttctttgccagacatgctaaatgtgagatagagtcaattataagaagaattttctccatctatctataccataataatgaaacttcaattctgtcaaagaaggaagaaacttcaaattacataggcatattattttatgtagatcttatgtgattttaaaaagctgagaattgtagcttctgcattaaagtggttctttgtcgtgatttctagtaaaacgtaattcgctcatccaaacagacactaactatcactgaaaattaatttcggtccaagtttttctgaataaatttactcttcaaaatcgattttttgtttaaaaattataactaaattcacaacataattaaaaatcctcaagagctaactaccattttagaattattttacaaattcaaatttaaatataaaaacaggcaaatgaatatctaatcagaaatttatgtaagttttagataacataaatgatatataactgaaataagcaaattaaattcaaataaatatcatacaataaaatatactttaattaataaaaaatatcatcttcccaaattttttattgaaaaataatatttaaattattatgaagtattttttttttggtcagggaaaaaaaatacttcatgataatttaaattatcatgaagcatttaattaactagtatatttcttttaaaaaattaactaatatattaatattaaatgttcctttataaatcataaatgtcgtccaatactcatttttatcatgaagagtgctaactactaattgacccatgaaaaggttatgtgcctaatccccaaagttgggaagagttttatcaaatcctcatgtttaagactatgttccaacttattaggccaaattcattaagatttgtgggtgcagtgtatcatcattatgctaagcgaaaaaaattgtttaaaaggaacacgtgattataaattgtaccatgcgattataacaagcgaaaaaatcagttacatacacgaacacttattcatatatacgtcattgtgattaactcacctccgttgatatatagacaatgcataatatatgcaacgtcatatgcaagctttgggcttcaaatcccagcaacaaaaaaaatatacatatgtacactttttgtttttataagtatacatataatacagactactttgaagagatcgttttaaatatttacttgtttaaaaggaatttcatatactaattacctaatatacttacaaaaatgaattatgttcttggaaaaaaaaattgatttgtggcagaatcgaagcgagtaaggtgagaatatgttaaactgaattaagttttgtaagacttaagtctcatacgtatttcgtgtacgtatcgacaaaaaaataaaaaagatggatttagagggaaaagaagtgttgtaaattcatagacaatggttaaaataaaagtcacaaaaaatataaaaacacttttaattgtagattaatctctattaaaatttcgtacttgttatcttttcaaccaattagaacatttcattaaatctcacctcacccttccccttccctaccattaagggtgtttgtactttgtagtaggcgagacaaaattggccaatctgctccattttgtctggcttaagattaatttgtctaaaggggcctgctaatttaagtggtttagttgatactctcaatctctctcgtttttttttttttttagtccccaaggttcgaatccagattttacatatattatatattgttattgccaatgagttaaactcacatagacaatctctctcatttatggcaagatcgataagcagacgtattaatcttttcaacggtttaaaaagtatttttttcttcattgaaataataacaccaacaatcagctatcatgaatttaaaataaataaaatgatatctacaattttttttatgatggtgctagtgtccaaaaaccgaaattgatttaactcttttaaaactatgtttggttttaatttttttacggcaaatcaattcaggtgactaaaactgatcatacatttatactagaagcaacaaattttaactttcatggcataagtaaaacaatttttcataccgtagattgttcccttcgctgactgcgtgactgcacctactacaatattcttgagtttgttttcactgaattacttttaacgtacgtgatgttctttttagttttataacaaagtgttatatcctgtttaaaaaactgttatatctcttgaccaaaaaaaaaatactgttatatctcagattaataaattacagtgcacacgcattatgtcatacgttttgtggtaaaaaatgtatgatttttctttctttctttttttttggtagagaaaatgtatgaatttttattataggttgaaaggttgaattaaaatccaagaagaacctcaaaatagtataagttgaattaaaattcaatataatttcaaaatagtcaaaatttctccaaaccaaaaaaaaaaagatagaaaaaatgttttattaaaccgacctagcgggccaaccgccctgcccccttattgtcccactttttcaacggattaaataaaacgggtcattttaagtgattgagtttaaaactttacttatcccgtctaaaatggaagactcaatctgttttacaatttgtaaatcgagtattttctggtgcaatcgtaaatattataatctctaaccttatcttataaattaatgactatattgttttttgcttagggtttgttggcagaaggtgctcaaaagattgtaat

SEQ ID NO: 4079 - DNA, 819 bp, Medicago truncatula
  Intron number 1 from transcript Medtr7g120750.1 (locus Med tr7g120750) derived from phytozome v7.0 (chr-ID MtChr7; po s 28263275 to 28264093 reverse strand)
gaggttctctcacgtaatttctctatttgttcaatttcttgttccattctatttgtttttagtagcaatcaattatagttctagaatgtgttattcagtaaaaagaacatatggaagattaattagctgataatagataacggataagttagttcatattatcggttaaacatgtatattgaattcaaagtgtttggtacaattagtggctgaacggactaataaatataaatgacatattttcaattttgataatgagggtaaaaagtagaaagaaaatgatatactataagttcaaatgctgcacttatgtttggttctgcggtgacaagaattgattttgagtgaattgattctgtaaaattgattttgactaaaagtgagttgaaggtaaagtgatttatttttggatacattcatgtaaaagtgagttaaactttaaatttgtgtgtaaaagtcaattctagaatcaaaagctacaaaacttaacttcaagtagagtcaattctgaaggcaaaatcaattatcttcgaaagcaaccaaccatgttagaatcaattctacaaccccatattcaattatgacacctctagaagtggaaccaaacataccaacatggtgagagaagacaaatttactttaatcattacacgatagaagctatacacctatttggttggccttgccatacatacaaagctataatgtttatgaacggattagtttctttgcgattgactttttttgatgtgataaattaaaatacttggatttcttccttcaggtttccagttatcaattgcaaaacttgttcagcca

SEQ ID NO: 4080 - DNA, 2074 bp, Medicago truncatula
  Intron number 1 from transcript Medtr2g033530.1 (locus Med tr2g033530) derived from phytozome v7.0 (chr-ID MtChr2; po s 9157545 to 9159618)
gagtgatttcagcttctggacaagattcaacttctgtatacttttcagaatcagaaggttgatcagattctgatgcatcttcagaatcagttgtacctgcattactttcactttgctctgaagttttacttccaggctctctatcatcaaattttacatgcatagattcttcaacacattgtgtttctgaattatacactctgtatgcctttgacctttcagagtaacctaaaaagattcctctttgagccttggcatcaaatttcttcagatagtctttagtgtttaagatgtaacaagtacatccaaactgatgaaagtaagagatattgggtcttcttcctttaaagagttcatatgctgttttctccaacataggtctgatatagatcctattttgaatataacatgaagtattgactgcttctgcccaaaaatgtttagctaagttgttttcatggatcatggttctggccatttcttgtaaggttctgttctttctttctacaaccccattttgttgtggagttctaggagaagaaaactcatggagaatcccatgtttttcacaaaaaagttcaaatggctcattttcaaattctccaccatgatcacttctgactttcaaaattttcaattctttttcagattgtatttgagtgcagaagctgctaaacacttcacatgcatagtctttacttttaatgaattttacccaagtccatctgctgtaatcatcaacaatgactaatccgtatttacttccatataaagatgcagtgttaactggaccaaaaagatcaatatggagtaattctaagggtctggaggttgatacaatgtctttagatttgaaagaacttttcacaattttccctttctgacatgcaccacaaagtgcatctgaatgataatcaatgttaggcaatcctttgaccagttgtaacttgctaattttagaaattaatctccaattagcatgtcccaaccttttatgccatacccattttttatcattcattgacagaaggcaaactaccttctgatcagccagatcagagaaatttattttatagacattctcaactctctttcccttgaatgtaatggatttgtcatccttgttgactagtgtgcagttggtcttactgaacgttacatcatacccattgtcacaaaattgactaatgctcaataggttatgcttcagaccatctactagccacacattattaattgagatggaggaattaccaatagtacctgtaccaatgatctttccagtttggttgccaccaaacttcacttctcctccatctttcattgtaagggtaaggaacaaagctttctctccagtcatgtgccttgaacatccgctgtctaggtaccatgacctttgtttctctcttgcccttaagcacacctgcatttttggccaattcagatttaggtacccatatcttcatgggtccttttgggttagttttggaggttttacttttcctcccttgtaccttagggtgaatgctgagtggcttctgatcattcaatactttaggtttgacaccttttggtattgttttctcagaagcagtagctgctttgttcttctgatccttttgttttggaattttagattctggtttaatcagattctgatgaacaggttctgatcttttcagaattttaatcttttgactcttaggatcagattttgtcattaccttgatcttaagattctctggctttgatgtgatcttagcctgtgaacctgaagcttcaggttttgactgaacagcagttatagcatttgtaccttcaggcacaaaggtggatttcaattcatccttgatacaatcacagtagctcttgagactgtattctttggatttctcctcagaatatccaatccctttgcctttgttcttgtatgtgctgtagatcatagaagcaactttgcttctgtctattccagccataataaaatcatccaaggcaatctcatgtttattgcctgaacctttatcacatttttcttgtagcttctgacaaagactcttgagtctatcttcat

SEQ ID NO: 4081 - DNA, 1091 bp, Medicago truncatula
  Intron number 1 from transcript Medtr1g016390.1 (locus Med tr1g016390) derived from phytozome v7.0 (chr-ID MtChr1; po s 3155346 to 3156436)
tggaactattctatcgtttgcttgagcttgacgtaattccaataagccttcttctctttcctgtaatatagtacacatttcattccattaatgaattttctattgcttgaaattcacctttaattgaactttgattgttgtagtgttctaatcgagcacatactctagttccggttccatttttaatactcaaatgttttggtcaatagcttttgtttttaggattttttattgggttaaatgtgttgaagttggttttgtagttgtttatagtttgtttctggtctcatattgctcgggttccgaactgttgagtgtatacacatgcttgagtaccctcatcttttgaggtagcttttgggatgagatccaagctcatttaacaaaatatacttttgttcttctgcgcaaattctagtttacccttgtaaataaaaaatggggttccaacctgttaaagtctacattcattcaatagcttgttcagcaaagttatctgttacacatcatagttactatagtactgctcttagagtaacacagccttgtaataactactagtttgttagaactagttgagttagttagagatccaaggttttatatatagctacaatgtaactaactttgattcattcaataaagagatattcttttctctgtgttctttcttctctaagcttccactttctctgatttcaccatgtcaatggtgaactttaagacaaccttataatttaaagattatttgtttttagacctttgagcatattactgtacataacaaataatgtgacggggataaactaagtacatttaatcgcataatttgatgcctcaaaggtctaaaagcaaagcattttaaatttcatattcccagaatttgctcaaatagcagggacaaaagtaaatttaaccctatttatttctggttaccaaaatacacgtgaatagagtaatgagcatatgaatactttatcatgtactactaatttatccatccttttgttactgatttatctatcctttgtttgaatatgaattatcgatctaaagggaagaaaacgatcaaagtctacacacctgacaat

SEQ ID NO: 4082 - DNA, 1549 bp, Medicago truncatula
  Intron number 1 from transcript Medtr2g103720.1 (locus Med tr2g103720) derived from phytozome v7.0 (chr-ID MtChr2; po s 24249101 to 24250649 reverse strand)
gcttgcaagtgagtgagttttaatttgtaattacacctttttttattggtgcttttttgggcatgtttggattgacttatttgagtttatctacttatataagcacttgtgaaactctttgtgagggcctatagtacgtcaataacttgtttttagcttatttccgtaagctcgttgtaatctatgaagcacggatacggacaccggacactgacacgccgacatggcaaataatttgaaaaaatcacaaaattcagtgtaattacaagtgccggtgtcgtgtcggtgtcggacacgatgcgtgtccgacaccgggacacgcctaatccgaggagtgtccgtgcttcataggttgtaattatactttttgggcccatttggattgacttaattttgagcttatgcaaataaataagcttttatgtatttattattcataagttctcgctaaccaaaattgtatcttcataaactaccttgacaaaattatgaattaacataaaagcttatttatttgcataaattatttttcataagctaaaaaataagccaatccaaatgggcccttggtgtatatttggttttacggcgagaaaaatagagtttgagtgaattgattctggcgaaaagttaagttgtgggtaaagtaatttatgtttcaatatatacgtaagtaaaagtgagttgaataataaatttgagtgtaaaaatcaattctagagaattagaagctacattttctagattctagtagaatcaattctagaggcaaaatcaattctactctagggaagccaaacatgtcaaaatcaattctacacctctagaatcaatttgcactcttccaaaagtggaagagaacatacacttagagattaaattgattttatttttttaatgtgaagagcaagtgcaattgaaaatgaattttaagctttgggaccaaaatttatgtgtttggggttggtgctctaaaatttatgttggtacttttgctttaggaagcgtcttctgtattagcattgaataaagttgtaatctttttctagaccaaaaaaaaaaaaaagttgtaatcttgttgatactcgtggttgcttatgagcaatgtatactgggtatgttttgatacttttaattttggttcaaatttccatttaggcagtaagaagatggtggaagaaatacctgaaaaggtttttttttggtgagagaacataagattgacaacattagcctattacaacataagtgtagaaagacttctacttgttacttgtgcttataaatggtgaatgtcaccataaatcacgagttatccttttttctatataaaatgcttaagttatttttcttgagtatttgtgagcttttgatctctgagcgtttttgccatttaataactttcaagtgtcactaagaaaattgtatttaacttagacttgtggtattctcaatgttgtaagctcaaattattgataactacggtcttttctaactatggtattcatttacagattttgtccagagatatacattggtgagcaggggc

SEQ ID NO: 4083 - DNA, 4566 bp, Medicago truncatula
  Intron number 1 from transcript Medtr4g140490.1 (locus Med tr4g140490) derived from phytozome v7.0 (chr-ID MtChr4; po s 34456602 to 34461167)
aatcacaatctcttattcattctctaaggtacacaatctcttattccttcttgttgttgtcctgatatgctataatttgtatctaatgatccatggctaaacactaaaatcttttattaattggtatcaaagccaaatagatacaacgtataaaccctaattattttacaattgactaccctattgttaagtcgatatatattcacgtaaccaatttggtttattgcgaagaaagcttcaacaaaaattgtaccaaatcaatgttatttttaggagaattcatgtgtgttgccgcaacattattatatcccaaaatttcttatctcttcaattgaaattcttgttttattttgaaaattgattactatgaaatttaaccatgaattaatgatttgtgaaatcatgatctttgtttggtaatcaagacccacatattatgttgaccaataattcaaaccgaaaagttatatatgttttaatcaaacaaatattggtttaaattgttttgggtttcatcttgaatctttgccgtgatgaactctcttgaaaatcgttgcattgcgtcatccgtaattctgagaagcaactgacgtcgatccgggtcacgttgcgggttattttgacccaattattatctggaaatatacgaaaggaatgcttatgcacaaactacttatgaaagttatactttagcgagtttaacatgtctctatactctggaattcagagcttaatcagatggtataaaaaaaatggcacgtatcaagtccaaatattccaaaatttattattttttatgtcaattaaatattagttattattctgatcaatgtggcataaattttggaattactttgacaactacaaatattttatttatttattattattatttggggaacaaattgttttctataaaatgtttattttcatgaagattccttacactttatgacatttatgaaaaatctcaatcttctataattgagattgatgtgtcaattaagaatttttcatccccaattaactaataaatattatattattttgagataaaaatataattctttatacatccaaaatattcttaagaagatttgatttattttgtacccataaaaattgggatttaaattacttcatgaaatctcttaatgtttgatgcaaattaatatgagaatcataaacttttttaaatcatatactctcaatatttgagtctaaaatatctgatgtgagaatactttttataataatagcacttgtataaaatattcttttaaagtgctatatgattgtgaaaattcttagactcggacttatattattgcatcaaatattctttattaatatatattttgagatttgttgattttcttgaaattatttgtcctgtcaagattaacttgactattatactgtatatatatattcttgatttatgggtttcaaaattttgtcaaatcttgaattgtttacctcattgaagtgataataatttctttaaaattatacatatattctcaatatttgagcctaaactgttttgaaaatcctctcttatattagtaacactaactatctaatcaattaaaatgttgtgattgtgaatttatagaaggctcaattttattaattttaatgccaaatataataaatttaaattttatgattttcaatattcttggcattataaatattctaatataatctattctttaattcatattttctttgcataaagatccaaagtttactacttgatcattcttttggcgacatatttaaacttagacacttgtctttgattcttgtcacaaattgatttaaaggttcctaataatattttgttttcaaaaatgcgtatagtgagttgtatattatatatgtcatatgtattagttgaatctaaaattggcatatttatctttaatatacattatgttttctactataatctagacccataatttattactctaaattttgtgacaaacaccattaactatctaattatgtgtcttgtcgcaattaaatgtttggatcacaataatattaaactatatattttatatatagtgaataatgcattgttgcatttttttaatgctaaaattctaattatgaattaaaatttgtacgcctctttgttgtttatccgtgaactattatcaaagcaacttattaagaattgaagcaattttttaaaatatttatcatccttacatctgaattcttatataaatcatattgatttataattagagtctcacatatgtttatttataattgcttattctctattgatgaatattttgagatgactatattataagatattctcgttaagtcatcaaaaatcattggttctaagtataaggatgaatgtcacactctacgaagtaagttgttatttaattattttatcctcttgtgacttattgcttattattgcacatatgaagaaatttaattcttcttctcttttgttgtgcaattatgatatcctatgtagaagtgaaatccattttccagaatattctaaacagaactctgttgttaaatactttttcttactgtagtactccatgttgtatttatattctttataagtgggagtatttaaaaaatttattctaagatttctattatggataaaataactcttgttattatactatttcatataaataaattctaaagtcatatctatgatatgctaatttaaaatattgttaagcatgtatttctattatttgtattgaatatgactgaaattgagtaaattaagtacaattgtttatgcatgatattattttatcatattctcctaagcataaacattattgatttgtataattgtaatctcacctatcgtggatacaattatgcaaagtttttctaaatagttagcattatattggtgacagtcataccctatcggtgtgttgttattaatataattgatattattcaatgtaccttaatttttatacatatgtcaaatataattagagtacgatatcaatatttaatttttttttgagacataagaattgtacattgtgatgatatagttcttacttattatccttaagatctcgaatgagattacaataagtgagttactctattaaaagacatgtagcaaactatataaatgttgcaattcaatattattctaattttttgaattaaatttatatttaaatgttattttatatatatatatatatatatatatatatatatatatatatatatatatatattgatttgctattatccctttgttatgtgagtgacggacatacactatcggtgtgacgttacttaacatatcattatgtgatggagaaatagttgaatattttatttaaaatatctttcaaactttttaattcaactatcatattctattctctatcaagtgggagaatctttgctatgtattatgtaataccctatcggtatgacattactcaacataatcatctttttatgggtaagaaaaataccttattagtttaactattattctcatcaattggagaacatataattcttcaacaagcgaggaaaattctacatgtcaattaactatattttataaacaaatatattatttgtttcataactctagatataaaattattgtagagatttatattgaggatattaattatagtcttttctcataaattattatatacttccatatccttttatattattgtaaacttattttgttaaagcaatatgtcataatcctaaaattcttaacaactttgttgagaaaaaaatttattccattattctaaataattataaatggtatatttgagatatttaatattactatattttgacatattttatattattgctattctttaataaatggaagcttatgactattttctcttatatcctcaataataataaaatataagtcttatgtatttccgctgcgtgtaacctaatcttttgtcaaatgtgtgtaattataattgtagcatttgagttttgagtgagtcactaaaattgtgaatatagtctcacatcctattttataatactagatacttatctcactcatatgatgataaaccttttacataatcatcatactctgtcatattaaggttactatatttataaaattctttgaaattaaattttatttgtgaaaaggagatcttgtgttataaaattcttaaataaaaatttacattttccttaattctaaatgcagaatatgtggttaactacgaaacccaattctttataatatctgccattgataaaatatgtatttatgtgggtttcatactatccttgagttaccacttgtgttaataattctgctatactcatgtgcaaaatatatggttgagttcatgaaactctattagttaaaattatgcagtaggagtcaattgttagacttagacctagtatgtgaagaacaccgttgtttctaaatttcaccaaaccgctgcttccccttcaaaactcagtaatctgatagccaaaaaccacaccatcgtttccccttttcctcaa

SEQ ID NO: 4084 - DNA, 10256 bp, Medicago truncatula
  Intron number 3 from transcript Medtr7g087770.1 (locus Med tr7g087770) derived from phytozome v7.0 (chr-ID MtChr7; po s 18878773 to 18889028)
cacattcgggagtgatgcttaattttcatttgtttcaaaaatgttaattggtcaacggggtacatataatgcacatgcatgcatttctctagactttataggaagataatagaaagataaattagaagtcatggtacattttctttagcttaaaatcagttatgttaccttcatttcataagttatatataactatattcgcatacatcttatccatgttaatatgcattagattaatattacagttattttcctgtttagcatttcccaaactaggtgtcaagaacaattctgaaaggaaagcgcaaaataatcactctcattgatgaacaaacatagagaaagtataagtgtcgcctctatgcaattagaatccattgattataggtatttaatatgcttctttttttttgtttgcttgatcactatagccaaatatgatttcatttttgacgatgccgtttatttgtttatagtgtttcttcaataatttttgtgaattttgcggttttcaaactcagagtcataacttcaagcctgataaaaaaattatagagaaactcaatgaagtccaatattttttttggtctaaattgtaacaaaaataagtttaaacaaattgttaattctttaataaatttatttctataccctttactctttttaattcttttatcaatcatcacaaatattaatgtgtattaaagacttgataaagctttcataaatattttgataaagatttataatgtttgtgcaatattcattaatttgctcatttttcttttaaaatatttttttttataaaatacgttattaaacccgtgcaacgcacgggtttgtaactagttttaatataaaaatagcgcatatgaattgtcaaaaatatcaaatgcatgtagtatgaaagtaaatgtgttatttacatcatttttgttgagtttttcatgcgtagtagtagttagcaaattgaaacaatgaacagtgtgtggtgtgggtgctagtcaaatttgccaatttggtcatttctatgacttttatttccacaaatactaacaaaaagtctagcacatgctcgtttctttttgattcagaaagatatacaaaaactatatatgcatgtgttatgtaaaaattagcgtaagcaaactaacttacttttttctaatgtatgaaaaatttgaaatttggtatttttcactatatggaaagtttgaaacattattatgcaatgaacgttctattttagaagaatttggaattccaaactatcaatcaatctgggtggtataacttgaatagaactctctcgaagttagcataagggattagatagtcagcaaacaatgatttctaatcataaacgtaagtcaattatacttataaatactgatcaattttgtggtgtacaaatgagacaaatatttcattatatgtaagttaatttttacgatttaatcgataaattttgccattaaactagatgagatatggacttcttgatcaaatgatacaaaagacacttgtgtttgatgcaagatcatttctttcgtgcaccaaagattccttatctacttaaaaaagttttcggatccacacatgatcagacaaaaggaaacaacagcgtatatcagccggcaaagaaactgatgcgatagtgactgttcagtaaatccgaaatcttgactttttaaaaacggagtaatacgtgatccgtttcaaaaaactgaagacaaaatatattaggaaatttcaaaataattcagtacatagtcatcgattttgactgcccactttttatcaatttataatgcaattttttcatactccctccgtcccatattatatcaaccagttgattttgtcacgtatgtcaatgcataaatgagtttaagaaaataatcctaataaatcaaatataaaaatacatgatttgattttaaattaaatatttagtagtaagtaattaaataaaagtaacaatagtaaaggatacaattttgttcaatttaaattttaccaaaataaatattggtcttcattcaacaaaaaaaaaacaagaagaagcagacagagatatgtacggtagtgaaatataaaagaaataattaatgtatattacaacccctaaaaaaatcaatgtatatcacaatttgatttgattaattttttaacgtaatcttgtcaatttttgaggaaaaaggagatgctcctcaaagagaaatttataatgcagacaatgatttgccattttttataattgattgtgcgacggctaattgggacagcaccttggactctacttagattcgatggccaataccaaatgcattgaacttaaccatattagttactaccaacttttttttactggtgcagtatcttggagaaaatatactcttaatttatccatgttttttttatcatgagtagtaatagagtcgggtcagattttggttccatatttacacgcaaaacaattgtgatccagacaatctaatcataaattcatagaaaagatccactcttattctaacttattttacatgcaatttactttcaaccatagtcaattttataaaatcaattttataaaatcaaattttattaccacttaaaacctttttggtggctttttcagctaatattggtgtaacttcttttatgttgaaatttatgttatgttattgaagttgttcatgctagaggccggataaatttatgacttgagtgtgactccctcctcatcgttctagctttttactaatgtaaatttgctttgattccttcaaagcttaaggttaaatagaaaaattgtattcatataattaagaatttccgttttagattttatgatatttacaaagaggagaatacttttgtagacagactaacccatgttggcttctttgttgatgatttagtcttatggaatcacttacttagttgttataaaaaataaaaaaaaattaaagacagtgttgacttactttcttatcgtttttgtttatcttgttttgatgagtttggtttatgtcagcccacctttgttttcttttttcattttaataatatatttaaagagatcgtataggattatgatgaattttgtcaaaaaaaaaaaaaaaaggaattataatgcattgtagtgtcaacatagtttcggtcgacatgtcaccgcgatgcaactatctccaattttataaaaaaaaaaaaaaaaaagaagttattttaaattattaacatgagactaattttagtatattttttattttttttggtaataaagagggccagatgccttaattaattgtagtcctataatagaagttctatatttcctttaacaaatggaaagaaagaagccgccttcaatctacttcctaaaatcgaaacacaactttaatgataattattgttactgcctaaaatatgtttttctttgttggagaaaaggtgtttttatgttcttttcaaatgagaaatccaatctgtcacaattttaaaatgtggaaaagctaaaagggatacgacaaaatctttattataaacatttgccttaatttttttgaagagtacatgtggtatcttcacattcttcatcttatttaatgctttcttatcatccaatcaaattgaattatgactcattcatttttttattagccaatcaagatgaatcatgactcatttagttttcatcaaccaatcaaaattgatcatgccttattttttccctatatatagacaatttgtttttcattattttcatttgtctcttcccccataatttttgttttgttttgtaataacaattattttatgtgttttaaaagcatataagtttaatcatttggttgtagattataggattgattttcttttttatttgtatctaattgttaattgttgatgctactttttcagggtcccattggagagcatgtgtctacattctacgacttcaagacgttcaacatcaacaatataatttttagtcaagacaatgttttttatttgatataaaatcaagatgttagagtttagatatcttaggttgatcgaatatttttaatgaattgatatgtcgaaaaactaatctcaataaattgatttagtctttatctatatttattttatgaacttttgtcttccccaaggatatattacacatgaacttttatttgatgtattctaattgatacttttaaacacatctccggacatgttaaacatcatcctaaaggttgcatacaattggttcaaatcatctaatttggacaaaccttttcttataagaagacatgttaacttcatcatattttactatgacggattttcacttaacatagtttcttcaatataatgtttcaaaagcttcaatcaacaattgttcaataatcatggtttattttttatttcttttgacaatataggacataatcctttaagtgtcatttcatctcatttatttgacaatcaatatatgactttttttctcctttgatttgtcaattagatagttactattaaataattttttcaaggactattaaaaatattgttgatttcgctatctacactgtattataaataacatccatttgcaagcaattccacgcataatttcaataaaaaattgtattcttctcaatcttttgtctcaatgtcgtgtcttttttctttttgttttctttttttctttctaagtttcacgtatttggtattattaaaaagtcaaaatgaattatattaacacgaaaatttcatatatttgtaaacttaataattttatatagttcataaatattctttttttccttttattaaggataataatgataaagcaatttaagaataattaatatgtcatttaatttaaattagaatgaattcataaaggttaaaatgtctcatttaaatttagaataaaatgacctcatttgatggatgagaaggaaaaagaaaacaaattaaataacagcgttaattataacccttaattaaaggaaacaattaaaccaaaaaaagatgaaaataaacaaatattgaagtatattatatcaaataaatgaaagatgtttaaaattcaaaaagttcaatttttatatccgtattaaaaaactgaattatttgaatcttttaactttttttattaatgtattaccttcatttcttttgagtaactatttaatttacaaacaaaaaaatttgtcaataattttgaaatattatatttttataatttataataattatggtttatgcgtcattttaattggattaatcctataaatatcaaattgtgttgtctaataggccaaacatttttttaaagaggtcaaccaaaaaattaaaatgttctttaaataatatccttaattgtagccattaataaaaatattttttgttttttgggaatatttcatgaatttgaaaaaattattgttaaattttcaaaaaaaaaaatctctaaatttcaagtactttaatttgaataatttaacatattttatttttttgtgattttttttcattttaaattgatgtggtcatttaaattaaaatgattctattaaaggtctcatttattggattagaggaaaagaaatgttatttaaatgatatcattatatggtaacatcttttgattcactatttttgctattagtactaataatagcattcataatcaaggttggctcaactaataatgagttgactcaatcttatgggcgatgattcaattcccgctactagcgtgataatctctttgacaggggatctctgggtaactttgtaagtgtccactgagtcatgtgacgtatcctgaccttgatgcgttctccagaatataactcacctaaatattttataacaaaaaaaaaacacaattttgtttaaattgtagataccgacagtagtcgttaaaaagcctcaatttttttattaaaaattaaagtttgttcggcgtattctaaaatattttttttaaagaaatctttatcttaattgagcatcgaatgctattttttcgatcaaacattccatatttatcggtgcaccatctcctcttaatgattttgttttcaatgttgctgtaaatgtgtaataatcgaccacattcaaaatcaataataaactcaattaagacacatacttattacaattaattatttttagggattatattactataaacttgaacaaagaaattcactacacctttacaccaaaatcgcaatcacttatatcgtagtagttcatatataaaagttcatattaaaataagatatttataggcaaattgtacacatttttaaacgacacaccaattttttaagcttaattatattctttattctttatagtgtaagttttttttttttgaaggggatttatagtgtaagtttaattgttacaaacgacactcccacaaatcttatcctccttcatcttaccattaatgtgatttaaaaaaaaaaaggatcataagacacatgttattttttttccttagtatcattaattgcatccacatatcaacacaaatttagtttcttactttgatcatcttaatttttcatagcatatcacgttgaatcaatttttcttattttacggtcaatttttttagtggatcaaatcaatttattttggttatttgagacgtttgattgtttcatacgaagaaaaactataaaagattgatgcaagtgatgatgaatcaaaagtacacatgtcaatttaaaattctaataacgagcattaatatcttttccatctcataaaaatatgtacacatgtgatccatatttcaagtcaatgtacatgtaatcatgtctgtgttgcacgacaatctctgttaatctgctaccgtaatggttgtttttaattctaccttattcaatgccaaaaaaatcatatagttaaaatcatacatattatgagtatttaaaaaattcataataaaaaattaatatttgcatctttataataaacaaattacttggacaatttttcacgtaaacatggtactccttatttctaaaacaaatgacttgcacagttttttaagtgcaaatggtactcttgatttctaatgagcattaaattctactccacctcataaaatatattcctatctccgtttctttttaattatcacattttgacattttacacaaaccaggacaatcaacaattgatactactttttatgccataagctatacttttactataatgaccttattcatttaatatcttatttcatatatttctctctccgcaataaataacgaagaacaatattgataaaacaacatttaatgttgcattgaactttgaaagtgacagttaaataggaataaaatttttctcaaaaagtgacagttaaataggaataaaatttttcttaaataaataattaaggtaataaattatcacttttatagagatgaagaaaaattctggagaccgtgttcaaaaattatgtaaattaaaagatgtgatgttaatgaaagaaaatgtcaactctattatgtttatcccctgtaaaaaaaaaaactatgttatgtttaagaaaggaaaatgtcttttattgatattccaaaaagaaaatgatatttattgtgacggagctttcagaattaattataatttaactcaatctaaccaatttgcatcattagacaattaaaataaaagtttctcatacggagtctttgagtcatgacatagtcaccttttaatatttaaatcaattatagtgtaacatgtgtcctatttatatagatcagattttaccgtttagtttatttgtatagtattttttttcaaattgtaatttacttctatcagcattgatttttttacaaaataacaaaaaagatggtttgcttatttttttactactatagatatttttttccaaatgtattatacaaataagtaaacaaatcaaattttatgactttgtcatcttttaatatgtaaaccaatgtccccgtaaacaaagctttgttggcagagacaatgcattgttatatgcagtagacacctcagttgttcatattatctatatttgaccaaaaagtaaggtgtgtaaaggtcgctctaaaaaaatgtaaatgtcaaataaataaatcaatattataaaatcgtggtttttgtttctaagttgatatgtatgaatgaatgaacattaaaatattgtattgtttttcatttattacatcatgaataaaatgaatggttattttgattatgatgtctttgactataaaatattggtttttgctcccatacttttcacaaatgaaataagagaattaggtaaagaaatgacaatgtaccaataacagaaaatagaattttagagaaaactttcaacaataaaccctccgatcaataatataagcaaaaatccacattttagatatattcaattaatgatgtatgtggtctttattatatgtcacatacataattaattaaatgtatctaaaaaatggatttttgcttatattaatgaccggagagtttattgttgaaagttttctctaaaattctattttctgttattgtacattgtcatttctttacctaattctcttatttcgtttggttattgtttttctttgatttaagtaggaactgcccatatttttcatttctctattatctacacttcatttacattttaacttataaccactgcttattttgacttatatttttatttagctttattatagaaaatttcatctccatcatgtgttcccttaattgtttttgaatcaccagtaattgatatagtacttaatattgtggtttatgtcattttgttgcattcattgatttagtgattattttttagtgaggaaatcatggatactacacgtgatcaaccacatataccccttgattaaccaaatatactcccttaaccaaatctatttttgagaagatgatacaaggttatagatatgtatagttactatcattagtcactgagaaatacattattaagtgaatgaaatagtactttattatcggttctttctttcttttcttttttcaatttatgtatgagggcaaagtaagtttttgcacaccttgattttgtaatttgttaccaatctatgtttgactttgagttttcaatctaagaaagataatgcatacatttttaatctttttgtgccactaatgctaatgttaagcctctttttgtacaagtgaagtagcgtaaacaaatacaatagtgcattaaacatcctcttaaaaaatgcactggacattgtttgttgcgatgcattctataatttggactttattgtttcatgagtaacaaatattatgttgatgggaacctctttcatcgaatacctacgtaaaataaaataagcaatttcaaaatcttcatttaaattgattcattgaatttatttacatgcattaaaccaaaccatattacagttgtaattataatcaaaattgatactattgttgataaattttattagatcatagagttgaagatcaaaatagatttttatagtaaaaagttaggataatgggaaattactatttttaataacaatgtcgttgattgtcatttttctgttacattatatattaatcgtcattttacaattcttaaataatgaatttatagtcaaatttatactactgcattgacacttcatgaacaaaaactagaaccgatgtacgctattttctttttcggttaaatcaacatttttttgggtgaattcctatatctatatctatgtatttatgataaacatttgtcttaattcaaatcaaaagtatatgcaacatattcacattccccatctcaattaatgcattttttttttatttaatttcttatatagatagaaaaatttcaaaaaaatgatatacctaaagaaaatcagcaaactgtattggctacaattagattattctatatctcatttccatttatgtgaaaataaattactgacataacttccatgtttatttttccacatatacttccaaaaatttatttttctactcaaattaaaataattagtcttataaacaaactttaaaattagtaatcagtacttaactaataacaaccgatttatagagaaattttttgctccacttattcatttcacctttctggtattttttccttcggttttcggttttgataggaaaatattgattattagtaggttgttcggggagggaaa

SEQ ID NO: 4085 - DNA, 943 bp, Medicago truncatula
  Intron number 1 from transcript Medtr5g036690.1 (locus Med tr5g036690) derived from phytozome v7.0 (chr-ID MtChr5; po s 15347504 to 15348446 reverse strand)
tgtttgtcaatacatttgaagctttagaaggagaggtacaaattcttagcattttattattcatttcctatacatgactaaaatattcgctcgcgtaaaatagttgaatcaactaaaattaatgtatttgggcatcaacttttatggacttatttttctcttataatttagaacgatgagaaaataaattaattttatttggtttgattattttttctccacaatattcatgactatttattacttagtcttacgtatatacaaaagtaaagtcaaatgtattttaccaaaaaagtgaaatgtgtttaaaaacagaacgagtattttattttatatatttctctttctatatctacaataaatagttaaaattttattaatttgaaaacaaaaaataaatagaaatatattttttttgacaaaaaaggacacttataaaagaagagaaaataatagtcaactattgttttcttgttccaaaaaaaaatgaaactactgttttcttagtttttttttttgacatcaagtatttttttggacatcaattattatttttttggttgagttgtgagacaatgttctttatttttattttagtttttatactactacaattatgcaatgaaatcagatcttacatgtttgggtgtgattttttattttttttggtacaaaaaagagggcagagcccaattttatttttattttttatatatatatatatagaaaaatactaataagtatcacgaccctttattataatattaaaatttgtgacgtttatggataatgtgattttaattcaattccctcttttttggaattttgtttttgtttttctaattaataatgagttttagtggaggatgaatttatgatcattaacaattttctttttgtattgaaaggttgtgaaagggctaactgagctttttccagctaa

SEQ ID NO: 4086 - DNA, 1139 bp, Medicago truncatula
  Intron number 8 from transcript Medtr3g102140.1 (locus Med tr3g102140) derived from phytozome v7.0 (chr-ID MtChr3; po s 24843886 to 24845024)
gactggcaagttgggatccctatttaatactttgggtaattacaagaatttattatcaaacccgattgtttttatgttcacagaatatttctttgctgcatctgggattgcatggattattttttatatatattatctgtaatactcttttgattagatttttgtgatggctcgtgaacattatctcttctgtgaagtagatatcaacaaaaaataacgctccatatccgactactcatgcatttactattgtaaataagacttctttagcaattcttatcctattgaatattgatctctattagcaaaaaaaaatatattgatctctttgtacatatttttattttgttgtagatgattgcaatattgtgtaggagcaaaataaatacggtttgtctaacatgtgcaatattgcacatgttaaagctactaaaagtagtaacttaacaactatttattaaaaagctacatactccctccgtcccataataactgagccatttaccaaaaaaaagtgtcccaaaataactgagccatttcaattttcaatacaatattaattactttttcccctttataactctaattaatactattttcatcattcccaattcaatatattccactttgcaccaatacttaacaagagcacttaaaaccactttttctctctcctttatttatacatttttcttaatatgtgtgaaatgagcaagtggctcagctaattcgggacggagggagtatttaatataaaatgcacaagttacaagacaaagttactatttaaaacttgttaacatgtgcaaatttgcaaatgattgaaaaccccaaataaatatacctccttaggtttttatatgagagaatttgaatacagtatttacaaacctagtgagaagtcaatatatttgctcatacatacttttgtttttggcataaaagtttcttgagttttatctcacttttgttttgcctttctcgaataaggtttcttggtatatcttatgttgtaccattttaacattcaaggataactcctcatttttctttctcttttgaatacggaatattttggttagaggcattgaaatcgtggttttgtattaatggttattatttgcagaatttttttggaa

SEQ ID NO: 4087 - DNA, 1253 bp, Medicago truncatula
  Intron number 2 from transcript Medtr3g137940.1 (locus Med tr3g137940) derived from phytozome v7.0 (chr-ID MtChr3; po s 35110841 to 35112093 reverse strand)
gagcgagtaagaaatatcattagagatcagatgcctagaaatatacaggtttattttattttattttatttttgtttttaactattatttataaagatttattaaaaaaaaaaaactatttgtttataaagatttttttaacaatggtgtaagactattaaacttttacatacgtgattatttcttacttttatatttatattattatactttttttttaaaagaaagtttatcatatattattatacttgtgtatgatgatgtttagactattattatttacacctctgatattaattttgtcttgtatgaatattgatattttttttaaggacggatattgatattataccatatatatatatataattataattaatatattataatattgttttttatatcttgattaattttatcaaaaaaaatcttgttaattgtggtttgattctttgagttttttggttaaattaaaaatatttaaaattttgataattgcttatgtaatgtcacatccaaacacttcaagttatgtaagtactttttagtgtacatatccaaacgtaaatagcttattgaatataagagcttatgatgtaagctctagtgctataagctctaatgctataagcatcaatataagctgtttatccaaacgagacctaagtctggcttaagattcaatcatcgtgatcctattatttagtttgatatcaatttaaaattaatttagattatgaatatttttatttaatgttttgaacaaaaaatatgacgaaaaatcttctttatatatttaattatatatacacactcacatagtgttgataataagtggtgaagctagagcaaattttcaattttacaaaggaacaaatttaaagaaaataaaatacaaatttaaaattaatattaaactttatcgataaatgaaatatttaaataatttttatctagcttaatttaaaattgcctaaaagaaataaaacccgacgataatcaaatctattcacaatattctttttttcatttttgtgttagccctccaactctcaaagaaaaggagttttattaaatcggagttcggccgaaaggttagtaaagtttagtcaattaataattaataatatcttattcaatgtaaatatctcagctatttgataagaaaaataacttaggtccattttgtatatgatgttgttttgatcatttttattgtcaaaagttcattatgtagttattatagggtttgg

SEQ ID NO: 4088 - DNA, 1041 bp, Medicago truncatula; identical to SEQ ID NO: 3993
  Intron number 1 from transcript Medtr7g106120.1 (locus Med tr7g106120) derived from phytozome v7.0 (chr-ID MtChr7; po s 24447515 to 24448555 reverse strand)

SEQ ID NO: 4089 - DNA, 908 bp, Medicago truncatula
  Intron number 9 from transcript Medtr6g102110.1 (locus Med tr6g102110) derived from phytozome v7.0 (chr-ID MtChr6; po s 22652163 to 22653070)
ttgtcttcctttgttggtgtgcaattagaaggtaagactaccttcttttgcatttttaaatcatatatttgaatatgttgcttataatttttagcattatttggtgtgcggtgataaaaattgatttttagtaaattggtttataaaattgattttggtttaaagttagtttaagtaagacgatttatgttttaacattaaaaaaaaagagcgatttttatcaattcatgtttggatcacttttatgtatatcagtaaatttgagaattgattctatatgttaccgcacaagctagaaatattagcttttgtagaattgactttaggattggaatcaattctaaatttgaaagccaaacataaaaaattatgatcaaatcacgtttgactaaccccaaacgtgattctgggaagtacattcgtggaaacaaacataagtttaacatgtgtttggaacaacggtttttaggaaaatcacgtgagcctgaaagcttagttttgtagcttctgtcttcatgttaagaatgtctcagtacgcgagaatgacttgcaaacgtggttccggacacttacttagtgtatatttggtatcatagtggatatctcaaaatcacggcaagaaatcacgtcaacctaaaagcttaattttgtagcttttgtcttcacgttaagaatgtcttgggatgcgagaatgattgtaaacgtggttccaaacacatacttaatgtcttttctccaaaaggagccatggatgcaatataaaacacaaaatacatgcatgcatacatgtcttgtatttttaaattttaaatttattgttcatttattgcttctatgttccctttttatttctattgaatatgaatgtcagaacatatttgtgcatgcagtgaaccagaaggagatca

SEQ ID NO: 4090 - DNA, 6807 bp, Medicago truncatula
  Intron number 1 from transcript Medtr5g083460.1 (locus Med tr5g083460) derived from phytozome v7.0 (chr-ID MtChr5; po s 31679576 to 31686382 reverse strand)
gttaagattgcaaccgcaagattgatagcgagttggtctttctagcgttaactaagaggaaaaactttgaaggttatgttgggtctctcattcgagttaagatcctctcattctggtctatttgaagattttgtctgattttagatccttggccaagtatgcttttagtgactgagtaggggtctggatagaagatatctctctttttttggcctaacccttgtaacggatataatccatattggatcctaatttattatatctgtctttattaaaaaaagtaaatcaatcaaagttatactttacaaaatattattaaagatcttctaaaaaaaattattattaaagatgtcattatgataaattagctccgacccttcattgatatataagaatgattatagtaacaaacctttaaataagagctttgctatatatagtgaagccaataacccaccaaagtacttttttctttgacataaaacaaacattcattcatttaaattgatagaataacatcgatgcaatacaaattcgttaaaaataaaaaggatggatctgtggaaaaactcaatccacaaaagtactagcaccgttagatctgcattttggcacaattcatgggtggtaggcaaaatacatgggtgtgtgaataataatttggcttgcatgcagtatgcgtcgtggtgttgtcgcgagaaaacttctcgctgtaaatagttttttcctttaaataaattaatcgagaaatatgacaatacattgaataacttctgatgtgattattttaaatattttatgggaaatgctaaccgatgcctccgaggcactggttaagataataaaaagaaaaattatatgttaattattgcattgaaaattgtttaattaatttataaataagttaacaaaacttcttttatgataaaaatttcttttttttgtatgtttaaccaatattccggaagcaccggtaaacatgaccctttattttatcaatctaagaaatataagattgggtgatgtactcaaaaaatacagttatggaagtagaatgttttatcgatatgtccaattttcgctgagttggatatccttcctcacatgtgtctatcaatctctatccaacttgccatagaaaaatgataaaaattacttaataatatatataatactcttactattaaaaattccttctttgttattttgcgaaatttctaaaattttggttttttcttgaatttggaatatcactttcctctttggattctaaatggattatggatagggttgtggattatatttatcatagatgacattttgacccaaaaaaatcatctaaatgacatgattaataaaaaaattagtgccaaattaataagtaaaattcatctaaattcatcatgatattatatatatgcatctaaatttatttatcatcattataaataaacacgttattaaacacatcatatatggtaaatatcaaacacatgattaatatatgataaatatcaaacacattttgaatttattctcacattttgaatataatataatattatattatagtaaaatatattggataccgccaaccccaagtaccaccatatagatcctctaaaaggacgaacatcgagtagaatctcatcacagatagcaacaaacgattgttgctaaatgttcatatgtaaacattcagattatacatgcatgcatacacacaatattctatttgtataaagttccaaagatacttcagttcaaatggtatagtattttcacaatgaaaaaaaatatctagatatagatatttttaggaaagggtctaaagtaaagccctaaattatttcttgttgcccctattatcgccgcaacacaaaaactcttgttgccctaaaatagactagtccatttatgcaaatagtgttttgattttagccatgaaagcatgcaagttgatatttgaagccagatttttcattgaactgaaaatatccttacaagatttttgtaagttgttgtcatcatctaaaattttcgttgttatttcatcttttttattagtggttatagtaatcaactactatatttcacaaatgacgtgtttagggtgaagaagagtttcatatgatgtactagtggatcaatatttgaggataattggaaactctaaaaataattgatgtcactaatcataagtagcttatagtattcatatcttcacgactgaaacggcgactcaatcaatgttagtttataaataaataaaaaacggtgcaatcaaaattcaatttatgatcattttctcttgtttttgttgaataaacatcgatcaagtcagtcatcgtattaaccgtagaaatgtaaagaaccttgatattttacttagatgtcaaaattttgatccaactcaaattatttcgatccaatccaagctagctggaatgtttttgcccctattactatcatcaaacaacaaaaaatcttgtttcctccaacatatactagacccgatgttttgtcaaaaaaatagactaatctatgttgatattattttaatcttagtcatgaaagcatggaagttgatatttttagacagatatttatttgaacttaaaatatccttaaaagatctttgtaagttgttgtcataatgatctgattcatgaagaagaaaaaatcatcttgtggataattataaagaaaataaaattgtaacaactcaagataaacgtttaaatttgggatggacattgaaaacttagtacataataaaaatattaatcaaggctgtccacattgtgagaaatagatacatatttgagacgccactgcgaaatccgggtttaatttatttcatttgtttgattgtattttgactattttctttttcaattcacagaaattaaagatgcaaaaaagattccttaaataaaatgaaaaaaatgaaaactagcgaaattatatttcatcttttccatctctatatttgaatttatgtcgttatttcaactttcttatatagtgattgtagtacgcaactaatccgaatatatgcgccatgcatggaggatttttttttatagaacttatgtcattattttaactttctcatagtgatttttttttttgtgttaactcttcgatccgttagacataggaattggaacagttattcagactatttctcatttaatgaaactcattaatcgtttaagtttaatcactttattttatattttacttatatgtgtatttgtacaatacttcactttattttatattttacttatatgtgtatttgtacaatactttacattgtgggtgtttaacaattaatgtctctaaaatatctctcaaataatatgtattttatattttgttacagtatcttttatatcattgtggaactcttttcaaataaataatttttttattataacaaataattggattgcaatcaagtatagttttctaattttaattaatataaatacttttacttacaatgcatggtgagagaaagcactaaaggcatgttagagcatccacattcatgtcacatatatttgtagtttcttttcatgtttgcattgaccttttcaaagagttgttttagctatagttgatttttttttaggtggtgttttagccatagttgattgatgtggtgcatcggtgcatatggtctatggtgaacgatgcttaaaattcattcaaaactttattgacgacgaatgtgattatgttttattagaagttgacggtttttaatgttctcacggatgagagacaataacttgcacgttattggttcaacttaaacaagatagaataaattttaaacgaactgaaattgatcgagtcatctgcatgtacaaataaatctataaacttaaacaattgacatcgtttttttttatccggagacacttctaagttgccttacgtactctaacacatcaagacaccttcgttagtttacaacacaaacgtatgtgatgtgtctagcgtgaagaagaatttcatatggtttaaggtggatcaacatttaaaaattatttcaaactctaacaaaaacttgaggtcgttcgtcataaatagaagcttgtagtatttttcattctcacacctacaacaatgacctataattgatgattttggcttgtaaaaaaataagaaaaacaaataatagtgtgatcaaaattcaacttgtgtttattttcttttgtttttgttaaatcaatatcgattaaataattgttctattatatcactctatttttctcttcattttaaaatgtataacttttttcctaatctctgacttcatttagtacctcatatttttaatctctatttcaatcataatattaataaatcacatataccatatcaatctctttattatttttctgtcttaatatgtacacactgcaacacgttaacaaaacatttttcttcctattgatcaaccactagccaaagcaagaaacatggctttgttggcatagaattatttttagctgatgtggcaaactaatatcctagtatgcattgaggtcacaattggaaacgtcatatccactcgtatctatgagtggctgagacatagcaaaagccccacaactgccccatacatcttccttttccaactttaccactctcatgttgatgaactttaatttatgtctcatcaccatctttcatccattgcatgtaatcttagtcaacgacaatttgactcatttttattggctatacttctcttacagctgccacatttctcagccacaaaaaacatttttatacttatagttatacatttctgtatatattagaaataaaaacatgaatggtattactcttttatgactgaaaaaaagtaaatttatatagtttcattatatttaattcatcattttataaatatgacaaattcttatgaaaaaggtgaacaaagataacgataactcgcgacataaaattgttttaatttgtgacaccaaaaaaattaaatcgtattaaataacattataattagcattttagactaacataaaagaaatgactttcaaatctcttttgcttatactacatttttcctatcttttgaaagggagaatgttggtatgttaatttgataattaacatttgttggaggtatgaatcaaatttgatcccactattttcactttatttattaaatatttcatcaaccacaaaatcaattttataactccttatttttgtctttatatgtaagactttttagactaataatatgcaataattaaaaaaactttttgtattaaatttatcaatatatattctcatcccaaaattatatttcaattattaaaataaaggatgacttttaaattctatgtgattaacacatcttgttattcgaaaaaagtcacattaaacccctaaaaaaaacatttaaatttcacaaaaggatcatacatatagaagttcttaaggcactagtctagtttctttttcgtttttctttttcttttctttttttctctatgtaccaaaaaaaaaagggaggtagtattttgttacagaaagggtataatataaggaaaatgcttaacagtacggaatcaaagttgaacgaaaaacaacggatgcacttgctgtagatttcttattacaattttatcctcaatccacttctatatgaccaccttacccttgtatatggtaagtgtttttttagtttcgtcaaatcccgtgaataaatagcccgtactgcataacactcctcataatataaatatcattttatgaaaggaagtaaaatttaaaatataaaaaaataaaaaaagactaaggaattataggatttggatttggtgttgtagaaaaagcacacagtttcacctagtaataaattctggcttttgatatcagaaaggacggttcagattaaacagcagtttaacacagttaaataatctcaaccgttgatctaaatcggacggccctgatttgttacagatcctgctgtaaacagcaggaaatccctatccggtattataggaggagtcctactctctataacaacaatacgaagaaaaagacgcatatgggaagaaggaacattaagaatggcccagaaacatcctttaatctaaaacgatgtaaaataggtgtgcatctttttctttgcttattgattttgatacatcattgcatcaaaagaattttatacattatattctttttcctttttatgaaagatatacatcatcatatttattcagggggaaatttcttttgcgttacaaggataacacataacctttttttgttttttgataagcaagtatcaatattctcatgatagaaagggcctttaataattcattatgaaaacaaaccctcacaacatcccaccacaaaaggagaatagaacgataaggtaagcaagctaaagaaagagtattatttaaattaaattttgtcacactttctaaatttaatttttcggtctaaagaatggataaattcatggggtggatatttctatagagacgtgatatatatccatgaacatgactacacagggttaaagtgatttcatgtatttggtcgttatttgtctccctcaatggtgtgtgcctcttttcctaattaggttaaacgataaaaaagctaaaatcacatcagttactattattgtacacggtgcaaaatgataattgataaatcggtgagcataataatatagtatgtatcaaatgacaataattatacaggctggatattgataaacaaataaaaacgaaa

SEQ ID NO: 4091 - DNA, 1154 bp, Medicago truncatula
  Intron number 2 from transcript Medtr4g009040.2 (locus Med tr4g009040) derived from phytozome v7.0 (chr-ID MtChr4; po s 1356239 to 1357392)
aggtattgtaattttgttaattttattttggatattatgttggttttttatttctttgtactgtatatttgaattgtgtttgtgagtcaattgaaattttcaaatttggtgcagttttgtttgagcttggttgtttttgttatagaactctaattcctttcaaattaataaattttttattttgggttttattaaatttaatatccatgttgtcatagattggattcaatgatttcataataattaaaaacaaaagaggatgcaattcaatgataattgtaacatcatttcactttttgctgatttgctgatttttcatatgggttttctttaaagcttcattgttcatttgtttcaatgtttctctgttgtattctgttgaaacaaacagaatttggcaactactttgtaggattaggatacttttttatattagtgaccccaaatttaataggtccgtctgattagaaaggataaggggagtatttggggatattaatgacagacaataccatattcaggtttgcataacagaattaggaaggaaagaatgaaatatacataggagttgagttcagagcttatgtagagttgattatgatctagagtagattctagagggaggtgtaatttttgaaagtcatgactcatgagggcatgcatttagtttctgttttgcaaaccattcttctagcttttgattactgaattcagtgtgaatatcgatgaagtatgttcttcaatcctttaatgcttctttttcttaaaccatacctcgaatgggagttgctgcagggtattgaggtctagagaggatctggaaaattgtgttaagaatggtttttcaatataaatatgtgcccacctatcagatgggcctattggagtggggagaggtagacggtcatttatgggtaggaagattgaagggaccattgtagaacctattctatcatgtctgttctctttgttagtaataatttattgagatttctgccgttaattgttgtgaaatttcttttctatttttagtagtattttatttagatttctgctgttaattgttgtgaaatttctgttctcttagttgcattttacttgaggatcttgtaatgaccttgtgatataattgtatctgtattttgtaggttgac

SEQ ID NO: 4092 - DNA, 1110 bp, Medicago truncatula
  Intron number 3 from transcript Medtr3g106580.1 (locus Med tr3g106580) derived from phytozome v7.0 (chr-ID MtChr3; po s 26860234 to 26861343 reverse strand)
caaacgatctgttgtgggtgcctgttctcctgaaggtttgtttctaaaattctatgtaatagtggaggttaattctaaaatttgattcaactcattgggttttgcagaaatcttttgtgcctttctgatatttattttttatgattctcttcatatgattttcctcatgactctgttaggaccttggtaaccatggttgtcaaaatcacatatcaatatttagaattatatttttttagtatttatttactataactgtaggatcatgtcagattctactggactctggtaaatgagtaggattgctttcaagtgtaacttgacatttatactgtaaagttgttggaataataataaacaatgttacacatagacctctttccctgcgttttttgagatgggtgggctgtgattcagtttgaatggatgggtgattattgagcatgaaatgaaaaaatgtagtaatttttctggaggtgctaacgaaaggaattccactggttggatttgtttacaaagatttgcttttttagttttttttaattctgtttaatgtatgctatttgctgaagtctttgctctatttctcaagctgatgagttccattgccatttatgttgtttggatcattgtttctctttttcttttggtagattactaatatgtcaattatctatcataattatatctcttcctacataaaaggtaataactatctgtattctttaagagatattccatataaatctctattttaaattattatacatgctttatagatacaattcctctagtaggtggatcttactatccttgagaggccaagcttggttcctaggttgaacttgcgaatatgggaacccaacttatcaacttttctctaaccgtatgcgttcatatctaaccttatgttatgcatgttcatataaacagattcagacctactttgctctctagcatgctctacacccgtttatcatattcatcaaccttggttttcattcagtgcgcaattgttctttatattttttcttacaataatattctataatataaatcttcaaaaccttttcctcagtttttcatttttatttattttagtcagccttg

SEQ ID NO: 4093 - DNA, 2139 bp, Medicago truncatula
  Intron number 2 from transcript Medtr6g093440.1 (locus Med tr6g093440) derived from phytozome v7.0 (chr-ID MtChr6; po s 20045421 to 20047559)
gctggtaatttcaatctttctatcatttgcttctcatgattcaattctatgtgtttcattgcaaattttgattcatcatttttgttgttaatttcatgatttaactgctaatcagtaattttctcacttgcctatgattttgattttagtaagagttcaattttgtagatctagtatctgtttggatacataacttagtttgcagcttatattgtaaagttaaattgttttaataagcgcttagttataagctacttttatgatgagataaaaattaagtttaattgtttttttgtaagttataagctgtttttataagccaagggcctgtttagattggcttgtttttgagtttatgaaaaatagcatatgcaattaagtaagcttttatgttaatttataagttttactaacgggaattatatcttcataaactcttttatcataaactccattgacaaacttatgaataatacataaaagcttgtctattgcaaaatccaaatgggccctaattctttgatggattatgaaaattttctaagtattgtcatgataagcgattctgtataagctatttttattgcaaaatgtaaacacaattatggttttttaataagctatacgttgtttttgattttgattttggagtttatgaaaaaaagttggaaataacttattcaatagatgcccaaataagcctgctgttcagtaactttctcactttcctgtaattgttgttttacataagcgtttcaattttgtagatctaggatctgtttggataaataggctaatttgcagtgtttactataagccattttataagaattatgatgttttggtaaactattttggattacatatgaaaataagctgaaaacacatgttataagtaattttgacttttgtgattcagttgtctgtgtttacactggaaattacaattcattgttttgaagtattaatttcatgattaaactgcttatcagtaattttctcactttcctgtagtattgttttagttagcatttcaattttgtagatttactagggtctgtttggatcaacttatttaagcttatctatttgcccaagcacttgtgggactgtttgggagaactaattgaaacaattgataacattttcattacctgtattcagcttattttcataatctcaccatgatatcttgttaaaacagcttataactgctaatcagtaattttctcacttttccataaccagtagtttcatcactttaattattaatttcatgatttaaactacattgggccctgtttggataaacagtttaatttgcatcttgtattagttttaacacttgttatgataactgcttagttataagctttttttataacaagagatgaaataaatttaaattgtttttataagctataagttgttttataagctaatcttggagagctaatggaaataagctgaaacagcttatgcacaaaatcattagctgttttaatgagctcttgcaagccgtcatgacaatgttatgccattaaataagctcgaataagttcatcctaacaggctctaagtaggtatgctgttcatttgatgttaagttaatccaaagaggctctaagtatgcatgctgttcatttgatgttgatgtgtaaattaatcatagtttgtgaacaatgtcatttgctgtttgtgtaagctatcttggagaacatataaaatatgctgaaagcagcttatgaacaatgtcgtcataatctgttttcatatccagaccgccagtaagtatggtaaaaacagctaatgaacaatgtcaaaacttatgtgagtaattgagcactaataagcctatccaaacagaccctaaatatgtatgctgttcatttggtctttgtgtgtaaaaaatttggacatttgattgcatctgaatcgcactgttttgtgtgtactaaactaacagttttttttagtcatattgattttttgactaaagtgccatttttattgtgtttattattattattatcatgatttgaaagataggtttttgtatttttcatgctgttgtctgtgtttttgtatttttcatgtaaaacagcaccttcaagaagaaggcaccaaaagccatcaagg

SEQ ID NO: 4094 - DNA, 2014 bp, Medicago truncatula
  Intron number 5 from transcript Medtr3g143500.1 (locus Med tr3g143500) derived from phytozome v7.0 (chr-ID MtChr3; po s 37020694 to 37022707 reverse strand)
gatctgaggtgtgtaatctatttcttgttatttatttgttacaactagtgccagatgcttcccaattttggttgctcagactttatctttcaacatcttttttctacactttttacctcgagttttttttttatatcgtatttgtctcctcatgaactcttcctcttttttgtagttatctttgaaatactgaaattatcgtgtattttatataaaaacatcacactggcttcctttgtcagtcacttgctgaattgcatgacacattggcactgttagtgttatgcaagggccatggcggttaccattctcgctgcactaatctcatcaccaacaacggcgatggcagattgaaagcctgtagcaaaaaaaaatgagaaattggatcatgagtcatggctagaccccaaaacccacatgacctataagataaaactctcgaaagacttgtaatatcgagcagtcttcaggctcatcgtgttcatctaaaatctttagcctcaactatctattatattttatatatttatttatatttaatcatttttatttattatattatataattatataagataggaagattatttatttctatatgtattcttttatattatataataccttatatttctattctatatataaatataaatatatgcgtagaaagtagtaaagagtatataaaatactatcttaaaataaaaatatatattttaaatagtctcattttttagaatttgaaataacgaccaattagattacagtaaacagtaatttatattacaaaattcttatgcattaggatgaaatattgtatactgtatatagtataatacatataatgtttcgatagaaatttgatatttctattgaatttctaaatgaatgccaaattttaaattaataaatagattttgattttcgctttgttattagaaggtctgtatctgagtacctccaatatctgggaagcttccatttctagtggacaagcatttttttacgctcttttttgggcagcctctccttctctttatctttgcaattcttctttcttgctatctttcatttgctcttgcggttctgttattttttttcctccgctactccacttttatgctactgtaagacttatgatattatgtgctttctatcagtttgatcatcggtcttaacatgtgttggcagtgcttttgtttttgtattgtattctgcatttttttgggtatattttggtatatgtactctcttttattattgtcgcctcttttgtcatagtttcctatgccattagaacattggacatttgtgttatactttttattttggttcaaaaaagttgggggcaagagatggtgttcttgtcccaggctggaaaaaccttcagattcattgcacttgcaattaattcactccaaagtgatgagtggggctcaaatgttccacatgactttaagtaatgaatgttagactatactgtacatacgtgtgagcttagacatatactttcaataatttaatgcaatgctgcattctactgctttctgcttcattttcctattggacttgttggtgtcatttgggaatatgcttgctaccccttctgcccaaatgaaagtttgtaaattagtggttagttatccaaagaaataaattaagaagcagacttatcatccttttccattcttactgtctcttttgtttagggagggtgaaggttgtttatttgttaatacttaataggtttttgtttcttagtttcccctttgactaaccattagaaactggacggctcaattgcttaaaaaaatttatcctactaatcaagattgcagaggtatttgttttcttatctataaatgttatgagtttcttttcggtagattttaatttgttaaagtattagtcatagatagttttaacatgcttgctttaatcttcatcacttgctcatatatgctaatatgtgattatgttcgacagaaggttgataatcctggtcaggcaaaca

SEQ ID NO: 4095 - DNA, 1192 bp, Medicago truncatula
  Intron number 2 from transcript Medtr5g026540.1 (locus Med tr5g026540) derived from phytozome v7.0 (chr-ID MtChr5; po s 10721455 to 10722646 reverse strand)
gtagattgagggaacaagttgccaagcaacaacaggtagtgatcattttatatgggttgtttctcaattttgcactagtactatttaggtttaaattgcttctgtagtatcattaatttgacttgaacttctgtttaaacaagcttattgtatgtttggttccactttttatgaagaggcaaaattgatcttagaggtgtagaagaattgattttgacatgtttggtttttattgaatataattgattttgtgtctagaagtgattctgacttgaagctagaatttgtagcttttgcctctagagttgatttttagctttggatttatcatttaactcactttcacatgaatgtatccgaacataaatcactttcacctgatactgacttgtacccaaaatcaatttgcttcaccggagaagcaaactcttttgcttagtgttttttggttccattttgtaagaggcaaaattgattttagagatgtagaattgattttgatttgtttgaatttggacatactctagtagaattaattttaagttgaagctaaaaattttaattgatttttagcctcaactttattgttcaactcacttttacattcaactcacatttagccaaaatcagttttatagaatcaatatattcaaaatcaatttttatcgccgcacaaccaaaaagacatgtatgtttggttccacttttggaagaggcaaaattcattatagaggtgtagaaatgattttgacctgtttgaatgttctcgggtagaattgattctaacttgaagctagaatttggagcttttgcctcaacatttgatttttaacctcaaatttattgtttgaccctttcttacatgaacgtatgacgtatctaaacataaatcactttgcattcaacttacttttagttataatcaattttactgaataaatatattcaatatcaatttttgtaccgcagaaccaaacacacgctaaggcttgtccttcatgattgagcttatggtgttggtgtgaaatccttaaacaggaagtgtagattgtgttaatcgttgtagaaatgtttgtttacattataatgtagattctgtttgtaaacatgattgaactttgtttgtcttatgttgttgttgatgttgttgttgttttgcagtctatacttagacagttgggccaacttagca

SEQ ID NO: 4096 - DNA, 2686 bp, Medicago truncatula
  Intron number 1 from transcript Medtr5g045550.1 (locus Med tr5g045550) derived from phytozome v7.0 (chr-ID MtChr5; po s 19055926 to 19058611 reverse strand)
tcttcatcagtcctttgattctagcagctacggtatctcttctgacgttttatttttcttgttattatgatagatagatagaaaacagtttgattatagaaatagcttatacataagccctaatgtttatcctaacagggctttctcactaaaaatgcaaaatattaaaaaaaaaaaaaaatcccctgaaaatagttgcaaatagttggtggctgttttaacctatttttagtgaaaacatgatcaatttgattgacctaagcaacttaacctaaatttcatcctaaattttaattaaatttaaattaatttgatgatgccatcataatctttattgttggctattgcctgttttgtttgtgctttttggttaaaaagagggagcaacccgatgcactaaagctcccgcatacgcagggtctgggagacaaaggaatattgttaaataagagaaacaaagaagtagaagagggtaaacaataaggaaaggaattggaattgaaattagaagagaaaacaactatcaacttagttaaggtcggcaaacacaagaaaaatccaatttgtagtatctagttactgagcagcataagagggtaagaaaactacttcaatggcacttctatcaaaagatatctattctgcccctcaaatagatctcaccagcttaagtgtttagcctctcgctgtagactaatgatatctttggtttaccaaaaaagagtagaagaggccaaagctaaaattgattattggaaaattctgtctctcctttctaacaataaactccaaaacaactttgctttgtttgtctcaactgtttttactcctctttgtcatggttgtataaccgagttaattgaggactgtacaggtttacaactctaagtttcaaactcaggttaacttgtttcacttttaccaaatcgtttgtgaataaattcgggtagacagttgaacgggtatacaattgagtgagtctagaatatattggttacttttcctagacatgtataaaatgacagcgggttaacgtttttcaaaaaacccaaaacgcaatagctgaacgataagactttgtagtttacgagaaattaacctcacctttgcagcacttgattccacatttgcatatcgcatcccaacgtgagcccgtctttaaggaggtgaaggagtcgctacccaataactttatgcataaatgaagtcatgaactaaaaaacacaagaaaacccattgttgcaagtgtgtagtgaactgaacaggttaatgaggtgaatgaaccctgctcagatgagctaaagcctagctctaccgagttgagtctagctctaatgcggggaacccagtccctccatcctcactatttggtaattttaaaccttgtgatttgtcaatttgtccatcgattttgatcttattatgctctttatgtgtgcctgagttgagaacctatcatgtgatttgagagttagtttgattgtactgctatgtacttgtattctgttttattttggctgggtcagtcatgtatagagagtgagtcgggtcaggtctactctggagctacgaatccatcttggtttaatttattgcctatagaaaatttagattttgttattgtgctttgctttattactaagtttgattgttgaattttactaagaaaatattatttgtttgaatatacgaaatatctcagaatttcttttgtattatgtagagtatcttagtttatctctaggatcattttatcaaacatttgacagacaattgacatatatcctagaattagttgccatattacttagttattatcatgatttgttttattatttacctgtttatttagagttaggggtcttgtatccctgtaattaaggtctagtctggagctacgaatgcatctcagtttaacttattgcttatagaaaatttaaattttgttattgtgctttgcttttctaccaagtttgattgttgaattttactaagaaaatattatttgttagaatataaatatgaaatatctcagaatttcattcgtattatgtcgaggatcttagtttatctctaggatcattttatcaaacattgaccgacaattgacatatatcctagaattagttgccatattactagttgttatcatgatttgttttattattacctgtttatttaggtccagtgttgacatatatcctaggatcatttgccgtattcaaagtttctattacttctttctttctttctctttcttttatttaaaacctcacaacttcaacagtattatattatgtttagatattggtgtagatgttttgagcatgatttttgtattaagtgcgctgttacaatcagatgagttgaatctctgaagatttcacaagttaatgtggactaatgagtttgacaactccgctctcagagtttatggccacctttgcatacatagttgtatgacatatgtaatgaagtgttactggagatataatatattattaactcccttgcaaatgtttcaatttgatttaattatctgtcaatgtttgagatctgtatatgttgatatcagtatagacagagtgtgtttttgttacttgtaataattgaaggttgtcctttcgtcagtttattgtttctaatttttgtctcttgtttcttgttttcctttcatcagttttag

SEQ ID NO: 4097 - DNA, 5152 bp, Medicago truncatula
  Intron number 9 from transcript Medtr5g098610.1 (locus Med tr5g098610) derived from phytozome v7.0 (chr-ID MtChr5; po s 39336862 to 39342013 reverse strand)
agaaggtctacaaaaccttgagggcaatccctccattttgattcatgtatttgcttggccgttttggctcacaaacattttacttcgatgccactttagcttaccatcattccattttaatattatcaatcatgattatcgttaccttacagtatatgcaagtagtattttgatttgattcgaaactagggcctaatcaaacatggagtattttgatttaatattaataatcatgaatctatttcggacgtaaaccccattttgaattcctttcctttgatcttttctgtttttaatataattgcatttgttgtagtttcaacaataggcttgaattaattgtgacagaattttgaactattttgcgaccgaaaattctgtcccgatttaatttttttcttttggtgtctgcagtataccatcattgttttattttgaacacaatttcattttcattatgatatcagcagaacctaaactttccattttgtcatttcaccaatggtcaaacctagtttcaatcaaactatccaccgcaaatttcttgtagtgaaaatcacaactcctatcattgattagagctctgaaaaatcggttgatgaagtcactgattcaaacggaaacaaatcaaacaatccaaacaaagatcaacgagtgttaaatagaaaattcaatttgaagtgcactcaacgatcagctgttgccaaatagtgaagacggtgaggcttaactcaaaaacaacctctatggcttatcaaaggggagattgtacttagtagtaaattagaaaattcaaagatacgtgtgaccaacttgcagatttggaaaaccactctcagatgtggaaaaagtattccaaatatcaaaggggcttggaaacaaatacagacagttgcttctatagagataacctgttagttgtaactaactgttttagagttagtatagaatatagaacatgtatcataactatcctacaccttcatgaattatatacaagctgtaatgtactctatgatcaaataatgagaatcatttctattcatttcttagtttcataatatggtatgagagaagttatttatgatccacatagggatttgtacatttatccattgcgatcttcaaagttgatcacttttttttgaagattttctcacgttttctagttgatttgattgtgactgttgatgaagctcatgctaccattgaagaattaagagtaatttatccaataatcaatgaaaattagtcttataagttaatttaaaaatagtatccgcaaactaatttttattcatgtggttaattttcattgattgttggataaattgtccataatttttggaggtatagcctatgccttaccaataatatctaccaacaaatgagtcaaaaaggaatctcatatgacaacaaaatcttgaaaaaggactaataataataatatcaatattagtaataataacaattttctctaaatatttaaccaactaaaaccaatatataattttcatggtaaattcatctaaacttagatcgatatatcaagtgatagttatgcacaaaccaaaatgaacacgaaaaattattagttaaggtctgaaaaactagctatttttgtaccaaaaaattatatcacacgaattactactattgttgacacaaatttgaaggtattattcgtatttcattgtactactttgtgtagagtaggtgaactgcattatttatgatgtaaagtgtttgtagaaaagtcatttgcctaacatgaccaaattaaaacagataggagtctgcttccccttttgaaagacatgtttccctctgtcctatccaatattaacttgtatctaaaaaactgttaaccaatcaactatattacttatcaaaattttaaaaaaattatttattgacaattattaataaatactcaaaagaattatatgtataaccccaaaagtttgttctcgtaatagaacaatatacctcctccaaaaataacaggctcgaaccgactaaacgttgaagggaactaaatataaatatatttgtaaaaatacattaatattgagtagttaaataggttcataaatcatatatataacatgccatattttgaaaacttatttactactgatatatttaaagtgaacactgtattattcattaatttggtcttgttaaaaaaagttgtttgattgattaaatattcatcatacaatcatttaacgtcacaatacttttaaatttcattattttaattatttagtatgtttgatttgatggttttgttttataccctctgttgtaataaaatttaaaattttctaccacttaattaaacatggatgataatgatgcttgatttaaatagactggtcattctaggctgcattttgcactttactgaggtatgattctttaaaaatactttgaaatctgctttaagctattcatgaatcatgatggactatgctgtatattagaggtgccctaaattcttgtaattaaggaggatatggaaagaaaactcagttggaggtactcttaccaagtcaaaagtcaaacacaaaggacacaacacgtcaacaatttcatgcttgtcgtaatgatgaacccatgtaatcttgcttaattacgttccatttcttttcatattttccgtcaacacgagatcaagtttgtaaaagaaattattataatgcaagactatatattttaataagccataactaaaagaaatggtttccgtctatttataaaaaaaaaaatggcatatcaacgtatcaaacattttccaactgatcgtaggaaaagaaacacatttttcaattagaatttatttattttgaagtaaatgaagcaacatgatattgatactatataatgaatgaatccttttttgagcttaataaaacaataggtttagtagtttgttttgcatgggttgacggttgacaaatatatttcggtggaaaaaatgtttagtttgggtgagaaaagagatgtgtgtgattggaattggagtttagggttattttaggggtagagtagttagtgaatgaatgtgcttcattgttgtctaacatttctatagaggctaatgtaaaagacctttgaaattggaatctgattataaataatgagtattcgatcatagaaacatataaagttttttttttttgaagaagacatatcaccgtagaataatataattttgatgccttaattgcattttcatcccctaatttcaccatttttgaaaatgattccttattttacaatttgatgatatttgtccttgtacgtaatatttgatctaaaatacgatcatataaagtttttaagagaacttcttatagaaaaaaattatgctgatttttcttcatcatcatatcatatacaagttattcaaaaacatatcatatcaccaattttcttaccaattttatatttattaattattaattttcataaggtataagcacttagcccttcctatttgccatttaaatactctctccatactctactagactatatgtgctatacgtaaataaaaaatgtatcaacaattttatcttttaaaatagcatttatgctttttaatctacaaaaaaaatctctaaaaggtgatgagaaataatacaaatattttaaaaaaaataatataaaaggcttattcatgttaaccacccaagaaaaacactcacagacaagttttttaaaaaataattaggcacctttataatggtctttttcaatgattcaacgttgcatcactttataagaaatgagagaaattaaacaaaaaatcatttcaaacctttttttatagaccaaaagagaaacagaactttcaaaaactacaaaccctagaaaaaataaattggtgctttttcttcaaattttctatgtcacattttcgttcatttgtattgattgtctcatccaagaatagcgaaaaggatcgaatattatggagtatgtacgggttcatgaaatgaaatcttttctttttctttccatcaaattaaactgtccttttattaacgtatctttcagttctgtgctttgtagggtcatttttgaatgtgttatgatagtttaatcggtggtagtcactgatcggctcgtacccaccatacaaaaagtctttggtttaccaacttctcaaaattgtgatatatgactatctatgacagattattatgtacaacattttagtttatcgacataattattatttatgacaacttatacaaacgacttacaacgtgtttgtaaattgtttttggcatattttaagaagtttttcatgaaaacatcatatagcttaagcgaaaatgcttgttataaaaattttaaaaaacttgtataggaaaacatcttatttatcagattgaattcattttatctttggttataaaaataacttataataaacatttatatatatatatatatatatatgagaaacacttatgttataaattgttgattaagttcagatagaatcttctgttgggatgtggggggctcgaggaatcatcatattggattttggtcggttatctcgtaattggaattggggacaacgttttaactgaatatgttatactccatccgtccttatatctaaacaactttttattatagacaaatgatgcttacatatagggatggaggaagcaattcattaggtttataaaatctctcatgtatataacattcaacatcaattatttatccaaaatgggacacttaattactcgtatcttgatatatcacttcgtgaaaagtttcaaggagtattgtgagatcaatgcttcatgatcataaaagatggataaactgtattttcactcaaaattttaaaatattaaatatgcgttaaagcaataatgtgttgggtacaattgtcaagtaagaagaaaagaaatatgacataaattttttatttaggccaaattagtcccttccacatttttagtttatacttattgggggccacaaccaagaataatattttatacttatttagggccgagttagtcccccttgcttattagggcaaaataaacccccaactagattgctggcaggggataatttattgagcaaggttgcacgacgaattgtggtgtca

SEQ ID NO: 4098 - DNA, 1966 bp, Medicago truncatula
  Intron number 2 from transcript Medtr1g127170.1 (locus Med tr1g127170) derived from phytozome v7.0 (chr-ID MtChr1; po s 28554059 to 28556024)
ctcagtatatatagcaggtttgactaaaaaaatttatgtttttctttcatgaacttctttatattatattttttaatgcgagtctgtaaaaaaccaccctttttaatgtgagaaccatataaaatctatatgttgtatgaaaattgtgaattttactgtttttcattgaagtttacatatcagcaacccggagtcatgagtatatatgcttgcataaacttaatttattacttaatattgttagtagtagtaactgatgagacaatcttaaaaaaattaagtaaccaatgagatgatatctgaatgataaatattatttattttgcaccattaattaaattttttagccatgcctattttggaatacattattctgaaaatatgattaggagttagatataggaatttctcattcaagtcatctaggatttctcaaaggttgatatgttgtcttggagatatccgttttgagcaaaatggatcatttacaatgtatagaatgagagatgcacacatgtgtatttgaaggcactgttatcaaagaaaagattacaattacaataatactaatttaccattttttcttctaacattgatatgagtttatactttcactgtattacgaaagaattctatccagtcattcatatttccatattatttatgattcattatatctaagctgtcaattgcgtgttaaagcggaaaaccagagcggccgatggctgctattggaagtttgtttatagtggccaaaattgtagtgtttgtggctgcgacagctgctaaatccctcagataaaatcctttttttattagcttattttttttatctgaattttaatgtctagttggtttaggccttagatgcctaaactttgtttttctgatttttttgttatttacttctgtgttttgctcatggcatgtaacttttttattgttatcgatgaatacttcattaattttgagtactcaattagtttttcagcatttacatgtatagtattttattattagttatttattgatgaatactttattaattttgagtgctcgattagtttttcagcatttatatgcatagtatttgttttagttatttatatgtactagcgaaaagacgggcactcacgtgctcgtctttccgctttttttattgcgttaacgcatgtatattatcaacgatattttatcgaaattttcgtgtaaattacaaacaatattttataattttttttttatataaattaaaattataaatatagatatttgtgactttcaaatgtaacaaactctacaaaccatatttatcttttcatattgacaacaataatataacaaatataataaagattcttatctttttgggagaaattttgcaagtatattagcccctgcatataacaaactcaacagaccatattaatctttaaaaattcatattgcaagtatattattccttttggtaattttggaagctattgcagttgttgtcttttgtttatctggcagaataggcttccctaaaaaaaaaactggcagaagaggctacttcctccacaaggggattttattagagtaaaagatgtatttgcatatattgcttagttatataaacagttggtatctgtaacaacacaatatgccgagtcagtcatattctgttgtattgttattatggaatctatttagaggtccgatcccttcataatcaatttatgcatctgactggataccgaatcaattaacagatcattttgcaagacacttaaaacgaattctcagtttattttttaattatcaattctagcatattttagtttgctctttgctacaatgtaaacttcataaatctgtaatggtactaggcttcgttctgttctttcatttgttttcttatgattcaaaatttttcatctgtgttgcaggtggaggaaggcttgctaggtgcttattttgtaat

SEQ ID NO: 4099 - DNA, 3355 bp, Medicago truncatula
  Intron number 1 from transcript Medtr3g138200.1 (locus Med tr3g138200) derived from phytozome v7.0 (chr-ID MtChr3; po s 35282905 to 35286259)
tttcgggtgcacgtcgtacaggtacacatctcatcgtaatattaccacaaaaccttcaataattttacttaaattaagtacatttacgtacttttacatggataatgttttttctattgggtcaatatggacagttctttaaaaaaaattatatggacagtgttaataattgtttttcttctgatttttggcacaattattaattataaataataaattatttttaagtattcattgatttttttcaaatagtttaataattaaaatccaccattttgaggtgaccaagtgagaagttcgaaaccaactcttacatgtaaaacgtaatgtctctgatcattgaacacaaaaaatatttgggctagaattaaataagatttaatttaattatatttattcaattaaataattgagggtgataattaattaatcaaatacgatttaatttaattcatatttcatatgtaattgaacgattttgattaaatcagaatccttgttgactgtcaaactattgtgccttaggagtttaaggggttgtttgcttcatggattacaaaatttacttttaagaatatgatattggaaatccttgattttcatgtttgttttaagttttcataaattatgtttagatatactttttattcataagaatataatttacacataactttttcatttttttttgttggttaagaactttgccactttttttcttttagtagatagatgaaatgttagaattattccaagcgtgtgtttggatatgattttgaaaccatatcacgttaaaatatcgcttcccaattcactccaatcctcaaaattgtgaagttgggttttgaagctttagcgttgccgtgatttccttccgtccttttctcaattctaccgtgctaccaaacatgccataaataaactcacatataagtggaggtgccggggttcaaactctgctcataacatccgacctaacaacattttatcaattgagctaaaatttgtggaaaactttcccactttttattcccatgttaaatgatgaaaatattttatttccactggaataagggataacaacccataacttcccactcctatattatttcaactgttttattttttgttttaaattttaaatttaatatattttaaaaatatttctaagaataaattacttaaaaaaaatacactttaacatgaataagatatgattgtaacaaacacagcataaaaaccatatgtatgtgtagactttagagatggatcctaatttatacatgtatgtgtatatcgtttgcacattatagattacacctttgatatatggtcattcttataagtaaaaataattttttaggttaattaaataacctatgtgtataatcaaaataaaaaagtggtacaaactcatttttcattgttttgttatgttaaaccaacaacaaggatggaatcatatggtagatagctgaattcaatgcagaagtagccaaaatgaatgaaaggagagggttagtttactactgttaacgtgtggcacggtgagtagccacaacataacataacacaacacaacacaacacaacacagcgatgaaattaaccacctcatgtttatcaacggcaataaacaacatcgtccccatgttgttttggaaatgagagggttagttacttttgaattttaacgtgttctgtggtaccactcccaataaacacaacagcatccgcatgtatgttcattcatgtattgtatatggtcccatatataacaaatgttacagatctaatggcaacggggcatgaaatcctcctctccatcaacggttacaattgaatgtgactcactcacgtaactatagccgtgaaatcctccttcttcgtatacctactccgccccccccactcaataatactcattcattctccaaaagaaaaggaaaggagcactcactcattaactgtattcatagttgacttgacttattcaaaaagagagaatgagagcgacgtggtgattatatataagcataataaataatgcacatcaattagtgatgaattatgtttaagaaagtgatttggtgtgttatgtttcactatttatttgagtcagtggaatggacaaaaaactgtaaaggctgcttcttccttcatctcctccattttccttctttgctttgattctgtttcagagattgagtgatctggcatcatcgccatgttttgcatgactgtgatacaaatcgacacagaacacaacaagacaacttctctctctctctctctctctctcagcagtctaatcacggcaccacacttaaatcaatgacatgaaaagagaaaaggagagagagagagagagagtaggcttttgttgaatttggacctgcacttgtgtgatttttttcttataatatctgtgcttttcattttatctttccttttctctttctttggaaccaaaccctaatatgtccgtatagatccacatttttgtttttcttccattaatggacacattcctacctttaccttttccttcagatttgattcaatccttaattgtgtctccttttggttattttcttcactccacatagtttccagttttggctttctttattgtgctgttcatataaccatcttgtttttgctcatcattggaacatagaaattgacagaagagagtgagcacatagacactcggtatagatgtatatcgttgcctttgcgtgctcactcatctttctgtcaaattccattaccacatgaaattgctttcattctggttctgttcctattcatcacctccaacctcaacccttctctctctctctcaatatatttgatggaaaatgcaagatcaccgctactccctactacaacaggttgtataaagtaacagtgttacttaatttggcgtttatgtgtttttttaatattcaatatactgtttgaatttaggttatccaatagattatattactattatattttagtcatcaccaaatccaatgattcagtttaatattagtttgttatcatcattattattaaaaaacagaaagcgtttcttttgatgaaaacacactctagaattttcttggttgatgaaagtaaattatagattattagcatatgtagcataacaacttaggaagattcacgttatataggacggtcctgttaaaacattcctctcaccgttatcatattcatgatactgatttcatatttagccccttccatattttatatgattcttgataattctaacgtggttcactttcatgttatgtggtgcttattcaggttttgctacagattccgatttcttgttcagctgg

SEQ ID NO: 4100 - DNA, 2240 bp, Medicago truncatula
  Intron number 1 from transcript Medtr5g078070.1 (locus Med tr5g078070) derived from phytozome v7.0 (chr-ID MtChr5; po s 28900457 to 28902696)
ttaatgtatggattcttgtgttttttacttcattcaatgtttattgtaaattttatgatatgatatacacctagaagatagacttcactctacacactttgattccatgcatgttaccctccaccccattctgttgagtaagccaatagagatgtaaagtaacaatagttcgtcatctcaatctagcaataactaattaagtctaattgtaggtcatctgaattagaggagaggtcgaatctttatcgatcaatgaactaacttcaatttaatcaatcacaagttaagccttaaattagttcatccgattcataaaaaatatcaaacttttgttgaccaatgaactaaccacaacttatttgatcacaagttaagtctcatcgtagttcatttgatttgtcttattaatttttaatactatcttttaattaaacactatcttaaatattgtaataatatggttttcaaattattaaatcttaattatgtatcatgtttgttattattttctttaaataataacagaaatcccacgttccaatttaaataaatattttgaaaaaataatttaatatattgatgaacaaaatactcaaacttacgttgcaattgtttctgaggtacaattctaaatttgcacgttttaaatttcaattgaattcaagattagctcttattcagttctatattttaagaaaagggtcaattatcgatcctgtcaaggtagtgggtcactagttgaacccgtactaattgaaatgcatgattgtttattttttatgatacgaaatgcatgattgttggtgtactttatataagaaaaattaaatttaatgacaaataattttatatttaaaaaatatagggttaatacctcaaataacccctctaatttgggcaaggtgtaaaaataggccatgtaaaaagacacaaatttcaatggtataatttttttattcttcatattttaacctgttacaaggctatttttatacattttttaatcctttacttggactatttgaaatattaactcaaaaatatatcataaaaaggaaaacaaatataaattatgtttcaataattataagttattatcagagctaggctcatcaatcaagatcgcatgactcattcctactatactaggaataatcctaaatcatcaacaagacattatggtacctacttggtccttaattcatcagcacacatacattctattttccatgtccctcaattgaagaaggcagtagaaaaccatcatgtctgtcacacaagaattacttgtggatttcaagatgatggattattctgccaaataaacaaggaagaactaatacaatgagacaaacattccttacgtatcacacatcgagctcatgaatatattgttgtgttccccatgtaagactttgtgaacaagtgaaatggtttaggtaaaactatcccaaatgaagacgtagttaataaggtagtgttgagttatgtattttcttcaagttcttttaattaaacgttttaattgaacgagaagaaaatatattcaaaaataacttaagggaaaattgttagaagtaaaaacatagtttcaaccatccatttcttgtgtttttcataaccttaagtagcaaaacaatgatcatataattcgaataacataggagcttgttgagagaaaaattgcacaaggcatcgtcatgtgtatctatagagaaaatgtagcttgatcttggagagatgtctcatttgtagttaactttgatttgatccaataatacactcgattaatgcataaattttgtcatctattaatgatgcatgatttctacaaataactttgccaagggacaacaatattattctttttttattttattttaaaaagatgcttatagaatttcaataataatattattccttttttgtgattttttcttttctattatgaaaggttataaaatagtggaaatttattaaataataaaatgaaggaagtcttatgattgataagtttttttatgtgatctttttacaaagtgtgttaaagtgacaaacacaataatttaatgtagttgagagagattccataattattctaattttatgaagggttttttttttattttttttttatacaattttataaggctaaaaactattttgttggtgtaaggagaatgccaactctataaattataaaatgataaaatcatttgttacatgcaaagaggggatac

SEQ ID NO: 4101 - DNA, 1852 bp, Medicago truncatula
  Intron number 1 from transcript Medtr6g069550.1 (locus Med tr6g069550) derived from phytozome v7.0 (chr-ID MtChr6; po s 12810239 to 12812090)
cgtcgctcctcgaccaccaccgcatctcagatcaggttcaacaactttttaattgtccaatatttctttctctgtcattcatagctttattctttaactgatttattttcgttgttcttaaattctaatttaatagtaatttaatctcgtaaaatctaagtcaaattgaataggttatgaatatatgcatacttacttatgcgtatactaactatataagtggctacttgagataatgataagagaatctgagatagttcaatgttaattatgttgtttcctttgtgattttgtttgcttgatgcatagtatatttttccaattctagcatagatataattcttatctttttaccataagtaatccaacattagatcaatgcaatgagccacccataaagcttattcctcttctccataaacatctgtcaaaccaacttgtagtttgtagcactgtctgttagaatttggaaattctgccttaattgcggtccgcccctagtcgcataaattgtgacctttggttagccttcattgcagcctccaacaccttcattgtgtttgctttgagggggtggatttagtcccatatcggatagatagcactcttgagaagagtttataaagagaaggcactcctccccttacaacttccttgggaataaaacatcttccccaagaatcctttatacctaggaataaaatctaaaaacttgtaacaaacatgagaatgcatattttctatccttttattcccgaaaatctacaaaggtaactttaaagaagcacatcgtttatttcctcgactctttcctgcaaaaccctaactttcataaatcacgccatagagtatgtgaaccaaagctgttgtttttctctctaagaattaaatcttagttgtcaatagcgttgtagcgttgcggcgaggccctccactgccatgccattggcccacgaagcgccagttgcaatagcggtcatagatgtaagatgccgctatactggttgagtaacaacaccatcattgccccatctcggttcaatagaatttgtgcttgttgtagggtgaccaaggttgtcaagaccggtaagatcataaaatgcaagatcgcaactaggatcagaagattgttcttaaatttatgattcagtatcaatttaatttaacagaatctaaatgaaattgaataggttcttaaataactcattcataccttgagataatgaagaaaatatgagatagttcaatgttaattatgttatttcctttgtgattttgtttgctggatgcatattatatttctgcaatccttacatagaaatttaccccttgaagtgaataagtggagaattcggggttcgaatccccggccctttatatcgcaatgtccctaccctggccccttgaggtgaataagttgtgatcattttacctgaagcaatagtgagattccacacgtgtctcatcggtttcaatctcaaactaaataaataaagaaaataaatattaattaattaactaaacattaaatatttttcttctctattttttatccacctttcacttaaaaacacacacacacacacaaccaatctcactttcactccaacaaacgcaaaaatcaaaacaaaaccaaaaaccctaagtattttttctctcctttttcccttctcttcatcatctttcaattatttatgaatgatttttcaattatacaaaattgtaaggtttattatcatcattattattattattaattctcttattgtcgttctatttgaattttttgggggaaattggcaggtgaaaatggcgagttcagtggagaaggaaggttctgctgctgtcagag

SEQ ID NO: 4102 - DNA, 1010 bp, Medicago truncatula
  Intron number 1 from transcript Medtr2g025870.1 (locus Med tr2g025870) derived from phytozome v7.0 (chr-ID MtChr2; po s 6954214 to 6955223 reverse strand)
agttaactgccgctagaagccagcggttgttaactgtcggcacatagcctaacgattcttaactgtcgttgggggtaaaaacgtcatttacttgtgtcaataggaagtattctatatcagaaaagcaattttcgttaaggaaattaaaagtagtagttttacatttaaacttacaacttttaaacttctagagagttgaattcaacatttttcaccactttcaacatattatttttatttttgttctcttagccaatgttctgaaagcactctttagcattttcttaaatatttctattaagaaataaagaaaatgcaatatgaaaaccttctaaattgtatgtgttcttatttttaatttttgttttcagtatttaaactgtatatttcacacactgaagttgtatgataggggttggttttcacaggggcatttcttgggcgtaagggcatgtgttgtattgtatcatagattacttcgaataagatatgatatgaaaatgtttctatgagtggatgtcatccattatcttacaacaaagtgtagagttggacttaactcgagttttaactatatgtcattcgttattttacagtgtagtgtagagttagacttaactcagattttaagatagtatcataatgctatcaaattcaaatatttgttaggttatttattatcaagtcacttaggtcacgcttaatattttaataatctataattattatgcacgtatataataataatcaatattgatttgattatcaagaatcaattcaaattacttacttatattactctcgaaaataaattactactagtgaagcaaagacaaaaccgttatcctaatacgagaaaaataccaaagcaacgttgaattattgatgtggacacttgaagctattgtagccttccaaatctcaatgagacattttgtctgaatatatatatatatatatatatattatggagaggctggaacttggaagaccctagaggccagaggatc

SEQ ID NO: 4103 - DNA, 2230 bp, Medicago truncatula
  Intron number 1 from transcript Medtr1g020780.1 (locus Med tr1g020780) derived from phytozome v7.0 (chr-ID MtChr1; po s 4664672 to 4666901 reverse strand)
ttggtatatatagtttctgacttttgatcaatttctaaattgttactactaaatatattggcggggtaattatttggaatcttaaatagccatataaccattatgtggctccctgcagaaacattttcctattgggatctgtaatgactaatgagtaatgtagctctgtccttgagcatatgaaaccatgtgcttcgagttaggattcatatagccatagctaatcctggtctgtctcctagagattttcctattaaaatcctcttaaatgttgagtcaagagagatattgaaggaaaatggggtaaggaatatgcattacaaggagttccatattgctggggccatattagacctcagattttttttttttctcttttccctctagttttgtagatggaacatgtaaaatttatcacacatctttagataggatccaatcttgctgttttttctcaagccatgcaagttattctatcccttaaacattgaaatgctctttcgattctctactgatttttgttagacttttcatccattttgttatttttgtattttttttagacaacttttgtattttcatatgttagagtttctttcttcatttagtaaaggtctgtaatgatattggttcaaatagcacaaacagacccaagaggaaaatataattggaagatttggatggtcctattataattgaatcatgaatgatgtctgtgctattagttcttgcagcaactgattatgtaattttaatgatgtctcaaattctgtttatgggaatatttaagataagatgattctattttcatttatataccaaaatagttattctattttctagttcttattttaattgaatcatatagatgatgtcatgtttttgaattgcagcaaaattttctgagatttcattattaaatggtgacttttttgtcatatattcattatttttatatttattttttatggatgaattattttcctgcactgtggatatgttaattttacttttgatgggactaaacgaaataagccaccattttatttattttaatttacttttttttaacaagcttttaatttactttttgaatgatcagctttaagtagttactgatattcaagactaaacatgattatttcctgaccatagttatttagagttgtaactggttaggattgatgagtgatcaactgttttgagattgaaggatattagaatgtcccttttatctcctagcctctcaagatgagtgattttttctttagttttttttttgaaacagcaaattttattaaacaaacatatctctgctcaagacgaatagagaccggtgaaattgagaatacaaacaaaaggcgccgtataaaggcgggaacacctaaaaataacaccctaaaaacacccttgagtacacgtcaccacctagaacaaactccttcgcaaaaaacaaccaccgtaaaaacgatatccaaaaccatccgtcgtcgctactcaccccaaagaaaaacacccctccaaattaaactccctggcctgagcaccaaagcttccgttgatattaagtgattttttcttagtgatattaatgattttactttgcttctgttggatggaggatatgtgatgttgcttattttcatgtttggtgaagtgatatagttgagaattgaaacatgacttcggcaggaccatgttatgaatcttttgtttttaaatgctattccatgggaagtttttgtgcgtttttggttggtttaggattagtcatagattatttttatggattcaatttcactagctttggatggttcttctctcagaattatcttgtaaagtagatacatatttggatgctagaaagctctttgatagtagtactattttttgtgccatgacttttcctaaattttctttgcatattgtctttcctccaagaaacattttgatttcatctaacagaaaatttaattgcacaatcagtctctttgatacagtatagacatagagttgttgattttagttggcataatgccatgatatgatgtactttgtagccacaaattacctatgtgtattcataaggcatttgactcggtcccgaagccagaaataccaatactcattggacttattatagttgaatatagtttttatcctattaaatatttgattattttattttgttttagttcggtattagagggttaatcttggcgcagctggt

SEQ ID NO: 4104 - DNA, 2059 bp, Medicago truncatula
  Intron number 5 from transcript Medtr5g046170.1 (locus Med tr5g046170) derived from phytozome v7.0 (chr-ID MtChr5; po s 19387017 to 19389075)
acccacttcaaaaaggaggaggggaaatttttcaggtaagaaaaaatttaattgattataaacctaaaaaaattttataggacaatcggttttatgcaatttcctaagtttacatatttctaataaatcatatatgattcaaaaaatgcacataggaatagaaaaattttgtgcttttgtctgaaaatacacattcagagaaatacaaaaaattagaactatttttcttttatgagtactttgtaaatttttttagtacagaaataagttttccttgtcttagtggcctttaaatcttgacatagtagtttactaaatcatacaatgtttttttttttttgcaaataatcaaaagttacttaacttatgattctaacatacatggaactgttatctccttgaagttgtgcaccaattagctttgatatcacaatattaaagttatcatgtttttatagatgtaaggttaatgtttgtatgtatacatgcacacttatatgcgtgcatgtctatcatgatatatacacattcatgtaattgagaaaatggaagatgtaacgtcaaagtacactatttttataagggttaatatgtgtttatccctgttatataggtggattttggtctatcccctgtaaaaaaaagtttttaaaagattctttcttgtaaaatgtagattctttggttttggaccctcgagttatatgactgtgaaaacttgcttatgtgtcacgccgaatgtgtaattgaaattcttttttcattttgttttttggtacacattgataatgtaataacatgtcattatttttatgaataaaaaataagaaacaaactaaaaaacatcatcgtcgtcgttgtgttttcctctctttctctctccctctcactatcatcttcatcttctttttttttaaccaaaaatttatcttcaattgaaacttattttccttcaaattttccatcttccaaaccccttccttcgaatcaaaagttcataatttttttattcttcgatcctctacaaaatcgattttattatttaattcctctacaattcgaaaaccataattcagtttttattcttcaaattcattttttcttcttgtccataatttagttatctttcctctacaatttgaactccatatctatgctttattatttgatacctttacaaattcgttttttggggctttttttgggtttgtgtatattgatgaattctagagaaaaccaatttttttaatctttaattttcatacccttatagtgttgactcacgattcattgggttatgaaaattttgagtgttaatttgtatttctagaagggttttgtggatttttttttttgttgttgttgttagattaacacttatttgttgttgttgttggatgatgaagttgttgttgtgagatgttgatgtgaatgtgtttttaaagtgtgagttgtagttattgttaatgcactgttgttgttgttgttgttgttgttgcattgttgttgttgattggagataatggagaacacaattatattggatgtgtttgatagtgttgcagaggattaatgaagattaacattggtgatgaacacccttagctctctatgacggtgttgctgcattttaattttttttttaattataaataatagcatgtaggtgagatgcaataagaaaaaaaattatacaaacgccacttgatcaaaaaaatatgattcagtgcgtcacataagcaaatttacacagtcatattccatgagggtccaaaataaagaatttacattttataaggaggaatctccaagtttttcatttacaatgggtaaaccaaaattcacctatatgaaaagggggataaacacctattaaccctctttataatggatgttcaatatgaattgaatcaattgtagttattttaaattaatatcacaatataggtttgtgtgcctatatgatcaattcctatgtatacaatgttaatttaattctagtaacttctaaagtggtttcactttttttaaggtggtgcttattcaaatagagttgtta

SEQ ID NO: 4105 - DNA, 661 bp, Medicago truncatula
  Intron number 8 from transcript Medtr1g068580.1 (locus Med tr1g068580) derived from phytozome v7.0 (chr-ID MtChr1; po s 13716710 to 13717370)
catttagcgtttcaagccatttacactccaacgtggtattttcttgcacttctttcacatagtaatttgatttggattagcggttcattatttttttgttttattttttttagatgatgtaactggtagtttttaaaccatgaatagtagcatagtagacatggtaacttgatctgttttcaacgccattgcaaacttaacttgtccaatccctagcaacgtaaagatgatagaattcttcaaatttgcttctttatttccagcttatgttttatcctaattgaaatctggttagtatgtgtcaaaggagtggggttgaattgttcagttagatatgaactgcttattttttttttttgaagagctggacttcaattatctcctttgatatattatttggaatcgaaggagtgtgtcaaaggagtgaagatgagaataaaatgatgaaatttcttttaatttgctgacttacattttttggaatcaattaattgccctaaacccaaaaaaattgtatgtggttctaaactattatttaaaaacctttaaatagttttattggaaattttggtatttgatagatcatggcgtccatcaatcggttccagactttcagtgtatatttctgtatttgttgattacttcctaaattttgtttcag

SEQ ID NO: 4106 - DNA, 2431 bp, Medicago truncatula
  Intron number 1 from transcript Medtr1g010230.2 (locus Med tr1g010230) derived from phytozome v7.0 (chr-ID MtChr1; po s 1654040 to 1656470)
attggaactggtatgattcgtttttctgtattgttaggttaaatctactacattttgtttactatatagtttgtgcatgtttggttttgcggtgacaaagatagattttgaattaattgattccggctaaaaatgagttgaagagctgacatgatttaaaattggatgcatttatgtagaagtcagttaaacaatgcatttaagtgtaaaaaattaattctggaatcaaaagctacaatttttagatttcagttagaattaattctcgaggcgaaatcaattttactcgattgcaactagacatttcaaaatcaattttacacgtttataatcacttttggctcctctaggagtgaaaccaaaaatacacttaaactagttgtgagactgtttgggggaactcttgaaaatagcttatgttttcagcttattttcataaattctccaagatagcttttatcttatacgaaaataatttaactttattttatgttttgttataaaaacagcttatgcataaacactttttatgataaacgtttatgctagaatctgcaaattaagttgctaatcctatcaggatcacagttaagctagttgtgttatctagtgtgagacaaacaaatggtagttactagctaggcatagagaaaaagggagtagttccacaacatggggaacaatggttggaatctctattagaagaggcaccacattcaatcttgaaatatgacttggtgcgtgtttggattctgaagacataaaattgattttggtatgtttgaatgttcttgattagaattgattataatttaagctaggatttgtagcttttggctctgaacatgatttttacactcaaatttattgttgaactcactttcacatgaatgtatctaaacataaattattttaccttaaactcatgtttaactaaaattaattcaatgaaaatcaattttcgctaatgtagtactaaacactcctatggtagaaagagggagtttggattctttgtagtgggcagagttgttggatacaggtgactgattgcacccgaatctaatggttttgcagccactgcacctgtgtagttgctgcataggcatgtgggtttaacagaaagagtatgatgcaagacaatatgctagaatagaatagaaaactatacggagagaataaaatgaagttataaggattaggatgcaagttgtggtttgagatgtcaataaatactgatggatggtccgaggcacgagactcctatcaagtgggatataagtaggtagatttaggaatcctcatcctcactagaaaagagactgttcctagaatttgaactcgttgtgaccttcaggttacaagacgacaacaagctgctttatcagtatcaataaatactgatactatttgatattggtaaaaacccaagtcccacatcggatagatgagactcttgatgagagtttataaagaggagacactcctcacctcacaagctggttttgtgatgatgagttagaccccaaatttcaacaagaaaaagttatcattacataaatgtactttgactgatagcattaaaatttcatggtattattaacaaattgaacttgtttatccttttgtggccataaatatggccaagctatttgtgttagcattgaaggggagggttgaggcttcctgttattatccttttgtgactataaactgttcttattgtgtttgatatgactggaccagagaattaacaggaacaatgacacagtaggcaatttccatgtgcagtataagtcttaattgaatttcaatgaaacattttaaatgaaattgagcaacctcctaatacaattgctaattgagaaaattgcttattctacaaagaatcaactttttatgggattacagattactcccaccaactgccctcataactaactagcccgtttcagctttactaccgacagttacaacttctctacttgtttacatacacttgattgataggaggtctttgagttctatcagtgtttgcatttaatggtaagggtgaggctttctacttttgcatttaatggtaagggtgaggctttctactatgtgtctagtcttcgtagttctatttcctcaaacttgtataacccaatgttttgttagtatgctataggctagcctaatgtattcctgatctctaaagagcacatgaatatttgttcaacatgatatggttccaatattatcatttttacataataaaattacgccattttattcacaatcaaaatagtacaatgtgaaatagttttatttctaacttttatgtcattgtctctttactgcttagaacttttcaactaacgcatttttgtgaattaattgttaggcttcaaaagaaaaaggcctcgaagtaaagttgagagaaattctg

SEQ ID NO: 4107 - DNA, 7577 bp, Medicago truncatula
  Intron number 1 from transcript Medtr8g081730.1 (locus Med tr8g081730) derived from phytozome v7.0 (chr-ID MtChr8; po s 16845201 to 16852777 reverse strand)
ggctacccgcggcccattcgggctagccctaacgggtaccgggttttaagggccgggctaaaagccctattaaaattcgggctcaatattttaggcccaagccctatatttattcgggctaaacgggccggtccgttttgacagctctaattacacggccatagaaaaagataaaacacaggttagccaatgttcaaacaaacaaaagcgctcgaccactgcatatgaaaatttggccggatagaaaaattaaatgacttcatccaccaaaaggatcgtaatttgactttctctaccaattgatgaatgatactctatgtatttttgaagatctaaatgtttctttcattccacacaatcgacagacaacataaccaatcgacacgcaactcacctgctgagtaaacaaactgataaaaatgctctgtcactcgaaaaggctctgctgaaactattcccaactaggaccgaatatgtccccaaattcctgcaaaaatcggacaggaaattaacagattttgggctgtttcgacctcgccgcatcccgccacacaatgatgattaggggtggacatcggacgggttcgggagggttcgggcccaaaccttcaacccataccaacccgcggtttgtgtgtagcaacccatttctacccatttttcttcttcggtttgtacgggtttgggtctttcgggccacaggtttatcgagcgggtatgtgcggttttgaagattcagagaaaaaaaaatgaaaaaacagtatagtatcctccgatctgtgtatgtatcaacacaccaaccaagatgaagaagaccaagaaaaatgagatttgagaagaatgagattaaaaagaagctaaagaagaggacagaggaggaagatagtccatcgaaaaacaagagagtgatagagcatgttgttagcttagagaagatagtctagagaagcaatgagatgatgaagcatgcgtttgcgtttgaagaagtagtgagagagattcaggtttacaggtagctttaaatgaaaattaaaggaaaataaatactggtggtcaatattaataaatatgatataaagtagtacattagtcaaaaaaggttattattataatgctaaattgtttcgaaacaattaattgtatataataaaaataaatgcaatacaactgagagagagagagagagagaaagccaacagttttcaagaaagagtagtggttttgcagtttatgtgtggttttgcaggttgtgtttctcaaaagaggaaatactacaacctggttttcaaatgtgaataaataaaaatattgtagtgtaactcgggctggttcgggtacccgcgggtgaagatcctttacccgcctctgcccatgtaaacccttgtatacccgtatctgtaacccgctgacccgaggacccgttttaacccgctcagtttcgggttttcccctcggtttttttcggtttgggccgggtcacgggtccttgtccagccctaatgatgattgccgtgaggaatgattccatgagcgaacagattatcctttgttggcaatctattccggatgaggcgccacacaagaacagagaccttcaaaggaacttttgtttgtgccaaattaaatatgatatcacatttgttgtctgaactggttgactggtgagcatatggtaaacaccactaactgtataacattcgacggagcctccacacccatcgatctgtagaagttttctttaaagaaatgttagatattaacatcctacacttccctaacaactcctcctcccaagtccacaaccgccgacgccactgccaagcctccccacctttctcacacccaaaaaaaaacatttcagccacagtaatagacttaatcactactaagtcataataacggctaaactgcacacatagaggcacatctcccactcactgatccacccaaaacaacgtatttgccccgttactgaccttgcgcacaacattctccttaaactaaccatcacctgtctctcctaacccgtcacgaatactcgccacctccctccaccacgaagaaacactctggcccccaaccttcaacctctcatcctcctcaccataacgagctaccaacaccctataccacaaactgtttttatcgactagtaacctccaacaccatttctctaacaggtcaatattaaactccctcatcctctgcacccccaaacctctagactccttactgacacaaatattattccaagcaacccatgagattttcctatgatcctcacacacaccccaatttttttttttttttttttataaatatagatttcatggaagagattatacctgacgggactttgaagaaggaaagagcatagacatgaatgaaggataagacaaacttgaagagaaccatacgaccaccaaatgaaagaaatttactacaccttgataatctctttttgattcgatccaataccggctcccaaaacattaaacgactcaaatcaccaccaatcggaaggcctaaatacaaaaaaatgaccttccccatttgattcgatcctctatatgtattgttatagaggtgtctgcaaaaaaaaaaaaaaactcaaattttgatttctaggttgatgttttgatattttcgtttcttgagtttttggtgcattaaaaattcatatttaatttgtcccttgttggaaaattttaattttttttgtagaagatgttgtttttatgtcctaaacatgcatgcaaaaaaataatgaaaaaaattcatcctctacgtcacttttccagaagcacacttgggaaaaaaattgcgattttacacttttcggtcgaaaaatcaaaataaatcgaggcttagttagaatactacgaaactttcgtgatcctctatatgtatttttatagaggtgtctgcaaaaaaaaaaagcttaaaattcaatttctaattcaatgttttgatgtcatgagttttatgcgtgttaaaaattcatatttaatccgtcccttgtcggaaaattcaaattttttatggaagatgttttttatcctaaacatgcatgcaaaaaagcatgaaaaaaatcaatatctagatcactttttcggacgcgcacttgaaaataaattgagacttagtcggaatgctacgatacaccttataaatatacacatagaggatctgcaaagtgtcgtagcattccgaataagcctcgatttattttgatttttcgtctaaaacacgcaaaatcacaattgatcctttgcccggaactacacttaagtgtacctgagccaactgcagttaattgcagctggcttagcagtagttaactacaactgaaaagatgcatcggtcgttaactaccgttgggggcaaaaatgtatttttcatgtgtttttaagaaaagttgaacgtgagaaaagcagttttcatcacattgaattcctttaattcaatttggaacttattcctttaattcttatcattccctaaaaatttgcatctcttgatgaatttgtgaatgagttgatcaaaaaagttactatgattttagatagcaacatatgtgctctaaatccttatgaatcttctagtcgttgaaatgagtgtactttacttatgaacaaagagataaaatagaaaatggagaacacataaaaaatggaagagaaaaactctagttgtcaatcattgcatgtctttcccttccccatagccttgccttatattgtttcatatatcagtgtattttttgttaggcttaaatgcaattttaccccctctattttgattgaatctgaattttgccccccctattttaaaactcggaattttaccccctctattttaaaactcggaattttaccccccctattttatgtttttcaggattttgcctccctccccctattttatccacataattaattatttgtattaaatgttttttaatgaaagaataaaaataaaaccaaaaaaatactaaaaaaaatgaataaaaaatactagaaaaaatgcataaaactagtatgatctctaaaaataaaataaaaaactagtatgaaaatacatgaaaataacaaatatttagaggtgcaaactagttttttcatgtattcttcttaattgatttttttcttgtaatttcattgtttttctattttttactttttttttttttttgtgttttcttgttttccttatatttttttaccaaattaatattttctaatcgtttctttatttttctagtattttttggttctttattttaaaatagggggtaaaattctgaaaaacgtaaaatagagggggtaaaattccgagttttaaaataaggggggcaaaatcccgattcaatcaaaatagagggggtaaaattccgaattttaaaataggggggggtaaaattcagattcaatcaaaatagggggggtaaaattgcatttaagccatatatatatatatatataagacataatgcattttatgtgggggatcataggtgataatttttttttcttcaaagaatcagacataatattttgtaaaaatgtgtttcgcctttggtagttgctgctttcaaatacaacatactcatcccttggatgttaagaaattatgcttaaactgcataaagctcactgctaaaatgtgattattatattttcatatttttagggtagaaaatacttatgcagatctgtaggataattttggcatttcaaacctagaatttgtctaatgtaatctaatcccgccatttatttttgagaatatttatagaggtaggaatctcctttctaattttttttactatcataagtttagtttatgcccccatgttttgtattttctattttatttttagggttaattgttgaaatagctcctataatatacacaaagtctggagatacgcctcaataaaaacacagattccactttgtatttcaagattattttcatcttaatcctccaatagcccaatcgcacatgaggcgctaatacgaaagggacatagatgtcgtatttttttaatgcttttttacaggtaggtatgtatacgacattaatataaggcctcctacctaaaattagaattttccgacaaagaacaaattgattatcaatttctaaagcgtcaaaaaccaaaacaacgaaaaccttaactttaaaatcataattttagcgggttttttttggtgatacctatataaaaatacatagaaatgatcagccaagtttcataaaattccaaagacgcctctattggtatttttctcttgtttttcattaaggctaataaagaaatacaaataataatgaaaggtttataaaaaaaaatggattacctcttattacgaaccagatttgtacgtgataatttcaactgaccacttcagtgagacaaaaggacaagaatatataataatattttttgttttacaaatggtttcttttaacaagtgatatggggaaggtcatatcagttcacagtgtcctgagccgaagaagactagaattggtggaaaggtgtttgctctgactggtacacagactcctaatgaggaccgacttatcagaggtacttgtttctttaatagtactcctttaattgctattattgatactggtgctactcactgttttattgctattgaatgtgcttataagttgggtttggatatatctgatatgaaaggagaaatggttgttgatactccagctaagggttcagtaaccacttctcttgtttgtctgcggtgtcctatatctatgtttggtagagattttgtgattgacttggtttgtctgccgttgacgggtatggatgttatctttggtatgaattggttagagtataatcgagttcatatcaactgctttagtaagacggtacatttctcttctgctgaagaagaaggtgaggttgagcttctgtctacgaaacagatgaaacagtttgaacgtgatggtatcctgatgtattctctaatggcacaattgtcgttagaaaatcaagctgtggttgatggtttacctgtagtgaatgagtttccagaagttttccctgatgaaattcctgatgtgccaccagagagggaggttgaattctcaattgatcttgttccaggaactaagccggtgtcgatggcaccgtaccgtatgtcagcttctgagttggctgagttgaagaaacaattggaggacctgttagataagaaatttgtaagacccagtgtttcaccttggggagcaccggtgttgttggtaaagaagaaggatggtagtatgagactttgtatagattaccgtcagttgaacaaagttacgatcaagaacaggtatccgcttcctagaattgacgacttgatggatcagttggttggtgccaagattttcagtaagattgatttgagggctggttatcatcagataaaagtgaaggatgaggatatgcagaagacggcctttaggacacgttatggtcattacgagtacaaagtgatgcctttcggtgttactaatgcgcctggtgtttttatggagtacatgaaccgaattttccatgcttttctggataagtttgtggtggtatttattgatgatattctaatctattccaagaatgaggaggagcatgcagagcatctgagaatagtgttgcaagtgttgaaggaaaagaggttgtatgctaagttatcacaatgtgaattctggttacgtgaagtaagttttcttgggtcacattatttctggtagtggtattgcggtggatccttcaaaggttgatgcggtatcacaatgggagactccgaagtcagtaactgagattagaagttttctgggtttggctggttattaccgcaggttcataaaagggttttcgaagttggctcttccgttgacgcagttgacctgtaagggtaaaccttttgtgtgggatgctcagtgtgagagtagtttcaatgagttgaagcgaagattgacaactgctcctgttttgattttgcctaaaccagaagagttaccatgacaagcgaagaaaggatcttgagtttcaggagggtgatcatgtttttctgagggtcactccgttgacgggtgttggacgtgccttgaagtcgaggaagttgactcctaagtttattggaccgtatcagatttcagagagaattggtacagtggcatatagagttggtttgccaccacatctttcgaacttgcacgacgtgtttcatgtttctcagcttcggaaatatgttgcggatccttctcatgtgattccgagggatgatgatgtgcaggttagggacaacttgactgttgagactatgccgttgaggattgatgacaagaaggtgaagtccttgagaggtaaagaaatacctcttgtgagagtcgtttggggtggagcgactggtgaaagtttgacttgggagctggagagtaagatgcgggagtcgtatccggagttgtttgcttgaggtaagatttcgaggacgaaattctgtaatttggggagagttgtaacgccctagttatttatttaattaatttta

SEQ ID NO: 4108 - DNA, 3554 bp, Medicago truncatula
  Intron number 3 from transcript Medtr5g048660.1 (locus Med tr5g048660) derived from phytozome v7.0 (chr-ID MtChr5; po s 20598425 to 20601978)
ttcttacacgttcatttactattctagtctcacaggtacattgcttcaagacatatgttatctttactattttcagactctagtaatcaaggtcaaattaaggattaattaagtttttagttctataaatatttacagttgtttttagtccctacaaaataaaatcacactttttagtctctgtgacatttttcttcagcattttagggaccaaaaatgttgatggaaaaattttatagggattaaaaatgctgatggaaaaattttatagggactaaaaatgttgataaaattttttataaggactaaaaaatgtgatgttattttgtagggactaaaaacaaaattctgaatatttatagggaccatttacttaattaaccctttatttttaaatttaaaaatcgaaggttaagagtttacatcggatagaagatgacctgacagtgtgtttataaatgaggacaatcctcacctcacaagtcgattttgtggggttgtgttaggttcaaccacgatttctaaaatgatatcatagcctcttcaagatccattgtgccacttactatctggtttccgttttcgggcaccctactatttatatccacaaaccaaactcaatagtactggtcgtgaggggatgcgttaagagttccacacaatgtgtttataagtgagaagatgcgttaagagttccacacaatgtgttcacaaattgtttttttttggattttattagtttcaaccacgattttcaagaacaaatgcattttctatagataaaaaatgatccaagcattttccaatgagttaaatttttatgcaccgtcaacataaaaagttttataccgtcaatacatttttaatagtttggcggtcatacttgattgttggtgtaaaaaactttacacctactgtgtaaatcaattaattcaactttcaataccaagttcatttataagtttagaaagagtacttgaataaaatttcaaggactatacattatttgtgaataattcctcagtttttccatgtcatcccaaatttggtttagatatcaatacaaatttaatttatacagagtgcaaattcataaaatccaaaaaccaataaagtaaaatggaaaataaatatgtaatgatttcagattttgagtaaaaatcaacttttgtggtccctctgaccccaacctggacgacttgtatgtgctatgtgggagttatatgatgttacactatttattgtggtggtttttggcacgttctttcaatcattaattgatttgcaatttttctcataataattgatgtaacatcaaacagatcagagttggtttgaaatgaaacaatctcaagaaaacgattttgctgggactttgattcatgaacattaatcattaagttgtagctttctttcactataagctcttttgtgtttatcataaaggggaaattatagagtggaccatggaccactcttcaccatggatcacactatcctagaaattgcatgttagttcttcaacttttctaaatctctctttttatgttgtctccgtcacatttattttatgtatttttggattcacgttgagtttgacgacagaatcatagtggatcattgtaatctctatgaatctaccccgactcattatacatcattgtcaaaatcatccctctcccttcaagaaagagttgatcaaagcgatattggatattgcatattttcatcacctagtttctaaatcagtcactaaatgagtttgtgaccaatttacaaatcagttttgaaaaatttgctaaactataaatttttaatattagtgatatttttaaccttttccgcccaaattgattgctaaactatttagagtctaggagctatcaaataacgttgttgggttgagcgtctctttggttggtgttaatgatttgagaattgccctacgggttctgtgaattgctcaaaagtctctcaaatgtatcagatcgtaactccattgcttatctgaagctacgatccaatatggatgttgcttgaattggattgtaatccaatcggcttatttcataggctaaacaatccacgggacgcatagagcaattgatctctattgattttggttttgcagattgtgacatattgttgcattcactttagtagagactagattttcggattttatatatttcgaagctgcttgttatatttacgtagtttatagataaattgaggaaagtgtgatagctttaaaactaagttgatggtttatttaatagtaggattgttaaatgggtttgaatcttacctctgaaagctagctcaaattacgaaggtatctgcatacatataaacaccctcacatctatcatgagtcatgagtcctgagtccaattctcacattgtcaattttaactctgttttgataccatattaaatgaatttgatactcactcccaaaaacgatctcaaaggatgatagtgtctaaacacatatttacacgaaacaacgcgagaactttgataatgtgaaactctgatatcacttcgagcacatgaatagaaacataggctctgaataatggaaagacaccattctcaatcatgcttcaaatgggacatattcaatgttataagtacaccttatgaaaaccaagaatggtctattggtgtatgcaaatgtagatgtttatgaaaacacacccattgtcaaaaattaaataaataaaccaaacccatattttatttggggatttaactctactaaagtgagtagttggtaaattatgaaaatcaatggttaatattatacatgatttgttatgcatatgcatctaattaactacgaattttttttcatttatcgactattggtataatacttatcggtctttttaaaggtataaactatatattggtcaaatttgacttccctaagtactaaatacctcactcttgtatatatttaaaggtattctaaggatttttttttttttttttttttttttttttgtatttattgcgcctaacaaatcttcttcaaacccttcctcaataggatttttgtctaacttagtaaacacgaattggagagaattttgatctttgagagaactttgatccttatctacattaggcaccaaattggagagggagtaatattttagagactgggttgggctccgttttccttaggtctcaggttttattttgtttttctgctttctttttgcggattcaggtttggtccccttgcttgtagagttttttctttttttaataaaattttatgagcatggtggcagaggatgcaggtgatcttggagtgtcaacctagttgggatgccttgtctcctcatgatgtttttcattgcttttgattcaaaaaaaaaaaaaaaaaagatattttagagactaaattgatgtttttttttctttattattactacaagtttatgttgtcattgcattcaatttgagagaatttatgtttattatttttttgctttgatttgtattgaagggagaaatcgaacaagagaagcttgattcat

SEQ ID NO: 4109 - DNA, 2816 bp, Medicago truncatula
  Intron number 2 from transcript Medtr5g037620.1 (locus Med tr5g037620) derived from phytozome v7.0 (chr-ID MtChr5; po s 15817813 to 15820628)
attatcgttggtactagtgaatgttgtagtcttagtgatgatgaaaaataaagtttttatattatactgtgaatttcttgtcatgtcttcattgtgatccttgatgtttgaaaggttttaatttgaaggcgacgtgattggcatgctttgttaatcacttggattggattatctttgtttttgttgctgaatgattctgactgtggcttttgtttttgaagtattgacattgttttaacaaagttaatgagaacgcaatttgtgcattgattctctggcaactttgaatgctcagatgttcaagttgttttctttaatattagcttttaagattcatcttatcattctataattaagcgcccgtttgttttatattctaaaaaaatgaatttttctttgtatttctaaaattagatttttttggaaatttagttaataatagtagaagttatttcaaactcattttgtataagttagaaaagatagaaaagagattttgacattcattaacttaaatattcattgtttgagattttacatagtaaaaattacatattttttcaaatgacatttttcaaaaatgatttttatgcaaagctatttgaaatagcttatttttttttagagattttttcaaaatttagtttccaaatttttttttaacaaaaatttctttgttaaaaaaattataacaaaaacataatacactacaaaaatttattttgaaaagaagttattaaaatcctttttaataacccaagaaaataatgagattgttgccttttacaatttcaattagatggttttgattaggtgaatcaattctgaggaagctaatttgattttgaaacctagaagaattttcagttaaaaagccaattaaggacactaaatttgatataaaaaattgggtataagaaatgaatcacagtaatattaacagcaaacccaacacaaatacaaaactcaaatctaaattcatatcattccatctccttgacaggtcctatgtatgtacatggtacaacattaagagacaaaaataagtttatgtctttgtttcttatagattttgattgtggtttctatcaaatttgtttcttcaagcacaaacccaaccaatatttgaataatagtgtttttggctttgttaagcgtggctcgattcaagtcttaacatggattggatcttgggatttattttaattatgtgcttgggatttatgaaactgcttcatgtcaagataattgtggtcgaaacacacttttgccaccgaattattgatgctacaaattggcgcttcgacttgccatgcattttcaccgcgattatgccttcctgctgccaaaccaaaccctagattggtgtgttttaggtcaccaatgtcacttaatgtcaatgtcacccggtgcaatccccttcaccccaaccctagattgtatatggaaatataaataaataaaaatatcattggttacacatatggtttaaaaattggcatttttttttaaaaaaaaattatggcaaatatagacaggaattcaactgaactatgcaatttttttaacaagaaattgacaacgttttaaatggttgcgatttgctactagttccaaattcacctttgatgtttatgattcattgtcaacaaccggtggtgcagtgaaggcagaaaccaaatcatcaattcaacgaaaccccacccgatccaaaacaaaagaacaaaagaaaaaagaaacaaaactaacaattttatagtgatgaaaattatatttatcaactttttattgtgttcaattgaatgagctttatgatatatactttcatttcgtttcacccaagtaacaacatagttttttattttatttttaatgttaacaccatccacaatagagctgttcattttagatacttattaattacttttttaaataggggtataatcttagtcttggtattttcgtcttgtaaaaacttattgtattgttctttatatatactccttgcacatcttgtgtgtagatgctttaatttattttcctttttccaaataaaaaatttcatgacttgggaaattttatattaggtgaagtattatttgtggtaattttatgtctaatatccacagtaaccacatactaatcgacaaatttagatccattagaattttttatttatatttattatttttcattgaccaatatatattattcatataaagaaaattgttcttttcattttttaaattgtttgtttctgtgattgttgctggtcgaacaacaattaattgtcgctaatcatttttaaatcagttcaacctacttcaaaagttaaaaagaacaattttcttacataaacacattctcgaaagagaagtgtgaagatctagttaaggtcgaactcaagatccaacattggctccatttgcatttgatactataaatcattgcaatcgaacttgaaatgatactaaaacaattgatcaagaagtcatgctgaagtgttgaatcaccaaacccattttctgacaacggcgagtagttaggcgtaatccaaatttcttgtagctttcttcaaacttttaggtcgcatcccaaagttaattattcatcattttaattctcataaaatttatttatttattatcaaacatagtgaattagtgatactattaaatttggatgagtatatatatccatcattcaataattcaatggcatgctatatttttatattaattttttgaaattaaattaaattctaaatgagttttgcttatggaatatcgatattcagccgatattcattgttgaac

SEQ ID NO: 4110 - DNA, 689 bp, Medicago truncatula
  Intron number 2 from transcript Medtr6g093830.1 (locus Med tr6g093830) derived from phytozome v7.0 (chr-ID MtChr6; po s 20447685 to 20448373)
agagaaaccgctcctttagctgcttcacaggtttgtgattaactatttctgctacaccatttaagtggtcgaaacacatgattaaaaattggtgaagcgatttcgcaaaattaagatacattgtatgattgcagattctgtatatgtttttccgaaataaataagaaactctctctacgggtggaactttcctcaccctccaatatcacttcggatgcacacatttggtgaaaaacgtgaattctgtactgtccggaagtacacttctggacaaaatatgtcatccagaagtacccttccgaaatatttgtggtgtttttagaaatgtagcgggcggagaaagtttcccctactctctaaatgtcagtagactaagtcacattgactatttcatataaatctttgtttcttgttttttcttctctgttgtttccaagttcttgattcatgttgtggaaaatttctatgacaagaaataagaaaattttaaatttaaaatgacattttcttgttatgttctttgagatactgccattaaaacttcatttctgaaaaaacgaacacgctttgcaacttacttggacatattgaaagcgagcagataatatatcattttgatcattttcctttgcagaaatctacgaaaatgcaacttacatttgtgtaactgtttactgtaaaagcagaat

SEQ ID NO: 4111 - DNA, 1234 bp, Medicago truncatula
  Intron number 4 from transcript Medtr4g157390.1 (locus Med tr4g157390) derived from phytozome v7.0 (chr-ID MtChr4; po s 39216916 to 39218149)
cccacaaaaccggaagctatctcagcctcctgaaggtgtcattcttatttctgactgttacaacttgctagtatttttataatttgtatctccattgtagtagttgctaaaggcacaagttctgtgtttgttctggttagtttagttttcttcatatagtgactgtatggttaatttgttagttcaacatgcaaagaattgtttctttcatcgttgtccaaatttgtggacagtggacaccgacctcacttagtgggatacagcttggttgttgttgtatattaggtaaacactggttgtctgatatggtgttggataaactattttatgtaaaattactgcatcagttggttaagtggttgaacattaattgtcaacttactctagagatacaaatgtacttattcagactgcttcttgagcaatccatcacaaagtttcactctcactactctgagaagtttaaagctgaataactcgaacagctttaaacttctcggtgtagtttgagagtgaaactttataatggattgtttagcaagcagtctgaataagtgcatttgtttcaatacatgttttgtgtagcttttgttttgaaattcccatgatttgatattgaaagaattaaatcttagatgagtatatctgatttatattttgattgtatttgagctataatttataaattaagccttataactgtaaatttaattaatcttgtaatttgccaaataaattatcttcacaccaccatcaaactatgtattgccatatcatgaaaggagttaccaaaatttgtggcggtaagctaggggcattacaaacacagtttaacccctagagaaatactccctctgttgccaattataagcaaatttaattttttagattcattcaattaatgatgtatgtggtccacaatatgaaccacatacatcattaattgaatgaacctaaagagtcaaatttgcttataattggcaacggagggagtaaactttgttaaactttttaaatcatgtgccaacatatcattgaatggtagtgtactagaaattgcattgactagatcaatttaatcggctctattttagcctgtgctgtctaagttataagcttatggtgacataactttgttggaggaaatggtgcactggttattaggtttgcatttttattatgaaatcttattgtgatataagaaagctaagtgatcatacatgactttcaggca

SEQ ID NO: 4112 - DNA, 776 bp, Medicago truncatula
  Intron number 4 from transcript Medtr8g065830.1 (locus Med tr8g065830) derived from phytozome v7.0 (chr-ID MtChr8; po s 12515403 to 12516178)
gggaggagtctcgctcctcactctaagtctctacggtatgttttatttcttttgtaatttatcttttgttaccttgcgtaactaattctttttagggtagggttctaagacgaaccttcattttatttgttggattatttaatttaaatgatttattcatttattttaggaatcctatttaatttttctatatgatgacagttcatcttatgttattcttagcatgtttttcaataggttttagcagcaaaaaggaagaatattagaactattgcttattgtaacaacccaattttctctagaattattttaattatttagtgtgtgcgtttatatgtgcttctatgtggttatttatctttttgtatattttggttgggattagtagattttagctttagaaggatatttttagtcattttggactcagtggtattttgatcattctgtaggcaagggtaaattagtaatttcacggtgaggattatttttagtgttttggtggcaataattaattttactaagttactagtgagttggggtaattaaataagaaacggtaactattcgttatttttaagtgaatagaaacttggtgaattagttagtgtgaactttgagcacattaagacaattgagggttgagccaattaatgtagagcctatataaattcttgtcttaagagaaactaggtcatttatatactcattcacacattgcaaaacattttggagaaagaggtagaaacagaaagtgaggcaacaagggttagaag

SEQ ID NO: 4113 - DNA, 1747 bp, Medicago truncatula
  Intron number 1 from transcript Medtr3g103790.1 (locus Med tr3g103790) derived from phytozome v7.0 (chr-ID MtChr3; po s 25632741 to 25634487)
gtcccttgaactccttgactttttagatgtatatccatatttggtcgttattattgttattgtgattaggatgtggtagttgccttttatagattgggatcatgttaactagtgctccgagtactagttaagcagttaaaagtagaaagaaaaaataaagtcaacattaaaaacaacattttttcaaatttcaaaaagtaaaatatataattttcaagaatacatttttttttataattttttaactggttaacattttcctataaattgtcaggacggtactggactttcttaaaattcattttatttatgtttgtattatcgatatcaatatcagtgagtacaacattatcattggaggttatatcttggagtgggatatttggtactgcatagacagaaggtaggacaatataatagtttaagtttgacttgaatcattgatcactctaacaaacaacaactatgttgaaagtttggaaacaaggactatctaaaggtcaagatgagtcttgctaacaagagctttaaaaacaagttaaagaaccgaagatagaattttttttcttgaaatttatgttggaattgtactaaaaaaatgtggaatgtctccctttctagattcagtttttgatcaacagctggtttctcatatcagaaaaatgtctttgtacttttatgtcaaagaggatagacttgtttagaataaagagaataatggagaatattcagttcgaattgcttgatatgtctgtgttctaaataccatatccatgagatttgattttgaaattaaacgtgcctcctcataacgtaaaaatgttttaccaacaaggatgccctcagagatggtgacatttcacatgggaacatcatggaaaagttggattcaatgattaaattaagtgaagaacatattcttaacatgctctctcaacattagatttttcttcacactatcttccaacaatttaaaaattctgaaaattaattttcagaaattaaaaaaattgaaaaaaaattagataattttttttaaaattttgtaattcatttattgaatgttagaattttttttttttgaaaaaatgaagaaattttttttttccagaattttattttcatagaaaaataaaaaaaattaatttcaaaatattttttttaggatttttattttatttttcagaatatcttattttattatgaaattaaaaaatatattctttttagaaaataaaaacttatcttagttttcaaaattttatttttattgaaataattttttttttcaaaaaaaaaatctaacattcaataaatgaattacagaatttaaaaaaaaaatatctgaatttttttatattttttcgatttttttaatttctgaaaattaattttcagaatttttaaattgttgaaagatagtttgaagaaaaatctagtgttgagagaacatgttaagaatatgttcttcatttaatctaatcattgaatccaactttcccatgtgaacacacaccctcagaggagaataaattgtcagttaatttgtgtgttctgtaattcagatgatgagaataacattcatctcttctttacatatcaaaccagtcgtaatgtttggaatatgtatgtgatagcctcaactatcaatgccgttgtgagccaagaaccaagggttgggttgtaggggaaccatctttcaaattctgcaggtgttatctatcggagactcagcgctgtttgcttg

SEQ ID NO: 4114 - DNA, 1409 bp, Medicago truncatula
  Intron number 5 from transcript Medtr4g104390.1 (locus Med tr4g104390) derived from phytozome v7.0 (chr-ID MtChr4; po s 22747228 to 22748636)
ttcgtgtttgcattgacaatcaaattcttaccaaggtatgtacttctaagaatttatattaattttacaataactgggattagtacttaagttagagtggcatagtacttcattgtgaatagtgcgaagtgatgttataaatcttcgccttgtatcttcacgtgtatatttttcttctgatcctagggatgattgattcatgtatgttggtgcctctgaactcaatatcggccgaagtggccaccattattggaaaaaatccaagttccttattgaaaagagataaagcctgaaaagagtctataaagagaggcacccctcatcttagaagtcgggtttgtaaggatgagttagacctaatttaaaaacctaataactaagacctaatttaaaaacctaattactatatcggtgtagcatagaaaccactaagctctacgcaaaaccccgccgcgttgcgattttgagtagctgttgtagtgccaccaagagggcccacaacattgaaaacccagtaaactcctgaactttttagactttttggtccttttgccttaaaatagttgttatttgcccttaatgtatagttgttccctctgtttctaaatttgttttcgtaacaagtgccataaaagcactctagcattttcctcatattaaatgcttacacgggcgattttaggccttggagactaaaattggtaacaatgaactttgaactttgagtattatgaatacgtcttcaatgttgtgtattcttctgttgtttagctttattttatggtaaaaactacatgtattgtttctctaaacttcgacgtagcggccataccgctatagtgttatggggtcggtcgctatctgccattgactaaataggtagggcaagggtcctctaaagtgagtaaagtgtaaagtaagaaaattgagggttgttattgtaacaaactcataattatgatgtacctacaatatatgcctttaatttgttaattaacagttgatattgcctactttacactctaaaagtgagttgctccctttagactagccggatcctaataggtaggtgcgtcatccgcttatatagtaccagattttcatataacgtgccggatcttttatgatgatttccctcttcgtcacttaattgtacaaacaaccttggtgctagtgtgctacttctgaacttcctttcttgtttatttatctgcctatcaaagatgctccagggcctaaataaaataaaatgctgcagtgctagtatgctattgaattattgttccgtagttgcatttttgtttctcttgtaattttgtagatttgtcagttttttaatgatgcatactatcccttcccaataccacaactcaattgcttgtaggataaacttgttgtagctgttgacg

SEQ ID NO: 4115 - DNA, 2076 bp, Medicago truncatula
  Intron number 21 from transcript Medtr8g103120.1 (locus Me dtr8g103120) derived from phytozome v7.0 (chr-ID MtChr8; p os 22906041 to 22908116 reverse strand)
ggatagctcaagtggttaagctgacacctgagcaggtatgctggatttggattttacgcaataactgcattatacaattactcgttttgaccgattgatggaggagatgatttaatgatgattctgtgaagttgtaatgtaagaaactgatctcagatcaatggccatgatcgattaatacgtgtatctgcatgtttttttcaagtgttgtggatccaaatccaattttgagaagtaaaatcacgatttaaactatggttacaaagataacgtgtccaacaagtaacaactaattaatatttgcctacaaaaaactgcacgcctatttgagctaatcatccatttattgaagtctaatatttggttattttatgatttacattttacattattactttttgttattagctagttgcttgcccgaattttaacaaataagatgaagtatttttataattggatttggtatgttctactcagacagactcttcctaatagtgtaattactgatgtgttaacatctatattttgtagctgcagtgaatctgcaaaatgaagtagatatatattagtttgtgcattattgttctaaggaaattgaaaaaatatctagccatttgaattattttatagttttaactattttttctatcagctagttgcttgactgaagattaaaaacaattgttgtaatgaacagattttttttttaattttggcactgactcactgattttttatttttttttagaaatatgtctctttctctcttgaaagagagatttattgttggacttccttttgagtttcaaccattgttttaaaaaccaagctgaattggctgactcgaccggttgaactgtggataggctagtttccgggttcgtttgatctcaggttgtactgcggtctgatttaggcctaaatttcaattgttgagagtatattctcctgtgttttatgatgtgtgaggaccattagtgtgtgtgtataccccttaagaaagatgtgtctgtttattcaaaaaaaaaaaattgtggctgtggatatcttgctaatagtcatatcagtatatcacacatttgtctgtctttttctgttctattaggatctctttttttttttgtcaagcagtttaatgactaaaaattcccatttttaaggtggataaataggatcaagggacattaggatctccattctattgtgcacttaaataattcaaattgttcatataaaaaacaaatatgacttcagctttgttttattaattgagaggatctattagttagttaggatatcctgaattttataaacaaaattacaccatttactatctttcattttttaattaagttgaaaaaaaaattacagaatcaaaagaaaataataatatctttcatttttagaattctatttgatctgaagtggacctaattcggcagccggattggtggaagtgcgcttgagaacaacagaagctcctcagagatgatggtgtacctgcaaacttgtgatgatcaagttagccttagatcaagggtgtgaggttttagaggttttagacttgacttgggacatgtgttagtatttatagggcatactctaccattgtgttgcattggatatgacctcatggatcaacgtgtgattgtcatcggatgacactaatagaatcaccggattggcttgggtgcgcctctttggcgtctccatagcatagccagttactttaaagtaaatgagatagttgaaaacaaaacactcattccgctaactttatttaagattgtctcattgtgtggatatgtactttttgctcttaaggaccttctacaattgctttctcttgttattagaatggtacagtagcttcttattaaatttacaaagaggccaagttacgttacttgttggcatttatgatgcaagtatgaagcttaaatgttccttggaaaataagttacgaaccaagattatatgaaattaacatgactgttttgtaaaaatcagtatatatgtgatttgatatttgtacaagacgagacgacacagaagattaaattcagaaactct

SEQ ID NO: 4116 - DNA, 1703 bp, Medicago truncatula
  Intron number 8 from transcript Medtr5g013990.1 (locus Med tr5g013990) derived from phytozome v7.0 (chr-ID MtChr5; po s 4349377 to 4351079)
gtggaaggacaagcaggtaacaaccctatcgcattcatcatttaaatataaggcatgtatttaatgtacaatttttatcctgatttataattgactttgtaaaaattactttaaatgcatattagggcaaaaacatgagttggaaggatttgaattttatatagttgcttttttaggataggatgaggggttatgtcaatgcgggtccttttattttcaagtccatttgatttgtaaacaaatcaaatactgaaacggacaaaaatatttgttccatgtttaatttaaaaagcgaccatggggttgaacaaaaagaggtgaggcattggttaaaaatctataattttgtatctcactaaaacatgagaaaaaagttgtctatggataaattatcaagacaaaaatatccttgcctttttttgacatattctctctccctctctcttatccgactcgtccttctctattagtatttacattcttaaacattaatatatatgtatgtatgtgtgtatatatatatatatatatatatatatatatatatatatatatatatatatgtatgtatatattagtatttacattcttaaacattaatatatatgtatgtatgtatgtatatatatatgtataaagggtattgttgtaaaattttatattattttgtttgtgttgtctattgtccagtagtttaaatgatttgttatgtactgttttgttcagtgcttattcttttgcaaaccaagcacactctttatgtactagattgtctctcttttccttgatggcatggaagacttcataatttctctaactttttattaaatggattagtacatgtcaaaacaccatctaatctgctagggttcatgttttatatgatctctaaacctgtcttgactttgtgattacacattataaccgctttggattcccttttggtcttacaatagattacttggtacttcctctcatttatgacaatatttgtcaattttatatgatagatatttcatgatatgaaaaattcatacccatcagaaagaatattgtaattggactgagagtagaaggagaaaacataaatggatgtgctttcagcaaaagaagagaatcatttgaccccaagctatgaactgaagcagaagaatataaaagacataatcccccctttatcagcttcactttctctcatcgtaactaacttttcttgacccaaactctctccagagtccccttacccatcccctttcagaaagtcctgattacactctggccttggatttaggcctactagaacccacttgaaagaccttccttcgctgaacgggtgtatcagatttattgattgtaatcataacaaatatcttttttctttatgtattattcgtattccttgatagattttcgtagttactattgataaactaggcgaattgatcccataatttagggatctctacattgtttcgcatgtatatattcatacaaagaatcgtaaatatatgagaaaaatacagatccgattcaagtaagttgacttatgcaaaataaaagatcgttgagattacatgtgcaacaacaatttttgcttgcttctatctcatcttttgtaagttcactcatgcatacttcacaaattgattttaaacatcattttgacaggttcaaactcatatttggttatttgcaactggaca

SEQ ID NO: 4117 - DNA, 2287 bp, Medicago truncatula
  Intron number 1 from transcript Medtr6g061830.1 (locus Med tr6g061830) derived from phytozome v7.0 (chr-ID MtChr6; po s 11179180 to 11181466)
ttctgcactgatttgatacatcttagaaattcaaagtccagagtcttttctgtattgtattgtgaacaccactgattgtatatcaagtgttcaattcaaactcaattctctgtatttttgtttgattagaagtctctcgcctgcgtgcttgagcattagaagtctcttgcttagtgcttgagcattggaagactcttgcgtgtgtgcttgagcatagttttgtgaagtctcatacttagaaagtattgagcagttgtaatctttgtgattatagtgaaatctccttggaagtgcaagggggactggactacttccgtgttgtggaaggaaccaggataactgcttgtgtctttgtctttcttttctctgctctgttcttttccgctgcaatctgactctgatcatttcatcagaagcaatcaaactgcttctgaagttttatcagaagaagtattttttaagagaaaaagaaaacacaattcaacccccccccttcttgtgtttttcaccttcacacccatccctgaccatatcctggagtctgagtatatagaggaacaactgatcagacttagtgatgagattcaggcactgattcttcgcagaacagttcctgcacctcctattcactattatgatcagtggatggatctacagaagagctttgatgagctgctggatcagcttagaactaaatgtgtgtcatctcactctgctatgctgaagaagcttttggaagatatgcatgaagcaactaaggagaaagagctgaattttgtgcctctgctggacatcactcctttctatccagaagaagagtacatcactagggctgctagaattcaggctggatataaaagaagaatgagggaaaaggatgagctacttcagaagaaggatgatcagatcaagtatctcttagaacagttgtataagcaagcccaaccttagttgcacacccaactctagcttgttttttttttacttttgttcttagtagctgtgtctttgtatcttaatctttctttatatatattatcattgtttctggatcttgtgctttttcaccttcaatatgttttacaagctttaactctgatgatatttactgtttaatgctgcttgctctgatactctttcttttgtttctattctttttgttgatgacaaaagggggagtaaatgtatagtatttgttaaggcactgagccctactataaccacttctaaatttcttttaaatacttctgatttgattttataagtattttattgaaatttaattaataagaatagaacttagggggagcttacaaacctcaccttaaagaactattagactcagggggagcttacaaacctctgtcccagtagtcaacttattaattagatcaacaacaattgaacattttaaatactattgtttgtcatcatcaaaaagggggagattgttggaacaaaatgtgtttcacaatgaaccttattaagttttgatgataacaaggtattaaaaattgtcaattggttattactaataattgttcaagtgtacaggaccaaaggctactcaagttatttcaataggtcttggaagaacaatggaaagaaaaaagaaattctgagcatctgaagaaaactgctcctgaagctaaactgctcctgaagagatgacgtcatcagaagcagaaagtcatcagaagcaaaagttttcatcagaagcaatatcttcaccagaagctacatttgatcctttaatcaaactgaagattcaaagtagctgattttcaattcagtcttatcaaagaagaacgaagaattgaaagggaggtatcaacggatatatggatagcactgagctcttgtctctcgttaatagagttgacaaagtacaagtgtacaaccactacctccactactctgttttctgtctacgctacaagacaaaacaacagccatgcctgcagaatttgtacactcaagatgggaatgaatttgaagtttattcttcaaaggactacacccaaatcaggcaaaggatcactggtggataatcaaaggatttcaaacgactctttagacgtgctgattatctcaacgtctctttcacgcctctataaaaaggagtgaagacttgaagataaaagtgagaaatacataagttcaaaagcgccaaaactctgtcaatttgattctacaaagcacactgaatttctgcactgatttgatacatcttagaaattcaaagtccagagtcttttctgtattgtattgtgaacaccactgattg

SEQ ID NO: 4118 - DNA, 4022 bp, Medicago truncatula
  Intron number 4 from transcript Medtr3g144800.1 (locus Med tr3g144800) derived from phytozome v7.0 (chr-ID MtChr3; po s 37652053 to 37656074 reverse strand)
caggtgtgatcacatatcgtggagcaaaaattcaggtatacatcgatgaatttgtcaccttacaacggcatgaaattcaatattttttatttttatttttggtttgaggaattcaggatgcctgcaactaaatatagctgtacctccttgatgctagttgagagaatcgtaaatgatatgtgagtgatgcctctataccaatagcttttgatcatcagctgcacatgcacttagtttccaaggagcttttttttggacatcggtgcatgggtcgaaacattgtgatggttgtataaacaaaaaagagaaacatttgaaactgatttgagttcttcatttcgttgcatctgttttatatttttgtccaaattataaatgaatattttttgaaacccatttgggttggcctggtggtgatggcttgagaccttggagcgtgctcctctccaggtctcaggtttgattctccccggtgctaatatcggtgggctagtttggcttcttcaaaaactaagaatatatttgaagttttatttgattccatgggttctttttaattaattgaaaaatttgagaatgtctatttaagatttgacgcagtacggaagcgtaaggttagcaagcgctaaacctagatagaaaagaacaagtttgcaagcgacaaacttgtgaaaatagggttgcaagcgacaaacctattaaaataagggtttccgaaatccaccagaattgagagaaaagtctcgaatattattaatgaataaaagtgtctcttaggctacataagttctgcttatatagtgaaagaaataacaaacccgtgggccaaaataaaataaaacgaaatactaatagaaagttatagaaaattactaagatttggctaaataataaatgctactaaattactaataaaaccctcctgcatcagtctcctccgaagaacatccacccggatcccattgagtgaaatgccaagattgtttggtttgaaaaatataacagttgactttattccgttgaagaaatgtagtagcatgctgaatagtttcctgaattttattcagagtgatcaccggaagtagtggaccaaatatttcttctgtcatgatttcagcatctagtggtggatgtaacaatattgtaggctcaataaacaggtttgtttcatcaattgaaccaccatgaactattgaagcagcaaatagagggtctttaagaagattgcacaatctctcaaagtggtgcttatttattattcttgagagtgccgttgacttcatcatgttgtcaccataaaattttctcatgaacttcttcaataactctaacaattcagatgagtgcttctccttaacaagcaaataatcgattgctatacatgcttgtccagtacatactccccactttgctcctactattcttttcactgccatcttaaaatctgaaggattggaaagataatcaaatatagcagggcattttccacctagctctcgagtaacaggagttaaatatcttgcagcaaaagacatgactatgcttgccacacgtggacttctagtgaagaatattttgccccacttttgtagcagtagttgttcacagacatctcctctttctgctgcaaagcatagatttactggtaagtccatcctaccgcgagctaacatgttctccgtctctaccaaaactccctccataattggatcgttgagttcttttcaaatgctgaagaagattattcatgattatggttccgtcgccaacattagcttgaacaatattcaaggtggtacggttcagcttcaacagttgacttaactgtttggttctaactgtaaaaggttgcagctcatagcaaagtacaccaatgtcgccacaaagttctcctgttttcgcctcaccgacaatctgttcaaccccgcctttgagaactaccaagtagttagcagacataagacaccaagaactaagaaaaactttgagggttgtataaggagggaattgtggggatataagcttatgatatgagaatagggagcgattgctcttttgctgcactgtgttggaattaacagataacaagggaagagaaaaattctttccccatatggaagtattacatctgatgacatataagagttattgagtatataagtgattgagtcaccaaatgaataatagtagttcacctggaccttgcttctattaatgaattggacaaagtttataagttctgcttcggtccaaattgtataagccaattttgcctttgtcttctctagatccttctcactctcttccacgatgaaacacgccatatcggctttgacacaacatggcttaattgagatgatttgatctctgccgactgagggtttgccgacagcgacggtgaagtcttcagacatcgtgagcctgcgtctggaggttctggtggcggtgcttctgaaagcatttttttcttcctattttgacaagtcaattgatcattgacagattcaactaaaatcaattcaacacatgaatttacaaataactcttttagttcagactttttatttctgcattttctaacttgtgtgtcatcatctccaatctctcctcacggttattattttctgaaccgagcttaacttgaccaagtggtttaagttcctgtgcttgaattatacggttgttggctgctttgacctcaattacttcaggctctgcagtttctttttcttcttgttcttctttcggttgttcatcattcctattttctccatcacaaagtaaaaccatgtgctcatcagtctccacaatactaacaacaagttcggtgactgaatgttcttcgaccggtttcacagacgtcggaaacgcttcggtcgtccgagcaacgtcgatctcctctttcaacgtcgtaagaattcttagaatatatgttatcaaaacagaatgtctagcaatatttttaaccgtcttacgtgagttatcagctattctagaagcatgtctcaataggtcagacaaggagtaatctttgttgtaacaaaacggacaacgatataccgaatcagagatttcaatctcgtagtaatcatccgtcaacttgttgtaatatctcctcctctgttcggattgtttctgttgttgttgtaaaccttagctgtccacgccgacatctgatctaacagagctttgatgtctgtggtaagagtcgcggtgatgccggcaaactctgccctcgtcacagttgatctcccatggctgatccgttaggaaaagaacaggagaaacctgctctgataccaactgacgcagtacggaagcgtagggttagcaagcgctaaacctagatagaaaagaacaagtttgcaagcaacaaacttgtgaaaatagggttgcaagcgacaaacctatcaaaataagggtttccgtaatccaccagaattgagagaaaagtcttgaatattattaatgaataaaagtgtgcctcttaggctacataagttctgcttatatagtgaaagaaataacaaaaccgtgggccaaaataaaataaaacgaaataataatagaatgttctagaaaattactaagatttggttaaataataaatactactaaattactaataaaaccctcctgcatcaagattcttaatgtttctcaatctagacttgtttctattgtcaaattaggtaccatgttgcctatttgtagtttcccccactaagtacagtcatctctttttgcagtttttttaatatcatttatgcattaaagggttgagatcaactttgttctcgaaatatatcccatgatagacaagacggttccactattattttttatttgaaaaatgaatttttcatccctgaaaactttcaggacttgatgactgttttctgtaattgcaacttaattgcaagacaaatttttataatatgattgtgattcaaatttgggtagtaaatgtttaattttgtatgtcagttgctggatctccctggaattattgagggcgccaa

SEQ ID NO: 4119 - DNA, 2176 bp, Medicago truncatula
  Intron number 1 from transcript Medtr3g013330.1 (locus Med tr3g013330) derived from phytozome v7.0 (chr-ID MtChr3; po s 2525269 to 2527444 reverse strand)
aagttgtctgactggtcatttccccctttccctatcattaattccatctacaattgtctatcgttgccccttgatgtttatgttgttactatatattggaacatatatgaaaattgtgagttaaaagactcaacataatttccaaatttggtaaaaatagtgttgtgtgaaattaaaaaatggaagtcctatattgaatagatcacacacatcaaaatagtgtttatgtgagggatgtacctctaagaggtgcataattatgtgaacggagtaagcactagcgaatatatatatatatatatatatatatatatatatatatatatatatatatattatttaaaaatgttaaattaaataattaatttaaacattattagaaagtgttttcgtagtccacagatttggctaaaatattttggaacacaatttgaaatattttggtacacaatctggaatattttaatatgcaatctaatatattttggtacttgatctgaattttattttagtacataatataatatatttttatgctagatattatatttattgggactcaatttgagatatttctgtagtagatctaatatgtgaattacttattgtcaaagttacttatatattacttgtgaattttctctataaataaagagctcacaaagttcattccacacaccgaaaaatattctgaaactttgaacattttcttctctctctttgtggcctttgttgacaagccttttcttctattatatatgtgtaattcagttttggcgcctaatttggtggattaggctttccaccacacggttcaaagattagaaacaaaggaaaaggataatggttcaaagatctgaaatcacaaaataaggaagtaagttcctcactattaatgtctattcactattccctgaaacgatgcttatgatttttttggttgataagaaatttcacgattccattttatttttttatttccttactctctcttttatgaattttctactaaaaaaaatctcttgtatgaatatcatagaaataaaatttttatttctgttactgcgaaaatatattctaacttgaatttgagtccatctttaacaaaaaaaaaaaaatacatgaaattgagtcacttgtaaaacaaaacaaaaaagactttgcctctattgtagagttcttgtggtttaggagtcaacttttcaacaattaatcattaccaagaacacaatcatttcaattaacaacttgttatgtcataatgtaaaataacctacaaattacaatgccataatcatctaacctataaacaccgaccttttactcttctcttgacttggttatcatcttgcattggcttttgtttaagcgaatatataacacattgcaagcaatgcatgttaattaatatatttcctctattttgcattggcacatgccttcgtgttgaagcggctatgcaaacatccgtcagttcaaccaggtaccgcttctatttagcttgattattttttattttgtttattcttggttatttatgaatcatccttcttaagatgagatatcatgataaatagaatttcataattgtatccttttgttgcattttctgttgatctggattgatcttaatcaaatcgtatttacatattatgcttatttgttgatcaaagtatttacatattatgcttatttgtttatctggattgatcttaattgctcaaaatcttaggattcttgacaccaactagttctacacttgtagttgatttatgagaattttctgtacaaaaatcactattatgttgcttctgaattgtgatggacttgtggtgcattacattggtgttgtttttatgcattacgtgtgcattctttaatctattttccaccttcctttctccatctctgaataccctcttatggcttgggctggcagcttaaaaatccaacctcataaagaacccaaaagctcaacaggttggtttttcaaatttacctttgaaaaacaaaaatcgaaagttgaaatactgattttttatgatcgaattcttgctttattaaatcttgaattcaatgctattgtagtttagaactctttcaatttgagtatcattaccatattctcttgttttgggactttgaagtaggtctccaagagaaagagagagagcta

SEQ ID NO: 4120 - DNA, 915 bp, Medicago truncatula
  Intron number 1 from transcript Medtr4g032510.1 (locus Med tr4g032510) derived from phytozome v7.0 (chr-ID MtChr4; po s 7839916 to 7840830)
agctgctggatcagcttagaactaaatgtgtgtcatctcactctgctatgctgaaaaagcttttggatgatatgcatgaagcagctaaggagaaagagctgaattttgtgcctctgctggacatcactcctttctatccagaagaagagtacatcactagggctgctagaattcaggctggatttaaacgaagaatgagggaaaaggatgagctacttcagaagaaggatgatcagatcaagtatctcttagaacagttgtctaagcaagcccaaccttagttgcacacccaactctagcttgttttttacttttgttcttcgtagctgtgtccttgtatcttaatcttctttatatatattatcattgtttctggatcttgtgctttttcaccttcaatatgttttacaagctttaactctgatgatatttactgtttaatgctgcttgctctgatactctttcttttgtttctattctttttgttgatgacaaaagggggagtaaaatgtatagtatttgttaaggcactgagccctactataaccacttctaaatttcttttaaatacttctgatttgattttataagtattttattgaaatttaattaataagaatagaacttagggggagcttacaaacctcaccttaaagaactattagactcagggggagcttacaaacctctgtcccagtagtcaacttattaattagatcaacaacaattgaacattttaaatactattgtttgtcatcatcaaaaagggggagattgttggaacaaaatgtgtttcacaatgaaccttattaagttttgatgataacaaggtattaaaaattgtcaattggttattactaataattgttcaagtgtacaggaccaaaggctactcaagttatttcaataggtctt

SEQ ID NO: 4121 - DNA, 2074 bp, Medicago truncatula
  Intron number 3 from transcript Medtr5g037220.1 (locus Med tr5g037220) derived from phytozome v7.0 (chr-ID MtChr5; po s 15623837 to 15625910 reverse strand)
gagtgatttcagcttctggacaagattcaacttctgtatacttttcagaatcagaaggttgatcagattctgatgcatcttcagaatcagttgtacctgcattactttcactttgctctgaagttttacttccaggctctctatcatcaaattttacatgcatagattcttcaacacattgtgtttctgaattatacactctgtatggctttgacctttcagagtaacctaaaaagattcctctttgagccttggcatcaaatttcttcagatagtctttagtgtttaagatgtaacaagtacatccaaactgatgaaagtaagagatatttggtcttcttcctttaaagagttcatatgctgttttctccaacataggtctgatatagatcctattttgaatataacatgaagtattgactgcttctgcccaaaaatgtttagctaagttgttttcatggatcatggttctggccatttcttgtaaggttctgttctttctttctacaaccccattttgttgtggagttctaggagaagaaaactcatggagaatcccatgtttttcacaaaaaagttcaaatggctcattttcaaattctccaccatgatcacttctgactttcaaaattttcaattctttttcagattgtatttgagtgcagaagctgctaaacacttcacatgcatagtctttacttttaatgaattttacccaagtccatctgctgtaatcatcaacaatgactaatccgtatttacttccatataaagatgcagtgttaactggaccaaaaagatcaatatggagtaattctaagggtctggaggttgatacaatgtctttagatttgaaagaacttttcacaattttccctttctgacatgcaccacaaagtgcatctgaatgataatcaatgttaggcaatcctttgaccagttgtaacttgctaattttagaaattaatctccaattagcatgtcccaaccttttatgccatacccattttttatcattcactgacagaaggcaaactaccttctgatcagccagatcagagaaatttattttataaacattctcaactctctttcccttgaatgtaatggatttgtcatccttgttgactagtgtgcagttggtcttactgaacgttacatcatacccattgtcacaaaattgactaatgctcaataggttatgcttcagaccatctactagccacacattattaattgagatggaggaattaccaatagtacctgtaccaatgatctttccagtttggttgccaccaaacttcacttctcctccatctttcattgtaagggtaaggaacaaagctttctctccagtcatgtgccttgaacatccgctgtctaggtaccatgacctttgtttctctcttgcccttaagcacacctgcatttttggccaattcagatttaggtacccatatcttcatgggtccttttgggttagttttggaggttttacttttcctcccttgtaccttagggtgaatgctgagtggcttctgatcattcaatactttaggtttgacaccttttggtattgttttctcagaagcagtagctgctttgttcttctgatccttttgttttggaattttagattctggtttaatcagattctgatgaacaggttctgatcttttcagaattttaatcttttgactcttaggatcagattttgtcattaccttgatcttaagattctctggctttgatgtgatcttagcctgtgaacctgaagcttcaggttttgactgaacagcagttatagcatttgtaccttcaggcacaaaggtggatttcaatccatccttgatacaatcacagtagctcttgagactgtattctttggatttctcctcagaatatccaatccctttgcctttgttcttgtatgtgctgtagatcatagaagcaactttgcttctgtctattccagccataataaaatcatccaaggcaatctcatgtttattgcctgaacctttatcacatttttcttgtagcttctgacaaagactcttgagtctatcttcat

SEQ ID NO: 4122 - DNA, 1256 bp, Medicago truncatula
  Intron number 1 from transcript Medtr8g074370.1 (locus Med tr8g074370) derived from phytozome v7.0 (chr-ID MtChr8; po s 14775428 to 14776683)
gaagtgcaggtgttcatttaaatcatggtagatggttggttgagtagggatggtaaattgatatttaagaaagaaaatcgttttaaatttgtgaatcaattgcccttaggttgaactggcgcttattttgtcgttgattttccactatgttcagttctaattcgtttggtaacgtgctaagttcttaaggtaggatagagtggctaacgatttcattaactgtattcttatttatgaagcatttatttatcaattgtttttcttttgttttgaagttttatcaaccgagttatgaggcgttggtcacttattagcacctataaattggtactcattccattctaattcacatgtctcatcagcatttttcgtacatgccaaaaaaatttgatattgtaattaatgtgtgtagtttgtgtatattattactaaattattgagtatagacaatattataatttgctgctatatgatatacttgaattggattctatgaatatttcactatgataccaccagaaataacaaaccaacaacttgcatctccattcgaaaaaataaaaataaaggaattgctttttcagttagaagtgaatatcgacactgtattcataaacatatttggtgacgggagaatatgcagtcaattgaaatgttgaattcaattttaaaaattgaaaaaatcaatgaccgaaattatggatttagaaattgggggaccaaaatccagaaattgattaaataggggacataaattgcaattaagcttacttttaactagttttgggacaaatatttggtgggtacgtagctatgtattctacccaaaataacatgtgtatgttgctaaatttaatgatttttatttgcttttgttattcatttaatggtcatcacataagtaaagatctatacaccattaggacgtaacaaatagaaatctattgaattgttagcatttcccttttttaaattgctaacctggttgctgcataccgttttggattgttggaatccgtttcgttctagtgatattggagtgtccaattccgatgttggttgtgcttgacttaattcagaacaatatcatgcttttgttttgtttcacttttatttttaaaatacaccaaacataatcgaaaacatgtattttgtcatgtttcttattttggtgacttactctttgatctgtccggtgagatcatgtagtttttatggtgaagctttaggatctgtggttgctgtcgcggtggctt

SEQ ID NO: 4123 - DNA, 3837 bp, Medicago truncatula
  Intron number 1 from transcript AC235756_21.1 (locus AC235 756_21) derived from phytozome v7.0 (chr-ID AC235756; pos 150008 to 153844)
caaaccaagtggccttcccttccaacttctttaaggtactatatcacctaccaagcttatctttttttagcatatttcacatgtgattgattttcatacaatattgatgtaaaaagttttataagtgggtaaattacaacgaacatatgtgctaaagtcaaatattttcaacaatctgatagttataattgattgatagtttatattcacaacgaacatatgtgtgttaaaaagtctttaattaattatatttatcccttataatatttaagtgagtttaacttagttgacagaacattgcataatatatgcaacaattggattttgcgttccagataccttcttacttattcacattaataggtgaattttcatccattaaactatttgatcggaaaaataaatttctcttttataatattcatccatgatttaatcatggacaagatatccttcaaaaaaaatcatggacaagatatgtctttcttgctttctttggtttcttcctcttgacatgtacttaagaaatataagagttttaaatacataaacggtggatggtccgataacataaatctgatagtagcaaatggcagagaaactctagccaatattgcatgtgtatataaagagaaaatagtgtcagagaaacaaattgtctatattgtatcaaaacaatgtaaggtagttggcttttcggtgtaactctagccaatactcacactgtcacgttgtacacttgcatgtaaaacgtgatgtatatattcatcatgtctaagtcagacgtcaacataagtgcatggtcgtaaaatactattaaaataagcacgtgaaagggaaaaaaaaacaaataagtggctgcgtggaaataaaatatcaataaaaatatgctgataaaaaatcatcaagaaatattattcaatttttttttaacttgacacatgtggcaattttgttttacattgagaagctgtattcaacaaattatgggccgtacaaccttatcactaccagcaatatagtggttaaaaacagttacaacatagactaattaaaagttcaataatactttgtaaaaaaaaaatagttaaataatacattcatgatcatgacattgactaaccaccacaaatataaaccaaaaacaacgttaggtaaaatcaaagtggattaaaataacgttctatgaaacaaataaagtggataaaatacaaagtgaatattacactttacatataatatatcttcttttttaatttaaaaaaaaaagaataatataataaaaatctacacacgccaactttttgttttcacataaaggactttccaacatcttattgctcatagatcacaagtttgtgttatcaagctcgccattcacaccaactttgactcaaaaattaaaactattttattggatcttaatgactccctaaattcttgaaaggatttaatttgtataaactttgaaccgtaaatgttcgttgtatatgataattaaaaatatttaactttaaccataattatttttaaagtcatatatatgaatttttcatttatcgacagtgaaaaatattttacagtgattgaatatgaaaatcaatatcttcttaaaaatgttatcactaatctaaacggtttagagacatattaatctaacaactgataggctttgagttgtcatattaatttaaagattgatatgttattgaacctagctacaagattcttagattgttctctcagaaagaaaagaaaaaaaaaaaaaaaaaaaaaagaatggttagattgtgaaaagttgatgtgatttatgttgttagctggaaagagttgcaaggctgtaagatcttgttgagggtttcacataagaaagggcttaggctacggtaggagatctcaatgggtctcctaccgtagatgactacatttttttttttttttttgtttctaaattgcttgtgagccgttggatttggaaagaaattttcaatggtatagatctttaaatatgttgagccactagcaatgtatattataatgtttaatttttgtctttaataaagtaattgaattagcaatcaatttacataaagggtatttatgtcatagttggaaaaatatgaaaatggccagtaaactattggcgtgcattatatatgttcccatcaaagttttatagttcatcaatatttttgctccacaaactcaagaaaagaaaaataaatattcaacaaaaattatagtatcctttttttgcatattgaagttttagttggggatgtttattaaatggttaattaatttgatgaacgaaggcatgattttgtattatagtagaaattttaacgctaaagacaataatagaaaacttggtaatactcgaattaaataggattacggctaatatatccctctctatctctatatataatatgagtttttctatcatgtgcaaatttgcacatgttaagaagtttataattgaaattttgcattgaaatttatacattttgtaataaatatataatttttaaataaataattgttgtttttcaataaaaacactaaccacttttaattggtttaacatgtgcaaactcatataatatatcttaatctatcaatttttttaatataaacaatgtttaattgtttatcaacgtttattattatttttttcaaacataactccaatgccacggcaggacacaaaaacacttatttgaatacatcatcacgatgaaagaatgttcaatgactaatcaatctaaaatatcttctaaacaattaataacgaatgagagctaccaataatcaaatcatgtgtgatagcaatttttaatcactaatattatttgttgaatgttcataaaagaaaatagtagtgtattatttgttgaatgttcataaaagaaaatagtatgtctcctaatttaaaaaatagatgccagataatttttaatcactaatattatatgtctaactcaaacaacacaagaaaaatacactactaatttaaaataaaagaaaacaattgaatgttgaaggtgtacggtaagcattttgatctaagggttggttgacctttatccaatggctcacattcatttttgtaaaaaaaaaaaaaaaagaagcatgtctcctatggtaggagacctattgaggtctcccaccggaaacggagccataagaaaggatttgacttgaaagtgtgtttataggtgggagtcatttctctccttacaagtcaaattgtattgatattatcgatttattcaatttttgttgggctatctaatattccctccggtcttatttataagagacatttacatcagtaaaagtggatgtatccgatccaatttttaatcagatacattaacttttgttgaccaaaatttctcttataaataggaccggagggagtagtatcaaactatttgagttgcatttcatatatgttcattcttgtgcgcgcgacaaagagcatgtttgttatagctttttcaagaaaaaaaaatcacttattttaataaaataatcacttttaaaagttttgcatccgtttgttacaactttaaaaaaaatcagaatctaataacaatttcaaatgagaagctgttaagagcagcttttaaaaattagattttttttagaggagagacataatattgtttaaaagattgaactaattttgtaataaaaaatctcttttatatagttgtatccaaacaaactaggaatgagatgagatgaaatgatctaaaaataaaaatatttttttggctacttacatttctttttgatatattaaagtttcttttggtgataacagga

SEQ ID NO: 4124 - DNA, 2180 bp, Medicago truncatula
  Intron number 12 from transcript Medtr5g074950.1 (locus Me dtr5g074950) derived from phytozome v7.0 (chr-ID MtChr5; p os 27157387 to 27159566)
caaaaacgagtgctggcagtgctaaacgaagcaaggtatggtgtaatatgtttcaaaatatcatgattttttgtgtattagctcgaaatatatttggaaatatcagatgtgttttagatttgtggatctggtttggtggttgtatgggttttgataaggagggggactaaattttaaatatcaaatgggaggctttgcaaataaaaataaaaatgggagttagttagaggaaaaagaaagagagaaccgatttgttatacaggatagtttcaatgttgtcaatcgtgggtcgcaaaaaatagcggtttgtttgaatttcgctatgctacagtactacagcgctgctatttgacaaaactttgtactaaatagcatatcggtaaacaatagcggtttgtttaaattgtgttatgctatagatccacaataaccgctatttgttactaccaagtagtttaaaggaagtcaaacgggtcatgtgtgtttctatttttgttttggcttatagtttgggccacaggagtttaccttcgataggaccatttgcttgtacttttgtattttcttctatttatcaataaaatcttcctttgtttattatcataaaaaaaaaaaaaaaaaaaaaaaaaaaaaaaaaaaaaaaaaactcctatttttagataggagttttgcctatcagttggtgttttcattggcgagagggagattctgttgtatgtaaacctagatggcgtcagaacgacttaatgctctagagattggcttcttcaaggacaatctacgatgcctatgaggatttctaatcctactcctcgttgatagttgagagccgcaactaatcataactttataactgccaaactagcgactttttaggataacccatcactagaacaaggagattgaggttggtttagggaatgccaatatctttcgcaaggaagatgtaataatttggtgatccaagtgggctgaacaatatgtttgtagtagttgaagatctcgaaggaagccaaaacatattggaccaagaaaaccatgagcttcagtcaggacggtgatattgttatattactctcaaggggttagcatgggtgatcagatcaataccacactgcttccaaagcaacaagttttacaatagatggcaaggcaggtaaatccagttactgagagtaccagatccgttgacaaaagaaaaaagtattttagagggccagcagtcaacaaataaatctattactgactaggccatcatttggaggtcaaattatgccaaggaagtaacggagggagatgaagacagccgttttaaatagtttctcctttctgccttgaggacaaggcagtttaggtagttttttaggtggatggtccggttggttatagaaggggaggaatcagtggaggaacctacttgtaaataacaaataaaaaaaagggaagtttgacgcactaaagctctcgcgtacgcagggttcgggaagttagattgaggggagagagagagagggaactaatttgctatatggggtagttcaatgtgagagagtcaagttattgtgtttccttttcattttcggcttatagcttggccccacatgagtttgtcgcttgagcatttgctcttttatgtaatttcttccactgcagattcccttttttttagggtagtactagttagttattcctatcaatgtgtctggatcctcatgaaagcccgagttaggaaagttttgttggtcggtgtttacatattgagtttttctacgaagttggggaagtttgaggttcgtgtatcctagggtagacaccattacatagggtgctccaccgttatgtctacttacctcttggcatcttcttcaaagtttttgttattaactaactagtggtatatttgcaaggattaaaacaataaaaaaaagttaagagactaaaatcaaaatgtggtatatttgtagggacaaaaaaacatatttaagccttaattgaaaatgactttccagtcattcctaggaacagcatggtcaatatttatcttctattcgtacttaccttttgtatttagcgtccttattctcttcaaaaacattgtcccgttaggtccatccttaactgcaatttatttgttgttattttcagctgcaaggaacctgttgaacctttgacaattgaag

SEQ ID NO: 4125 - DNA, 3810 bp, Medicago truncatula
  Intron number 1 from transcript Medtr5g039510.4 (locus Med tr5g039510) derived from phytozome v7.0 (chr-ID MtChr5; po s 16779150 to 16782959 reverse strand)
gatttcactctcaaggatcatcaattcaggttcaaacatgatgatttttgttctttaatttatttgttttgtttcataatgagaattattgttgtgttttgattctgaacccaaaaatctttcatgtttggagtggttaataatttatcacatgaccctcatcctaacgccccaaaacattgtttgcatgtatggatttgaaagtaaaaaaattaggaattggttgaacttcatttttcgccctctaagtttcaaaatgtttcaaaatgttgcgattttgaccccctattaaaaaaatggcaaaagtgacccctatgtttagggaaatatgctcttttgacctcctaacataagggaaatatgttttttgaccccttatctttacaaaaagttgcgattatggccccttttttgggacacgtggcgtcttctcagcaattttgggatgaaatgggccaaaattgccattttttttaatagggggtcaaaatcgcaacattttgaaacataggaggcgaaaagtgcagtttagccttaggaatttgatttttggttgtgttaccaattaatggatattcttgattctaatagtgatcaagattttatgtaggtgtttagttttccatgtgacaaaaattgaattgattttgtaaaatcgattctccgcgaaagtgagttgaatattatatgaacacattcatataatagtgataatagtaagttgaacaataaatttccacctaaggcaaaaattccaaattctaataagttcaagttaaaatcaattttggaggacaaaccaattctccttagaacttgtgtcaaaatcaattctaaacctatagaatcaattagggctaaaagtatacacttgatgtttgatttaaaaagtggccttgatatctttcaccaaatcacaagaaaatattttttatcctaatttttctgatgaagctaaatttagctaccagaattagcacgggaaaatcaatcccaaaactttaagaggaggatagtctaaagtcccaaaccaacaccaccaaacaaatccaaatgaatttttttttatcctaattaaatataaacttttgccacatggcagtccagtaatttaaaaattaaaaataaaattctgaaaattattttttttaatttaaaaatcataaaatattttcgaaaaaaatctgaaaatacttttccgaaaaaaaagactttgaaaattaaaattttcgaaaacttaatttttttgacataaaaactattaaatttaaaaaatttgaaaagaaaagtgaaaattaaatttttgaaaaatagatttttttaatttgaaaattatatattaaaattttttcaaaaataatgacaattatattttcaaaatttaaaatttttgaaaataaattataattttaaaaaaattctaatttcctgttcttttacgaaaattttaattttaaaaaaataataatttttttttcagaaatttctgaatatatattattttacaaaaaaattaattttattttgaaaattataaaaaaaataaatcagaaaattattttaatacagggacgaaaatcaaaactggaccaaattacagggacgattatcatatttaagcctatattattttctctttattttatgggttatgctaacatgtgtcttaagtccacttgttaaggaatccaaaattagtatacccttcggtcactaatataagcaaaagtttgatttttaggttcattcattaaatgatgtatataatttataatatagactacatacgtcatttaataaatgaatctaaaaatcaaacttttgtttatattagtgatcgaagagtgtatatgtttgtattggattcaacaacattttgacttttaaaaagttaaaattcattacttttcatcctttcccaacacaatatttttgttcgtattctcttaatcaatgctccaaggttagcgttttccttttttttttttttgaataaagcgttttccttcttttatttgcacagttttgttaacatatgtgaattggttaatttagctcataatttcatgagggaagaagtaaaatcgtagtaaatttcactgttttgtttgtgttttatactgtctaccaaatatcatgacaaaaaattgtctgtaactcaaatgtttgtcttgttcttctgcttacttgcatcaaacggacctttatagatatttaaaggagagagacgtgtaggaaaaaaattggcattaatagttgaatgaggtaaaaaaaaaaaaaaaaacggtaaaatggtaaagatctctttcagtttaatcatatgttctagattttaaaccaaccctaaaaatacaggggtgttaaatttcaaatgagagttttgtccttcattatcttcttactcaactcgaagattagtctttgtaattgcgcgcagattatatcagtctaaaaaacaaaataattgaatatggtacgtaacaagattcccttcctattgaatgttgtcatccattttggttttgctgacttgcaatagataagtatgcagaatctaccttaagatctatctttctttgtttcttctagttctacaacataaaaataaaataccttttcaacatcaaacaacattaaaataacattgcatgcactttagtttatattatagtacaaaacaatccacttaaccatgtttttaactacaactaagtcttatatttcatcacctttcatctctttccgcaaaatttcttcattttccaaacccaaattgtggaatattgtaccgtcttcttccaccgaacatttgtctttaggtttatccatttcagccagaaacatgtctgtgtcttgtacgtactcatcaaaaaatggatcacactctcatggatcaacaattcaggttcaaacatgatgatttttgatctgtggtgtattttgcattttttgtgtcctgctgcatattcaaatgataagaattatagttttatgtaactatgttttgattatgaaccctaacatctttattgtttgtagtagttagtaatttatctcatgtccctcatcttaacaccccccataaaattgtttggatgtatggttttgaaaaagaattaggaatttgatttttgattgtgttaccaattaatggatatcaatgatgcaaaaactgattaagattgtgtttgcacgtttggatttgcaatgagtttgtcaaaatttgaaaaacccaccatgatacgaaacatttgatttcatttacaataattgattttgtaaaattgaatgtaaagtgatcaatgtttgaattcgttcatgtaaaaagtgaattgaacaataaattccatgcaaaagttaattctagagacaaaagttccaaattctagcttcaagttaaaacaactccggagacaaaatcaattctgcttgagagcattcaaaggtgtcaaaatcctttatgcacctctataatcaattcttcctccttcaaaaccaaaggtggacccaaaaatttccgctacgcgttggggggggacatcaaaaattttcatgtctctgcgaccatgagtgagattgtgctggttgtattttatcgcaattccccgcactattggggatcatgttgtggtctgcgcgagttatttaaaaacatgatagtgataatgaatctgagaatttgttctacacatttttggtcttgttctggattcttttttttaaggggtttggattatgagtttctcaagtgttaatgtgatttctatgtatgtaggggggtgaagcatttttcaggggtgtgttggagag

SEQ ID NO: 4126 - DNA, 712 bp, Medicago truncatula
  Intron number 1 from transcript Medtr3g150880.1 (locus Med tr3g150880) derived from phytozome v7.0 (chr-ID MtChr3; po s 39842505 to 39843216 reverse strand)
gtcacaccagacaatacacagagcttgtaaattacctttttgttattatttattattattttttctatgagagaattgtgttatgttattgcctgttggtgtagtgtagttgttgttgctcttttttcctttttgttgttgttggcttggcttggcttgaccctgagacgacgcttctgatttccctaccacccacctttgctatacgtatgcattgtcagaatatctgaattgccttatgctttgtgtttttcagactataaaattgaaaatgaaggagggttttgttttagtcttttagatttggggggttggatttaaccatggttagttagaggaaccgcacgtggggagttttaagttttaactgtggccgtgtgatgtgatatgatgaatgaatgaatgaatattagtatcattcacattctctttggttaatgatgagctaccaaagcaaatgcgccttttttgtttcttcatctctcaggtgttgtttggggtccatttcaatcatcaattttttaacttgtgtgtgtcacaaaattttcttattctgtcgcattcattcattcgtaaattgttaggctaaatattaaataaactgatattgttcaattttgaatcttgagtagtacagtattttattttatagtataaataaaaaaaatgaaaaataggtgaaacggaggagagtggagctcacgcggtccaa

SEQ ID NO: 4127 - DNA, 5001 bp, Medicago truncatula
  Intron number 1 from transcript Medtr3g068930.1 (locus Med tr3g068930) derived from phytozome v7.0 (chr-ID MtChr3; po s 16371215 to 16376215)
cagaaagactttgtgaccaagtgaaggttgatcatttcctccacctttgggaaaaatgttttcattttggatcttcagcagcattttcttttccatgcttaaggtgctgtaaggcttagcatcctttgatccgtagatagtgttgtttactatctccttccatgggcttgttctggggttaggaatctcttctccatcgtatgtcccagaagcatcccttctcatggcttgagcaatcacatgctcattgattgttacaggaatccccatgacgtttgatctaatctcagtcccagtgaaggcgagtagacccatttcttctctggtttttccctccaaagtaggatcaaccagaatcatctgagcttcttcctgtttagcagcaactttgtcaaacactgaagctcttacccagaattgtctgacaagcacttcataagtaggaccgttgagaagactgaagtaactcatcagcttctgcttcttgtagaatcttaccaagtcgcatccatgatgagttagagaagtgaaatccactggattttccgcttgaatgattagatcccattcctcaattgacatagttcttcctttgatttcataagcaggagtatctatatccatattcgatgaagaaccaccggcagaacttgaagatgccattgatatgaagtggttttagggttctaaagagtttttgagaggatgagagaatgcgtttactttcgcagagggttaagacgaaaaatagaaagtgtttgttgtgaagtgagtagtgtgtgaaatgacttagtgtttttattaaaacgtttgtaattcagaagggacaaacaaacacagcattaatgacaaattgggggcgcgtgtaagtatgttaaaaagcgaataaaaacatcattgccctttttgttatactccaatacaaatagaccacgtcagagactcttcagaaaactactttttgggtaatgggacagctgttacataaagtaactgccaacgttcccactaaccaaactattcagaagcaaagaataacacttctgaagttttagtgctgacgtcatcttcagaagcacattttcctcagaacctaagttaagagcttctgatgaaccaaaatgctcctgaataaacttcagaaccaaacttcttattcagaggcaagcaatttttcaatcagacacaaaatgcatgttcaaatttttcttaataaaatcaaatctttcaacagacaaaggttttgtaaatatatcagcccattgatgttcagtatcaatgaattgtatatctaaaattcctttttgaacatagtctctgataaaatggtgtttgatttcaatatgcttggctcttgaatgtagaattggattctttgacaaacaaatagcagcagtattatcacaataaatgggaatactgttagcattgatctgatagtcttccaactgatgtttcatccaaagtagttgtgtgcaacaacttgcagctgaaatgtactctgcttctgctgtagacatagcaatagttgcttgtcttttgcttgcccaggatatcagattctctcccaggaattgacaatttccactggttgattttctttcaatcctatcaccagcataatcagcatcacagaatccaatcaacttataatctagggatttcctatacaggagtccaagattagttgttcctttcagatacctgaagattctcttaactgcagttaaatgagattctctaggatctgattgaaatcttgcacacaagcatacactgaataaaatatcaggtctagatgcagtgaggtataacagagaaccaatcatacctctgtatagcttctggtctactactgttccagtatcttctttgcttaaggtgcaggttggatgcattggagtgttcatcactttacaatcttctagcttgaacttcttcagaagctcttttgtatattttgtttgatgaacatatactccttctttactttggttgatttgaattcccagaaagaatttcaattctcccatcatactcatttcaaattcatcctgcattaacttagaaaatactttgcaaagagatgcattagtagaaccaaatattatatcatcaacatatatttgcacaatcaaaatatctttcttaagagtccttctgaagagtgttgtgtcaacttgtcctctttcaaaatcatttttaattaagaaattacttagtctatcataccaagctctgggagcttgtttcaagccatatagtgatttcttaagtttataaacatggtcaggatgcttaagatcctcaaacccaggaggttgtttaacatacacttcttcttcaatgacaccattaagaaaaacacttttgacatccatttgatataatattatgccatgattaattgcgtaggatagaagtaacctgattgcttccaatcttgcaactggagcaaatgtttcagtgtaatcaatgccttcttgttgactgtagccttgagcaacaagtctggctttgtttctggttacttctccttgttcattcagcttgtttctgaatacccattttgttccaataatgttcttctgagaaggtttgggtaccagatcccacacatcattcctttggaattgatttagctcttcttgcatagctaatatccatccatcatctgagagagcttcttcaacagttttaggctcaattattgaaagcagtcctattaaagactcttcttgtctaaaatgtgatcttgttcttctaggactatctttgcttccaatgattaactcctcaggatgtgaagatttgtgcttgaatttaggttgaataacctgctgagtgttatcttgaaagtcctcagaagcactttcattctgtacttttgggctaggttctgcttctgaattagactcagcttctggagtgatttcagcttttggacaagattcaacttctgtatacttttcagaatcagaaggttgatcagattctgatgcatcttcagaatcagttgtacctgcattactttcactttgctctgaagttttacttccaggctctctatcatcaaattttacatgcatagattcttcaacacattgtgtttctgaattatacactctgtatgcctttgacctttcagagtaacctaaaaagattcctctttgagccttggcatcaaatttcttcagatagtctttagtgtttaagatgtaacaagtacatccaaactgatgaaagtaagagatattgggtcttcttcctttaaagagttcatatgctgttttctccaacataggtctgatatagatcctattttgaatataacatgaagtattgactgcttctgcccaaaaatgtttagctaagttgttttcatggatcatggttctggctatttcttgtaaggttctgttctttctctctacaaccccattttgttgtggagttctaggagaagaaaactcatggagaatcccatgtttttcacaaaaaagttcgaatggctcattttcaaattctccaccatgatcacttctgactttcaaaattttcaattctttttcagattgtatttgagtgcagaagctgctaaacacttcacatgcatagtctttacttttaatgaattttacccaagtccatctgctgtaatcatcaacaatgactaatccatatttacttccatataaggatgcagtattaactggaccaaaaagatcaatatggagtaattctaagggtctggaggttgatacaatgtctttagatttgaacgaacttttcacaattttccctttctgacatgcaccacaaagtgcatctgaatgataatcaatgttaggcaatcctttgaccagttgtaacttgctaattttagaaattaatctccaattagcatgtcccaaccttttatgccatacccatttttttatcattcattgacagaaggcaaactaccttctgatcagccagatcagagaaatttattttatagacattctcaactctctttcccttgaatgtaatggatttgtcatccttgttgactagtgtgcagttggtcttactgaacgttacatcatacccattgtcacaaaattgactaatgctcaataggttatgcttcagaccatctactagccacacattattaattgagatggaggaattaccaatagtacctgtaccaatgatctttccagtttggttgccaccaaacttcacttctcctccatctttcattgtaagggtaaggaacaaagctttttctccagtcatgtgccttgaacatccgctgtctaggtaccatgacctttgtttctctcttgcccttaagcacacctgcatttttggccaattcagatttaggtacccatatcttcatgggtccttttgggttagttttggaggttttacttttcctcccttgtaccttagggtgaatgctgagtggcttctgatcattcaatactttaggtttgacaccttttggtattgttttctcagaagcagtagctgctttgttcttctgatccttttgttttggaattttagattctggtttaatcagattctgatgaacaggttctgatcttttcagaattttaatcttttgactcttaggatcagattttgtcattaccttgatcttaagattctctggctttgatgtgatcttagcctgtgaacctgaagcttcaggttttgactgaacagcagttatagcatttgtaccttcaggcacaaaggtgaatttcaatccatccttgatacaatcacagtagctcttgagactgtattctttggatttctcctcagaatatccaatccctttgcctttgttcttgtatgtgctgtagatcatagaagcaactttgcttctgtctattccagccataataaaatcatccaaggcaatctcatgtttattgcctgaacctttatcacatttttcttgtagcttctgacaaagactcttgagtctatcttcat

SEQ ID NO: 4128 - DNA, 4156 bp, Medicago truncatula
  Intron number 1 from transcript Medtr1g099640.1 (locus Med tr1g099640) derived from phytozome v7.0 (chr-ID MtChr1; po s 20440084 to 20444239 reverse strand)
tgtaattttctactaatggtcaattgacgaatctgaatattatgtgttggaaaaaaaaatgtaaatttaaactttttttttttttttgcaaaccaaacataattagatttttttttgacaatcaacattcggttgaagataatacttttcgagagcaataaaatgtaggtatttttctcaaccggaatttgaaaagaaattacttctataaaaataaaaaacacaaacatatatatttgctgtaaatcttgagccatggcatgactcattggtcccactcctttttgataacttagagcattaggtcccgttgattaagattgaaaactttttaatgtcgtccactagcaacaataatataagagactacattacttatatataggcatgtagccgatgttattgtcgtttccacaagccacacttcatagttcatacaatactcaaataaactattattagatttactagtgacaaattactaattattatttgtgccaaacaaattatttattattataaggtaaaaggaaataagttaaacaaataggagaggaggaaacaatatcgaatgttgaaaattgggtaagatggggtcaagacaagctatctatctatctatctatctatatttatacgaaacaagtaacggcatttttgtagtttcgttgcttgtatagtttgtcatcatatccaaatcatggactttgttatcatcgatgattattgcatatgctatcgaagcagacatagaataacacactcaatctacgaatacaaacaataatacaaattctaagaataaccaaacgaaacttccgtttcacatataattcacataatgatacaaagaaaggacattctttgtgtaaagaataaaccatcggatttgttttttttcttttttcttgttgccctattcggagaattagtgttttattcgtttgtattgtctagtacaatttttctattatttttacttattttatttgctcggaataggatttgtcattaaattagtaaaaggtccagggcaagggattagaccttcacagtgtgagaaactaatgtttaaattctaactgaaataagtgcttatatatgtaatactcaaaatagtctctcgaatataatttactcatgaaataagatttattattttctttatataaaaaagcaataaatataaatataataatgtcattgtatttgttttaataactaatgaaatatataaaaaaaaaaaggtgttcaaaggattttttttccttgggtttgataatctaaaatttggtcggaaagtaagtaaaagttgatcaataattcttctacccataaattaaactcatgttctcccgaacaatttgtcatttgtacggctcattaactacttacgtttgttcaagggattttttttgttactatagtattgactgattcaccaatttatttgcaaaaatagtgctttgtaaaaaacattgcaaaaatagtaaaacaactaacatttttgtagtgtataaatgaatcactattaatgtgccaaaaaaataattattagccttttttttttttcgcttccttttttccgtttatggtaaaacaatgggggcgagggaatgcagttccaatccaaatagaaaatacatgcagatttaaaaaacacttataaaacgatttaaatttattatttaaaaaaaaaacaatttaaatttatctctctccaaatacatcagctgaattcgaatttgcaaccttcattttagcactaataaatcaattttgtttttccttcacgtagatcgagggtgctgggaataatttgtttaatctgtgtccactctacggtaaggtccctaactctgtaaaggcaataatagtgttatggatgaaagatactaatcaatcattttaagcaaaagttttcatgcatgatttaaataagtgaaggtagttgcattgcacttggcacatgtgggacaataatacttcaggttatatcaattatataaatattttttcgtgcatgtctctaaaggcatgtatcatggcttttcataatttgttaactggacttaaatttcttattgtaaggacttgtattatggttgatctttctatctggatcccactttgcatataaatgatgtaactatcatgttgtcgtaacatttttgtgtttgttggctggtttatatgagtgaaacactttaatgtaaggatagagtttattttgacattgtaattgtttcataagtattctctcatttgtggataccatagcatgcttttatctttggattgaccatttcaaatttaaaagtgacatgcaattttatggattttaatcggcggcaattaattgccgattaacatttacgtctttttctggtgtgtttcagctttgttagaagcgtgaaaaacaattttcataggccttgtcatgggaggctatgtttaaaattcccatatgggaccaatgtagttgcaaatgatatgaacttgcccaaatgctttgctcctttgtcatgtgcaactgcctatatgtctttgtttgaactgctaaaagtaacattttctatcaaagcttttccttttcctttttacatatttgataatcattctctttccttgtcttttggtatattgggggtggggatagagatgatgttgaagatttcttttttcctttgtaaaaaaaaaagtaaactcaaaatggtatggtgagatcccatagagattgcatgttctttttgttggtgtttcgtaaataatgataaaaagaaaccctagtgagtgagatcggttgagttggaagtgcaatgattgttacacctttcaaacctttttacactctttttcttttattcttgataattcaaaattgaaaggaaaaaaatatttactgtcctccattgatacttcaatgataaaagtggtaacaaaaatgaatgattaagtaaagtggatatacttttgaacagaaccctggattatattgcctcctatgtatgtgatttggaacactcgagtggctttaaaaggtctacacattttaaaccatccataattaactataattatgattacttattctttcaactatttttttttatcatttatcttttcgggtaattaaagtcttgtgaacttgatgtatatttaaatactttcgtttctaaatttatatattaaattataaaatgtaaattgttataattggtatttttttataactatactttaatttttttttttttaagaggatccgatctttagagacggataatgtagtaagtcaaaatgaaactttacatgaaggttaattttttaaagaatgcattgatctttttatttactagtggattactaacacttcggattgagatagaaaataataagaaaaaaaatacaaaagtgaattttaatgtttggttttgtttttgcttcaactttaataagaggatggaagactgaaacaagttgagttgttaagaaaacaacatgtgagaaaaggaattttctaattttggtaagatggcccagtagttaaagggattgttaggctcctcaattgcagctccaaaaaacactttgtcattttaagataatttcttttctcaccctatcattctcacacaccctccacaatttcgattttactttcgttgaattatataatccaaataaaaaatatcaagattatataatccaaactcatcctatatataagcaaaaccataaatcctccccaatctcaaaaggttttgaatttttccctaactactcttacaccatccaaaatccgaaccacaacatattgtatgattcttgaagatttttttttctctctcaaaattatcacattttaagccttttcaaacatcaaatacaaggtaaggacacattccttggatccattgttcttttatttgatttattttcttctaggtgttgaacacacccgacttatataatctgaatcatattgttatgattttgaattatataatccaaatatgttcaacatatgctgaaaattgttttttatatttaattttgcgtatttttgttgatttaaatatgtcattatgattgtttcaatatggaccaatgcattgaaggacttagacgctacatacctaccattactacatcc

SEQ ID NO: 4129 - DNA, 1985 bp, Medicago truncatula
  Intron number 7 from transcript Medtr4g033730.1 (locus Med tr4g033730) derived from phytozome v7.0 (chr-ID MtChr4; po s 8420033 to 8422017)
ataagtgagttttcacatcttgagttcttgttatacttgtaagaaactgttattgctctctatatttgttgttcaaaggataaaatgttagattaatttggaaaattaggccaagctgttgtatttatacataagccatgaaactttgaaataatgaatttagggttctttatttctgcggaaatattacgagtgcttgatttaaagatgaggcaggttgctatttatatccgaggctgatgccttttttctcatacctcctttttttttgtcccccctttcaaactaattcatgagacgagacttctatttagtgtcaagctggttctctttgaatgttcaaaacttaattctggtcagtttttttggaatgtcaagttggttctctttagtgtgcttcatttgcgaaaattcattccaaatgttaatgctgttgggtttttgttgtttataaagtgaaacaacaatatgcgtttgtttcaaatgacccatgtggcaatgtacagtatagtgacaaccatgtgttgactcacatctctgtctgacttatatgaatctatgccaccacttggcttttggctgttggcaatgcctactcgaattaacgagtgagtgagaaaagtcactggtgagatggtggcatgtctggctcatggtggcggttactttttacattgaccggatttactttcttttatattttaaaaatgtttgtggatctttcttacattagggatggccatatcatacacaaatcaataggcttaaatggtgctggttttgtgggcgtcatctctcggatggttaattgattacaattaatgcatcacactattttttttattttcttctaagagtccaactggtattctgttaacattgcagctgaaaaattcggggttgatatttcgtacaagactcgccactgaatatttcacctaatttttaagtggataccaaactgaaaatggtgtattgatgtccttcactcctatacaaataatatcatgagtctgaccctcacttgtattccgctatagtaggagttttattggttgccagttgcctttacttttgatattttttttaacaagtattgctattttagtgataattataaaaaaaaaagttatgtttgatacatagtaatcaatagcggccaatagcgccgctatagagcggccgtgcagtgcggtgccggagtgctacgcaacaagccatagcgttgcggttagaaccgctatttcgtttcaagagaaaatacaaaattgtccttggtttaaaaaaaacaagggtatttctgtaaatcttcctctgcttttctgctgttctgtaaaacttcttcacctctgctgtaaatcttcctctacttcgtcgcatttgctctattatcttgttatatttttgtttaacaatctcataactctgttgttctgttacttttttgttctagtattctttgttattacggattccagactccattctgctctctctgtttctgtttgtagtttgtattaacaatcctctgttttgttcatataaaactctattctgctctctctgtttccttatttttgttgtttttgtttttatgaaatagcggtcatagcgctatgcgctatcccactatagcatttttggggtcggccgctatccgctattaactactatggtttgatacaaataataatgttctcagattatttgtaacaagtcctaaaacttctcatgcatatcaaatattaaatactatctttttattacctaatagctattcactctttgacaaagtattttgcttgcacctttgttccgcatctgctttcaaaggcaatgttcttgatcttgaaaggataactgacaatgcatttacgaacttccttttgttgttacttgtaaagatttctggtttggttgttgatcatttttgtctttggtatgatgcaggaaagctgaaaccacggataaaacactaccttctt

SEQ ID NO: 4130 - DNA, 2077 bp, Medicago truncatula
  Intron number 1 from transcript Medtr2g034530.1 (locus Med tr2g034530) derived from phytozome v7.0 (chr-ID MtChr2; po s 9671607 to 9673683 reverse strand)
agacaggtgattttcttttgttaactttattttctttttaacccgctagactcttttttctaaaaaaataatttatagaagcaatgttatttgaactttaaaaaattaattcgacaatcgaataaaaataaattaatatgacaaaaaaatgtgactacaaagaagaaacagttaaaaataaataatatataatatgtataaataaatatacgacgttcgttccatcatttaatagtcactgatcttcatagaaaaatctgaaaaatacacgtaatgagttcttttctctcaactaatttttctagtactctaaaataaaaaagtatagtgttatcgttgaagcaaattccatgcaagtagattgaatatttaattcaagcatgcatacgtccttacaccaataattgagatcatgtgtcagcagatattgacctatatatatataagaagatattggcctgtatatagcgttcaattttttaatgctcccgtattttgagaatagaaatgtacattaaacaatcgcaaaagtattaataatataacaatggaatacaaattgataatgatctttatccatagacgaatcatttaaaagaatctaaattttattttttagataaaacaatttttatcaaattatatttatttcacggttaaactcaaatgatatttatcttacgactgaactttaattattatcgtttttcgttggatgaacatgaattttttttttttaacttgaccaaaaagattttttagggaaatttgaccaaaatgatagtgtatgtttattattttttaaaatttaacaatttttacatgaatatgagaatccaagtattataatattgggtccacttttttgtattattttattaaaatgtcttgaaaatagtaactagagtctcgtttgacatggtgtggaagtggaagcactttcagggtgtgaaaatgctatgtgaacacaagttgtattatagtcgcaccatacttgtatacggtttgcccatgaatttggatatattttttttaataatttcttagctcatcttgatttttatgcaagctcaatgagattgcacttgaatgatattagattttagtgacattattggtaacattcgtgtctctctttaaatcaatcattctctctcgttttaataatttattttaattattgtacctccattttcttttatctaaagtgcattaatattgttactagagtcatcaaaagctaatatcactcaagtattttccagctccatgtcccttgtatcattgatgttggcattgttgtgttcaaataacattgatcacatcaaatgagttagaggttccacattagatcgattaatagatgttgagaaacattctgtcaaaataaaaataacaataaattcaaagattcatataccgaacatcttaatatttttatataaatgcagtgtttaacatcttttttatggttgctcttatctcaatagaatgattgttatcttgatttatgctcccaaaaataccaacatctcgaaactgaggggtattgcatttcattttcttttttgacaaaattgttacacttatgaatattttgataacttaaattatctaaggagggtacttatgatacattcttttatatacacttgcaaatataaaaatgagtattttataaaataaaaacaaaaatgagctaacttgtaaaaacggtaatgtggtaagcggttggaaaataggagttatatatttcagaattattttaactctaaactaattattcagtcaaaagaaaaactagtaaactaaccattgttgcaatgcatagttgactagttgttgcagtgcattccgcaccaaccatctttctaacatttctaaaaatgaaactagaaacaccatatctcgatatcataatattcccatattagttttaaagtgtacttagagttggtctacttaattaataaaaaaacttttgattcaacaattagtttgatttggtgaaaactgatatttatcgcaatcaagttctatagacattaaagaaaacctcaaagtatcaaatccattt

SEQ ID NO: 4131 - DNA, 375 bp, Medicago truncatula
  Intron number 10 from transcript Medtr4g160760.1 (locus Me dtr4g160760) derived from phytozome v7.0 (chr-ID MtChr4; p os 40851314 to 40851688 reverse strand)
cgaaacttgataggagatatagtgccttggttgaggtatgtagcatgagtttatgtgtttaagaatgcagaatatatgtatctacgaaacacgaaagcatgtctagaaaacttgtgaggttcaattaaatagttgcattgcccacagttttctatctctaaatcaatgatatcaattggttacaactaattctattattgtgtgatttgagccgtccgatctcaaattagcggcagagattgattattgtggtaatgaatgtttatctcatagcagaaaattcggatccacgtgatttctatagttagttgaccggacgatgatgaacatataataactgggtaatgttgtttgcaggtccaggcttgtggatca

SEQ ID NO: 4132 - DNA, 1043 bp, Medicago truncatula
  Intron number 7 from transcript Medtr3g156670.1 (locus Med tr3g156670) derived from phytozome v7.0 (chr-ID MtChr3; po s 41195161 to 41196203)
agaaggtacaaatataatatctgcatatgtaattgcttatttgttcactacaaatcacccctcctcggtaatatatggatgtgctaaaagaggataagttaaattgtcgatagtttaaaagagctgtgaaaagtaggaaggcagtatatttttcattttttgtgaatgtacttgaggggttttcactcagttaatcttctatggtacactcttagaaataactacaatttacatttaaaaggagattaataaaatttttctttatgaaaggagattaacaacttcgctacttcctaagtgcatgtatgagattctctagtctagataattggctaactatgtacatgaactcatgaagtcttgaacctacaactctcaatactaatatgagatccaacactctttaccaaccctatttggaaggtggaataatgtggtactttctccattgagagaaaataaaattatttattgcatataacattgtcatactccggtggcttgtatctgttacggtctagctgtttaatttctgtttgatcaaatgtatgtaattcagaacatgaatgaggaaaatatagcacaatctgcagttacaattatatctattaaaagaaattttgtcacatagttgaattattgttttatgaatctctcgaggtatgtcagtctgatcaaatctgttcagtagtttagctttctggtcttgctattttaccgaagcaattttctcaaccagttacaatggctagtatgtttctgtttatttatttattgtatttaaaactcacctcacctagtggaaaaggcttttgtttgttgttgattattctaccatgtgaaaaacctgccactgaagtaagaggtttggacaattgaactggattaacatggatgttgctaaactaaattattctttgaatttgagaaacaactggatccaagcatgcacctttcatatttcttttcattgtctttattgtccaaaaagattcgacatttgcaaatcaaatatagttgtttctcatttacatttcctcagg

SEQ ID NO: 4133 - DNA, 5790 bp, Medicago truncatula
  Intron number 1 from transcript Medtr7g105480.1 (locus Med tr7g105480) derived from phytozome v7.0 (chr-ID MtChr7; po s 24171232 to 24177021)
ttggtgctttcaaacaatataaaccactacggcaggtgattatttttatctatttcttgaaactggtttacatatatttcatggtggtttggcacccccaataaatttactcaagatccgccattgtctaaaagtggttagattcttatattgaaactaacttataaagtaagaagagtcacttttaacatacttattttagatcttatctttattttacgtgggaattgagttttcctaatatatattaagtttggtgcatgaatataatattcgatcaaatttttaaaaatgacttataaagttaaaagagtcattttaaacaccctgatatcttattaaatttttatattgagtttaattttgtaagagcattaacacattcaagtttgtattgatctcacactcactcaattggatcaatgaggaaagttctgttttgaaattgaatgtacacacttacacacttgcttgttctacaagttatttatacaaacattggatgcatattattttgtggttaattgcatgtttgatcccttatgtttattttagtttttaagttggtctctgttttaaaagtttcaagctggtcccttacgttttaaaagttttaagttggtccaaaacgttactcatattggaataagttagtcccttccgcgacatgatattgagtttaataaaacaaaaaaaaaagttttaaaactgattttctaaataagttaagttccataatccatattgtcaacccgaatcttcaaacgttaagtgaccgaagggactaacttattccaacgtgagtaacgtttttgatcaacttgaaacttctaaaacgtaagagaccaacttaaaacttttaaaatgtaagggaccaacttaaaaactaagataaacataagggatcaaacatgcaattaaactttattttgttacagagttagttccatattcaactaactatcctaaatgaatgaactgtttcaataaatttatccttataaacaaacttataagttgtaggatctcattctttataaacttcatttgagaccttgtcctttaatattggccctagctcattcctttcgattttcaatttgatttttacaattttgttttctttttttttgaaggaaggaatttttacaactttgttattcacctgatttgggcgacaatatacaacaacggtgtgaatatgtttttgcaaaatttgaacttgtaactagttaggcaactcatgtcagatgagttttctaatgttctttatcctgtctcgatcaaagtaaacacatgtagtatgctaaaaatacaatgctcaatataattccccatctccaaatgaaaaactccaaaattaatattttatctggaatttggatgcccttaaagttgcatggaaggaagcttgagagatagggtgatatgtttacatgtttttgttgtggtatgcctaaggaatgtgcaaaacttggttctatttttagagaggttaaaattaattttagagatacacaatttattcttaaattaatttttaaactcaaaattatcatataacaagcaagcatcctatctcaactcacttttattcaaaattaattttatataatcaattcattcaaaatcaattttgatgaaacactaacctcttcttctttttttcctttctctaacacggccaccaccctagaaatttatttctaaaagcttgtttttgtgatcatttttccgtccgtaagttaatttttgttgtcaaaataaattttcaaaaagagaaaggaggagagggaagatatgttttcttttacgttaacaaaaattgaaataaattaattatgtatattgattttgatttttattaaaagtaagttgaagataaatttatttatgtttgtatatattcaaataaaactgagttcaacaacaaattaaattcaacaaaatcaattatagaatcaaaaacatcaaatttagttaagaaccaattaaaaaacaattaaagaattgtacccaagtttttttttccgtattatttcacttttcagctttcacccctctccaaattatttcactttttttttgacaagaaattatttcacttttagaatctatatttatttcagttttttcttaaactacataaaaaacaagtggttaatgtcttatatttttgtagttaataaaatagttgaagtgattaatgaaatttatgttcaaaaatataattgattaatgacgcaactcaaatgttgtgttgaaaatatatttcaaaaaacaaataaaatgtgcatactgtgagaaaacttgtgtatgtcacttttttatttgtgtttttttatggtccattatatgggtttacttgatgacgaagtggtgaagcaagcatgagatcagtgaaagagagaaggtcataattgtcaaaatacataaacgaagagacaaaagatctgttcatgtatcacagacacctttgacaataatcttaaaagtcgtaggacacgtcaaccattgctaccctacaaagctacaactactttggtcaacaagtaacaaccttctccactctttcctatgctaattagattctctcttttaatctaatctctcaatcatatcatatctaatcccttctttcttctttatttgaataatctctctttcttttctttttcctatattcaaatttcttgttttaatggaaataatttgtactaattaactattttacttttaccaatataacgtgatatcctgatagacacttaaatctttaactatttcgttcaaattcgatcacttaaatctttaatcattttattcatattcgttagtcaagctttaaacatctatcaccaatttactttattttttctttgaacaataattgatgacatatatgaaaatttcaaataatggttgataaatttggggttgatttgaaattaaattataattgaataagatagtatttaaaatcagaccattgtggctctggctctggctcagtatatatctgacttgttttaacaaccagtcaaggataattagttttgaaaacattaagtgattgatgttgaagttgaataaaaaatcaactagtctctagaagcagaccctactgaatgtgttttgaattggtagctagtgatcttttcttttgaccaaaattaagaataatcaaaacattcaactgatcatgtgtcatttattaaccattagttgacataaatttaaaacaaagttgttctttctaacatgaaaatacataggagtatgtttaaatcacatttatcagtaaaaaatagtaattaaattacagttacgtgaagaagaatattccacagttcaaaaaaatgggtagggttttgtttgttttatacgtggaccatgtaatgtaatgtattattctccaagcaaacaatttgttgtcatgaatgaatgaagcagcaccgtctgttgactccattgattaatatcaatgaatgtggacggtgtcagatcgatgcatggcagctcactgaaagtgatccatgttgtatttgccattgggttgagttccttcaaattaaggtgcatattgatattaactactgcataaaattaattagggtacaaatattcacttattgtatgaaaaactttaatatgttcaaccatatttttggtcgtataaaatattttcatggtttaatattttttacactatcaatctcatgccttaataaaatctttttttttttaagaaatctcatgccttaaaatcttacaaatatttaacattgtaataattatattgtataatttattttatacatggatatgtgagacaaaataaatcatcgttgttttcaattagatatttttttatgagtttgatagtcgtaggttgacagtccaaaacaactttgcatacacaatcaatgaaaatattctgaatgattgtaatatgtgcaaaattattttggaacatcaacctaatattattaaactcattttttttaaacccttactctgtacatcccctaaaatttggttaattcacataactaatgaataacaatgattataacaatgtgtcttagctcattaattcttttattaacgtgattaaccacaactttgacgaaatatcattcatatatattttgtgtatgagtaagccaaagtacatattgaacgagtgactataagtctataagccaactttcagtttctgttttcttttgatgatgatcattatgttttcaatcctacaactaattaaacatgcatcattacaaattgcaaataggatctaatttgtcgtactttataataaaaataaaaataaaaatagtagtactcatcaaaaagaataataaagaaaagtagcttaagccaaattacttgtttaacataataacctttccatatcttatcttatctaccctaaacctactaatgaaattgatcttaaactaaaaaaattggcttgattagtgcaaataatttggggaaagaaaggaataacgtataagatggtgtttcctaccttcatacacgactttacttctttccctttccaatcttctctactcccacattcgatgaaaatcaattttatttattattattattattttttattttttatttttgtaataaagtgatctaaattgtggggtacaaaggcatctatatcttctttttcatccaaacgtagctttcaattgctcacgttattgcattcgtcacctctttttcttatattattggtagttgtttccttccctccttctcaattattattggactcctttgaagggtttatttgaaattaagtacgtaactcataaagtgttctatgcatacgtggagcttttttggctttaaataatcaaccatttattttaaatttcatttatttatataaattaaatttatttaaaattgtgtttacatgaataaaaaggaaatgagtctaccctaattagaatgatgatatatttattatctctttgtgtaaattgggaaaaaagtgattgaggaatattccaaaggctgatcgagatgctgaaaagaaatatatttaaccatttatttgatttaagttcttttttaaaataaaaaaaatctggccatacaccttttttctttattttctccctttctagaaccccacttattcaatctttctctttcaagtttcatctagctagatatatatatattcttagtggatcgacacttggcattctgcttaaatgaaactatctaagtgtccgtattaaattaatagcaaataggtttagatacatgtcatcaagacccacattagactatccttttacctaacacaattacatgatttgttgtttttgaatttacattattaatccttttaatttgacttgggtaaaaccctacatgcttgagatatttaaactaatactagtggataataataaattaagtataattaaaatagaaagcacacccacgcattgcagagacttggtcgtttttagattcctatgtaaagcaaattataaaatatcaacatgtaatagataaataaatgttttataacctaataacaagctcacatggtcacatgggtatgtttgttgaagaaaattgcacaactagtcaaataaactacagtgacttgattcccaagctgcttcatttcattctcttcatatcatatatattaaaaatagatttttcatttcttgcaaaaaaaagtatagaagaagataagaaacagtcaaagcttgctgattttagtggtttaattagtgg

SEQ ID NO: 4134 - DNA, 1015 bp, Medicago truncatula
  Intron number 1 from transcript Medtr7g108090.1 (locus Med tr7g108090) derived from phytozome v7.0 (chr-ID MtChr7; po s 25362445 to 25363459)
cctcacttttcgcccctccaaggtccaattttattcatcaactacgttaaattaaacccttcaaatatcatagatctaatgcaatgcttcctaaattcaactaactttcaagtttaaaatcttaattattgcctcaattattttgaatcataaattgtttttatctctaagtaggaattttgaatgattatgttttcctttcaaatctattttatttagtagctctgtgatttaaatttcgcttatatacaccataaaccacagctttgatgaaaatatatgcttgtagctcagtatctgtatgttaatttagtgagaattatgaacagagtgatggaagtttgtacgacaaagttgccattaatgattgtatgaacatgaaatgcacaattacttgattgcatatgccactcctctgagattaaaaggcatagggtctgtttggattgactaatttcagtttatctactgacatcagtacgtttgagagtgtttgggagagtttatagaaacaacttactacattttcataagttttccaggatagcttacaaaattagtttgactatattttatcttttgttatagaaatagcttatacataaacactttatgaccaagggtccgtttggattggcttattttagagcttatacaaagcatcttatgcaaataaataagcattaatgtattatttataagcttgttaacgtagtttatgaaaaaacaacttaagaatatacaattttcgccagtaagattttatgaattaacataaaagcttaattatttacataagctctttttcataagctcaatccaaacaggccccaagtacttatgctataagcgcttaagtaagttgttataaaaagatgggcaatagagctagaaattatgaactggcttgcagaacggtgtatattatatattcttttaaatgaaagattgttattgtaattattttgatattgatactaaacaagaagcatatctcatatagttgtcagttgct

SEQ ID NO: 4135 - DNA, 1051 bp, Medicago truncatula
  Intron number 7 from transcript Medtr2g009190.1 (locus Med tr2g009190) derived from phytozome v7.0 (chr-ID MtChr2; po s 1982685 to 1983735)
tgaagggaactggctcccttttggctactgttcaggttaggaattcttaatagaagcctttcttgaccatatggtttgatgtattcacatatgacatattactcgcatgctattctgtacataataatccttgacatcttatgcttggtagcttttcacagttgtgactttgaaaggataaatgactacctgtttgagtgttaaaagtttctttatatttaaaatatgcagttttcaatatcaattcagatataatgctattatttaaagggttaaatatgtttttggtccctacattttacgcgattttgagaatagtccctacatttcaataaatgtttttaaaatccctacatttttctttcgttggtgcaattggtccctgccttcagtgtcatattgatgaaacacaagccatcataacaagttcaaacccaccccaccaaatctccaccacaacaccttccacacccgcaacagcaaacactttcaacgataacatcatcgctttcggcctccaaatctttccatctaaaccaacatatttcactggaaatgtcacgaacaccggcgatccgcatctacgacgttgcggagaaagaccgtggtgaagttccccgccgttttccggcgagattgaaccaccaacattgacatcacgttagaaatttgacaacagggactatttacgctaacggaggaaaaatgtagggattttaaaaacatttattgaaatgtagggactattctcaaaatcgcgtaaaatgtagggaccaaaaacatatttaacccttatttaaaccaccatgtagcttcatttttttttttttggggggtgggggagtgggtgggttctgtttggaaagaaagttccaattccaataaaagcttaacaactattcatagctttttaaaataaattttaaataaattgtttcgtagcgattcttataattttggaagtatggaacttgttcattctttgctatcctcaatgactcaatctgaatctgcagccagtgaagagggacaaaacatcactcaaggagca

SEQ ID NO: 4136 - DNA, 693 bp, Medicago truncatula
  Intron number 1 from transcript Medtr2g130270.1 (locus Med tr2g130270) derived from phytozome v7.0 (chr-ID MtChr2; po s 31746823 to 31747515 reverse strand)
tctttccgtctccaccacaagaatcacattcacaagtaagttcatccaattctccttcaaactctttcatttgatttattatatttatcgctaaattaatctcaattcttcgttttctgcgatttttcatttcctttagttttaactctgagaaatatgtatttgagtacttgctttcaaatgggtatgtgtaagttcttaactttttaggtttcatttcaatttctgcactgtatttttattgtcactgttacttgatcaaacagcgtattattcgaatttcatgatagagaatggaacctgcgactttgagccatgaaatttcatgaaaacgattcgtttttagtaatctgttttattttgtacgcaaaatttaaagaaaattgaaattattaggtgaacttgaaattttatatgttgctgttaggttagaaaatgaaattgagaaatcaacaaaaatgccactgaaattgtaaattttagtcacacagattaatttttttttttttttggtagataaacgaaatatcaaagccattataaactcacacaaggtaccggggttcggtcatggcatccggcctaacaatttggagataactcttttttctttgtttcattctttgaattagaaaatgatttagctgttttctgtttgcaggttaacataatatttagtgttgtggtggcacc

SEQ ID NO: 4137 - DNA, 1372 bp, Medicago truncatula
  Intron number 1 from transcript Medtr3g012660.1 (locus Med tr3g012660) derived from phytozome v7.0 (chr-ID MtChr3; po s 2150549 to 2151920)
ttcttctagttccatcatcccttgattctcttcaggtttgtttgtttgtttgcttaaatgaccgaatataattattctacgttgcttgcttcaaaattataaattgggggaacatgttgctttcttaaaatttggggaagcttgaaccctagaaataaaaaattgggggaaaattggtaattgatagattttgcacttggtaattgggtgtgtagttttatgctgctatcgttggtttggttttgcttgtattcgacgggttttggagttgacgtggcttcttcatttttgtatcagtggaaggaagccctagtggtgtatgttttattggtttttgcttgtctaagtattgtacggggtggttattagtaattgatgttattaataattcctgttagagttagaaattacaattgatgtgtgaattttcctagtttaatttgattggtttgaagttccgtgctttattagtagttgatgtgtgaattgtgcattttgtagagtgatacaatggtcaaacataagaaaattgatgcatttttcaaaagaaaagttttgaacaaagatgaaaattgtatagctacaattcaacattgacacttgttaatttcaacatcacttgaaatttacacttgaatcttccaaatcaccatggatacatttggctggtgttctatggcgtttttgccttgaatcgactctttgtaattcttttttatcgaatattatttgatagtgatattatttgcatttaaaaaacaaagttaatatttaagtgattttgtcattcttttttattcaagcgcttctttgaattctggcaacctgttttttgtttgtttttattattcaacagaatattgctttacgaatataatgacagtaacacaaatcttacaagagaagtaaatggttatgacacgagtcacattccttttggcttgcaagtattctactacccttttttccttagcagtgtaatcggtttgtcggggtctgtgcttgaatgggataatgccttttctagccacaaaatggccacaccatactattttgtatccatgattgcttgcttctgttacctacagttttcagttctgaatgaattgtcatagctccttgtgacagtgctgctaggatactctataatgtgataccattagttgatgagtaactatattgttaccttttgcttttgtaaaaataggtttcggtacagtgtcgtgtgaatcttagtgtggcaaaatgtggcattgcatattattttatataacattttctcaacccagtctcttatctaactaacctgtgatatcatttattcgttcttcttatagcttttggaggaaggtggggaaagaaagaattgtgt

SEQ ID NO: 4138 - DNA, 4953 bp, Medicago truncatula
  Intron number 7 from transcript Medtr1g007310.1 (locus Med tr1g007310) derived from phytozome v7.0 (chr-ID MtChr1; po s 352798 to 357750 reverse strand)
attgaagcctaggtttggtctaatcttcatctaaggtaagggggttagtctttatcataatcatgttcattctttgcaatttttcatgatttggatgaaatgggttgaaatgaatgaatgaataattgttgctaaattcgtgctccaactttgatgatatgtttgtatgcatgaattgataataattgtatgattgttggttaaattacatgtttgaatatgtgaaaatgaaaagttatgaaaattgtgcaaaatggatgaatttgacatgttgttgttgaattatgatggagggtatgattatatgttatgattgtagttgattgatgatgttgatctcatttcatgacttgggtacgatttatgttgagatgttgttgagaattgtgttgaacttgaagagatgaattgtggttgtttgagaacttattgttttgagaaaaattattttaaacaatttcataacttgtacaaatgccccgaaacgagcgagttcgatgtgttagagcctcgggttatgcctcagatcacttttgatgattgaggattttaaacgttcgatttttgatcgaaattggcgaaaacccgcggccgagacacgcgaaaacgcgcgtttacggagcgctgcgcctgtagtggagcgctggacgcccacttacagggagtcagcgcttgggcgctgcacctctagcgccaggcgcccatgacaggacaacgggaacgttgttccatgttcgggtgcttgggggtggtcgtgcaggggtcctaggcgatcgttttgaagtgttcttttgctgttttcacctacttttctactggaacacatttggctttgtcgaaactttaattttctaaatggtttgaaacttgagtttgtgtcgtttcgttttttcggaaattgttggaacttggtcttggtgaacaaaaggagttgcaagcttagtctacagttcttatgggattaggcaatgcttgtaaggttcgtacaatgtcttaatcatgtcaaaattgattttcgggtgggaatgtggaatgtttaaacttgggattttctcatacgaacttaggctaacctttgaactaatgatcgatagttcgtaagtggcctaagctcatacttatatgattgattaagattgaattgtaggatttcaaacttgaataagttgcctagctttgaaaattatcaatgttggccgtttaccacatgatttggatttttgtcggaaatgtttctttagcaaattgttttgtgagttattgtgattattcttgtatgactaagtgaagttgtatgaggaagtgattatattttggatatgatgtttatcatgacatgttgtttttccctattacttggaatatgagaatgcttgaaatggtgaaactatatgatatagttgatgttgcatgacattgttgactattgataattatgttgaagtgtgatggtgaatactatgatttaattgtgtatgggcatgttttcttgataatgcaatgttgtggagataatcaatataattgggtgttgtcctatatattgagtttgacatggtgattgttatcgcattatcgagtccttacacatgtccatgcatcatagtcgttgttgctgtaaaagggatgactcttttacttcgagattattgtaaggcagaggtgagccttacatgcgatgttgacttgtccatcggaggtgacgaccttgttgagatatggtaccgcatgcatttatgtgtccataagtgcatatcatagcatgagtcatatgtgaattatgtgattggtgatgaattgagatgaatgaatgttgctaatgattgtctatgactgatgttgtgaatgaatatttatgattggataattattcatgtgattgatatatgcggatatgaactagcaagttgtgatataagtatttatgcatgactattattattcaagtacatgatattattgaatttgattattatctggattatgataatgtaatgcttacccccagtggttttaaccgcctacttgcctgtatgggtgagtagacgttgtgcaagagtagtctcgatgagtctttgcttgggatatcgggagcttccttcgatattggtgtcgttgcggctctgatctaggcttgtcgtgtcggtctagattaggttgtttatattttcgtttggattattattttgttgatgactacccgtatgtttgggttttgagatttatctttgggatatgatttatttgctcatgacatgtatatatttgatcactctgatttatattccgctataactgttgaggtttacatacatgtctatcggtttttgaattttgaataagacgtaatctctatttcttgaataaatgtattattcgcatgtttaattgctttaatagaaataggagcgttacagtgaccataggtctccacattcttggaagacatcttagaatctttctgattctctcatgagtggaatatgcctttccaagagatctcatttcatttactattgtagtaaatctagcatacatctcatcaatggtttcattttcactcatttcaaagagttcaaactttctgactccaatgtcaattctagttcctttgacatgagatgtacctttatgatgtactctcagagtgtcccatacatctttggcatttttacacacatcaactctttcactttcttccctagtcagtgcacatgatagaaagagtctagctttggagtttagtaatacctgagatttttcatctgttgaccatgcacttttttcttttacagctccttctttggttgttggaacaaagtctccatctgtgatgactgtccacatatcattgtcttgagatatgagaaagagttccatcttacctttccagaactagtagtttgagccatctaaaagtggtggtctgtttgatgatcctccttcagctatgtatttgactttagacatacttcctgaatcttttctctaacacttgtttaagtgttcaaacccttagagcctggctctgatgccaattgaagtaaataaaatagtcacaagggaggggggtttgaattgtgaccctttaaaaaattatcctgtaacttaaaaagtaattctcaagttgaaatttggaatggttaagttaataacagacttcagaacgttctgatgtctgagtgcaaaaacagttttaacaaagtgaatgtgtttgtgtgtgtttgtgtttgcagtaagtaaagagtatagggaagagagaataaacacacagagatttatagtggttcccccaatgtgggttagtccactcctcacaatcttgtgagagtttccactatgatgcctgagataacctctcaaatcctgcaccttacaatctttgttcacctgaacaattacaattatgtattctctaagcctcagtaggcttgcaccttgttgctaagttaaccacttagacttttacaatctttgctcaagctaacactttagtacccgctaaagctagatgagacttgattacaatttgtgagaagtttgaatgtttgtgaatcaaacagaagaggaggaagaagaaaatatccttaagagagataacaagaagagaattgatttacactacaaagaaggtatgaaaaacccttcagtgatgataaattcaaattgcaagagcttcaaacaatctttgttgttttcttgtatgctttgcaatggtgcaagtaatgttgagcctttgatctctatttagagttttgggctcatatagccgttgtaaggtgaccaatggtgttatgccacgtgacctgggccccacaagcttttacttgaaaatctgggtgaacattctgaacatcagaatgttgttgtgtttccaggataaacatcagaatgttgttgtgttcttcatcagaatgtttgatattcatgatgttcttcatctaggttcatcaatgatgaatgtctgatgagtttctgggttcatccaatacgtgacatgagatttgttcaggttatatccttgaaaagttacttctccatatgcatcaaaagttgcttgaaaaagtaggataaagttaccaaatctgtcttggattttgtgcaggagagagaggatagtgaatctgcatcttcaggcccatgcttcaaggagatttgcttgatttaaatcagaggacacattatctctgatgcaagatctccttttgctagctttttcatctttccaccaactacactgttcatggctagaagcatgtgcagaagtgaacattctgatcttcagaatgttccatctgttcttactttaggttgatttgtaagacttaacttttaatgtaatcaaacctaatagtaagccaacactgaagtgcagtgaatgcatcatctaggataatattcttattggaatattcctagtactttaatgttcatagtcttggatgaacatcaaagatccttttgacatagttccttgtccatgcctttatttgttgatagatccatgcagatgaacttttctagaccttttattcatgtcaagtatgcttgcatgttcttcacgttcttgatgaatctgggttgcttatgaacaaccttctgaacttacatcagaacgttctgatcaactttctgatcaacattctgaactaactttctgaactccagaattagttcatggatttaatgtcctttgattttatgcatcttggtatgattcaaacattgtttctgtcttagtaaaaacactaaagagcacaagttaaataccaatgaattaatcaaagtccatttaatccttaatcattaaagtttattatctttaaaattaattagggattttgcctcaacatattttagtattacatatttacttattgttttactaatcatctcactctaagcaaactcttgagagttcaaactctcgaagagtacagagaaatttttaaa

SEQ ID NO: 4139 - DNA, 1425 bp, Medicago truncatula
  Intron number 1 from transcript Medtr8g125330.1 (locus Med tr8g125330) derived from phytozome v7.0 (chr-ID MtChr8; po s 29203367 to 29204791)
gaagaagcgcgttaggaacccttttgttcccattggtaaaacacaatcatctctttattttccctttttctttcttgtcgttttcattatgtaattgttcacatctttgtattgttctgttaattttgattttcgaattaggtttatgatcttgtttttttttttttttttttactgaaagaaacgtagtttatgatttggaaattctagttgagtagaaaatttgtagctttatgatgctgcaattgaattattgatatttgtgagctgtaaattgaggctcttggattggatttagttatcttagtttgcatatgttgatgtgcatcattttcattctttgcttcatattgaatctgctcgttcactaggcaaataatcactagtcactagttattttgtgaaggatgatatattagtgctataagtttattgtggttgctgaacttacttaagatgtcatcaatgaagttgcttggaaagtcgaaatttagagttggttacaacaacaaagaaactcaaacacacaagtaatattgtattgtcatattgatgtataagagaaagccaaaaatttcactcacatcacaataatgagcaaaaatggagtaccacgagtacccggtacgggcacttcaccactttacaagtacccatgcttcagctgtggtttatctctctaatgaaatcaccatgcatgcgaatttggaaataatattgggtctgtttgcatttacaaacgaaaaataaaggaatttgattatgtcaaattttcattggtatatgcattgaagttgggaattgacaatgttggtgttgaacctgatggatatttacttagcttcttagttaggcctggtgcagctttgtgatatcccaatctatagagtagttttgttagttgcttgggtgaccagcttgtaactgttttctgtagctacttggggttgattggcagcatatgtaaacattgctgggtggttgagagcgaatgagttttttcaccgaagagtgtttcattgatcacagagagaacaagtaatctagagtgtgtgggatcacaaaactgctgggaattctttgattttgaatcgaaagctgcagcagtgagactgaggtggtggtggtaggcattgctccgaacctcgataaattttgtctttttttctcttcccattctgccctttagttgttttctgctattgaatgcagcagcattagtcattattcgaaactttacaattagaacgtcaattttacattacttgctgattagatattgttacataacattcttttcttttggtgatttgattgtgtgattatctcggcttgtcatttaactttgttggttagtatcctttgattaactttgctatgttaatttcaggcgcacttattactgccggtgtactaacggctggc

SEQ ID NO: 4140 - DNA, 785 bp, Medicago truncatula
  Intron number 4 from transcript Medtr4g152310.1 (locus Med tr4g152310) derived from phytozome v7.0 (chr-ID MtChr4; po s 37720793 to 37721577)
aaggtatgctgcactttgcatcatctcctactttatgccctttcaatttgagctaatttatttttttgattgttcaagttcaataattgtcattctccattgttcaagttgaatattgccattctcaatttgtgctattcgtttgagtgatttctatgtgttgaatgaattttaagttatctgatggatgaaggagaagcttttgaactagctcaatgccatttcatggtcatcaaaaccttggaggaatatgtgtctcttgctacagttataaaagtaggagaagatcttcaatggcctttaactaaagatgagcctgtggtgaagctagatgctctccattacatttgagtgatttctattttttgaatgaattttaagttcatctgattgatgaaggagaagcttttgatatctatttgtatcctactaaatgatttccatattatatttgtatctactaaacgatatctattgaatgttcttttttagttataagttgattaagggtcctttaaagtttgcatctgattttttgacattaatttatggagaatcattgatctttaaagcgctgacttttttttgatgtaaatggtcagttttttcgatgtaaatcgatcaacaaaaagtcaagggcagtcgttaaaacaagttgctaccgcacgggtcatatatagttgagaacattttaatggttagtaggagtagacactctaacctctcttactgtttgtgtttttgttggattgcaggtgaattggaaactaattaacaggactttc

SEQ ID NO: 4141 - DNA, 1142 bp, Medicago truncatula
  Intron number 6 from transcript Medtr1g143830.1 (locus Med tr1g143830) derived from phytozome v7.0 (chr-ID MtChr1; po s 31875537 to 31876678)
attcccaaaagctaagtgttgccacaaaattcaaggtacaaacccgcagctttggttttctccaaaatttatcatgaaatggtctggtagttggataactgatgttttggtcctcccattcaatatgtatgtttgtttatgttttatagtgtatgctattgacagtattcatctttgatcatgtattcgaaaacagaaactgagaaaatgaagaaggaaaacctctgattctgagaaaatatattttctggttagtgactttgcaaagtcagagaacactcatttgtagatgaatgacctcactacatatgcagaagtgacagctaagagttagctattcagttctaactgaaaaatagttaaaatactagctaccactaactgaaaatacaaccatgaattagggttaagtagattactctcacatcaagccatgcaaattttgcaacttctgctcgagaaagaaagatggcctcgtctgaatatcaacgacacttacgataattgacatggcctttcagctattagttcttttaacttagttgttacaaactagaaggtatccaatgcattgcaaggtattttaaaatgaaaatattaatgagatacaatatttaaaatctttaagaaggtataaattggtcaaatgtagctcttcaagctttgaagaaaatcattagaataaattaattgagcgcttttgatataaagttcaacgccatgatggaatccagaaaagagtagaacctgtttgtgcggttatcaatgacagtcttaccttgcatttgcaagagactgatgagtagtaactccaactattgtgtcaagactcttctgttcattgattatttttttttttttttggtgtttaccctccggttcctaggggaaaggggacctagtaattcggagttcggccaggagataagtaaagcctggccaataattgaactcgggttcccccaaacgatccgtcctttggtggattatgttcattaatattatttgatataatgtggctaaatttaaaccattgaactccaaatttaaagttagggaaatttttgacatcaataataaattcatatgatttgtcgttatgagatctttctgttggcatccagggacaattgtttcaactg

SEQ ID NO: 4142 - DNA, 2080 bp, Medicago truncatula
  Intron number 4 from transcript Medtr5g078580.1 (locus Med tr5g078580) derived from phytozome v7.0 (chr-ID MtChr5; po s 29125166 to 29127245 reverse strand)
agcaagtaagcatttatttataactatgccacaaagtgttttgaattatcattgattttcattgttattaatagttatgtatgctagttctactactccgatgaccttagcttgaaaatttgaacattgaagtttgactttttgttaaacatagttgaagtgttcatatgcaatgcttttggcttatttgattgaggcgttttttgtttgattgtgggagtgaaactttgtataagttgtacacaagtttttcttaggctgtcgatctatctttgctatcattaagaattcagcattttagctaataagtcattatttctagttagctacacgcctacatccttaatgactggcttgctttctcagatatttgtttctgcttggtaggcttgctgtctggtttcttttcaacgtatacatgtttttgccttttttaatgaatttcttcatacacatacacatataactcttggacacctatacagttatttcacctaatagcttttcatataatgaaaaattaaccaaattgactgtagaatcatgtgatattattttcatgattaggcataccaaatgttagataatttagacatctgtggttatataaccttatagtggatattatttatattttaaggtaaatgataactagggcctagacactggttgaggatctggagttataaatttgaaagtttgtattgagaagtggagcatttatgttacctataaagaagaacttttcaataaagattttcaatttcttgattggcactgattagcaaaaatatatttcaattttcaagtatcacgctatacattaaagtaaaagtagtgcaatgaagtactgattagcctttttttatttatatgaaattctgtagagttaactgtaattttttaatttaatttaatgtttggattgataaaataacaattaggtaaagttatcaattttgacaagtatgctaagactggtgtcaaccgttcttaagtcatatatagttcatcttgaaagaatgaaatctaggcaagtggaggataaaaaatgactttcaaattcatattgaaagaaatgaatatattccagaggaaagatagtagagtaaaacatgacctcaatacaataacttgcttccgttaccgactgacctaaatagacccttgtaaactcacgagtaggatcatacacaagtccagttcatgtattactattaccggcatagctgtgcttttgggatcaaggtttcaggttttatgtgacgaccgatgtagaaaaataattattcctggaaaggagtgaattgggttatgggtgcgatatcagaaaggttaacaagaggaagaattttatgtgaaggggattgatagctatcggctattcctattgtgaaaagctgctgctttgtgattttccgtattgggtgatagctatcagaaagttgtgaaaatctgcttctctgtttttccttatacttctcaccctccaaagccctcccctcccctagaaactcccaaacaaagccttagggcatggcacaataatgacataaatcttacacttctctgaatatgttcctagggagttgggctgctttactactctttcattggacatgctgagttagatttggaagcttgttgtttgtagtaggactgatatatgtgtctcccaagttataactcacaacgaaattagaaatttatacagcgattaagcttgagtttgtaattgtactagataattgtagacatgccttctaagttcttattacttgaaatctgaatttattcgtcttcatcaccctgctgctgttgtgtgattctttgatgcttctttatcttcccagattttttttatcttttttgcttagtttatactcagttttgctttgcttatggttgaagtttaaaagttgtttatgttataaaatttactgatagttggaatagacccttctactgcttagttgccagatcatttgtcctgctatcttattgtatgttttcagttcttcactgaccgtgttattcttttgtagagagctgcaaatactggttggggtgataacgggat

SEQ ID NO: 4143 - DNA, 2074 bp, Medicago truncatula
  Intron number 2 from transcript Medtr3g083850.1 (locus Med tr3g083850) derived from phytozome v7.0 (chr-ID MtChr3; po s 19801615 to 19803688 reverse strand)
gagtgatttcagcttctggacaagattcaacttctgtatacttttcagaatcagaaggttgatcagattctgatgcatcttcagaatcagttgtacctgcattactttcactttgctctgaagttttacttccaggctctctatcatcaaattttacatgcatagattcttcaacacattgtgtttctgaattatacactctgtatgcctttgacctttcagagtaacctaaaaagattcctctttgagccttggcatcaaatttcttcagatagtctttagtgtttaagatgtaacaggtacatccaaactgatgaaagtaagagatattgggtcttcttcctttaaagagttcataagctgttttctccaacataggtctgatatagatcctattttgaatataacaagaagtattgactgcttctgcccaaaaatgtttagctaagttgttttcatggatcatggttctggccatttcttgtaaggttctgttctttctctctacaaccccattttgttgtggagttctaggagaagaaaactcatggagaatcccatgtttttcacaaaaaagttcaaatagctcattttcaaattctccaccatgatcacttctgactttcaaaattttcaattctttttcagattgtatttgagtgcagaagctgctaaacacttcacatgcatagtctttacttttaatgaattttacccaagtccatctgctgtaatcatcaacaatgactaatccatatttacttccatataaggatgcagtgttaactggaccaaaaagatcaatatggagtaattctaagggtctggaggttgatacaatgtctttagatttgaacgaacttttcacaattttccctttctgacatgcaccacaaagtgcatctgaatgataatcaatgttaggcaatcctttgaccagttgtaacttgctaattttagaaattaatctccaattagcatgtcccaaccttttatgccatacccattttttatcattcattgacagaaggcaaactaccttctgatcagccagatcagagaaatttattttatagacattctcaactctctttcccttgaatgtaatggatttgtcatccttgttaactagtgtgcagttggtcttactgaacgttacatcatacccattgtcacaaaattgacttatgctcaataggttatgcttcagaccatctactagccacacattattaattgagatggaggaattaccaatagtacctgtaccaatgatctttccagtttggttgccaccaaacttcacttctcctccatctttcattgtaagggtaaggaacaaagctttctctccagtcatgtgccttgaacatccgctgtctaggtaccatgacctttgtttctctcttgcccttaagcacacctgcatttttggccaattcagatttaggtacccatatcttcatgggtccttttgggttagctttggaggttttacttttcctcccttgtaccttagggtgaatgctgagtggcttctgatcattcaatactttaggtttgacaccttttggtattgttttctcagaagcagtagctgctttgttcttctgatccttttgttttggaattttagattctggtttaatcagattctgatgaacaggttctgatcttttcagaattttaatcttttgactcttaggatcagattttgtcattaccttgatcttaagattctctggctttgatgtgatcttagcctgtgaacctgaagcttcaggttttgactgaacagcagttttagcatttgtaccttcaggcacaaaggtggatttcaatccatccttgatacaatcacagtagctcttgagactgtattctttggatttctcctcagaatatccaatccctttgcctttgttcttgtatgtgctgtagatcatagaagcaactttgcttctgtctattccagccataataaaatcatccaaggcaatctcatgtttattgcctgaacctttatcacatttttcttgtagcttctgacaaagactcttgagtctatcttcat

SEQ ID NO: 4144 - DNA, 3691 bp, Medicago truncatula
  Intron number 2 from transcript Medtr4g157400.1 (locus Med tr4g157400) derived from phytozome v7.0 (chr-ID MtChr4; po s 39223736 to 39227426)
actagtggcagcaccctttgtcttgtatgtgtgtcgggttgtaatcatcttgtttttctatttccttacttcgttgcttgttatttatgcattagtgactaaactttatattctttttttgtgattctcttttgcatgtgttgtgcgagataaatcactgatggtgatataaatttcattttggtagatctaaataactttatgccaccaaataatcgactttttatttgttcttatgtggagaataaaataaactttcttatcgttatagtgagtagctaaaagcagccaaataattgaagttgtttggatggttcgatcggttcacttctttttatgctgtttatatgtggaagaaatttcttcctttttgttttttgacaaatgaagtgagacagctccatgaaacattttgtggaacaatgaggtggtgggatatatgggataagataaaaggccttgttgcctaacatttacaaaattcttcaaacatattatatatatctcctaaattaaataaaaaaaacttatgtgatcgaacatatataatccacttatttgaaaaattcatgtttttaagtgaaataactattacaaaaactagcctaggcagtgatgaaaaaccatagcctcaattaaactttacgcaacagttttcagacaaatattctaagactatggaatatacagtaaatataattatgtacagtatatgcctacaatgtgacgaattaattcttgaattccgactcaaagagatagatttcatatttagtgacaatatttcgaatatgattaactctgatggaagaaaaatatggaaaacccaacaatttttgtgtatgattttatactagagtcaagaaaattgggatatgtgttggttctcctactttcaaaaattttgaatataagaaaatatattcacattattatttatataatattaaattgtgattcttttgaaataaatttatattaatataactatatatgttagattttaatacatttttgccctttatttatgtgttttctggattagagtaatttgcacggtatctttcatgaaataattcaacgttccatagtttcttgaagatttttatgttctccaattttaatttcatgttctgccttttcatttatttatttatttatttatcgtaaagacaataattaagatgaattccgggatgtttagttgtttattgaaggtgacatattgttctgcctgttctactgtttctttttctctcattccttttatatgactttttgttattttttttgaaggaaaaaaaataaataaataaataaatgcagagaaaacgatatttttcagttgcttttacctccatttatatattcttttaagtttgggatttaagtaacaaaatttagattaaaataagaatgctaacgagtgtcctcgagacattgattaaagtcttttacattaaaaaataatataaaaaatgcaatttagttaaaagaatactatatatgacaaattgggtatatgtcgttggctcaattgggtagaatgaagaccttggatcctccttgacataaagttcaaatctttgacaaaaaaaaaaaagattgattattttttatcaaccttgttttatgttttattatttttatacgacgaggaggaatcatgaaaccctatagtgatattaaagccactataaaatttgttttagatctttaaatatgaccctcgaactttggtttcacacggtacgaaagtttaatctcaaatactagtttcaacctttgttgttgtagttagttaaaaaatctaattatagaggttgaaaccatttagttagttttgtagtgtctttatttattttcaatgtcaattaatgttacacatttttttttttttgaaggaaaaagtagtaattaatgctacacataataatatcaaaaaaacgattcatatatataagaaaattaaaaaaaaaaatcacatgttttcttttttactcaactagtttcatgcttgacaaaaatatcttaagttttactcaactagttgtccttataactaatgtcatgaaggttaaattggtcttttgagtttgataaaaatatcatgttagtcttaagttttttaagaaatctatttgaaactcttgaccaaaaaaataaaaaagaatctatttaaaacttaaaaattttaaaaacttcaaataaatgtattaaattaacaacttaattaaataccctattttgaaacttaaaaaaacttaaaagatatattaaaaacttaaaaaatttaaaacacttatttaaaacttaacaaacttaaagggtatttttgtcaaaaaatttaaaggataaaaaggtattttgcctaattataatggtttcatttcttcccacgtgtctaaaattcaatagtcaatttttcagtcagttgtgggagttttatatttaatttaatccttatcaatcaacttcgtttactatgattatgattacgaagtttggcttgaattgactaaattgaggctttgctgctgaagtagttgttatgttaaagattagagctacgaagtttctcactctagcgtgtaggaagggtgaagaaaatgtctttgtccaagcctattcaacccattctaatatgcatgtgtgtgtgatgctaaagtttgatgctttttctcaactttataggcttttaacaaattatatatttactgttaaaacaaattacattcccaaaaaaaaaaaaattaaatttatttccttgatgtcaattatgatatgctttttattaccagctagaattaacataattaacaatccttcattataattaacatcattagatagatgcaagacaacttatctaggagattaataagacaacttatcaattcttgtaaaataaaataatagagagattggttttgtctaatgtgcacgagtgaaatagtcttgcatcctacacaaatctatcattaaatcaataagatatatcatatcacatttgataatatttattgatccaaatccaatagtaaaaacaagctttatgtatggttttctcaaaaaagatttgttcccttgtggacaataaaattagtcaaaaaagatgtatatgattttagaatttttatctaaaaatagtaactaataattaactcaaataattaagatttaccaaaacaacttttactacttgtctattttttcaagaaaggggaggggatagattttatctttgggttgtgcttgttcgacaagataactaaaagattttaatggagggaaagtgtagatttaccttttttcaccgttttaatgtctaaatgccacatttaataaaatgatatttaagtctaaattttaaacaaatattaacttaactctttaggaagggagagtaaaaaaaaaaactcattaggaagggagctaaaattggctctgtgagaaaaattttttttgtccttgcactccttccaccaccaaagagcggagattggaacgcctctagaggctctatattgtggtctacaacattacccatgagagccttgttgtagtcttcaatggagtcatggtcacaaaaacgattttttagttgttctagttgatgaataaatgaaatttaactttttatatattgagtataggttcgggattcgaatcctatcgacaagggagagac

SEQ ID NO: 4145 - DNA, 607 bp, Medicago truncatula
  Intron number 1 from transcript Medtr5g090950.1 (locus Med tr5g090950) derived from phytozome v7.0 (chr-ID MtChr5; po s 35554053 to 35554659 reverse strand)
cattgattaattcaggggttgggtgggacagctgggttagttttgtttgaattttcaatgatgtatacagaatccaaactggttctctctctcttttttctttttttgcctatgtctgtaaagagtcttttgggagcatgccattttgtttgagtttggtagttactggaaaaatgggagttgggagatcaaatcagattgtgggtcctatatagattctgtgtagtataaatgtataatcaattgacttaaagctcgtttgactacacactgggtgagataaaattggggtacaccgtgaaaagctatcacacatgtggaaatcattaacattgagttaggtaaaaatacaggtcttatttactaggtaaaagtgattatacatcttggaaggaagactttcttcgcctgtgttaatgctatttccactgtgtttccaaacaggctcttattttcagaggaaacatattcaaacaaattattacacattaaactctatctttatcaaatactactatatctttatgaaatcaatttcgttcaaagtcacatttatctaagtacatgtttcgtttgcagaggtaaaaacatttttctgcacaggctt

SEQ ID NO: 4146 - DNA, 636 bp, Medicago truncatula
  Intron number 25 from transcript Medtr5g021910.1 (locus Me dtr5g021910) derived from phytozome v7.0 (chr-ID MtChr5; p os 8476924 to 8477559)
ctaatttggccagtgaacttgaggtgatcttattaagagtttttaattagcttttgtataactaacaataaatgtatgcggcctcaccctctccaccacttctcctggctccatactaaactgggttgctcttagtctcagaattgaaccatgttattactggtaggcagtagcacacaggataaactatgaaacaattgtatgcatttattaaatggatgtaggaatctgaatagctgtcattggtggtgttgagaattgatatctcacatcgactaatgatatggtcaaagtattccttataaggctttgcaaaatcttcacccctagagctatagcttttgggggttaggtggagccgtaattcttagaaatcataactctaagaacacaggcacatgagaaggagtgatatattttgagtagccttctatacttgatgacagctcatctttaatgtttcaactagtagtatttaagtggattgaactaccactatccattcaaatgatttgtatgtatgatatgaattgtacccgtgtatctgagaataagatttggaccatgtctttcctaaactagattacgtttccttttgcaggttctactaacagaaattggttcaaggtttgtcac

SEQ ID NO: 4147 - DNA, 1796 bp, Medicago truncatula
  Intron number 1 from transcript Medtr5g026470.1 (locus Med tr5g026470) derived from phytozome v7.0 (chr-ID MtChr5; po s 10697991 to 10699786)
tcatcaataacctcatcactttgccctattttctggtaccttccttttcctttaccccatatttctcatttttcagttcttttttttgtttgtttagtctttattaattaattaatggtttaatttaagttaattaagtaaccactattggtgtatgctatttttaaattattaaaaattagtataaagtagggttgcattgcatatatatggaggggtcttcagttgttctcttgactgatgggtggagatggtatgaatggttgttatagtggggtactacttactcattttagtttttttttttttttttatttttattttttattttttatattatagtaaatgatagtttaagatttttacccataataaatttaaaataatattgattatatttgttttaaaataactttattgttaattattttattaattttgaaaaagacatatattgttttattaaaaaaatataataaaaaagatttggaaggaaggaagcataaaaagcttttaataatgatggacttttcaagtagaaagaacatgatttttttaaataaagtggcctttaagatattcctttttttttttttttaaggaaaagtttcctttaaaatattctttatcattctttgaacgtgttttttatttaatcacttgaaatttttttagtttttttctcaacaatcacatttcttttgttctataaaaagtattacgaattttttggaaatatattcttattcgaagaatatactagtactaggaggaacaatgcacttataatgggtgtttagatagtgtggcctccagctatttgctgtgcaacgattaattttgtttttttctatctttttctttgtagttgataaaatttgaaagacgtatcttcaaaaatgttgtatttttcttatgatttgaatgaatggacaacctattttctgaataataataataagagtaaaattttaggaagtgataactaacttgcctcctaaaaaatcttacacgtccttttcaattgtgcttttgtattgtacgtcaattggtcccaacaactcccaggctccaaatgctgattccagaactcaaccaatgtccacacattattatacatacaaaaataatacaagtttttttttttttttttttcaactaacgtccacagaactcaaccaacacaacctatgataatgatagcttaatttcctataaaaaattatttcggttaatcaaaacacattaaacaacatgttacttacgcgaacaatgcttaataaattaatgatatagtttagaacaatatatgaatgtcagtgagttttactagcgtttttcttaataaaactatccatacaaatactaacatagatgtccgagttttcaagggggcggtgagattggtcccctcagattagttggtccttagatcggataccgagttttaaaaataaaaataaaacttagagattttttcttttaatttgagttctacttcaaatattttattccttcgaaacattactatttgaaaggactctagtggagatactacgaaacgaagtaggttcaagaggagaagcggatatcttaaatggatctcaattacgtcatgactcatgagacgagtatctctatagtcttagaagtattataagaaaacatgtagctgaaacaaataattttcagagttgcaatatctagagaattttacagtattatagtgaagttgacttagctttgaattttatgtttcaggttttttttctgtgtctgttaagtggctgcagtat

SEQ ID NO: 4148 - DNA, 669 bp, Medicago truncatula
  Intron number 13 from transcript Medtr7g112390.1 (locus Me dtr7g112390) derived from phytozome v7.0 (chr-ID MtChr7; p os 26639774 to 26640442 reverse strand)
gcatattgaaatacaggcagcacaaaacaaggcaagttaaaattaaaattagttttggttaaatccgaatttttcctacaaaatacaaagagtacaactggcacaaagtacaaagtcccacgattcaactactaatcttcttctgcataatatcatcccacgactacataagatacaattttctgagcaacaaacaagtacctcagttcttgtaaatagtaaaactaggattttgagagtgtgtcactccactgttcagattatatacattagacgtacatgctgcatacattaacatagtcattgtacactaattacatgcactatatattaaatatcttagaatagttcaatgttttattagagtattgtagtttatcgcctaggaccattttctaatcttagattatctcctatagttattttctatattacctgttataatcatgatttgtttccttgttttcttttatattaaagagtaggagtcttgtatttccttacttccgtggtgtttagtcttctgtatcaagttaatatcacactagtatccaattattatcaatagcattcaaagtttttattatttgtctcctcctttatctaaaacccatatttttcgatatggtatcagaatctggatcggtcctttggaacctatcctgtccc

SEQ ID NO: 4149 - DNA, 2504 bp, Medicago truncatula
  Intron number 1 from transcript Medtr4g115930.1 (locus Med tr4g115930) derived from phytozome v7.0 (chr-ID MtChr4; po s 26971007 to 26973510 reverse strand)
tcactgttcttagaaggtcgtttgttttgtgagagagcagatttcttatctgggatctctctcttcactatacattattctttctctctctaacatttttttttatttgtttcttcactttgaaaagaaaaaaaaaattacccaacagatcgaaatcgatgatcttagcttcttcattgttgtttctacaacacccactttgttaaattgttttttttttcttaaagtttttatttttattatagtttgagtcaaaagactaaatttttattctcaattcatggtggattcttaatagcaagttatttgaggatgtgggtttgaggtaattttactaatcatttctgaattctatgtttaattttagttaatcatttgatataatttggtttaattttttttattcttaagtggttgtgttttgagtttgattgaaatgaaattcttggttccttttggttgttggaggattattcagctgaatttgtaaacttgaattgttttttttttgtttgtttgtttgtttgtttgtttgtatgattagctgaaatgttgagatgttgaattttacctggtgtctttgcgtgcaatcgcagagactaatcttcctcgagccggattttgaattcttgttttaatgcaataaatatctgttggtttggtaattgtgcataggatctgctcaattcaaatttgtcattcatttaggtttcatcaattcaaagattgataaattgttgtgaagttgtaattggattaagggaagacttgcatggttcagtatgaatacaattgagattttctgttactttattttgtccttcattatttttactcaaacttggagccaaggatcacagtttcgtcatgtcaaggatgaaattgtgatgcctggtttgacattatttaacttatttatagattttttatttcaatgatgagcatgtgtgtagttagttagtcaaattaaaaatcattattattttactgattgttcaatttttttttttattattttactgaggttttcaaatttctttgcccgagattgaatggtggagaatgaatcagatttaatgcatttgaaactcgtccatttgaaatatgatttccacccggtggtgtgataggttggtttcatttttaataaacctgaccgtcttcttgcaacttgaatcatgtcagattacaactaacagatgcttctattttgtggcctgtatgcctattttcatgaatgtttgttacattgctaacccttttgcaatcccaaagtttgctaacttagcgatgtgttcacttcttatcggtagtctgaacatctgttatgtaatatttcactcatactttctaaacatagaagttgttaattttcatcagcagttaactttgttatggattttgacactaacatatatgataactattcggagctacattgtgcaatgttttttttaaacagacagtagatgttttttacctgccttgaggaacctcttagtttaagaatctcaagagctcgatgttgtagcgtactcttttttcttttccatgcatgttggccttttttacatacacttttctagctcagtatttcagtaaatactttcacttttttattctctggttaattaaccttatctgatctaatctaggatatgatggtggtagtatcggttctctagtaagcatttcttaattttttatttgggagttgaaaacaatatttggtaataattaccaaactgtgagatgcaaagacttgtagcaagtgaagaagacatatttaccaaggtttccggtggcattgtagtgcaaggcttttagaatgcctatttcattatgtgaagctggctacctaaagtagtatgacttaggaattaggaggttcttgctccttgttctactgttcaatacttatataaaaaagtttcttgatgaaacgggctactaaaatgttaatctgctcatagaaaagttaatctacaagtttacctaaatactcttcaactgtacttgagttatgagtaatttatattaagatttactttcatttattatacttttagatcaatgtacttgaaaagatgtggaaatctgattaattcatacttttcttttttgtctttttctactgagaagttcccttatcattcatgtatatttaatggatgaattttggaaaaaaaaaaactttaaatttcttgataggaaactatctttgcaattgctagcattgtatatgcgatgtttgtatatgtgatgtcgtttcatcgtttgggttcacatcattaaatctggtttctagtcattcaattttttggctgctttacatggattgagttatttgatgccatgccacatttggaactcatgagtatgaaataaattaagatactgcatggattgtgatattattgggttgaaagagaagctatatatcacttatcacttaatttgacgaaaattacttattaaaatatatccgtgttcaattatcaggg

SEQ ID NO: 4150 - DNA, 3458 bp, Medicago truncatula
  Intron number 2 from transcript Medtr5g095810.2 (locus Med tr5g095810) derived from phytozome v7.0 (chr-ID MtChr5; po s 38005195 to 38008652)
ggttactaacctctcacttcttcctatttcctcctgtaagttcactctcgccattcttcaacctttcatctttcttctgcaaaaaatttcattcattctgtatcaatttcaccctaatctactcctaaaactaaatgggtatttattatttcaaaccccatttcgaaaaaattgtgcttttcttagaattgttgtgttttcttcttaaccctaatttttcagttagggtttgtttatgctgtttattgtctcttaggttatgaattttgagtttcaattgtttatttttggtaatttttttcattaatttagggaaaaattcagaatgatttgcatttgtgatatattactattgttaaatctgttttaggatcttgtgatttaattctaagatacagttgactaattgactttgagccagtttggataaacttctccgttcgtacttgtgaaagaaaagagaaaaaaaaaaaaaaaaaaactaaagacttattttagtccctctgattttcttgcagaccatttcagtgcccaacaaattatagtagtaccaaattagtccctcacattttcatgtagggtagtccctatgttagtttaaatgagggactaatttgtccctcatgaatgtgaggaactgatttggtactactattttttgttgggcactgaattggtttgcaagaaaattttgagggactaaaatgggccattcttaaaaaaagttattgaatgaatcttacaatgactgagtttttattagcttctcatatagagaaagataaatgcatgccgtattgtgtatggtgtatgtattttgatgttcaaataactcactttgttattaaatatatcattcttttactctcttttatctaattctcactttttccttctatttatctttcttggtagtaaaaatcttaacgtctacacatgaatctcgaacatttggatgagaacattgagaatgttaattctaaataattaaatctttaggaaaggtaagagcctagaaatggatggtgctgtatataatttgtgggttagatccattgttccttgcctacagttgttttgctgaaggcaggaaaaacggggcaatgattagaatgagagaggcctcgagtgggaaatacccaattccattgcaaaatcacaacccaatttctatcaagagtcatatccaaacaaagaaaaagaaaaacatatacataagccagaacttgaaggtgccgccacgccattttcatgaaaaggtttggctttggtatctcagattctgtctgcatcttctttctacttttcatctttctcatactgtcccttaaattgaattgggttttttttcccacagtgacagatctttcaaaatttacacttgatatgagcccctcaacctactgattttctattatgattattttaaattatttgttttaaaaatttgttttcttgagttgttgtttttgtttcgcactgattttgtttttgttgccaaatttgtttgagggtcttttcacttatttcaaagatatagttaactaattgacttttagcgtatttagataaacttcttggtaaatacttgtgaaaagaaaatgaatcttgcaatgattgagttttttgaacattagcttctcatatagatacagataaatttatgccgtatcacatatagtgtctgtattttgatagtagcaatctctttgtctaaatataaatctcgaacatttggatgtgtacatagagaattttcatcaaaaaaataattaaatcattaggtaaggaaaaatcctagaaatggatggtgttgtatataatgtgtgggttagatccattgttccttgccttcagttgtttttctgaagtcataaagaaaggggcaatgattagaatgagagaggccttgagtgggaaatgcccaattccattgcaaaacacaaccctacttccaacaatatccaaaaccataaaaagggaaaatatatatttaagccagaacttgaagatgccgccacgtccttttcatcaattggtttggctttggtatctcagattctgtctgcatcttctttctcctttttcctctttctcttactgcctcttaaattgaattgggcttttttttcttcccacagtgacagatctttcaaagtttacacttgatatgagcccctcaaccttctgattttctattatgattattttaacttggttgttttaaaaaatcttttttgagttgtagttttttttttttgcactgattttgttttggttggggaaacatttctgttgttttcttgtttgagattcactgcgtacaggaaaagccacagcttgattatagctactgcttgtttcaatctcccccagcctaaccaaaccatactgggttcgacatcagtctatgtggtttctatgccggttagttgatgtattctaaaataatacctcaattaatcgggcataagctgttgttgaacccaatttggttagtttgttggagattgaatccatccaaccactgagcatgtttttcaaaaatatggttggttttattgtacttgggcagcggctaacacaactgtagagatggaatccgcaaatgctgagtttttttttgtctcaccattctattaattccatctcacattttcttatttgttggtatctgctatttagatttaatcgttttatgtatttttttattttgactaaaaatttggggtttcataataaggaagacgacataaagtagtgtgcatatggataccgtgtttggaatcaatttgctgcatttgcactcttattctcttttaataatagttttacgcaatatggacataaagtagtgtgcatatggacataaagtagtgcgcaatggtgaaagtggcagcttcataagtgtttatacctaatttcatgaagagttcaatggataaaatagttttacactgtcatccagatatatctctgcaaatgtttgtgaagatattttaggatttaaaatagcggtgtggctcaatgaagagatatgatttgacgacaatgtaaaactatttcacactttcaaaatcagtcaatataactcatatttttcaaagctgtcatttagtttgtccacaaataccgattaagcttttaaggacttttttgcaagtgaagaaacataaacttattctaactgagaaactcccataaactagaatttggtccaagctagcgctttatatagtagcagttcttccatttgttgtagtcttgacttgccgtttctagtaaatggagtagtctcgacttgccgtttgtagtcttggcttttgcatgcaacccaatcaaagcctttgtttacttcatcacaaaaactagaagaaaccctctccacatttcttgttttgatgtccattgtcaagaatttgttttctagttagattaatcctttattcagctctcat

SEQ ID NO: 4151 - DNA, 3870 bp, Medicago truncatula
  Intron number 2 from transcript Medtr3g016770.1 (locus Med tr3g016770) derived from phytozome v7.0 (chr-ID MtChr3; po s 3337614 to 3341483)
cattccttctaattctagaaaataccactgggcaggtgaggagttcatatgtatttgatctctgcactctaattgtgagagttttagaaaagttttggattatttacatattagaccccttgatgattgggaggtcgcttgacccgaccatggcacctagcgtaacactccaaattttaatattaatttgttagtgatattattaaataatactgatattattattggataatattagtattattgttattattagtattaattgctcgatattgttaaattaaatttttcacagttgtagatgttatgaataatgacaaagtagggggaataacttgtcggttaaataattgaagaaaacaattttaggaagaaaatagtgtttttagcaagggtaagaaggtagagtgcaaacagaggtgcattagtaaaactggataagaaacgggtgtaagtaatagttgtatatcattaagtggtgtgaatagaggtcgtgtaaaaagcaaagatgtatagttgcagcaaagaataataatcatactagtggtgcagaaagattaagaatgggtgagcaagattaagcccaagtagtggctatatataaagaagaacatggaagaattagagttacagaaagcagaagaaagaaatagagagaagctgaggaggttgtcacgtgggaaccatagaagagacgagaggaaatgagactaatcctagctaaggaaaaccaagccaaaagctacactttcggagaattcgaggtaagagggagaaactttcatcttaaggtattcttatatcagggttgttataattctatgaatttggtgttgttatcatagaaagcatgatgagtatttggtgatgaaataatgatgcttagagttattggtgtggttgaaagattagagttgtgaaactaatgttagggtaatcaattagagtattcaatcatgtgtgaagaagtgtattaagatagattgagtaaaaattggtgtttgaatgataaggtaaccttagggtattttttgggatgatttgggtgagtttggggtcaaattcaaaccttgggggaaaattgcaaaaaactgtgattctacacatacttgagggaaatgcacggccgtgctttaaaacaaacgggtcgtgtatttcttgctgccctttatccttctatgcgttgtaaaaacgcacgtcgtgcactctgaggcgcacaaccgtgcacttttcccaatcttaggaaaccttactttccttccttaaatgggttcctaaagtgaaggttagggtcccaaagtaatgtacctaagcgagagaagtttgtttaggtgttttagaattgatttcttaaaaactatggcgagtctaaaacattaattagttaaaggggcataagacgattataagaaaaggtatgggctggtgatttaggataattaatgatgataaaggtaaattccctagagtagtaatgagcctaagataattgtgagatagaggagtataagattaaaataaacgaagaataaggtgtggttgtttaagataattaatgaatgcgaagagtactcacaccagtaatgtgatcctccgcggcttgtcgtatgttccttctctaaactaaggggtgggtgctgcaaaatgcactctaggcgatacgtagatatgcgttctattaggtagcaaagttattaaagtaagttgatcatacttgggagtgagacccctatttaaagtgacatattttgatgatactcttcatgttgttgctattcttgctcttacaatttggtcgagtatgttacagatgctacccaatttgtttatagtaacagattttgagatgggtaggagtgactatctgattcgaatgagttccacattactatgaataacccaaaaattatgtgatggtttattgacgccaaaagtggtaaagcgtatgggtgtttgacttatctggatgtaagaacaaaggggttccaaagacgatacatgaggtattttcatgtgatgcacattgggtctgagacataatatcgaatgaggtacaaccctgtgttgtaccatgttttatgacgaggttgtaacctcgaacgaacttgaatccttttccaaatttgagctatgtgttatgttcatgatgagatttctatttggacgtcccataggatgattggtttgagccttctaagcccataccaattcactaccaatcatatttatgcagttattcacctttttattgatcgtgtttgcatattagtcattattattaattaatatactaatcatatttatatagtaattgaagttgcctagttggtatattttgtatgatcaatattttattatttatcaatttattatacataaagtatacataacaagtccaaatacgagtaattatgcagtataaattagtgataagaattatctctaaataataatcaacacatacatacaaaatatcaattaaatataagcaaaagagagagatcaataaacttatatgctcttaacattgatgtataactaagcacatatacaactctatcaacattctccaccaacaactcatatgtaacctgcaaaataataaaccgttatataacctgaggcatgatgaagtcattgtccttaaggatttatccgcctcataagtgcttatcctcccaggatacaacaggttcttctctgatatgaatcatataagaggtgacagaacaacttgaatttgataaacattgaaatgatttaacccaagaactcaatggtattggtggagagaaattgaattttgtgtacggagaaaaaatgaattacccaagtgtgtatttgtgtatactattatttattatattgatcagaatgaagaaaaaacgttttgtattaagtgacactagttgttcctactaatggggaagtaaggcatgataataccaaaaatcaaacagtatcatggtcaaagcaacaccaaatattattcagaagaataaggtttggcctaagtaaaacatcgcttggtcaaaacactgtgacatgtagtttataaatcatgaattaaaactctaaaaattacaacaaattatatttctaatagtttcctacaaacatgaatgctactatccatgtgagtatgagccagagtgtgagtattttttattttatttttatcaattatgaaagtatataagaaggaatactgatgtgtcatacctaaactcatttcatctccattcataagttggagtgggcatagtgttgaaacaattagataaccaaagaaagttacggaaaaagaaagaaaaacacactcatatatatgtcgtctttctttgcacataaatgaataaatgaaaaaggtagatgaaccataaggtttttctctttagtatttcatatataattctaatgtgacatatatcttatttcttctttatctttcttttaatgacgtttctttattcacaaaatcagcgcaatcaaacaaactatgcacgtgtctattcatgcagtatgcagtgacacccattccaacttacaatacaccttaacttaaaagaaagaattaacacaacgtaaatgaacatgctaaacatagcaaggatcatcaatcacaattcacaaaatgacatatcatatcgttaacatgaatccaattatccctccaacaaatggagtcgaccctaatttcttctatccatatttttttcttgtgattttgttctctcaatgcggcgttgttttcttcgtcgtcttgatgtgacattgcttgattttctgtccgagtgtagtattcggttggttcagattgacatatcaacttcaatcaattacaaattaaatcaaataactagatcttca

SEQ ID NO: 4152 - DNA, 1232 bp, Medicago truncatula
  Intron number 3 from transcript Medtr3g106270.1 (locus Med tr3g106270) derived from phytozome v7.0 (chr-ID MtChr3; po s 26724770 to 26726001 reverse strand)
atttggaggactgacccacctatcatcatcaagtcgtgtgccattaaaactacttaacacactcaccatggtaatataattgctgataccagagtttatagttgctaaccttcacccagtttctgtttttgtttttctttcatcaaattcaaatttacttttaacttcatcatgtttctaggctaccataaatcgttgctaaataaatcatccgagaaacagttccattactgtttatctcattttgcccaaaagatatgggaaaaaaaggatttagagggattcaatccctattatgctgcaaaaacgatgcttaaccactgttccatcatttttctaataacacatgtaatctatgtatattaatgcgatcttatgctgattacaacattaagttgtgtgccattaaaacctaataacaccatggtaacaatattatccattccttacatcatgtttaatcttttcttggttaatatactattatagttcctttgaaattgtatttgattttgatattgataataagcgtcaatcattttatttcttcatgaaattcacaattatgaaaacttcaagtttataacttatattttcaagacagagaatacaacttttttaactgacatgataaatggtgatataaatgcttaggtttctgctggtctatctgcatcccatgtaaatttcttttgtagtttgctcatgtattgaatgaattgaattgattgtatcctgttttatctatctccgagagtaggtatcaaattccacttgcttttgaagtgtacgaaacacaagtataaacagttaattcagcctagtagaattttttattaacgattaaagaatgcataggaaatattgagaattgagtagatattattgtttattgaattagaaattttaacattgaaatattgagatttagcatgtggaatttgtatcatcaattatttgtgtattctgcttccttgtgtgaactaaaggcacctactctaatccatcattcaaacgttaccatcaattattattggcgttttaaattcatgtacggcaatacttgattctgcaaaactgaaacagagcattagatcttatgctgatttctgcaatgcaagtcatgcttgtagggacatgtaacttttcattttaccttcatgaagctcactgatatatccctatggtttaccccctaaccctaatttttttattcaattttacaggaaatt

SEQ ID NO: 4153 - DNA, 2160 bp, Medicago truncatula
  Intron number 1 from transcript Medtr3g111140.1 (locus Med tr3g111140) derived from phytozome v7.0 (chr-ID MtChr3; po s 28117877 to 28120036)
ggagcttgtcaaaagaggaattcttccattcaaaggtaaatttaaccgatctttttctctatgtttcttaataagtcatcgtggttttgtaaaagctaaatttataacttcaattaactcgtgatgaaattagtatatacttccctaaagactattatatataaataaaaaaaaaacaatttttagatgcattaaataactgatttatataatagtgtttgtaagaagtattctgcagatttgtacgttagatactcaacatacaatctttaatgctatgtcattttataattcaattattttaaatttactttaaatttgaaattattttttccagagactattggtatctaacaaatctcaaaagtacctaagaatattccaaaaataatttggttattcatattttctttcacctataatctaatgagatgaaagttcttaaacagcatgaaaaaaaaatccacacccctgttattaagtagtaaattttttttggataaatcaggagagaggacggacatcgaggagaaacaacgagattgacatctcgatgagctctcatcctataccgccaatctcaaattttaggatctagggagataaatattaaatacgtatgaattttgaaattaagtagttcaaatcggattctttatggtcaatttttttacacattcaaaatatttcatggtcattgagtcgtccgttctaaaattcaatacatatttttttttttatattttaataaaacatactccctccgtccctaattataagacccttttgagaattttttttgtccctttttataagacccctttgttattttcaactacattaattatttttttacatacacacccctatttattatacatctttttcttcaatcaacaataaataacatgttgaaaacataaactaaccttctttcttaaaggataaaattataaaaacaatagtgattacaaacaactttaatataaatatgccctatcttaattcccgtaattttggcaaaaggatcttatatataaggacggagggagtactaaatttaaatttaaatcgtttgatcttgattcaacaattataattactgtttttttttttttttttttttgtgttaacctcttacgatttttaaaagaatgcggtcttgttaatccataatccaatataaaataaataaaaattggtcaataattttatttaaaaatcgaattcgattctcttaaataatttttcatgtcctaaagacctaacatgacccttatattaaatgcgtcctcatactttgatggatgccaatcatggaccctagacatagttgtcacttgccaaggtaccaacaaaaatgtagtgggcacagaacatgtctctatcagagagagagagagagagagattggatccaccctacaagtgtgccttgactaattccaattctaaacccaagaagtagctaaactaatgttatgttcgcatacttctccatcgaatgaatcgtaacgttgcttcagataagtattttatattaaactaatgaaaacgacattagcacctaggcatattctaatcatatctaatcatattctaattgttaatgcgatatgttgacatattagatgttgttaaatttttcactattatatagagataaatgatgacatattagatgttgttaaatttatttcgatagatattttaaaatattaaatttttaatgctatataaatttttgcgattgatatggttaggatttttatccgtccacataatttagttttttttgttagacctaatttttgtcgtgtacatgtttttttattaagaaaacaaaatatacaatttaccttgttagacctaatttttgtggtgtacatgttttttattaaaaaaataaaatatacaatttaccttagtttatattgaatttaatttgcatacatcgtcagcgtacactgtcaaatcattaaaaatgtttgatttttaccgtaattacttcttctaaatccacacacacattatcgatgttgacatcatttagtttataaaaaaaaaaaattattatttcataattttttttttttacaagtattatttcataatcattagattgtgaaacttgagtaacttacttttgtcaaattatcag

SEQ ID NO: 4154 - DNA, 3229 bp, Medicago truncatula
  Intron number 2 from transcript Medtr5g005920.1 (locus Med tr5g005920) derived from phytozome v7.0 (chr-ID MtChr5; po s 423017 to 426245 reverse strand)
gtgcaggaagttggtatgtgacccgttctgtgttgtcagtcggtttattcaccaacttatagatccagttgatatttgcaaacatttgcaaacatcgtttgttagacttgactagggttgaatcgaatgtattgttgttattggttgtatttcccgttagggttgattcactggtcaggttttatgtcccttagttttgatgtatttttttattttttattttaataatatagatgagcatttgacaaacgtaggtttagaatgagatatcaacttcgttgagacgtcctctattccttaaatgtcattttactttgaccttataaaaaaaaattctataacttttgcatgaatctttcctttaatttttatttttttgctaaggaaatacttccttttgtcttatgtgatgtgataaactctatagaatctctcatttgagagacaattgttaccgacatcgaaaccattgagaagtggggttaacattttacaatatagtacttgccttttttttagttctagttgcccaatccttccttcataaataagtgacaatttttttataatctcgagtaaaaaagtattgtctttcatctggatttttctcacctcaccgtatctaccaaatgatatttttcatgcatctttttccacatatatcacgttgatctgcccagaatattgattggtctcttacatcaaagaggttttctctttgctacaaaatacaaacaaaaaagaaaatgatgtgtccgtctccactggcacagaccatcttatcattaactttggaccttataataattcaaaattcagccccttttgttttttcaattttttttcttttcaacatgcatgttatctcactgttaagggtcctgctgacaactttgttcaacactgtgtgtgactaaaaatatatcatgaaaaaagtgtgctacttttgtgattttttttttgaccaaaacactaatttgaaaattgagggaatatcccaatagatcgccttgattaattccagggaacaaaaagatttaatgtggatttttattgatctttgctcaaggaaaattaaggcaatgagggtccaataatccaaattatgcttaattttggaagcatcaagggtaacccgtaggtaacttgtggcaattgatgcaattccttgccccttcatcacccacataatttatcatttttcttatatagtaagtagtacatcttttgacaaatattttttataatattgtgtggtattttttgacgtcacaaaatatactccacttttcaacataaatgaacaggctattctcatttgagtaataagcatgaaaacaactggtacctgaaagggtcgataaataacaaatttccatgatttatgtttgaaacagtttttccttcaaaaaaaaaaaatgtttgaaacagttttggtttccattaataatccacatgatttccggaaatatgatattcacaatttacgttcatataatgcagctaatggggcctttacgatttgattcaaagtctaaatttgattttaaagataagtgttaaattttttgggtcgtggtcggagtttgtgtaacgccctagttgttataattaattattttgtttatgtggagtctatatatatttatatatatgatttttgatgatttatgtggtgtgttgttttattatatggtttatttaataataattagaataagtatgaaataataattattttggtgtttggggagttaaatgaaaatagaagggagttacaattaatgggaagttaagaaaagaatggatgtcagaaacagtttcacgtaaaaccaacttttgggagaagaaggagagaagagcaacttagaaccaagggaaccctttttgctgtgcatttctcattctgaattaaggtaagggtgaggtttacttcaatagtgtagttattgatttctgattttgaatttaacagagttgtagtgagaattgggattttgagattttatgttgaattgttgaatttggagttgtgagtgtgattttgatgttaaaaatgggttctgagtgtatacagcaagttaacttatatctgtaaactgaggaagaaaaatgggatttttgggaaaaaccagttttctgcccgtacagaagttcatcgctcgcctcgcgagcattcatgtttcgcctcgcgagtgagcgacttcatcgctcgcctcgcgagtagaccaactcgccatggcgagcaagcctggacaaaacttaatttttgaaatgttgttataagatgttttggggatggtttaaggtacctagatgattttaataatgactggagcaagttttaggttaaaaagatgaatagggagcttagaattgaggtttgagtgagaaaatgtcttttttcccgagagcacctaattttcactcgcctcgagttcaccttgaactcgccatggcgagcagccagtttgtgaactcgccatagcgagcagatgtgctcgcgaggcgagctaccctgttttaatgtgttgttttgcttgcatgaatggtagtgatctaatgttgttgtgttgagcatagtttcatgtaattatgcattattctggatgatttgattgctgaattgattgattactgatgatgactgaatgtatgcttattattaaccatacatgttgttaaagtggagtttatatggagtttgcattgcatggtcagttgtatgtagatatacacaagtaggtccattgcatatgcataaaacagcggagaggactcatgtccaggagtactagttgctcaacagcggtgagggcttcggtcctgatgaatgctttaaccattcaaaagcggtgagggcttcggtcctgtttggtaccacatgcatattgcatatttgaggagtctaaggtgttgtcttagcagtgtcgtcgtatcgtttgcatgagtcttggttgttggttgtagttgccacttgatgattgatgttgttgatgaatatgtatttatatacttattgtgatggatgtatattgatgatattgttgttgcttgtgaattatatatttatatttgcaagatgaaatgtttattgattagggtgttagattcaattgaagattttaatatctatatttattgttgtgaatctcaccccttctgcttgaaaatgttgcccttcctatgggtaacttgcaggtgatcctgagtagttggtggtggctca

SEQ ID NO: 4155 - DNA, 2107 bp, Medicago truncatula
  Intron number 2 from transcript Medtr1g064840.1 (locus Med tr1g064840) derived from phytozome v7.0 (chr-ID MtChr1; po s 12703847 to 12705953)
actctggaaatatttgtccttgcccacgtattcaggtattatatacaattagttctggtgggaaaaggcttggttcttcttgttgttgccgctgtatatttgttgataatactcttactcgaataaagatttcagtattgtattttgttgagaggattaagtttttatacggtgactgttaggcgattttctgttcaaagtagctgtgagtacttggcaagttagtatggacttgtgtgatcgatttcttatcatgccaacaaatgttgtctaggtcatctgttgcaaattacaaagagcgtgtttggttctccgtgttgcttccttttaatagaatattttgtatgttcactttctatattgaatcctgtagtgaaactgtgaaagtatgttcacatccaaatgaaagaaccattttcttcccatatgtccaatatatgctacatccagtccagtccgtcatctccattctcgttaaaaatcaaagtagacatttttttgttcattgtatgtttctcatttctttctctcatttatatatatatattatgttgaggagggatcaaaatacatcaatgcaaaacttgtgtaaagttacaccactcaacaagtttttattggatacataatttatataactcaccattggattgaaagatatacatcatttatataaaattttatattacactgaaattatttgatatgttattaagatgcacaaaggttaacagtattcagtaaaagcagttaagacatttatctttatgacatctcagtgacatatcaaatgacttcaaatttatgtaaactttgagatgatctatatgatataaaatttcaatctaatggtgagttttacaaaatatatatccgataataactagttaaatatattaagaataaaactatattcatgtgttcatttaagttttaaaataagaaaaagtaaataaaatccagtacaagaaattaataagtagatgcattaggaataaaattcatgcgattatttaaatttaaaatttattaaatattaataaataagataggatcaagttgaagaaattaattagtagatgttttatcttgttattatgtaatttcatccaaattgaattagattttttccatgcagtatgttttttcgtcttacttctgttgcaaattattatttgttttttcaacaaactgatataaaaaatataatttgacacttacacatacactttttaagtataattttacattcaaaagtactttttataaatatcaaaacatttttttttttgtcagatatatatgtttgaggaaaagtatccaaacataaccccacttaatagcaaactcaattttaaccaaaagaatgcttgcaaaatgaagtttaatcgatattacgtttgcatattttaatagaaacatgcaaaaaattgttagtctttgtttcagtatgatgtcaaattgtcaacttctttttcggaatcttgtccattcaaatttcaaactgtgattcatggtagcatgaaaaaaacttaccgcaaaagttccactactaaccgtgagacataaggggctttcagcctgttaatgctaactactaacaaccttggtttcactacatgacattctgaagcattagtgtgtagtttgtgctatttattatactgatactgagtttggatagatggacaaccatgggacatgatttggacgatatgaaatgatatgtggctaggcttttggctttgatatccgatagtttgatacatatgcctgtgcgattaattttactgtggatgaaagtttatccataagcatgtagtgcagtatcattgtctacacgaaattgattcgatgcttgttaacatcttgcaacctgagctttgtgtagttgtaatatgaggcgttgatgtatgaatgataaaacaagacatgcttaactttattttggtatgtaaggtgtttattatgtttgtactgattattttcttaatctttgtttacttgtaagtatagactgtgtaagctgttaatggattaggttatcctaaccatctacctaatgaatgcagcaataaaattgaggtttcttaccaggaagccgttg

SEQ ID NO: 4156 - DNA, 2483 bp, Medicago truncatula
  Intron number 1 from transcript Medtr5g039410.1 (locus Med tr5g039410) derived from phytozome v7.0 (chr-ID MtChr5; po s 16693101 to 16695583 reverse strand)
tttttggaattgtgaggcaaattagtgagaagtatgatgcttttcggaaatgtgtgacaaatttcttcattgttatgggatgattttccagatcattaatatatcaagcttttattttgataaaatgtttttttattacatttacatttctctttgggttattttttctatttgataagtacttcattattatacttgtgttgcacctctttttaacttgtcaaaaaaaaaaaagtacttcattattcattttatgacaatttaatgagtttagatgatctcatatagaatcataaattgaccccttacattaaccattttaggtatcaaagaagatatgcttgattgatgtcttgtttgaagcgcttaggtggggaatacaagtattccatataaacatacttttataataatccttctagcacacaatattattttaattatattatcattttaacttgcttagaaatgagaagattgcttttccatccactcaggaaattatcgactctaaacactaagttctagttaattttatcatcatgaatttagcctaagttttatactactccaacaatgaatatttttcaaaaaaacaaatgcaatgaaaaagtctattatttctacgaaatagtaagttaggtaatttttatcttacaatttaaatggttatttaatgaaataaattttatagggtaaaaccaatttcattaacacatatattttgtattgtaataagaagttgaaggatatacaaaaataagagatgaaacaacaatgttttttcttcctaatttcggtagaaaatagttccaacataaaattgaaaatccatttatttgtttatttttgtttcttgaacaaaatacaaaatttaaattttaatactcagaatgaattacgaatacaattgagtaatttaacaatatattcttcatttatattgcttttgtattgttttatatgatgttacatgaatcacctacaaaagagaaacaattgaaatcaacttttctaggaacataaactatttattttgtataatgtattgtctctaagttgaaaggataaaatcttgaatgcaaaaagtgaaactcgtcggaaatatgcaacatggtaaaaacaaatcttttatgctttcaaattgttctcgttgttctatgtcttcttatcaacacatgaagaagcacccaacaaagtatatttcctctttttgtttgaatcttcttctttaacatagaaataaaaaaccgtgatgaaatatttagtcaagataatgattagtaataatattatcattaaatataagttggatggataaccttattttctctttttcttctttttttgtttttgtttttgtttttataatttagaaaccttaacaggatgtataccatggatcccctgcttgaatattattgttttcattcatacatcaaagtcctaaaaattatttgaaagaatttaagaaaaagaatataaatgattaaactctttcaagtaattttcagaacattggggatactaagggaaaaaaataatcttcaagcggggatgcatgtatatttcttgctaaggtctgtgaattatcaaaaataaaagaagaaaaagagaaaataaagttatgcatccaaattatatttaatgataatattgttactaatcattatattaactaaatattttatcaaattttttatttttaggttaaagaagaattagattcaaacaaaatgaggaaaaatacttagtttggctcttcttaatgtcttgataagaagacaggacaacgagaacaatatggaattatatacttattttttttactatgtcgcatattccttacaatcctgttttctgcattcaagattccatccttagagcttagacaataaattgtatatgccaatgaaaccttttaaatcacaatctttagtaaatgcaaaatttatagtttttgttcctaataaacttgattttaacttttctcatttttaggcgattcctgtaacattctattaaaaaataaaaataaaaatataaatgaatagtattttttttttgaaggaataaatgaatagtatgttgttgaattacgctattgtattcataattcattatgaatattgaaatctcaatttatgattatttatatgtaagagacaaaaataattgaaagggattttcaattttgcgttgcaattattttgaagtgaaattagtgggaaaaatcattatttcatctcaaacttatgtatgtgcttcaacttcttcttacaataatttagacacatgtcatcttacattatttttagtatgtattttaatcattttattagacatttgagtcattatagaggatttttagagaaattgctcatggtttaaggaacattttgtttcttccctaaaccaacaattttataattgttttgagtcttttatttagaaatcatgtaatttggaaaacaagggacctc

SEQ ID NO: 4157 - DNA, 1906 bp, Medicago truncatula
  Intron number 1 from transcript Medtr4g103680.1 (locus Med tr4g103680) derived from phytozome v7.0 (chr-ID MtChr4; po s 22395869 to 22397774)
gctggcaattgccagctcatacttttcaggttgctttcactcttccaattctcacttttttttttagggttttgctcgattcactaataattcaggatcataacgcataatttagcttcttgctcaaaaatctctactttctagtagtagtggtagttgagtaatgctttcattttttaggatttcaagatttgggtcttcttatcaaggttttcaaaattgtttttggaaaaaataaaagacaaaagtttaattttttttgttttttttccttctagaacagtttgtttttgtgttttttggaagttgaaaaagagaattttgtttggaataataataataatcatgtttttaggggtgggtgaagatgagatgtacacagatcgaatagtttcagtttaccccttttatctcgtatgtgttgcataaatcttcatttggtttatgaactgaatgaaatagtatagactgtagaatttgatttctgtacatttatcatattctgaagttatacatcagcaagcaagtaggcatcgattggtgtgttgggttttggttgttagttgataagttagatgatgcagaatagaaacatgctatctataagggcttgtttggattggcttatttgagcttatctaccggcataagcacttacgaaactatttgggggaacttatgagttatgacatgttcataagttgtttttaacttatttcgataatggcttattaagcttatccaaatttgtttacccaaacaaggcttaaatctcattcttgtagattgaaatattacaaattttaatttcggaggatttactggaacatatgggtatggggaggctgcagttgaagaagattggatgtgtggtggaggttgtgaaaagtgatttttctttaatcaaattaattcactttgcaaaatcaagttctttcaaaattatgtttggtaaatactcacaaaaacatactcacaaatatcttacattattaatatgtagggttatattccaatattcgatgaattttataacacataaaataataattttaaagcttcaacttttgaaaggtcaggatcttgttcatttttaaagtaaactgtgtagaatctgaattaccctttccctgccctcttaaaaatgaaaatgcactacccctttcacaccattttaatgtaaacataactcttggtggttatgagcagtcatgacttatgattgagcttctgcggctcttaatgtctctttctgttggtttttaacactcctatgaaactttagaaatgaaatgaagttttgaataccattactattggttttggttcttcaattgacaccttcatttcatttgctaaagttccaaaggcagtgatggtaagaggtttaaaacaagctaatgatgatgcttaaatagttaacccacccctgagaagttcattcacattagtatgaactgtaaatgtaaaacatattaatctatcaaaagaatgaagtgtaaaatttctaaatgaaaaaacaataatggtgtaagctgagcattgtttacaggcagagacttgtacgttaccctactatatatatatatatatatatatatatatatatatatatatatatatatatatatatatatatatatatatatatataattgaattgaattgaatgactgcatggttcatgcactacttaaatgagaaaaataaatttgatactcatatcaggaaaataaaatgtaactttttcatattctttttcatttacaaaatgcttattgttttgattacactgctttggtgacttgtatttcatcagttgcaggcttgtcaacttatttttctaaaattgttggttcttacatgaataggttgtcgcaatcactgtattctgcttgttggtgat

SEQ ID NO: 4158 - DNA, 709 bp, Medicago truncatula
  Intron number 1 from transcript Medtr5g049800.1 (locus Med tr5g049800) derived from phytozome v7.0 (chr-ID MtChr5; po s 21402663 to 21403371)
aagattgacacattaacagtttcttctgttctctggtgagtttaagaatcattctaattcttcaaatgaagtttatttttattttttttctgtttatgttttttttttccttttcttttcgagtttgttaaggttttagtcaaagattttggtcttgttatcttgtcgtgtttttcttatgttcattttgatggttttttcttcatagtattgtattcattttgatggtttttttttttatgatattcttcatagtcttgtgttcattttgatggttttttttttaatgatattcttcatagtcttatgttcattttgattgatggattttatgatattcttcgtagtcttatgttcattttgatggtttttgggtgttaattttctcggtaaatttctgtgtagtgtttgtttggttggaaaatgatgaaaaggaaaaagtaaagtaggaaattgaggcctatttggtgcctaactcgactcacgtgtctggtgtctaatacgtgtgagtgtcacattaagatgtatctagtgtttgatacagatgtatttggtgtttgatacatgtttaatgactcacacgtgtttgatgtctgatgcgtgtcagtgtcacattgagatgtatttggtgtttgacacatgtttagtgactatcatgtgtctggtgtctgatgcgtatcattgtgtcgatgtttgacgcagacactaa

SEQ ID NO: 4159 - DNA, 675 bp, Medicago truncatula
  Intron number 3 from transcript Medtr4g133500.1 (locus Med tr4g133500) derived from phytozome v7.0 (chr-ID MtChr4; po s 32003801 to 32004475 reverse strand)
cttcacttcattgtaattcggaacaggtactatatctgggccaattatgcttttttattcagttgtgtgtgggcatgagttctttctcgaaataagttttcatggatgattatcgtaacatttgttagctacataaataattttttgaaacagaaaagagagtggaatatgagaggtattccaacccacaaacaaatcattgttatgtttgtagagaacaattaattattttgttttatgttgtagggtttagatagggtggggaggagcagtttagatagggtggttgaaacatagagagatactctgaatacttttgagattggaaggatttgatgtatgtaaaatattaagcaccaatattgtaatactttatactacttacacataaaactgggttaaataatgggtagtaatagtatagtactactgctaatacaagcccaagcccactgatacaataggactcctaatcataatcaaattaggaaacataataaaattagggataactcatcctagagtatatgcgtaaaattctaaaaatattctgtggattttataagatgttttgtagatatattctgtttataatatattcgtttattgttttttgttaatgatttttttttttccgtgtgtcctaggcttctggactccgcgaggctcttcaaa

SEQ ID NO: 4160 - DNA, 824 bp, Medicago truncatula
  Intron number 3 from transcript Medtr7g009730.1 (locus Med tr7g009730) derived from phytozome v7.0 (chr-ID MtChr7; po s 1899799 to 1900622)
ttgcagctaaagttgtggctctgtaggagaatgcattcctctcagtatgttttttttcttcttcatgagaacataattttatcaattgtgaatgtgatgaatgattatttttttatttggtagatttaatttattcagtttgtatttaacggcgttaaattgcaaaccttaatccaacacttgttttgagctttcattttatttaggatttttttttttagttttaaatattgatcgacaatataaaatgattttttttaatttatggcaaagttgtgttaattgattttttaaatgaacgtggatttatcgaaatatatagaggatgcatccctcagaatttctcattaacaaccaaagaaatcaaattatcagtataaacatgcttacagggttgtatcattaatctctgctaaatatttgtttcaataattgcatgaataataacaattggatcagaaaaatctagttgatattgaacaaccttttcagtttcatttttcttagaaaatattttgtcttgtgttttaattcaccgatgattaatataactacctatttgctaattctttcattatttagcaataggaattttatggttctgattatgagaagacaacccttatttacttggccaacttgttgctgctattagatcataagttggtcttatactgactgttggggatggaaaatttatgggaggaaaaggatctctgcatattctgtgaccttatggagttggagctgaatttaaatcgatggatacaccctttcctttgttcgaagaattggtttgattaattttgacgaatttgagcctg

SEQ ID NO: 4161 - DNA, 4089 bp, Medicago truncatula
  Intron number 4 from transcript Medtr5g034370.1 (locus Med tr5g034370) derived from phytozome v7.0 (chr-ID MtChr5; po s 14106181 to 14110269 reverse strand)
tagcaggtattgtgtctgtcgagaaagctgaattggtttgcatttatctcctattgtctagcacaagatgatgaaggatgcatttgttttattgtctgtagttttgaggtgtttggggctgacttcctagttcatagacctttattcttgtaattatcggctcctcaacgtacttcttgtacattgtgcagtggatgtgtgtaacaatgattttggaactcaatttggcgagtggtgactaaactttcacaagtcactcatatttagtcccacatcgctagtatgagagatgagatgaggctcaaggctatatataaacatgcatagttgttgttcattcgatctcgtgtgtgatagctgaaaatataatttatatatttcagtgtcaaattgggtaattgtctgccccggtagcgcttatttaagtctttggagagttagttatgtagttttgtcaccgtatttgtgagaagagacacaaatgtttctttactcttgtttcttctcataataggtgacaatacacataacaaatttttcttatgagttgagatcctcaccaataaaaaatatatggaaagtgacattattaaagatatagatataaaaaataggttgtgggtttgataaatgggttttattatgattaattatttttaatatctctctatttataactttttctatttgttttatttagagagataaagatattcactaagtgataggatggcagatattttttgtgtctatcttttttcaaattgtaactttcatttatttttataaattgagaggatttttacccgaatttttgatggaaatcttcactttaaattattgcaaattgttaagaagcaagtttctactcatcaaacataaaaaattaggtaacgtagcatccaaactcgtttgactttgttggtttttgggcttggttcgttagattgggaagtaggttgaacgtgagttagctggaccaaagtgaattaactcacgcaggggtaagtccctagtgacttaagtcacaaaggtctaacgtccaacttttgaaattttacgttttgttttttttttttagcttgttgcacaagttttgaattggggtctcaaaccaatgaattgaaatactaatgtatgaacactaagaagtggagaaaaaaatatgagtgttaataggtaggtttttgactgggcttcccaccggaagcacagtggttgtgtacatgttcatgtgaatgaaatatattacatattaaattttaattagttactctctaggttgtaaaggtttctaaagataatagatactttgactaaataaaatatgatatgtttgaaactttattaagttaaacaaatttctggtacaaaaaatgtttagtgaacaaagaatacgctccaaccgaatttaaattctacttgtcaaccaaacaattttttctttgatcaaagattaaagagtcgtagttctctctatggagagctcttaaatttcttcaaacgaatttcaattaattataattataattagttttttaagtttttaaatagactatgtaactgaaaaagaaaagaaaaaatcatatcgataattcaaaagaagaagaaaaatcatatcatcacctgtcaatagctgttggttgagtcctccgtaacattacctacaattcagagttttgatcgttttactaactttgaagtttctttgtttaatatttaatgttttttatgacaatgaatattagtactccaaagttagcaatggagattgaatacattaatattaaacactgaacttcaaagtaatggagatatacctaggattaaagcaaagaaattcgttctagaattgatataaatcaacgtacttttagaatttatgacattaatttgacatttatacaataaaactatagtaacgaccatgtcaagttcttttaaaaaatgaagatctctactctacatagatagagagagcatgaattaatggtctttttcatgttaggagtttttagacttactttgcacataagaaaagaataggatttggtgctatatagatagagaaagcatgaaagaattcaggttacattcaaagaaggatcactacaatagtacaacctccacagataaagtctaaaattgacctatcagaaaaaatagaacattcctgtcccaaatcttagcctagggctctactaaaatctcttggtcctctggagaatactaatgattgtaagtgaacacgtggtatctcccgcacaagctttagtagaatcatttcatacattcttagttctaaggatggttacaatttcagttcatctaattgacttagcagcattggtttttacagcatctgcatgacaccaaattttttgcaacaaatcaaacattttacttgagtttagacatcacagccattgttctattggcaaatttgatgcaacaagaaaagtttcagcagaacaatcatggactgcaaatgttgcttaaaataaaactgtcaattttgttcacttgattaaaaaatggcttaacaaaatgaagtggtctgcttcactagatgactctattcacttgaataaagctccaatccctactgtcacgaccaccctgcttttcataatttctacgctgtaacacaaaaaatcattttttaaaaacaataaatcctcaaaacacgtaacactgaatttgaaatgttagaaaaacaaacacgcagtacatgaaccgcatttaacagtgttatctttatcctcaaatttcttcccaatttccatactattcaatttcctttgtttttggtgcataagtgattattattcaccttttattttctcaaattctgattcgttcatctaacaatagtaatctactaactttacaaataaagcagaaaaaatgtaagtttcacacaatcaatatgatcaactctgaattgatttgaattcaagagaagacacagaaagaatgcaaatatatataagaagatgtgtgcagtggatgtgtataacaatgatttttgagctgaatttggcgagtggtgactaaagtttcaaaagtcactcataattagtcccacatcgccaatatgagagatgagatgaggctgaagcctgtatataaacaaaacaagcgctgttattgtgtaagaaaaattggtaccgttccttttaatgatttgagagcttggatcctgtgatcccgactcaagtctaatagttataaatataagggaagaaatttctcaccctttttttttttgtgcaccttctaaaggaattttgaattttggagtgagcatgagagaagtgagggtggaaaaagattttccctataaatacaaaaattttagatcccaaagaatttgagtagcatgtcctcacaaggccctgattcaagtctttcgagagctagtcatgttgatgcatcttcgaataacaaatagcagcatgactagtacttaaatataagtatccaagtgacaaggagcaaaacctctaatttttactttttggtcaaggtctgatgacaagtaaacggatcaggtcattttcccaccgtttggaaagatgttctacacaaattgggtgctcaacggatgtagagttcggaggaaaatactttaacacttgtttttttaatgctcattaactaattttgtgtggtttaagaatttattgtggcaaaatttatcttctactttgcataatattgccttgataaatcttaaccagtttgcgggtctaataggctgtggtagggtctaaatagagagctttagtgttatttggttcacgtgtattttgggttctttgaaaagggtgtacggagaagaatgaagatctttaagaacaaagagggttggtggagaagatctttaagaacaaagttgaggaacaaattgcaacatattagtaaattctagttctaattgttttatctttctggtgtgtactacttcacatgatggttaaattgtacatataggtgacaaattaatgagtaccggaggagttattttaaagaaagaagtttggatcatgcattgcaggctggttttttggttgccgtaggtgcctt

SEQ ID NO: 4162 - DNA, 2848 bp, Medicago truncatula
  Intron number 1 from transcript Medtr4g005540.1 (locus Med tr4g005540) derived from phytozome v7.0 (chr-ID MtChr4; po s 286898 to 289745)
ttgaagatattattagtaagaatgaaatttcagcaagtgatgaatagcaaacagttcaaggtgatgaacaggtgaagaaaatggttgataatgaaagtgttatttggagctttgctcaatgaagtagcttagtatcactagttaatacttagtgcttctttttttttttgttgcaaagcttggtagtaagctttttatatgcactttatcaatactttgtgcccttaacttttttgtggtgctgctattgaagttgttttagctattctgtgacattctggatggttttagtcttgttttctgttttaacatttgggttttacttaggagattaaacttgtatgcctcctagtcctagagcagatcttttggtttttcatagtgcatatctcaatgcagattgtagacttctgtcacatttttcatgtgaactatatgaggaactgaattttattttggttgaatatgttgatctatcttcgatatggattctcgttataaggtactcatgtttggatgagcggcgagtttgatagaatttcggtgagtcactgattttatcaaaaactacaatttggtgtctcaactaaactatgaatttgtgaaaacttaggcattatgattatgtgtggacaagttaaacattgaatactttaaaatgattttcatatacaaattaaatgcttgtgccctggaaaattccatattttttataattcaactcatattttcatgaagtatcattattgttcaaaccaggttcttttaagaagaattgtaataattcaatctctcatgtgatacactactttttttttttttactggatatgatacggttcctacacttgtgattcctaatattcactaatctcaatggaaacaatcaaatatatagtagactatcattgaacctatcttatgtagttatatgttatatttctggagaaataaagtgggttgagagtgaggcacggggattggagatttagaagaacaaatctctcactaacatttgttaataacaaattactatccccttaaatggtgagttgtgagatgaatatgagtgtgtattatcctctcccactccagtaacaaggactaactatcgacccatattacatttaattggttttagctttgtatttgtgcaatattctttccaatttttattcaggaatttcgttttgaaaatacaagaattatgtacatgtatgacttggttgggttgagcaaaatatttcattttgtgttggatcaagatttggttcggttggtaaagtgatgcaatcatgtttcggtgactgtttgatcaagatcggacgatcctaatttaaactcggtattttagggattatgaagtaaaaattaagtatttttcttctggaccgtaatgtcttgatcacgtgaatgtaggaaaaaatgactactttaaatctgatatcttttttatttactttgaagatgagtgtaactcctaatgacgattgatttttggcaagtgtaaatcatctaataggaataatgaattctctcaactttttcccttcatgactcatgattcatgatctataccattaaaattcacttttttctaaactatcttctctctccttttcaatggatgatggagatttcaatagactttcatgtcacatgagagaattcgttatcatctgtttcaaagcttatacatattcatttttcatttttattaacaacaattagaaagctactctattttcacttttaattttttttatcaatactgtatagtaaataatgattttttttttattaatttttctatttatttttccaagagcatttttttgttcaattgttctacatgtccttgtgatctcaacttctaaagttaaagaatctccttcatccacgatgctacgaaaggtattaataacccatttacatatccttcatgtctagcttgatgaaaaggttgaaaataacaagagtgaaaagtataaaaaaggtatactttaagaatgagttaaagggtgatgaaagaaagaatctattctaagctgctgaaaacacctctttgttaaattgcaacatctttagtttaatgctaagaatctatcatattttgaagaaaagctaagaatctttagttagattatgacaagagaaaaagctatcttaacaaatgaagttacctttattgatttacataatatagaggaacatcatcatactttctatcaagtggaatatctttctcattcttaatatgctaagacttcaacatcaaatggttctctcttcctcgtgttcattctttctttggcttctcattttatcagcaacattttctctaggtaggtactttattgatatttataaaattttgctttgatgtttcatagaaaaaggtacttatttgcaattaaggacatttctgtaattataccactatggtcagatgggtcttgaattgtccgatgtcgcaaaattccacacattcatgcagtcaatacatcgatagttgttggatcgaaatctgatggtatagaaagcaaacaaatttcaatttcttttaaacttcaatatattaaacttgaaatctggaccgtctgatgtcgatctaacaatcactgatgtgctgaccgaatgaataagtgtgactattattttagagttacattaatttcagatactaaattgtttgaccttacaatttttatattaaagtggtgatttagtcaaataattcttcaatgtcatttttatgcattgctttgcatgcatgacatggatttactaatctaccttcaaatttttctttggtgcagtattagggaacaaagcatttaccggaacat

SEQ ID NO: 4163 - DNA, 3174 bp, Medicago truncatula
  Intron number 1 from transcript Medtr5g026670.1 (locus Med tr5g026670) derived from phytozome v7.0 (chr-ID MtChr5; po s 10772696 to 10775869)
gtgctggtctcaaaatcacttgccccatttgcaaggtttgttttttccttcttcttcatcttcttcctatcagaacaaaaaaaatcaaatttttattattgcctctctatttttatgttattgcatcgattgtaccgatctgggtcgtgcttatttctttttaatttttaatttatttgtgttttcaaatttcattgaatgagttaccatacgggcacgcagacacggcatccatatatattataatttgagagaatgacataattcaacggaatcatagttcacatgtgtcagtgtcgtattggtgtctggcactggcccatgtcggacacaccttccatcagaagtgttggtgttactgaggtttccgtccatgatgatttgattttaaaatttaagcacagcttaaatgggtggccttattgatgatgcaagtgttggtagaaatattaattggttaggctttaaatgattcaattattgatctgttagttaataatcataagcttgactgctagaatattaattattttgaagataatgtcctgttttgttgcattttgctcttatttggctttgtgtgtcagtttgccaactaaaggtttgtactttagcatttcagcccataattactttttgaataatatatgtataggcatgcttctgttgttggcttgttgccctggtgggacatttgatcagagcaacttgttcagctatcttatttagatatacctttttttgtcttcatttattgtgatttatgataatctcttatgcatcttttcactgtataattgaaattaatcatcaattaaacgatacataaacggtttctttctggtttcctatccggtgttggggccactatccaaagtcattagaatgaaacatttgtatttttcaacctttgctagggctggaattggattaattgtggcatttgagttgtaattggtatgatcttttctaacatttcaagttttagcagcaaacatagcttagatctaaagcatcgttcgttgttcttgtaagataagaaagtatttgcagtgttaaggtgttaataggagaattcattaggatcctttatttgcactgattgctttattttttctaaattctaacacaggaaaaacaaatcctgtaacctgactattagttttggaaaaagtaattagtggccaagtgcattggctcataattaccaatagctatagttacttttgaaactgctttctattggttcaagctgtgctttagacgacggtccaacaaaagtgaagcttgaatcttttttattatatcctttttcgtcgtgtagtgagtttcgtgtgtagattcgcttgttgcagcttgtgatatggttctcttataatttgtcttcactcttcagaattgaagtgattctgagagatacctggttttcaaagaacatgctttagaagcttgaaagtttccaagagcttcttagatacgtggactggcaagcataaccttgtctctaggaaatagaacatctcatacttcatttgttaaactgaactgctgaagtataccctagaagaagaaactcaaaatctcttctctccatatacctggttagacaaacaacacaattaagcagcacttataataagtgtttatgtataagttatttctatagctaatggtaaaataaaatcaaactactttcatataatctataagctgtttttataagttatctaaggaatttgtggaaataagccgaaaacagcttattgacatgacataagttgttttcataagctcttccaaacagtctcacaagtgttcatgccaataaattggcacaaaagaagccaacccaaacatgtccgtactagtgattaaatggctgtgtttatattattgttgaagatacctatcatatctttacatcagaactttcattgtgacaaaaattcttagcttgtaggaacttacacattacacacaatagaggccatgaagggaaacttgatgctataaagtccctgccatggtgggttcagggaaggatcaaatccatttcggttctatagtaatgcagtcttcttgctttgcattagcaggaggctaatttcacgacttgaacctgtgttatcctaataactctgaccattttggcaagagtccctttcatgaagcacaacaaaagacctagtttttatatttaaagacctagtttttggtatttacttgatcgactaggaatgcataaattattgtgaacaagtaattaggtgtatatttctttagcaaagaggattattcctctgcagcaacctctgtataagttcaaccttgctatattagcaggaattatgtgggttgaaagaacttttgaggaacagggaactgaaaactttcaattgacttctatattcgtttgaaacataaatatcgaggtttaaggaattgaaaactaatactttcatacaagttcaatattataattaatgttgttcaggtgcctataattaactgtgggcaagagtggttgaatcaaggacattttatagggtattatccgtctctttttggctatgcattttatagggtattaactgtgtgcctatgttgtgaaacatgactgtgtaatggctatgcatgtctagatcttggacacctcttatgcttgtaaacattgtttactgcctgtaccaaacttgaaaaactttattcccacttcagatttcaggttaaaacattcctaataccaaataccaccttagccttattcttccatgaaaaggaactaaggtaagagaaacatgtgcagagttatagagacaactgttccttcttatgatgaaatattcatctcaacacatttatgtaaccctcctttctattttataatttgacttctataatgttagttcgatacaattcaagaatcatgtatagctggtggccgttctagggtgacactatggttaaataggttaatggggccattcaatgtagacatttttctggaattaatttttttgatgttattgaaccatgtgtttgtagagatgttttacaattttaaatgttatagaatctagtgagaacttttgtgtatctatcaggattcttcttactgttgtttcacattctttttcaggtccaacttgcaaatccaaaccaacttgctgatca

SEQ ID NO: 4164 - DNA, 1659 bp, Medicago truncatula
  Intron number 1 from transcript Medtr8g101640.1 (locus Med tr8g101640) derived from phytozome v7.0 (chr-ID MtChr8; po s 22103216 to 22104874 reverse strand)
acttttcgcaattctcttcatcgcccagtgattaggtacacacctaaccgattcttctataattttttgaccctttcgttttccctcaaagaaagtttcaatttttgccttttttttttgttggttagaagtataatctgttctttctcttccccacttgaatgcatgtggctggttttgttgttttgaatgtgtttctgattttctaactcaatgttgtttttttcttaatgggtgagcttaaagggaaaagcttttcatttttcaatgcaatttttgtttgattgatttatgaaatttaaaaatgagaaattaaaatccctaacgtttgcattttgatgcaatgcataattgtaggtttttccaggttgtgttcaaatttctacctttattttcataaagggctaattgcatttttcaatactgattgtaaaaatgttctatatgcatattacaatgttataacttaggttactctttgccagccaaatattacaaattattggttgcttgaatctgtggagttgttatgtaagggtgtgtttgcgagttggtttttggagggttttgaagggggagggctatgtctatattttcatacatatttgatatagacgtagccctccaaacccctgccctctaaaaacctccaaaaccaaaaaccaactctcaaacataggatatagatatagaatggtgattatttagattgatggttaaaagttgttatagtcttatagaagttagttagctgggattgttatagggttgttactccctttgtccagtaataagtgactcttttgtaaaaaaaatattgtcctaaaataactgacccatttcagttctcaatgcaatattaattacttttttttcaattataactctaattaatactactgtcatcactcccaatttaatatattcttttttgcatctatgataatggtaaatgcaccaatacttgacaaaaacattcaaaaccatttttctctctcattcacttagtatacatttttcttaatatgtgtgaaatgaccaaatgggtcacttaatttaggaaggagggagtagttagttggttagttgaggttgttataggactatttgtataaataggagaaacaatgtagagttgatcattattgaatattgtaaacagtgtgaatcgagtagtaactctattgtgaaggggaatcccttgaaggagagatttatctccctattctttcctattttttcttaataaaagtgttctttcttaggaatccaattcttgggttcctaacatcttctcttctcttgtttttacatttatgaagcaccaacacaacaccgacgcggcgacacctatactctgagaaatagaagtaattgaaagtaacaacatgtgttcgtattgcacatgttagacaccagatacaccttcaatctgacgtgttggtgctatatcggttaacattgggttgggttgttggtggatgtgattgaagtgaatttggaactaaggtcaatgtttgggatgagtaatatttacttaattatatttattggttattataaacatagaagagtcacattttgactttttcttttcttttcattttgatgtttattgttggtcaactactaattgtaaagtttttttttaatgcaaag

SEQ ID NO: 4165 - DNA, 1160 bp, Medicago truncatula
  Intron number 5 from transcript Medtr3g151420.1 (locus Med tr3g151420) derived from phytozome v7.0 (chr-ID MtChr3; po s 40145607 to 40146766 reverse strand)
ttgaggtatgtattctgtcaatttaatgatgtcaacgttcttcataagatatcttccaactttaggtcattagcgaacaacccttacacaagacaataaatcatctaatgttgaaatttcggatgatcttgtcatgccaacattttctgccacttttctttcattataatttttcactcaatttctgtcttggaagagagattgagagacaatttgtacacgggataacaagccaatgtgaaatttaacatgagaggatccattctaggacttaattctaagatctccccatagaggggttttaccatcaattttctgttgtttggcattggaaaaacaatgtatgccatgccttcgttgtgaagaagatttcttttttaactgcttaaaagttattctcattttctgttttatgtatacatagcgatgcaggaactagggggtcaactataattaaggctctgtttgggatttttgggggaagggaggggagggcttgtaaaaaaaggaaggaagaaggggaaagaatggagagctttatgaggggatggttttgggggatttagtgttcttcataatattaaatccccctaatttgggggaactaaaaaattgtattggaggagtttggataaattttccaaatccaatatatgttgttataatactttcaaaattaaaaattcattaatcataagcaataatttatcattctctacaaaatttttgaaagatttctctattttttcctctaatctcatccctccaaagccctcccctcccttctccaaactccctcatccctccaaagccctcccctcccttctccaaactcccaaacagagcctaaatgtcagtttgttttctgtgctttggtagatgagtactcacactgctgtcatgtggacagtattcttctacaatattcgaaccatgcccaggatgtaaatattattgatctaactatttccctacattttagggatacttgttcttatatttctatactgatttctggaagcctggttccgctttaagttttttcttcttcttttatttttagaatagtatattcttcttttcatgttacatgtcaaagttatatttgtttttaaatagagcatgaatactaacttcttttctctgacagttaagtacat

SEQ ID NO: 4166 - DNA, 974 bp, Medicago truncatula
  Intron number 6 from transcript Medtr4g159340.1 (locus Med tr4g159340) derived from phytozome v7.0 (chr-ID MtChr4; po s 40179321 to 40180294 reverse strand)
aagttttggccaacatcatatcatccaagaacttagtaagcttcaaattcttgttattttatatatttacttggaatatcattgcgggcttttatcaaaattacaaaatgttggtttcatttaagtatttgaaatttgaagtagcttatatatgacatctgtcatcagaatatcagatgaagaaaggaatacatattaaagcatgtactgttaaatgaaattccaagtccaataattacatccttcattttgattaagtgtgatttggatgatggcgagagattaatataaaagattatatacatgagatgagagttacaagttatccattgtgcctagttggcttggtagcgggtaatatatacattagcgaggcttcgtagatgaaagtgcgaccactgaccaccgttgtgtctacaatatcgaatgtgtaattattgtactctgtcttctgtttcaaaaaaattgtattctgtcttttagtgaataaacccaggattttttacatttttatgatgtttcctgtgattatagcatctaatgcattagatttgcaattacttttagaagagatgtattctatgtaacaatctaagtgctgtatgttctatgggtagaaactgaggaagttcaaatgggaaaggatcaaagggtatttgtcaaaaatttggactgtgcaagtattggacatgtggtagattgaggaccgtctggtgcaacaagatcttttagtctctcatgcttgtttgacactcgggaaaaattatgctcgttgtgaaatctttacaataaataaccaatgctgaattatttttgggagggagattctacatcttttttgctgtcaataagcttacttgattaaattgccaaaaaatttcgtatgataatagttgactttgcttatgatgttggcttggcattttaataaaattacagcagcattgagggcattactggatttagcaaggagg

SEQ ID NO: 4167 - DNA, 1929 bp, Medicago truncatula
  Intron number 1 from transcript Medtr5g079820.1 (locus Med tr5g079820) derived from phytozome v7.0 (chr-ID MtChr5; po s 29806657 to 29808585 reverse strand)
cgaatatccgcttgctagcaaaatccttgttaaaagtaagtaactctctcactctcttattttctcataattttctacccttcaagctgttttcaatttctttatttgatccattgttgttttcaatgttacaagtgttgaatgtaatctatagggaatacattatattaggagttgatccattgttgttttcattgttacaagtgttgaatcgtactagcgtgatagaacaattgttattgaattgggaaatggtgagcttcaagctctacaatggtgaaaaacagaaacaataagagaaaacaagagttcaatccaatgaactccttatcaagaacaattgctcctagcccagagacaaatctcacatacaaaataatactaaccacttttgtgaatgggtatcaccagcctagcctcgatgcgtggtttttcgttagtttattagttaggactaggaatttgaagctctattggtctgatttacctttttctttctaatttgcttatttgcatcacgaaaatcctcatttcaccatttgctctcttcaatgcttttacttaacacattagatatacataagaagaatgctacgctgccgcaggcagaccatcatttataatattttgaattgcattctctgagtagtatttgctcttcccttgtaagggaagcttccttcctgtcagattctttcttgtgatgaaggcgtgtactgtgctatctctactggtttggattgcagcttgcatgcaactactgaattttcattcagaaatttctatctataaccggtgttatcaatcccatatagagcagtgtagcggtcaacccaaaaaatgctatagtgagatagcagataacgggatggcagctattttgaaatcatagagttaactaaactgctcagctagtgcatgtctgtagcggtctatgtagtattaagacatgtctgctctgctaaagcacgcttttgaaaacatgttgcaacatctttaggatagatgtgtttctgttgcatctatgtaggttaagtcatttttttcttgggcagtagaggagaagggtattcttgttagaagtgaaaagtgatttaagagcctttttaagccaatattatgctttttttggttcttgttatatatgcttgtcttagaatttggtttgggcctaactcaaccttacaaagccggcttgtaaggtgaggactgctcccacttttaacacatagtcaggtcatatctcatccaatgtgagactctttaacaacttgttttctctgtttagatgggttcttgttcctctttcctgtatggtaatggaaataagttccagtataataatgaaaaaaaaagtcattttacaatgtccgtaactgataaatgaaaatccgaaggtgccaactgcacaatcatttggatggaaaattggcaatattgcattcatcttctctaagatgattgtgccaactacattttgattttttacaaaattgacgttcacttatctgtcatattacatgcttttgaattcgaaattatggacttccactaacacacttgatgccttttgttccaaagcactaagcttcatccagatatctacaaaaaaaacttttcttgtggattatcttattaacttgatgtagataaaaaaacacttgtggattgactagtttctgttttcacaaatctggctgattgttgagtgtggagaattttctttacattatgtagttcttcattttgatctgtgatcagtctttcatatccttttaatattctctcctgatatctggatgctatggactatggagcattttgttttatttttttggaagggatatttctttcttttatttaccatttttttatgaagtcctacctgctcttctttggagacagatctaccctattttactggcgaga

SEQ ID NO: 4168 - DNA, 733 bp, Medicago truncatula
  Intron number 6 from transcript Medtr1g149730.1 (locus Med tr1g149730) derived from phytozome v7.0 (chr-ID MtChr1; po s 33095691 to 33096423 reverse strand)
gaaattggcaaagaattgtccaaaaccgtgagtttgtcaattcttatttctaataataggtttaattatttttaagaaaaataaataaaagatttaaatatggttttagtttctgtaattaatttttcattctagtccttgtaagttttttttgttttgaattcagtccctacacatttaaaaactgttgatattagtcactaaatcaacttattgggtcacatgacatgatatttttttgtcatgtacaacatcagagactaaaaacaacagctttttaaatttacagagactgaatttaaataaaaaaacctacaagaactaaaacccaaaaacattaaaatcatatttaaatatattttgtttatatgaattgaacttgatatttccttcttttccaacatatttcttctcttcaatgaatttgaaatcctttacactaattccaaacttttaatattaaggtttttttttttataaaaaaatgttagtagttagtttgttagaagagccagaatgttaagggatagtagttgaattcgggatcattctacatatgttaagatttgcggtaagaataatagaatcaccatgaaccaccacaattttgataagaactacactttaaagttacaacaaaatcacttgtaatttagttaccaattatagctcctaatgaaatgcgtatatcactacaggttgcaacatttattgttgagaaaattctgtcaga

SEQ ID NO: 4169 - DNA, 2489 bp, Medicago truncatula
  Intron number 1 from transcript Medtr3g144470.1 (locus Med tr3g144470) derived from phytozome v7.0 (chr-ID MtChr3; po s 37443191 to 37445679 reverse strand)
agagatagccggtaacgtctttttccttaacttaatctttatgtttgttaattccttttttaataagcttttttgctgtgatttttgatagttgaacttgtgtaagtgtttttaggttaggtttagtcgacagcatttggtgagaattgtttaatttgattgccaaatgaacaattgtgttgtttatcaacaatgctgcagctaaaattgactgttggtttgatgcacacccctttggaatgaatttttatcgatcttcaactttactcagcttaacctggttacttttgctccatggttattcaattctttaatacaatttttgataagcatgccattgaaaaccgtcaccacctataagatgcatgtgaaaccctgtttactactttatatagctttatcatcgtgggcatttggaacaacacaacataccacttgatgggttagatgcaaaaggaccaaatccaatttatttaacaacacaatgatatttttacaaaattattcatatataacgtacctaagtaaattagttcacagtgattttattcaatagcaaaatcgattccataggttcatttgctctacaaccaaccacggctggtttcacggtgtacccttgttaaatgcacagacacactttcaaatagatttgctatatcattataatctatagagccctagtcaatgctcaagttgtcacacattgtctgaggaatatgtatggaaatgtgcagttctgcaaacaaagattgcaaacagaggatttcagcagctgtatttaccgaaattttgttctctgcctcagtaattaagtttgcaacgagggtttgctttttagaacatctcgataccagaattgcgccaaagtaaatgcagtgtcctgaagttgatctccagtcatctagggtctggggcccaggctgcatcacaatattttttaaaagggactggctggctcaaatcagctgtctggtttctgcagcagcaacccatgactgataagtccctttcagatacctcagggtgatcttcagttcttgactgcctttccatgattctcgagtggcatgacatgatttttttcactgcaaaccgacgtctgtctgggttgtaatggcacattgccatgcacccactattgattttagatttgttagtttccgggttgtaatggctcattgccatgcacccactattgattttagatttgttagtttgtgatggcagaaaagatccatcaagcagtctttatttgaataccaagaaagtaatggtaagtatttcaattttaaaaacaaactcagagtgcagttcagatatccgattctgtataaaaggaggtatcacttgtactgattatttcatccacataaatgagataaaaaatttagtgtgaatcttgatgtgaagtgaccgaagagggtcatacttgcttgcccaatagcagaaaaccaagaagggcagtaataactaataagtctgtctctcataccaatctctgaatgcttgtttgagatcttagagagccttgtgcaatctacaaatcagtaatttatatgctgattcaaaacttggtggtgggctcgtatatatctcttctaaaaggtgatctaggaatgactgctggatgtggcactcttttaagatggcagtagcaagaatattctaataatatgtcttacacctgtgggaaagtttctgtaaccttaaaccctattgctgatgaagtcctttggaaactaacttggccgcattaatggtctcatcaggttttctttatttttgataacccacttgcagcctgaaggaagaagaaacagagaccagctaggttctgccaagacttgcttggcagtacttggttccatgcgttcctttaagaaagtagggaccgatcggggatgagcaatgccattcttcgctttagtccgcatggtcgtgagtataagagagtatatattaacaatatactctgagataatgactgcagttaaaagtttgagaactattagtcaagaaagtttaggtttatgcttgtttgaatttgcttgagttagaacacgagagaaaatcaagataaaaaaaagagagaaagttggaagtgagaatttggaagaatctggtgtctggagtcggcctctattgacaacagactctgcactataatctgtgaatatttttgttaaattaattgactgaacggagatggatcatatacacaagcattactctgtttttacggccgttacttaattttgcttgtattcaacatactagctctcagtaacactcacttggttaaaaactatacatttatgcaaattagttacacatagtacgaagtttgaactattacaatgttatgaattatacagtataaatatcaggttcaaatttgtcggacttttctatgcatattttataatagctgaattttaatgtgaattgcaggagatttagggagaagaaagaaactgtcgagcctg

SEQ ID NO: 4170 - DNA, 953 bp, Medicago truncatula
  Intron number 8 from transcript Medtr4g165460.1 (locus Med tr4g165460) derived from phytozome v7.0 (chr-ID MtChr4; po s 41668827 to 41669779 reverse strand)
ttgtaagcaactattattctagttgttttccattttaagttaagtaggtttgaagttgattatcttctcttgcttgaagggatgtactaatttgtatatctgtgtcctcgtgagcttagctcagttggcatggacaatgcataatatatgcaaggtccagggttcgaaccccagccaccaccaaaaaaataatttgtatatctgtgtaaaatgcatcagcatcaatcaatttatgaacctgcatttatttggctggttatcttgatggaacggttatgttgttaaatcagatttttttttttttttttatattctacatgacacatgtacttcatgtcttttaccatttgtgtgataagagaactcaaactctgctgttataatttgattaacttgctgcttatcaaaacaaaaatatgagacaaagttgtagtgataaaaaaaaataaaaaaaaccttacttatggtagggtacactgagccggtactctgttcttaacaaaagaaatgtttattctctataataataacaataattttagggtaatgttgggtgagcaacgtgataccgaattcaaacataatataggccctatttttctggaaagtcaatcataaataaaatcgtagaataccaacattaccttggtccgagtggaactgggttctgatccttaaacaagttctcaggtttgagccatagtgatggaaaagaacgtggttgggaaggaagactctcctaaaggtggtccagccatgttccccgagggagattggttattggcaaagtttgttgatacttcacaccaataacataattagcaaaaagaagtcaataatttgtattgttgaaatgttaatgactattgagtactgagtcgtgagatgcctgtttttgtagacatagtttctcatagtaatttttgtgtatgttcctttgtaggaatcctatt

SEQ ID NO: 4171 - DNA, 2142 bp, Medicago truncatula
  Intron number 1 from transcript Medtr5g094960.2 (locus Med tr5g094960) derived from phytozome v7.0 (chr-ID MtChr5; po s 37653748 to 37655889)
caagcttccgccgtcttcatcatctccgtctattggtatgctctctttttcccttttaccttttcaattttcccccaatttgctcttaaccaaaaccctagatttatgaataaaccctaatatgttaattttttttgttttctttttaattcatgcaattgggtattgaaatagttaattaattagttgaatttcgttgttgctatgtccaattttctgtttccctcataaccttatatacagcttagttgaattgaagcactgttcttattgtttctatcacaaagaggattttttttctataaagacagtttttttctacaccttttcgaaaatgttgtatatagttatgctattttttagtatagaacagtaggaacattgcctagtgttatccattgtggatggcggaaattaaaaattctgtcattttaagcctttgctatttccgctttggtgccttcatacttcacaaactgaccatgaaggttgtcgaaaaatctgccactacaattcgccatgtttgctatttgacaatacatatattatttttggtttagggtatgtatctgtaggtttggatgggttttgatatttgttaattgttattgatatcttgtgagttaagagtgattaaggttaacttgtacatgaatttcattttatcagttttgataaggcaacggatgtggaactttggtatttaaccaaatcattggctagtctcgcggttgggctaaattaagtgcttaggcttgtgtagtatttcattagatagggatactgacctgaaagaaaatcaaagcacaattgacttgactgtaggaaccaatgttataataagcataatggaatcttaatctcagctaatctagcgattctttttcacttagattctttgatcgtccaaatccaaatattttttgttccatgtagtgttgaatcggttcttttgtatctgttttcttttggttcaaatgtgagtttttctatgttggaaattctgcctttattgcggtccgcccctagtcgtctaaattgtggcctttggttggccttcattgcagcctccaacaccattgtgttggctttgagggagtggatttagtcccacatcggatagataggactcttgagaagagtttataaagaggagacattcctcaccttacaagccggttttgtaaggatgagttaggccccaaatttcaacattctattttctgtttgtttctgttcagctatttttttacgagactttcattttgaatgtgtgctttcactaaaaaagttcccataagccatggtgtgggatgtatctgtggatttattcagctgatgtggtgcaatacatttgggttagttgattggcggtgggttaaacaaacaggttttgtgtataccaaatttcacattctttatttgagttttcataaataaaatgagatgtattcaaccctaaacattcacccttattctatctattgttgcttgatgccatgattcaacctctctatagcttgatagttggaacttcacaaaacataatttcaagcaatgtgtttattttttctttttattgcaagactgatgatacttacacaaatttgtgcttagtacgttcatgagacaccattttctgttatataaatatataaataaataattacagacattgtcatccttacttttacggtatgattacccagctactaatagtctaatactataacccaaaccaaatcgagcacagaaacaatctgtcaacgcctatgaatcacccaaatctgtgtatttatttttaatttccaaacgtgaaaaggtttacaggggaggtgacccttttgattttagttagaaggagttccaaatgtggttatgatagaacattatggcgtaatttgatccatgtggccgaccccacttagtgggataaggcttggttgttgttgttttgtattttacttacaaggaatattttcacacgttattacaatcttagcatgtcaacgttcaagcatttttatttgtttatttacaatgaatgtttaatacttttgaaagatttatttgtgtctgaaattgaatggatcactttacaatgcagcaatctttgaaaatttgttccataactttatcgga

SEQ ID NO: 4172 - DNA, 1546 bp, Medicago truncatula
  Intron number 5 from transcript Medtr8g089410.1 (locus Med tr8g089410) derived from phytozome v7.0 (chr-ID MtChr8; po s 19211347 to 19212892)
tggtgttcccattattctggttggcacaaagcttggtatgtctatttttggccaatgtaacatctgttattgtaatttcatgcattagtcagttgcttccctctagtgtattaattaagaaggaaaatgttaactagtgtcccaaaggcacatgttaagaaaccaagtatagaaatatttctttttttcaacacaaaattcctcttctatttcttttttttaattccttaacaagtgttttaagggtgcatgtaagcaagacctgatttatgatattaagcacattttgtgctatgaaatcatatgatcttaaatatatgaagtccatgacccatgattgataattctttttatgttaatattctaaaggatgaacagttttactgaagagtaacttcttgcttccggtaatggggtgaactctgaaggattgttttactagttcatcttgtgcctttttttccttctcttgtaagctttcatttcaattcacggtctgtttggattgacatacatgagcttatctaccggcataaatacttgtgagattacttgggtgaacttatgaacacaactttgcatgtttatgagttgttttcagcttcctttcataagctctcaaagatagctcatgaaaactgcttataacttataggaaaacaatttaactttattttatagaagcaacttataagttgcaagttatgttgtttatccaaacagggctttattcttccgatgtttttccaaacagttatggtcatgttttttgttggattttactcttcattcttgtctctaatatatattccaagatattttgtatggtagggattttacgtaagtttacatttgctgtcttgtatttgctaattaatactccctccagaatgaaatataagcaaatgtggtaattgaaaagtcaatgcatgtggttaagaatttagtacatatacctcaacttttcaactaccatttttgtttatatttcattttggagggagtacagttcacacatgctcatccttattaaagttttagcaacaacatgcatatttgatgaatttagctctttttttgttttctttttttgcctatcatatgattacaccagataaaaggcgttaggcagtctagtacaatgctagagatctcagctatcaagcttgaccatgtgcttgcgtctagaaagttggacggaagtgtttatgaaatacaaaagtacaatccgaaagttatcaatttagaattttgatttggactaccatctcattctcactgaaaatgtattagcatttgacattaattaagaagtcattaatgatggcatgatgcagtatgtgtgagtagatgggttagtcctatctgtagatatctatcaatatttaagaataacatgtgaataaattgcatagagcattttctgctctatttggaggatgaataattgtgtcaatagtaattgtgacctgtacatgttctattagtgtcaaataagagttagtccttaactatcttgtgatttgaaatgagacagaccttcggg

SEQ ID NO: 4173 - DNA, 1519 bp, Medicago truncatula
  Intron number 2 from transcript AC233657_19.1 (locus AC233 657_19) derived from phytozome v7.0 (chr-ID AC233657; pos 107848 to 109366 reverse strand)
aagaggttgagttttttaaattttgattgttttgacctaatttcaatatgctgtgagtgtagaatatatattttgtttattgttataatcatttgttatactgtgagattataattaggattttgaaaacaaaaaataaactatgatatgatgctaatttcagagttgcttgaggtgaggcatgggtcaattagagcttctgctcatagatcttgttttgcacacttaatcaaacagttagtagattaatttccattgactaacttgaagctgatataaatcaaatttagctaattagaaaatgatggtagtggagagttgtgttcaaaaagaaagagtttctaagagacgttatatggatcgggctattataaaataggagatgaactgattagaagatttttaggtttcaaaattggcattacaacatttagagcaaccgttaggattagttaaggatacttagtttgtagttggctcggttttgcattggtcatttcacactatttagccatgcattttgatttgatgagtgagttagtgagaagtaagaaaattcgaaaggggttttggctcgtatggcatatgataatttggattctttgcaagtgtagaaatgttagaattttaaagataagacagttgatgctaatgagatggtcgaggagattaaggtgttatcttggagatgtagtcttggttcccaacttgttttttctatgaatggtattggaatccaatcgtttatttaaataggtgacgtgtgcttcgtttgtttccatcatagctgttgtgtgagctgaaggtcatcgttatttcttgccttctggtgcagtggtactgttgctgttttgctttttttttttttttgttttctggctttttttttttgtgtgttggattgttggtgtggggctctgttggatacagcgtttgtgttgtttatgttagttcctgttgtttagaatttctgttgtataaatctgctgtactgttgatttgtgcgcgcatgtacggcttgtgcacgtagtcgcgtttaatagaatttcgccatttaaaaaacaaacaaaaaatagaaatatttggttggaaaatgatgtattcaattttttggtagtttaatacaaaacttctactttctgcttgcttaaagagtgcccgccgggcacatgttagcatgaccgtttaactaattatttatttatttattatacatatgcatgtaatttatttatcagaatttcgatcattgattttttgttgaatagctatgccagcactttgcgctctaaagttctcctacacccatccctttaagcttaaaagaaataactagattatataaactagggaatttccacatgaaccaagagtaattcttgggttgagagctagttttgacgtgtgactttcatttagtaatttgaattcagttgcatattgcaatctagttgagtctttttttccaaaataaattctgttgactaaaatcatatttgtttgcagctatttgctggaa

SEQ ID NO: 4174 - DNA, 1089 bp, Medicago truncatula
  Intron number 2 from transcript Medtr6g014970.1 (locus Med tr6g014970) derived from phytozome v7.0 (chr-ID MtChr6; po s 3649877 to 3650965)
taaactatattatactacaggtaaataagtgtgcacaactattgggagatagtaacggttggtcaatattgcttgcgggagcactttccggtatatattttccaccttagtttattttagttagtttttgacaaaagtcaaaaataatttatgtttttccagtaaaaactcttgcaaatgtaatttaaattataattaattatgttttgagagtttttatttggaaaaacataaataaaactagtttaattctattttaagaattgttatttttgaatttttaatacattaataggtactctatttgaaataaaaaataattagtggttgtagttgaaaagtaattttttttttttggtgttgtccatgattcctagactttacatttgttatgcattgacaataaaaagtttatttagtctacatacattaatattgattggttttttttaaggattaatattgattgggttagcaaagtgtttgcctccattgtaatattcattaattttgattggtttactgatgtaacaaaaaaatatggatcattgtcgcttgtctgagatgaaatttaattaaattaaaagtattaaaagatgaagaaaaaaaaattatatgttaaattttctttttcttccttacttcaaccctccttctctctttctctctcaacctccaccttcaatatcaacatcatatcttgcgttaggacttcatcttcagtcggacactaaaagtgactctcccactatgcatttgcggtacaaaatgaattattaatgttatctttggattgatggaatgttaaggagttgtaaataattaacccaaaatgaaatggagtttataaacatacattctgcattattaatgttatcttgttcatgtgcgtgaatttgacaaacatacaaagagcggtcgcttgtcccacattctgcatttgagaagcttataaattaagcgtagaacatgacacctcatttatcattctgaatatgatttgtcccacattctgtattctttgttattgttgttttcattgtctatgttgatttatatttgttgtggttcctatttttgaattcagcc

SEQ ID NO: 4175 - DNA, 3055 bp, Medicago truncatula
  Intron number 1 from transcript Medtr3g113680.1 (locus Med tr3g113680) derived from phytozome v7.0 (chr-ID MtChr3; po s 28603165 to 28606219 reverse strand)
taaagaaacaggtaattttcaaaaacttattgtccttttaatttgtttataactattgttgttgaaatattgtctacctatagttgttattgagacagaaagtatcaatcaaacccgtataaatatatctgtcaatcatgtagcaattttttttcttatttatgctaatttttggcaaaccgaatttatttgggatagctaaatgtaattttatacaaattaattcaagaataatttatttttgggtagcaaaggctatcccatcctcttgagaggaaccgcccctgagaaccatttgaataatgagcagaattcttgaaggtttgttagcggtggaaaaatctagccttaaaatgcaagcggtgtgtgagagatccatgcaatcatgatgttgtcgtgaattatctctcgcgagatatagcatttctcttagaaaatttccatattgaaaattcatcatgcctcgtggaaagaggtttatgagacttccaatgttggtgcaaatgtgagtaggaagaagttgtttaattatagaccagttctgaccatcatcaatgacatgggcactgacattaaaactaatagcttacgaagaaatggataaagtacatagacatcaaataatatctcaatatttagatatatcatacataatattgtttcttcagtccacatgtcctagctcaactggtaaaaaaatattgaatttgttaggttagacgtcatgatttgggttcgaacctcactctctcacttatgtgtgagtttataatgattttgtcatttcgtttatctaaaaaaaaattgtttcttctaatagctacatattgatactttcaacatgacgaaaatcctttaaaaaaacatgacgagtacaaagttgactgatttatttaatcagattttactattttattttgggaagctatttaaagaataatattatgattaaatatgtttttgatctatataaatatctcaactttcgttttagttcctcaaaaaaaattcttcgacttttagtcttccaaaagtctttcatcatcatttttgttctctgcttttaagccaactcgtgcgtatcattcaaagttttgaattttttcgaaatcgtgcttagaatattataagaatctaacccaaaaaaatcaaatttctaacaaaacatgaattaaatatgaatttttatgttttttttgcgcatcaaaattcatatttaattcatgttttgttaaaaaaaaaaatcaatttttagagagattcttataatattttaatcattcctacaaaaactcattaaaaaattgaagggtacacatgacatgacttaaaagcagagaccaaaattgtgaaccggaaacttttggggctaaaaatctaagaaaaattttagaggaactaaaatgaaatattgagatatttaatcattaatattataatatatctaaatatagagatattatttgatgtctttgtaaaattatttcatattgctaatgtatacaaaagaagcatacaatatacaaattcttgctcagctggtaaaaatattttgttagatcggatgttgatcaagactgagagtccaggtatgcacaatgatccatttacttcatttaagtcatagatgtgagacatgtgacaaaacattaatccaggactcagatataaattttaaaaacaagtaatttttaattaaattaaaaacatttcccctttctcccatagctaccctttttctctctcgttgtggtcgtcgccgtcatcacccaatctatcacagcgcaaacccgctttcattgaattttaatttttgatgcagcaacttgaagaacgcaaagaaatattagtatattgtataatgctggggatcaatctcatgttcagtttttactgcaaatctgaaacgcaaatttctcaattcatgggatgtagttttacttaataattgaccttttatttttaaatctcaacccttaaatatgtttttgccacatgtcttacatctatgacttaaatgaagtaaatagagagcattttttaaatggaggatacgtgaattcaagactcgaacttcggattcttcacttgtaattgtatgtttgcaatgactattatcattttgtctatctattaaaaaaactcatacattattatttttcattaaaaaaatcaagtccacttttatctttattttttaaaggaagtccttttttatttatcaatttgtaaaagaagaggtcaattattttttttggacaaaaatgaaagtgattttttgaataaaaaaacgacttgacttttcttattgaaaagaagcttttttatttacaaattgacaaataaaaaaagacttgatctaatgtatgagtttgtttgacagataaaagaaaagacatgatttaatgtatgaaatttttaaaacaaattgacacataaaaaaaactttccttgatgtatgacttaaaaaaaaaaactaatatatcaaatcaagtcttttttttcattaaaaatattgtgtacatgaacctatattgaacctgagttttcgttccagggacagtgcaatcacattttacaaaagaattaatatttttgaatggtcattttacataagaattattaaatggtataaacataaaaatttgacttttttcttaaaaaaataaaaataaaaatttgactttcgatgtgctttataatctactacatttctccagtaaaccaaataatgatattgataatatactacatacattacatactactagtattatatatttagttttcgtttataaataagatatagcattggtacaagagcaaacacaacaaaatccaagagtaatttgctaaaattacctcactgcataggagtatctatctattcttcaccacaaattccttcaattcataagccttgcttccgtatattttactttgtaaaaaaaaaaatacaatatcatgcattttactaggaaaattgttaattgactctttaggtagttcatattaatgaattgcaatttttgacaacctgcagaaaggaatagtt

SEQ ID NO: 4176 - DNA, 1085 bp, Medicago truncatula
  Intron number 2 from transcript Medtr7g075920.1 (locus Med tr7g075920) derived from phytozome v7.0 (chr-ID MtChr7; po s 15346054 to 15347138 reverse strand)
gagacatcaaagcgttatgttctttatcctttatggtttgtaccaagtttatggtaattccactgtcttgacactagcctatgtttgattgttagacaagggcatctacaatgaatattggtttgaagatgcatatccatgttacggatcaaccctttaattcttttttcttttctattaatctctttaaggatctatatttcttagtacatattggtttgaagatgcatattcatggagtgttgatcctaaacaaaggatttagtcaattttgggatgcctcaatattgaaaacattatatctgatggattaactagtttcacattcttctgttgttttccttaccaactttgaatgttttgaaaataatgtctccacataatttgcttgaaacattgttccatatatggtaatttatgactacgttatatctgagtaatgtaggcaatgatcatatatagtaatccagtgtatgataacatccactgttttatgaaagaattattaattattgtactacaaaaaattgtaagaaaaattcaatcattgtttttatgatttagcttatttctcctcgtggaggtttatttccttccataatttcatgacctcattattgtagcttatttctccttgaaaaaattgaaccgtctataacttaaatccgatttaataggttcagtgcactagttttaaaatctcaaacccaactagttttttaaactgttgtataaaggttttcgaactgttctgaattggttctgaactagttttaaatatttacttagtcagaattcaaactctaataaacaagcatgaccttaacattcaattccgaaaatcctgagatcaaagatagcatgtaaactccatagaaattataaatatagagcaatataagagctcaattttctcatatttagtaagctcttgttgcattgcttgctggttttggtggtcttgattagagtgaaagttgattagcaatacggacgggacaacttctttttaggccaagttctgagatgtttttgaaagtttatccttaggtaaagctggtgtttacaaacatattgagttgttc

SEQ ID NO: 4177 - DNA, 3428 bp, Medicago truncatula
  Intron number 2 from transcript Medtr3g114470.1 (locus Med tr3g114470) derived from phytozome v7.0 (chr-ID MtChr3; po s 28976493 to 28979920)
aggataaggaggaaagtggcagaggatccagagtaagtaaaatcatcggttactgtataatgaatatcttgaattatagtatagtgtatcaacttcaatatttttcaaatggtgataagggtttttataacctactaaaattcatctttaacaaatgacggatagaatatgtggattgtccaaacctttctagacaaaataaaaacattaataagagaaagacatgtagaaacatgaaaaatgaagactttcatataaaacttgtcttccatgagtatggttttttattatcttttgaattattatccaaacatgtacgcatcatatatagttttacaacaatgtcaaacaaatcaagtggcctactgtttataggggttctaataaccttccaatggttataacctccttttatataaaattttgaaagaatgaagtgtaaatgttagatattgatatatttagatatccggttctagctttatatatagctagatcacaacctatcaggttaactctaaggatacctgaatcaaaactttcttttatgttgtttaatatataaacaattataatcaaaactatgttctcggactaatgctagatacaaatcgtatattcagaatgagatatttaaaatatgcattataaatgatttgctaaataagttttcatgctcttcctttatatgtaggtgatgaaagaatctattatagtgctaaccatattgatagatcataaatcaatgataacaacattgttaatgtattaacatcctgcgtacatctggacttccaaatcattaaatcaaattaaaagtgggaagtccaattatgctacaaagaaatatagatcattctgaagggttatgcaatggaaccagattaatacttcggaaatgcatctatctaacataccaaatttgttgcagaaattatgcatataaataatacctttaaaacaccgtgatctgcagctttcttcttcatcctgctcttttgaactcagaacctctttctatgaaaggttttttcatcttaccacaattagctacagtactggatgtatctgtttgtagggacacgcaaaaaaaaaatgtgatgtgcattaatgcattgagttgaataaaactacttggtaaatgtatctaactttatgaatgtcaacacttaaataatacgacacgggctgcaatatagattcctgattagctgacactaataattgttatccattatataacacaattgaacttaataaagaatatatggcttaattaaacttattccaacttttgatataaacttactaaaggaggtatgttctattctccatatattacactaaaaatgattacaattttaattattttttaattcaaaaagttaaacatgtaaaatcatggacatcaattccaaataagttgagaatcttaacactactgcacactgaatgtaattaacactgtgttaaaaaagattcctgcaacaatattgaaattacttaaaatagaagtggtgtttgccatacatggagaattgaaaagattgtatacaaatcatttttccttttgttttgtatgtgaataagtgattatcaaaaactcatttttttaagctgaacttttattgatcactccattttttggttggccatttccattctcaatataaattttcatatttaatgtttattttttcatctcatcattttttattttttggtatgggtatttcaattttgtattgagaagaaagagtgacggatactcgtttatttctttagtatgttttgattttattttactacgttttgtggtatacaagaagaaaaaaaatgaggttgaacattttcatttgtaaagcaacaacataacaaactaaattttatcaatgtttttttttttcatttgttctttttagatgtatatattcacaaaaaattattgtagctattttgaacgtcaaataaatattttatcaattttcaatcaattattgtaaggtgtgtattattctttggattgtgtcaatatttttctctctctctctatatatatactttgagattatttatttttaatggaagtgttaattttttttttaaaatcaatggaattgttactttattaataatatttgctattataataattataattattttattgttgatgttgttactaattactatactattaccatggataataatggatgcccacttgtatgcataatagttaagtctctatttgataaaaaaatgatatttatgtcgttctcacattcgtgtgaatatcccgttagacgagtatcaatgaatattaaggtatttggaaatatcaatgagtaaaataatttttttttatacaaaaaattgcattattataatataatttaaatcatgtggaattttattattaataagtgtggcatcaatgatcattttacaaccgttgcacgtgagatttggacaatgtatcttaaagttacaaagtcaagctcttagcattgaactgacatctcttaaacttatttcttctgtttggataagacaaaaatatttttccacacactttcactttgacaacaaattactgatcaaacaaaaatcattaattataaaattcagatatattttatttcatgatgagaaatttttatttaagtaatacgataattgtatgattttactaatttcgaaacatgtatggattaatgtgagtccaataacaaaaatatgtttattttatccttttttttgttacgtttattttattctatatgtgttattaatttactaaatcaagttaatttcatccgtcagcgcatctattaatttacgactacgtaaaatatggtttatattattatatttgagtgtacccattaagatagataaatgatatttgtacaaccactttgtgacaactttttgacaactttctttcacatactcacattatatttttattctctcttcatttttctctctccattgtttttgaccaagaaaaaagagaaaaaagagattgtctcaaaagttgtttcaaatagatgttcaaatatcactactcattaagatattagtcctctaccggtccagtccatagtgatttttatttgtggataccatgcaaacataattttagtcatccttaattatatgtctaacccagacaacgtcgggtaaatacactagttacatataaatatatgaaaaacatagatcatttttgcttcgtaaatttttatcaagtcaaatttgattcgctcgactcatttttagtcatattagtgaatcacactacttatgttgaaaaccacaataatattttttattgttatttacagaacaatattatacaactatttatttagtagtacctaattttaataacaatggttgttggaggtggtaccaaacac

SEQ ID NO: 4178 - DNA, 2074 bp, Medicago truncatula
  Intron number 1 from transcript Medtr3g013520.1 (locus Med tr3g013520) derived from phytozome v7.0 (chr-ID MtChr3; po s 2604190 to 2606263 reverse strand)
gagtgatttcagcttctggacaagattcaacttctgtatacttttcagaatcagaaggttgatcagattctgatgcatcttcagaatcagttgtacctgcattactttcactttgctctgaagttttacttccaggctctctatcatcaaattttacatgcatagattcttcaacacattgtgtttctgaattatacactctgtatgcctttgacctttcagagtaacctaaaaagattcctctttgagccttggcatcaaatttcttcagatagtctttagtgtttaagatgtaacaagtacatccaaactgatgaaagtaagagatattgggtcttcttcctttaaagagttcatatgctgttttctccaacataggtctgatatagatcctattttgaatataacatgaagtattgactgcttctgcccaaaaatgtttagctaagttgttttcatggatcatggttctggccatttcttgtaaggttctgttctttctttctacaaccccattttgttgtggagttctaggagaagaaaactcatggagaatcccatgtttttcacaaaaaagttcaaatggctcattttcaaattctccaccatgatcacttctgactttcaaaattttcaattctttttcagattgtatttgagtgcagaagctgctaaacacttcacatgcatagtctttacttttaatgaattttacccaagtccatctgctgtaatcatcaacaatgactaatccgtatttacttccatataaagatgcagtgttaactggaccaaaaagatcaatatggagtaattctaagggtctggaggttgatacaatgtctttagatttgaaagaacttttcacaattttccctttctgacatgcaccacaaagtgcatctgaatgataatcaatgttaggcaatcctttgaccagttgtaacttgctaattttagaaattaatctccaattagcatgtcccaaccttttatgccatacccattttttatcattcattgacagaaggcaaactaccttctgatcagccagatcagagaaatttattttatagacattctcaactctctttcccttgaatgtaatggatttgtcatccttgttgactagtgtgcagttggtcttactgaacgttacatcatacccattgtcacaaaattgactaatgctcaataggttatgcttcagaccatctactagccacacattattaattgagatggaggaattaccaatagtacctgcaccaatgatctttccagtttggttgccaccaaacttcacttctcctccatctttcattgtaagggtaaggaacaaagctttctctccagtcatgtgccttgaacatccgctgtctaggtaccatgacctttgtttctctcttgcccttaagcacacctgcatttttggccaattcagatttaggtacccatatcttcatgggtccttttgggttagtttaggaggttttacttttcctcccttgtaccttagggtgaatgctgagtggcttctgatcattcaatactttaggtttgacaccttttggtattgttttctcagaagcagtagctgctttgttcttctgatccttttgttttggaattttagattctggtttaatcagattctgatgaacaggttctgatcttttcagaattttaatcttttgactcttaggatcagattttgtcattaccttgatcttaagattctctggctttgatgtgatcttagcctgtgaacctgaagcttcaggttttgactgaacaacagttatagcatttgtaccttcaggcacaaaggtggatttcaatccatccttgatacaatcacagtagctcttgagactgtattctttggatttctcctcagaatatccaatccctttgcctttgttcttgtatgtgctgtagatcatagaagcaactttgcttctgtctattccagccataataaaatcatccaaggcaatctcatgtttattgcctgaacctttatcacatttttcttgtagcttctgacaaagactcttgagtctatcttcat

SEQ ID NO: 4179 - DNA, 968 bp, Medicago truncatula; identical to SEQ ID NO: 4065
  Intron number 2 from transcript Medtr4g108300.1 (locus Med tr4g108300) derived from phytozome v7.0 (chr-ID MtChr4; po s 23913898 to 23914865 reverse strand)

SEQ ID NO: 4180 - DNA, 2531 bp, Medicago truncatula
  Intron number 8 from transcript Medtr3g101160.1 (locus Med tr3g101160) derived from phytozome v7.0 (chr-ID MtChr3; po s 24452855 to 24455385 reverse strand)
tctttgcttctgtggagattggtcttctagtggcggtaatcatttctcaatttgtggcatgactttattttacaactattcatatgtaaaatgagttttaatatattcaatccattacatgaaactaacacctaataaatttggaaacatcctatcatagtcatcaaaaagaatttccaaatttggaattggatagtttgtagaagcattctcaagcatttaggtgttgtaggtgatctcgaccgtttatttaagattaaacaattcaaattatactgtcaataaattaattttaaacaatttcgaccattagtttaagataagacgacccaaaatgtaattgtgtcacgtagttacaacaaagaatccaaatcctataaatttatgggtttaagtcctctcatacaacaaaaagaagtccatttaaatatccattttttattaaaataaaatggaaagagaaagatagtttataatgaaatagagagagtgaaaaaccaagggttgagattgaggaagaaatatatagaggggatcaattcccctaatagagcaaacagcccctaaacctaaataaaatctgatgacttagaaaggaactccaccctacaaagtacaaatgaatcatattccttgttaatgggagggtaaaagtacaaaatataatctattgtgaaattaatttatttatcaaaactataaattatttaaaataatgtttttattttagtggtatatattcaatatattacctatcattcctttttgtataatccaattggtgaacacttgccttctatgtgatctctgtttttgctgcagttacaccactttgataatttttgtccttgttttgctataattgggttggatgattcccactcaactataatttttgtctatgttttatcatgagtgtcgtattaaattatttttatataaattaaaaaatattagtgaaataaaatgataattttattaaattaaattttatcattggtgtattcatcattatcataaataaaaaactattaattaaaggaaatagttgggattaaacccctcggattaattggtctttagactggctaccgagttttcaaaaagaaaaaaataaatagttataaaaaaggataaattatatttattttaagagaatgaagaaatatatggttcacacacagctacattatttactttttataaataaaaggtgaacactcacatttttgttggatataatatccaacatttgatgttccgttattttttatgtttaatttttcttttaaaattgtggaagaggaaagcattattaataattctgacattaattaccattttacaatcgtttcattcgaagtttgaaatttatcatttaaaattacaaagttaaacttttaccaccgtactaacgtctcttttataaattttgtgttaattttgccttaagtacctaaaccagtctttgttcatgggatacgaaagaatactcataaattaaaacatctcaattattaatttcctaagattctttgaagaatcaagactagcatctttattgtacatcactcacttgagattcaaatgttcactccacaagaaataacaaagttatagataaatgatacttttatattcctagttgtcaaagcaccaacaaacttgagtgcaccgtagaacaatagttatgaaagacattactctatgaacacaatgacattactagtggatatcttgcaacatagttattacactatttatgggtatgcttccatatagccaaacttggaaattcttattcaactattcataataattaattggtgatggcatgtgcccaaaccttattttttttttcatatattgtattataataagtttattattccccactacatcaggggaacaacatatttggcactaagtgtgatacataatggatgtggagcattgaaaaatcccacttgttgggacacgtttatcttgaaaactatagcaacctagtgaattctctgttttagaatatgattttcctaaggttgcaatcacacataaaaagttatcaagtatcaacaaatttcaaacactttatggtgtgaggtcaacttgtatctttgttggaattaataatggatagagttgtagctttctctttagaaagttataatcataaacaatttttttttaaggagtaatcgtacacaattattcatcgacaaatttcacagtattttgtactaacataaacacctatgaagcacggatatggatacggacatcggacacgacactgacacgccgacaaaattaataatttaaaaaaatcacataatttaatataattacaagtgtcggtgtcgtgtccgtgctccatagagaaacactctaaatacattttggccaaagaaattaaatcatagcataattaattatggaacatatattatcaaatatgatgtactcattaaattttttgattgtcttaattggcaggtggtaatatcatttgcaaagataattgtgatatc

SEQ ID NO: 4181 - DNA, 1599 bp, Medicago truncatula
  Intron number 3 from transcript Medtr2g125770.1 (locus Med tr2g125770) derived from phytozome v7.0 (chr-ID MtChr2; po s 30355184 to 30356782)
aaatagaccaccctgaaggtccttttggcaccaaggttagtaatgttcttgtttcttcaaacaaatatatatgcaagctgatgtttaactcgttttaaagttgtgttgtgtgttttgatgttgctttcctatgtgtgtgaattagatgtttccaagcttgatttttatgtgggttgcggaatggttttggtttatgtttggtgaccttaatttagaaaagtgattttggcaaaactaatgttgtttggagtgtgttgttaaaaatcattatggatatttatattttaattacctaaagggtatttcattcttcatattgtctttttcttttctattacttattttcattatttcagtctctaagagctgcactgttgcaaatggcacaaatgttgttgtaaccgtactcaattgtaagataaaatatggaacactatttaatctttttgaagtttggttcatttatatttttagtgctatgagtccttagtttaaagagaaactattaagaaagatctagagattgaggagttgaattgagatacgatagaacattatagggccgtttgatccatgttgccaaccctgcttagtgggataaggcttggttgttgttgtatatggtccctagtctccctacccttcactgagttataacacccaagtctccttgggatggtattataagatcaaaaaacaatggggattagattggatatgagtgtaaccaaacatttttttacctccaaattatcattcttcaaaaattaataatttgaatgtaagattttaaaaaacatctatcaaaatccataaaattaacagaagcactgcatataatcaattacttgttgataagtaaattcaaattcaaattgcaaagacacatagaaggctggaactacaaaactgattactggcttggaatttgggactaactatcataccatcaatctacaatacctatatgattcgatgcagaagcaatcttctggagcttcttctcagacaggactcttgcatcaatgaacaaacatatagatatgtattaaatatatcaaatttggatgctaagttgcttacattggatattctttggaagtaagcatgaggatattggtaaattgttggtcctgttaacaagttgctatcctcagttacttcactgtactcggttgtaagaggtgaagagtaaccatggctagaaaatcaaggggttttgtagctttgttgagctttaagtttacacaattgtagttttgaatccaaagtttaaagacaaaaaatgtgcttaaagatgttttatgaaggttggtgaagagtaacgatggctggaaaatcaaggggttttgtagcttgttgagctttaagttaacacaattgtagttttgaagtttccaaagtttaaaggaaaaatgtgcttaaagatgttttatgaaggttctgaagtgtgcttgatatatgttttgtgaatagttgctgtagattcacattgtccgcgttgtctaatacttataatggttttgaagtatgcttgatatatgtctgctttcgttgtttataggaagcacctgctgttgttaagtcttactataacag

SEQ ID NO: 4182 - DNA, 1088 bp, Medicago truncatula
  Intron number 1 from transcript Medtr4g062400.1 (locus Med tr4g062400) derived from phytozome v7.0 (chr-ID MtChr4; po s 12091713 to 12092800 reverse strand)
gcggaacctaaagttaaatacgatcgccaactcaggtactaatattcattcaatataatattcgattatcaattcattcaactattctgtgtatttgcaagattcaatcaacgttagggttttgaatgaagtttatttgattcaactattaattaactggagaagagttctaatgtatcttcaactggaactgcttttatagatttttttaatcaaaacagaatgctcctattttcatagttttattttattttattttcagtgaatttttgctattcgtagtagctgtaagtaggttttaaataaatttccgtgtccgcaatctttgcgaaatagaatggtgttattgatcatagttgttttttttagtgaaatttcctaattcatagtagctttaagggaaaggggccctgttaattaggagtcgggtgggagctaagtaaagccgacaaagaattgttccacctgggaatcgaactcaggttcttataaacagtctgtccttggtgaatcattaaccacttgagcccaattgattggctgtaagtagggtcttaaataaaggtttgcgactgcgatatgaggcacggcaaatgttgtcaagtttggattgctgaaaaccgtgctttgttaaaattacgttataataaagtgttatagattctttataggcactagttgactacacattgtaccaaatttcgtattgtggagtaatagtggtttgttcgaattctgctacgttgtagccgctatttgaaaacatttcgtgggtcacggcgttgggcttttatgttcctgaaagtgcaacgtgaccactgttgaggccgcatcggctacatttgactgaaatatcaaggattgcaaccactatttaaaacattgttgtaagatagctgttgttcatgctctgcttcgattgctttgagactgagtgtgtgtgcgcccgtgtttaatttaaactattctgatatataaaattaaattgttatctgttcatcgttttcttactgttttatttgggtattatttatgatgtctctgatccgaattgtatggcaaaatgtttactcttgaaaatgcagaat

SEQ ID NO: 4183 - DNA, 1345 bp, Medicago truncatula
  Intron number 6 from transcript Medtr4g133950.1 (locus Med tr4g133950) derived from phytozome v7.0 (chr-ID MtChr4; po s 32205717 to 32207061)
acgagtgcctacggaagtaagtacctgctaaattcaccttttcaggatgcctttgtttcagataactttgatattaattatcactgtcttctattttttttttttttttgaaagacactgtcttcttctatttgaatgcttatattcgaataatttcgtgaatgcgagtcctttattccttatcagcatttaagcactatcattaatgtgcattcttttcctattgttatatgtttcagagttacttaaattttttgttaacgatgtatggagaagacttgtaatagcaccaatgaggaggacgtactagatggggggatagtccaatagttagagatagatggaaaccaatgaaaactataggttaaatcattaacagagatttggatttaaatggtatatcatcaaatttatgttcatgataggtcgtgtttctgtatgtgtgttgatgcgttatctattgttttgtagttgaagatccttttgttttcccttttttttaaagatttttaatttggctcactttttgtactaataataaaaaagaaaatgctgcataggtttttattgcagtttggttttactatcaagattgaaaagctgagatttgattcatggatcaacaggaaatgacgacattactgacttaagtagtacaacaacaacaacagtagctgttagctaagccttttcctgctagatagggtcaacagtacatacgttgtaattttctgttatgtgttaagttcaaaagtagaccatttatctcttaagtagtaactaacaattagtataagtaactaagacatattacttgctttcatgactgaccatgtcaaatttgcacgttcagtgttaatgttatttacaatgagcaaacatatacttcgttaaaggaatttgcatcctctcgttttacttatatgtcatgttaaaaagaagaagaaatataagcaaattcagtggaccatacaaaaatagtgctgggttttatcttttactatggttgcttttaatcacgttgttacatcaatgtcaagtttcaagttgtagtatatagttataaaatatattgatttttttctttaatgatctttgatttagaattttttttattactgatttaatttttttattatatcgctaattgggctgtttacttcattttaacttgtttactatggtatcgttcattttcttctgtttgatattagttttattcatatatatatatatatatatatatatatatatatatatatatatatatttcattttagaactttcatatttgaagttgtgcaatcctttgtcaatgaatattcttcgtatttggtttgcaggt

SEQ ID NO: 4184 - DNA, 3426 bp, Medicago truncatula
  Intron number 1 from transcript Medtr5g104710.1 (locus Med tr5g104710) derived from phytozome v7.0 (chr-ID MtChr5; po s 42021835 to 42025260)
ttgctgctgcttctgctcttgccattatttttcaggtcacattttcttcattttattttttaaattaattaataaagtttgttaatataatcaattaggttatgttttatatgttgagtccaacaatgaagaattatattttttaaggaaaaaaattgagtgagttgttgaatgtgtagcatgtgtaactgatccagctttttcagttccgaaaatggacaaattattggtcaagtcaaacattatgcattgtaacctgcagagatatatgcagataccctttatgtaaaaataatatttcttttggatcatttgttaaatttcttcttgtgatatgatgattttttaaagaactttagacccaatacattggtacattcattcaagtaattggattaggatttatgttttttgttttgagatgcttaatttgaagcatcctagaaaaaactgttccttaaaaacggctacttttaaggcgggtcattttccaaactaaatgtgtgtccctttcacaaaaagggtaaatgtattttcttgtttggtattatatgaaaaaggctttgaattttgatgtttacctttcttggcatgaaatccttttttgactgagctttttaattattctagatatctataatctatctaatctaataaatccatggcttgccttttttctatctaaaaacatcttcttagtagctttttactttgtttcagaaggattgttttcttaaataacacaaggagggaaacatgaatagtgatttatgtctcattactatcgtcctttctaccatatagtactctactgtttttatttttatttttataaatagtactactgtttttatgtttctttatatagttagagcaatgaaattgtacaacttttggtcctgtttggtttcatattattctattattaaaatcaatcaattgagtgcaaagtgtgtgccacagcttttctctagctacttggatttgccctaagatttatattcgtagaaatctgcagttgggttggatcgggtagaagtggttagatccaccttttggatttaaattcagaattgtactcacatttagtgattaatttctaacctaaataatttcattttactcataattctaaaaatagaagaatgattaaatcttgttacattcttaccaaaagagattcttagttttaccaattggtggtaaaattaagcacataatcaattagtttctaaaacatttaaggattgatatgtttgaattgttattattgtcactgttattatgttcggtgtaaaccattgatttctcatctcatcaaaagacgttgtttaatttctccaccctcaattttcgatacaatttttttttttttttttgcctcattagcttatgtcgcttgttagcatcacctagtctttaaaaaaaagttttgttcctaattatattagtctcagtacaagttactagctacattgttatgaaacttttaaagttaaacacataatacaaggaatattttaagaatgtctgcacataaaatggatatgctaattttattgccaagtttttttccgtcttttgtaagaatgagttgaacaataaattataatgttaaaagtaattttaaaatcaaaaactataaatactcctttcaattagaatcaattctaattgttaaatcaattttacttcaaaacaatcaaatatttttaaatcaattttaaactgtcagaatcaattttgactcctctaaaatagaatcaaatatacatttaatatacatgtgtaaagaagaaatgaaaatgtttataaaaagagacggtgagagtattttataataataatataatacaatggtcaagaagcaacatatgtataaaagccaaaaatcacatggattccaattcttgccttgacaataccccattccttttgtatctatgtgtgaagctccctctcattgggttctttcccaataaattaaatagtatgatagcagtattaaaaatgttaaagatccatttaatttttaaaatatgtttattttaacttgttaatataaaatgtgagattctgtctgcaagttttagttcaattgatataaatgctgaaattgttaggccggacgtcttgattggggttcgaaccctgacacctctatttatgtctgttagtttataataactttgccatttcatctatctaccaaaaaaatgtgagattcttaaaaagtgaactatttttgaaataaataatatttttaagaagtgaactattcttgataagtttactcttaacatagttggatttagggcatactttgtctcattaattaaagtagacagtgtagatatctaaatttaaattttgcatgaatgcctccggtatgcattgagatattcttttcacacataacttaacttttatacactatacttatatggtttttgagtttttaagatgaataaatggatctgtcaactgaattaggttcacgaggacacactcaatcgtcctcgatctattgtgtggaaattcacatatgtatccgaatagcacaacttattttaaatatatgaaagtataattattatttttctacataattaattaattaattgctagtactttagaagatggttgatggtttgttagtggaacatgtagcaagaaagatgaccggatatttgtctttaggcttgttggaagggttgttattgtttgtagaagttgatagattctcttgttggaacaagacagagccttgaccatacctttattggaaatgaaagtgaaatatatgtggggtaccacgctagctatagcttttgatactctaccatgttttactatcctaatatttcattttcatacattacacacgactacatgaacagcaactaagatattgacttgtttcgttatcttacctcatattaatctatatgctagtatagactatggaccacatcatatcaatttctgtctttgctattgctatatagtatcatatcataaattttattttattggaccataatatatgataataataggtcatgctcttgaccatctcatccaaccacctcctttttgattgagaatatcttccaccatatcttatctatggaagaatgtgaaaatcgtacttagtatatacacttcaattttatctgtcacaatcgcaccttccctctgaatgggaacacacatcatcaccttgaacagtcaattttctaatttcaatatttaattttggtacctatacctatatgtatattctatagtgtcttaatcgtcaaataaatataaataatctactatagtatattaaattgagattaacatgtaatattttttttttgcatgatatgggtcttgatgtttttatatggttggaaaatgcatgcaggtttgttcaac

SEQ ID NO: 4185 - DNA, 1331 bp, Medicago truncatula
  Intron number 1 from transcript Medtr5g021140.1 (locus Med tr5g021140) derived from phytozome v7.0 (chr-ID MtChr5; po s 8023628 to 8024958 reverse strand)
gaaaaacgcaagtctatgtaagccttataaattataatttatttaattatcctaattatttttatcattattgttaattactatattattttatttgatcccttctatctcacacatggatgatatgattttgatttatgattcttaattgtagtattttgctttttgcatattctcacatcctttcataatttctccacgaggccaatggcatgcatgctcaccaaatagtgatatgtgaatcttattatttggaaccacaaaaactttagtcttaattatgaaccaaaataactattgacacagtagaacttatataaattttaatcgcttactcgcttatatatgtttttatataaatttttatgatataactttgacctcatttattgaaaattttggatcaatatttgccacaaggtgactatatttaaattttcaatgaaagatgattgtcggcagtcaaaattttggcgcatttcaagtagcatattggtatagatgtcaaatatacaatttttcttttaaaaaatattaaaatttgtattataatctgaaacgatctcgattcaataattacaaatatgtgctaacggcgtgaatgcataaaatttggaatccaatttcattttgaatctagtgatcgcaaagtggcttgaaagggtacttcattttttgacagaaggaaaggatacttccttccaacagctatattttataaataatcagctagccttcctgtttcattgcagcttgcacatctcaatggagtgtggctaattaaaccaatgcagataaagagttactataaattctcatatttttaatctcataccacacatatcctcaattttaatattttaaccctgccccatgcttttatttttctaagattaagattttgccaatgtcgcatgagagatctatttccagctagagtggactgtgtgggaggaaataataatagtatccatgagatctatatgattgaaagcaattattttagtagttgaaatggtagaagtagatgagtaatttagtacctcaaattttggaattcaacaatgtcaatcaatttagtcatttttttgttattttggaccataaatttcgttcactttaaaagatgtttattaaagagattttgatattctctaatttaaaatagtaatttattatttcgtaaatttgaaagactaaatcgctgaccttacatttttcgaaatgttgattaactcaactacatattcatatataattaattaataatccttttcaattagtgaaaacaaacgtgtttttatttacattttgtatatgtaaatgcagtt

SEQ ID NO: 4186 - DNA, 2573 bp, Medicago truncatula
  Intron number 24 from transcript Medtr8g133280.1 (locus Me dtr8g133280) derived from phytozome v7.0 (chr-ID MtChr8; p os 31702514 to 31705086 reverse strand)
tcatcaacaagaacaatacttttcaaaccaataaagtgagtttttacacaatgtatttatatttaaaacattttcctgcctacctgtactgtgacagttcgattgcgtgattttatttcctttttgttggtcaagggttcaggagtggctattcagtaatttttcaatctgaaaaaaaaattattagtgtagatacttttaattaagggttaataggcttttacccccctgccatttgagcgacttttggtttatgcccctatgaaaaaaaacttggagatcccccctcgacattagaagattctttggttttatcctccgaaccccatatgactagatcacttggctgatgtggcatgatgagtgtgtatagaattttatttttgatttttttaatacccatttatattaaaacatttacatgtcattaaaaaatcaaaataaaattaaaaaaataaattgttaaaaaggagaaaagaagtgaagaagtgatttccttcttctccatcttcgtattccccttcccttcttttctttctttatcttcaatttccttctctcctcctccctcactgttttccttatcttattcaactttgcttgtgtttctggttcgtgagagaagagaagagaagcgtacaattgaagaaaaaattcagggtctgcagtggccatgtgctggaaaaaattgaagaaaattttgggttttcgaattgggatctgcaattccaagttctatgtttgctaggaaaaaaaattgggttcaactactaagttttgcaaatttcgggttttggaattgcaatctgtaatttcatgtttcacaagttctaagtttttattttttagaaattttatggatttatgggttcaactacaagttctaaaatttatggatttttttttttaatgaggttatgtcaaaggtttgaaattgttgtgttgttgctgctgtgtgttgttggggttgttgttgatgttgtgttgttgttgttgctatgttgtgttgttgttattgatttggggtttgtatctcaagggagcaaagagatttaagggagatggagtaaaagtaagtgataaaaaatctgaagaaaaaaatgatgatagaagaaggagattgaaaaagagagtgaggaagaagatgaatatgtaattgaaaagagaatagaaggaagaagagaagagagaagagactgatgaagagaatagaaggaagaagaaaagaaagaacataaacagagaaggaagaagagagaaggggatttacgatggagaaggagaaaaagaaatggatttttttttaatttatcattaagggtattctgggtatttcactttccaaacattcttttaaaaattaaaatttaaaaattatgacgtgtcagtgccacgtcacccatcgttacacattcaacatgccaaatcatcaaatttatccaatcagattagtttatcgtctttctttattttctatatttacaaaagcctaaccctttaattaattatctttgtcttctttcctagattagtttatcgtctttctttattttctatatttacaaaaaatattagaagcaccactagtaatattctatatatattccccattattaattccaacatggtatctaccttggagaaaagcttcttcggtcagttctgttgagttcatgggacttgaccattgccaaaccatagcctgtgatctctccttagctactcttgccacattaagagcgtagtctcaatatcccattctgtttcacatccttgtcgttccagcttctttacaaagctgatctgcaatcctatccactatgcagtttgaacctcttaaatgttgccagatccttgtcgtttcatgtagacattggctcccatttgggcctgtcattctgcaaactggctcccataatccagttttcactcatttttccatatattgatgctcttttgtatgcttcaacttgtcttttcccagattgtagttcccatttagttgatctttctgcatactggaactccaggcccctgttccatagatcggctctcttttgattttaggatgcagtctgacctttccatttgtgtagtttgattcctgtgtcaggagctgggatatgaccgagcccacattaaattttcaaaccctagttgattctctccaaaggtgttggtgtaactattttatgtagattattagcatatatttagcataagcaagacagttattctttattattgatattttcttattcataaattagttaattattgcctgtcgttctttttctgttatgtattaatgtacaactttaagattaagattataaacaatcataacaacttaagacttaagagaccttaattcaaaagatagcagttaattagatgatatgttgtgcattcattctatgttaggttagaaacaactgcttaattttggtttacatcacatctagtttttgtttcagaatgttatttttgaattgtgcagaatcttacttgtcaaatgcttttctcgtgctcctgtaggactaatattattgaagctcatatccaagtacaat

SEQ ID NO: 4187 - DNA, 2074 bp, Medicago truncatula
  Intron number 1 from transcript Medtr3g080950.1 (locus Med tr3g080950) derived from phytozome v7.0 (chr-ID MtChr3; po s 19227938 to 19230011)
gagtgatttcagcttctggacaagattcaacttctgtatactttttagaatcagaaggttgatcagattctgatgcatcttcagaatcagttgtacctgcattactttcactttgctctgaagttttacttccaggctctctatcatcaaattttacatgcatagattcttcaacacattgtgtttctgaattatacactctgtatgcctttgacctttcagagtaacctaaaaagattcctctttgagccttggcatcaaatttcttcagatagtctttagtgtttaagatgtaacaagtacatccaaactgatgaaagtaagagatattgggtcttcttcctttaaagagttcatatgctgttttctccaacataggtctgatatagatcctattttgaatataacatgaagtattgactgcttctgcccaaaaatgtttagctaagttgttttcatggatcatggttctggccatttcttgtaaggttctgttctttctttctacaaccccattttgttgtggagttctaggagaagaaaactcatggagaatcccatgtttttcacaaaaaagttcaaatggctcattttcaaattctccaccatgatcacttctgactttcaaaattttcaattctttttcagattgtatttgagtgcagaagctgctaaacacttcacatgcatagtctttacttttaatgaattttacccaagtccatctgctgtaatcatcaacaatgactaatccgtatttacttccatataaagatgcagtgttaactggaccaaaaagatcgatatggagtaattctaagggtctggaggttgatataatgtccttagatttgaaagaacttttcacaattttccctttctgacatgcaccacaaagtgcatctgaatgataatcaatgttaggcaatcctttgaccagttgtaacttgctaattttagaaattaatctccaattagcatgtcccaaccttttatgccatacccattttttatcattcattgacagaaggcaaactaccttctgatcagccagatcagagaaatttattttatagacattctcaactctctttcccttgaatgtaatggatttgtcatccttgttgactagtgtgcagttggtcttactgaacgttacatcatacccattgtcacaaaattgactaatgctcaataggttatgcttcagaccatctactagccacacattattaattgagatggaggaattaccaatagtacctgtaccaatgatccttccagtttggttgccaccaaacttcacttctcctccatctttcattgtaagggtaaggaacaaagctttctctccagtcatgtgccttgaacatccgctgtctaggtaccatgacatttgtttctctcttgcccttaagcacacctgcatttttggccaattcagatttaggtacccatatcttcatgggtccttttgggttagttttgaaggttttacttttcctcccttgtaccttagagtgaatgctgagtggcttctgatcattcaatactttaggtttgacaccttttggtattgttttctcagaagcagtagctgctttgttcttctgatccttttgttttggaattttagattctggtttaatcagattctgatgaacaggttctgatcttttcagaattttaatcttttgactcttaggatcagattttgtcattaccttgatcttaagattctctggctttgatgtgatcttagcctgtgaacctgaagcttcaggttttgactgaacagtagttatagcatttgtaccttcaggcacaaaggtggatttcaatccatccttgatacaatcacagtagctcttgagactgtattctttggatttctcctcagaatatccaatccctttgcctttgttcttgtatgtgctgtagatcatagaagcaactttgcttctgtctattccagccataataaaatcatccaaggcaatctcatgtttattgcctgaacctttatcacatttttcttgtagcttctgacaaagactcttgagtctatcttcat

SEQ ID NO: 4188 - DNA, 4951 bp, Medicago truncatula
  Intron number 1 from transcript Medtr4g159800.1 (locus Med tr4g159800) derived from phytozome v7.0 (chr-ID MtChr4; po s 40384170 to 40389120)
tcttcggcgtttacgacggccacggtggcgctcaggtacacacctttttccatttttttaatttattattatttcgaaaaacaacagtttctattttatttattattattatcgtatattgtggtgtggcgttatgtgtttgtaataaatgcatatatttactttgtttggattataattttattttgtttttatttatctggtgttcaattaatctgaatatttactaatattatttctggaaataaaataaaaatggagaatcgtaattgttgcttgtggttaaactgaaacgggaatgtagttggtgagtatgtttgtgaggaaggccacgtgttataggtagagtggtccacaaaaagagataaattaatggtccgtttcattcggtggtgacacgtttgtagatacgactgtatacgattgtgtataaggcaaattctatgctacatccaataaatttataaatttgaatgtatcggtacaccaagtcgtaaaattaataataaatgagttgtttttttaagaaaaataattattttctatcattgacaactaagataattaaattttatataccaaaagctttgacgaaataaaatttaatttttaagaatttctattactcataacaatgaatattggttttttttctatgacaaaatgtaaattttgtaatatgatccttataaataatgaaatgatgatttttcttatgaaatgatgttttttaaaatataaatattgacaaatacttttttatttcattaaagtggtttttaatttatatattttgtgaaacaagagtaccggtacacttaaaattgtgagtgtaccatagaagttcccccgtgtatgatactccatccgttaataataataaattattttttctaaacatacccctaattaatcctactaatttattttaaaatacgaaaatttaaatttaatacacatatatataaagaacaattaataatattaacacataaaatagacacgttaactacattaataacttttcataaaaaatttgaaaaaaaaaaaaggaacggagggctattgtgggccttttcttttctttctctttcagaacagatactattacctgtaccagtacgtacgtattaggaaggaatagtcatagagattggttagaactacccagatctcatgttgtttccctcacagaccaatcacaagttcacacttacctattcatcttcagctttttcttgggaaggagggttgataacatattttttactattgtaaaaattttgttaaaatcacagagagttttacatcaaaattttaatctattaaataagatcgatcgaatatatgaatgaaacaaggttatagtgttttatatacagtaaatttttaaaaattattttgttaacccttaaaatactaattaaaatacattttttcaacttttaaaatgttgaatatacaattttaaataatatttctttttaaaattacaataaaatttatacatgcaaagaggcaaacttttgaagacatacatatttaaaatataaaatttaattatttttttgttaaaaaaaggattgattggatgtgcttaatttattattattacgagtataataatgtttgggtgggtgtggtcctgtttgttgggggagaatgagttttggaggaaaaggttgagccatgtgtctggaaggatgagcttttttcccaaagaaagggtacgtttttcatatcatgacatgtgtgggtaagtgggaccaatgtttcattatatacatagtgggacctacgtttcattatgtaccttttcaccacttttggcatattatacagggctgagagatgattgttgtgctgagtctgccctttctaggaaaagtttattcaattccaacggtttaaataatttttttattttgtgccaaaaaaatcccatcagtcaattttaaatcttttttgaatggtagtcaatattatatttaagactttaatatgtatttcgtctttgtaattagggatcgtttaaaaattgatccatgcaatcgttaatccttgtaaattagccttacattgtttaatcatttaaaatttcgttcctcgaccaacttgatcattgtcgcgtcactaatctaatgacgacgtgacactgctaattgattcatacgcacacgaaatgaccaaaatgcccttagtttttcaattaaacaggaaatgactaaaataccctcctctttcattttcttcttccattgaattcaattccaaagtaccaattttccattactccttttcaattcactattgctgcggttctgtgcatatattcaattcactgttgttgttgttttgaattggtgtaaaatgaccctattcttatttcactttcatcttccatcaccatccctatgatattcatccaaacccagcaaataaaaaacccaacattgattccagctgacacaaccattttgtaacccaaaatcaataaaaaaatctttaatcttcttccactcaaaaccaataaaaaaaggcaaacccataaatcaagtcttcttcctgtaacatgaatgaagaagcaaacccataaatcaaatcaaatgattttctttttttggagaaagaagaataaaacccagaaatcaatgtgttgttgttgttatgtatgttgccgtaagcatctttttcagttcctcttctccctccctaacatcaaaaaccaataaccaacaaacccaacaacaaaaacaacagaaacgtaaatggaacctaattctccatattccaccaccgtcatcgtagaaaagttcaaaagcgctaccaccagccccagcgccgtcttcgccggctccatcatcaccggctctacgaagaacgatgacagggttgaaaggtgaatgactactagcatcacgacggcgtcggcggaagccttgtcaacgggaagaaacggtgtcggcgggaaaggacagagacgtttgatgggtagaagatcagttacacaggaaaagtgggtttgatttcaaagtattggtgattgttgtttgcagatcgaataagagaaaaagaacagggatggtgttggtgattgcagatacggcaggaagaaaagggaatgagaagaagagacgggcgttaacatagccacgtcagtaatttgatgggcttaagactaaattttaaatgattaaacgatccttaattataaggacgaaatacatattaaaatctatatttaaagaaaggatattcatataactactttaaaataacttataaaataaccatattcttttctctttttaagatacaaacaatagtgcgagagaaaaaaagaagataaacacacaatatgaacacgaggataaatttttttcaaaaaaagaatatgagagtgaactcttaaaagttatttaaaacaatttttttaaagaaaatgttatccaaatataatttcttttatttctatatattttcacttttgttactccaaaaacaatattttgttcttcattattcttttgttcaaaatgattgtacatagtgaaaaagataattgcttttgtacaatcattttgttcttccccgtcactactaattatagttctcaattctcatactgccacataaatttgacaagataattgcaacctcatcatattttatttgtgttgtactaatcttgaagattgtatttagtcatcataaaaaagattcaagtatttagtcaaaatgtaagttggtcaagctactaaggatatacatccttcaaaaaaaagctaataaggatgtgattaggatcccacaaagtctggtattatatttcactctcaaagtgacaattttactatcagtatgtaatatgtgagtatttttgtaattgatttttaaaacttaaaacattttcatgatcttgattgattagttgtggagacttaactcaaaagttgtcgaaacttaaaacattttcaaaactttctaactaacacctatcttttctgaaagtgtccaagaacttatcgcatactgttcgagggtgcaggggttgtgaggattttaagagttacattattttcacacacaagttcgatattaaaatttgacaataatttaaatacacattttaaatatgtgagtaattatgttaagtagatggttaatggatacatcaaggtatcacaacactttaaccatccgctatagacaattaatcatgacttttaacatcattaaccatgatcgggtgttcaagtacatatgaattcattcaccacaatttgtgtttaaatatacacctaaaatatggtgattagttttcttaaaaaatatggttaattgagttgagtgagtgattaacgaattgctgctccatgttaaattcattaacaaccaactaaacccaatcaatcacatatttaaaccacgttacctatctagatcattgtctaattttgatgttaaaattgtgtgtaaaatataatttccctagctttaaatacttggttatctgaattctctcattgattaactcacccttgagatttatctgttctttagtaccgtacttgaactcatggtagcttataatgttacacgtccatttttcttttttccacccacatgatgacattgttattttacatattaaattgagtatttcttcaggggcattagatgattttttttattttatttaagtaattcctgtaccacaactgtttatttcagaattatgatagatcaaagcttgatgaagaagggaaagtgagttctgaaagatagtacataactacttattaagttttgattatagtcgaatgcatttgttcaacatggcctttatagcataaaatgtccgaattcagaaaacatcatcgtgagaagtgcattcttctaacttttgtggttaatataatcctaggttgctaaattttgtgcaaagcga

SEQ ID NO: 4189 - DNA, 1970 bp, Medicago truncatula
  Intron number 2 from transcript Medtr8g138420.1 (locus Med tr8g138420) derived from phytozome v7.0 (chr-ID MtChr8; po s 33409011 to 33410980 reverse strand)
tcattgaccaaaccagagtatgtacttttatatttccatttcttttgtttttttactctgctttttttattagatacatgttgcacccgatttttaggttttgtttcttagaaatttgaagcaataaagtttgaattttttcatctgggtgttgattaaaacttgtcatgatttacattgtcagaaaaaattatggtagaatttgattgatgaatttagtttttgtatagttgctggttttgttttgttctattttaaggagttttgtgtccatcttttgcagtaagttaagttttggaatgatttggtgttctattctaggtagttatatcttgtaaaagttttgtgtccatcttttgcattaagttattcagactgttttcagcttattttcataagttctccaagataacttaggaaaacagctcattgtttatatgaaaacaatttaactttaatttacaaattaagcggtttatccaaataggccctgcattttgattacaaatattgagttgtctgcatctttttggtttggtatcttagaaacttgaagatccaactacagcctgcgttccattatgagttgtcttcattgttgattagtttttttttcttttttttttctttttttttctctttatttaatgaaagcattgttgattagttggacatgctttttgtaagtctgatgttgaaactgcatagcataattggtgtagggacggaagcactttgcgggcttgtgcccacatttttgttgttcctacattagtgtcaagtccttttgcaaatatatgaatggatacaaaaccatgtttcttattcccctttgaattagttagtaaacaaacacactttgaaacttttaaggctataaatatcatgtttaacatttcccacgaatagtgctgaaatgaatgttgtggtttcattgcatttagagctgtcaaaataggccggcccggaagcctgaattaaatgtagggcctgggccgaaaaaatagcagcccgaattttcagggctttttagcctgccccgaaaaggcccacagcccgctcgggctaagggcagcccggcagcctgcaaaaaaaagtgggttatttttgacactggactggacggacagcccaaatagttatgttcatttgatatttaagtcattctctcttttaaaaattgtatataattatgttcatttgttttgttacttctaattaaaatgaaggaaaaacaataatcaaagtggttgtgtttcatcattgtttcttaactcttgttctcctgtaatgttaaaaatgttatgcttttattccccacttttgaaacccttttgcttatggttgcattgtgatttcctttcttcactgtcaactcagtttagtaccctttatctttctttctttttatttttttaatttatttttacatgtgttggctaattaattatatgtggatcttgcaagacaatatagtgactatatgttccctcaacaaaacaaaaaaaatagtgactatactgattagcaaatgaatttaataaatatacttttttagtgtacaattatgttaatgttagttggtatggataaatgttattctcttggatcaaacttaatttttcttttgttcactataaattttgtgtatatttatgttattatgttttcagtccttaaatgaaaaaaaaaaaaacgggcctgggctggcccatatttaaaccggacttttcagcccggccctaaaaagcccttgggctggtcaggccgggcctaaacgggtcgggtcgtcgttttgacagctaatgcatccaagtttgtgacaatactgcactatttatacttgcataaatacactaactcgctaagaactatgtaacttttttattgctgcaaattaaatttgcccccacaaaagtttcttgatccatcactgaatttgtgtactatatgttgccaggctcttgttg

SEQ ID NO: 4190 - DNA, 1514 bp, Medicago truncatula
  Intron number 1 from transcript AC233659_11.1 (locus AC233 659_11) derived from phytozome v7.0 (chr-ID AC233659; pos 43855 to 45368 reverse strand)
gcgccggtgagtgtttcagtttgtttgaatctgctagatctcgtttgaatctgcttagatctatgctaattttgctttcaatgctaattgcttgatcttaaagttttcttttttacttgatgttttcttttgaatgcttaggattttgaatcaggtattaggaagttgaaagacgtgaattgaactttgtttgtttcaaatttcacttgaaaattgaaatagtttacttgagctgaaacaaagtttttttgagggttgtgatttagtaaaccagatgctgatttagtgaactcttgcgtggtgacgagcttttgagtgttagttttatcctctgttggattgcagtttggattttaatcggattctgtagtttgtaggatttgttttgcgtgctcgtttatgcggattgaaatattggatgaatatgtctgttgatcaattggggagagatcttttgtacacgatcgtctctccgccttttaaacttagatctaggtagtgatttatagattagcagatgatgataaagtttgatgtgaataaatagcatcaaattgtcttgaaaacatttattggatttaatgagagtgcttagggacatatgagaaacatgcagggtatgtttgacaacaatgcagcataggtttgagtaaaatatctagtcaaaaatagaaggtaggaacgctggggtcccttttgcttcaaatagactatcacagtgcttctaagggttttccaaacgtatgcatatcgtgttttaaactagttgtctgtgttggcaaatccaaacgtatgcgtatcgcgttttaagctaatagtctgtgttggcagaatcttggtaaacatcgtatcgtaatgtttacatatgcctatgttcatacttgtcaagcgtgaattttgtattgagttaatccttgtgcagttttatgatgttcctatctcattgttgcaacacattaccctttatttcttgttaatttttttcctttgaatttggtttctttatgtgatggatcatggattcattttcgtaggaaaagtaaggatttatatccattgattaaaaaaggctgtagagatgttgattccattacacacactcttgacctccaatcacgtggtagaaactccaacaattgcaccacatctccctttcaactgaagcacaacttttgtttataaaaattaaaacaaaatatatggaatgcaagtttagcaagaggcagcaaaattttagtatagaagtgggaattagacagcataccagatcacaagtcttgtggtttcagtccatcatattaaatgatgggagatagacgaagacatgaaccagaagatcaaagtaggatagatgaaattaggatatgtttgcaatgtgaatacagtagtgtcactcaagtataaagaaaagtttaccacaaaactataagctctgcattgttgtgcaaagtgtgaacccagtgtcagatggtaaatagtcactaaaaagtaagttcaatgttgcaggaataagg

SEQ ID NO: 4191 - DNA, 3257 bp, Medicago truncatula
  Intron number 1 from transcript Medtr8g009250.1 (locus Med tr8g009250) derived from phytozome v7.0 (chr-ID MtChr8; po s 1264913 to 1268169 reverse strand)
cataagtatatgcaaggtcccgggttcgaaccaacaccaccaaaaaaataataaatttaaagttttgtacaatattttgccaaacagcttttaacttcaaaataattttagaactaaaaaaaataaaataaagaaatcaaacaacttttacctttttcttattgagctttattttaactttattttaaagtagcttttggaccgaaaaaaaccccggcgaaacagtaccttagatttgattttaagcttgggaacaaaaagtagtttgtgctaacccgagaagagtgtaagttaaccatgcagatagtgagatagtgtaggtaaattgtatgtttttcaccataaataaataaaaataaataaataatttgattgagtaagaaacttttccaaaatttgctatacctcattaggcatggcaatggggcgggatggagacgtgtttcgtcttccccatccccatcccatacttccatatacttatccgttaccctacccatatccaacggggatgagaaattgaatctcatccccatcccgttcgggtattcccaccacatccccgtccccgaatcaattttttttaataaaaaaagagttttttttaagcttcaatggtaatgttgtaatgcattatccaacaatttgcgctcattttaaaattttgttaccgaataattcggttgctcctttaactatccgtgaaagttcttatatcatgacaattatcaaaccaaataacatgcaattatcaaaccaaataacatgacatatcattatcaacctccttaacaaaaacaaaaatatgacctttctacattcgggtagggtttgagtatgggttcggggtgggtaattctatttaagcttaacagatatagtctaagaggcataacttttattcaatcaataatactttagagttttttctcattttttggtggattccaaaaccttattttcacaagtttgtcgcttgcaaacttgttcttttcaatcgaggtttagcgcttgctagcctacgcttccgtactgcgtcagttggtatcagagcatgtttctcatgttcttttgggagatcaaccggttaggagggcatatattgacggattagctgcgaccatcaaagctgtggcggatttgatggcggcgttatcctcaacaaccacgactcgaacgatggtgttgacggctaatattgtcaacatcaacaataacaaaaatcaaaacatgatatgtgaacaaattagggtttcacgtagtggaaacaatcgaaatattgagtcggtgttgcaaaaggagactttgacattcaaatcgagcttttcacttgacaataatctgattttcggatcttcgttgtcgcaggtttatgtagatgatatattcgatggagttagtgaaaaaactgtcggtcttgatgatttattagataagatcggtggattgcatgcaccaagcgctaaaagttccattaaaaaaaaaatagcatgattttgatgacttcatgattgggtttggtggaagcagcatatccaataatgggaaagcaaccattgagaagaataatcctcggaaaccaactgccatatctcataatggccgtttttagtatttgaaagcacaacatcttcaaaatcattcctggactcattagagcaaatcactaagaatggttctaaacatacaagtggcagctcaacacctccccattatcgaggccttctcccaagccaacgaatgtttcaaactcaatcaacagctcaagtttatcatcatcaatagatgaggttgagaactttgccaagggccgagtgtagagtaatcctagtagaaaagcaaatggcataacatgtgtgcaagaaatcaattcagcaaaccaaatattcaacaacaaattgaaaggtcttgttaagttatctaccaatagtgcactgagatattaaaccaaagaacatacttgtggttgtggagaacaagaactcggagtcgagttcttcatagatggaggagactcacgtaggaaggtttccttagtaatttattagtattttattgtttaagtttatatttattatttgtttgttttattttcagtttgttatttttaggcccatcagagtttgttattttcctttttttttttggtagtcggggtttaaaccctataccttgcatatactatccattgtccataccaactgagttaagctcacgaggaggactattattttcctatttaagcttaaacagatgtagcctaagcggcataacttttattcaatcaataatattttagagagttttttcttaatttctggtggatttcagaaccctatttttacaattttgtcgcttgcaaactaaatcttttttaatataggtttaacgcatgctagcctacgctcgatttagagtgagtttgtttgaacttaaaaaaaaaacaatttatgttaaaacaatatctatagatttttttgttgaaatttaaaaaaaataaaaaaaataaactatttatgtttgcatctataaaaaaaaaacttttttcctaccgaattatccctcttaatagatacaacccggccacaacacccaaacttgtttcgtttgcaaagtgtttttgcagcatttcaaaagccactgtcaaatacaatgatcaatcaaaatagaatatagaatccttaaaaaatttgaacaactctcataacataaatttctttgtttcaacctattaggtgtttggtttattaacgtcatggccaaacctcatgaactcaaaccattatacgcaacacttctcaacaaatgtttttcctcgaaaaacataaacagcctcaaaataatccatgcacgcacaattcgtttaggtatttcacacgatgatttcattcgaaccaaacttgtttcttgctatgcttcatgttccaaattgcaccaagcaaatattcttttttcattcacaaatcgcaaacccactttcctcaacaactctctcattagagcctatttatctctcaacctatttaaagaaacgctttcgctatttcgtgaaatgaggttgtcttataaaccctttgattgccatactttgccgcttgtgctaaaatcttgcgctggtttatcggcgttaaggcttgggaaacaagttcatggagctgttttggtaaatgggtttgcgttagatttgaaaaattctaatgctttgataaacatgtatgctaaatgcggggagttagaatttgcgcgcaaagtgtttg

SEQ ID NO: 4192 - DNA, 5377 bp, Medicago truncatula
  Intron number 1 from transcript Medtr3g080130.1 (locus Med tr3g080130) derived from phytozome v7.0 (chr-ID MtChr3; po s 18746202 to 18751578)
tctgctaacgacaccgtttcgggtactttcagtgtgtaagtcacactctttgctttttttgttttgaaatggttgaattttgtgtaatgcatgaattggatgtgtatttagttgcttttgttattagcgcttatgaaaatttttatttttttgttgtttttttttctcccattttgatttttgatcttatgcattgatttttattttattttattagaattacaatttacaatgaatgagttgcttaattaaatagttagaatttgagtaaatcaccaattcgcccccttggaattgtaggggtcgagaatttacccctttaaaatttgcatataggcaaaaaagatctagattttgaatgaagtctgggaaatttggtcctttgggactaattttagtaagtaatataattcagggactaattttctagtgaatgatataacctaggggctaatttgctattaagtgatatacttcagggactgatttgacagaaaattagatacaagttaatagaaggaccaatttgctcgacgtaattcaaattgaaggacttttttttgcttactcacgagtaggggtgggaataggccaggccaggctttgataggcctgagcctggcctacgaaataaatcacaagcctgagcctggcctatggcctatcataggccgtttttctaggtctggcctgacctatttaaaagcctggactggcctgaaagcctacttacaggcctacttcacattaaggccatcaaatagttcatttggcctactaaataggttaaacatgtcttaaagcctacttaaaagcctatttcactacaagtaaatttcaactagattaaagcctacataaaagcctataacaacaaagcctattaagggactaatagatagagaaaaagatgtttatatttttaatatatgcaattattttaatataaaaaaatatttttaataaataagtattaataggccggcctattaggcttaacagtctttttttgaagcttaagtttggcctatttaactaaacaggctttctaaaaagcctaagcctaggcctatctactaaacagtccaggccaggccagaccaaaacaggccaggccgtaggcccctgtaggccggcctggcctattcccatccctactcacgagtttatgggtggtggaggtaaaggcccgtccgctacaattttaggggctgattggtaatgtactcgttagaatttatttgttgtgggaggggccgtgtaattgaagaaatcctttcaaaaccctctattctctaaccatggctcaaccaatcaaatctaaaataaaactttccatttttgtcacaataaaacacaagagaaaacagaaaagagcaactagtaacttttgaacaccagtttttttttttttttttgtcataaaaattgaaaagttggaagatgtaaactttctctaccatctagagtgagcttagtccatcatatatagggaaaggcctaatggcatgatagtgttatctctgtttaaaaatccatatgtagggaaagtcctaatgacatgttatctctatattttaaaaaaatccagacacgctttctagtattattgctactttctgtagcatagcagaggcttgggcccctgtagggatacacctagcttcacctctggctttatgcttagttattccctaaatgctactgaccatattttcccaaccttttattccttctaatctaatgttgacgttctatattaggggtttaacaaagtgagtttgtgcgagttttaggaggtcaaattgagggttgatggactttagatctgattaatcatttatccaatatatccatggcatgtttagtggatacatgtcatggatggatttccaacccgccattcaaattaattatattttttgcattttaaatcgattatcgatccccccgttctctattgatgctttcatcccttgtgcaccccatcaatttcagaagttctatccagttcacataagtacaacttgttgtgattcagatgagtgggtggcttggtgcggggaacggcttcaagttacccattttccactttcaatttgtagaaatcaccatcgacttctcaaaataaagtctagcacatatatgccaaagcatacggggcaaccaaaacttgtaactgtggtgactgcaaagataatattggcatatttagctttttacaagagcttcacaacagggctgctacatccactatttggccattacagccactatgtgaaaatgcaacaacagggtttcatgtagcacctaggggctgctacgctatgccgctattgactaaagaaaatacacagttgagttggattggacattgttatgtcttggtgggctggatagataatgatattaattgatcattttgccacctccagcgtatgtgtgtataccttttccatttggtaattgtccaactttctctcaagacttaccttcttttcttataaatttatactctatgatgcaaagtggtgtgagaaagaacaaagggggactatgtgaatgagttaggaaaagatgaaggtagctatgtgaacttggttggtattaatctaaaagattagatcttgccagtaaaccatatggatatgagaaggaagcaaacacgctaagaaacatgttcaatgggctacccacatagttatggtttccatgtgtattagttcatttaggagttcactaaggttgacttatagtcagcaccaacctttgtggaaagcgatgaagcaagcatgtctgttgcacatcaatattttctctaaggttgctaattgtttttcagttgcaggtagttggtagttacttctacgttgtaataacataacactacttctttgtatttggttcgacatcctgaaaagtaattcaaaaataacaacccagattatggtagcttctctcaatttctctctgcacattttctccagtttctcgccctttttcacactttttcacctattataattctgatatggcatcatcagcaaggcagtcaaacttaagattttattcaaaagtgaagtaaaattctaaattgctgaatcgtaacacaaattttaagattctataaaaaaaattaaaactcatatataacacacataaattcatctgtatgcatatatgataaggatgtcagaatgcttttttttttttgaacaataaaaaatggaaggatgtcagaatgcttgaatgagtaacacactacaagaacaactatttatatgcatgttaagtacaatttacaagagaaattaaaattagcattaatgtttttaaggtgttgtgaatctaagaatgcaataaaccctatgatataatgaattctcattatgcttggaaagcgaaacattaattatattatattttcggaaagtttaatttagataatctatttggggaccaggtgtttgcgtcttggtattttgtacttgacgaagttattttgtttgtgatgaatttgagttatgtatggcttttttttggtcaagtagcctagtggctagaaattcacctttttaaagtgaataagtggggtgtccggggttcgatccctggcccctgcataggtgcatatgagttttataaactttgcagaatcttatgattcatgttacgacttcattttcccttcctgattctgagtaaaatattgagtttaactaccttgatatggactaaatcttgttgtagacttcatgagcaaagaatatatatgattcacaaaaaggtgcacataagtttgttgtcttgtctctgcctgtagttagtaggcccttgctctttctgagaaacatataagttgcggggattgtttcccaaatgaaacttcccttacctcctcttggccttgacactttagtttttgtagctccagtttaccttctttttttgtaacaggctcctagatcatggtttcagaggttggggtctgcctttattctagcaaataatcttttgttgtctgctctctatgctctgaacattgtgtatttgattttatatatgcgaatggtgttattgtgacaactgacaagcagtctatggatctaatttagctgcttatttcaaagataagaacaaattttaatttcaatcaattacttgagagacggatggagtcagtatataataagaaaaaagcaataacctcagggttcaacccgaaattatatgttccatatttatttgtatagtatggagttgactcaggcagctcgaccccatcactgtcctcagtgggaagaacatatagctgtgtgttcctattcatggatacagtcgggggttgactcagctgaaccttattattgtcctctgggaagcaaggatgacaagcaataactttagtgggctcaggccgcgctcaacccttcatagatgtattccaatgtaattatactgttagacttgactcgtctaagcttcatcaccttcctctgtttatgtgacaaaaaaagtagcaattagtaatgatctattttctcttcactaaggtcaaacttgtatcgctacactggggtttttctatccgtatcttgtcatacagtcattcttatattagtgagtcattgtttttcaaatatgaaaatatgacaaaatatatattagcgagtaatttagagctaagaagctgagttaatagtattttaattttcaagaatgtgcactttatgcctgttaaaaggagtattcagagctgtggttgagattctatttctgattgtaagttgtagtgagtaaaatcctttaagtcatcgatgatattactctctaacttcagtgttttttcttcttggtgacaacattatgttttcataccacggaagcaatcatatacatacattaagttttttcttctgtctgcttcattattattattataataataataatttaattgttattattattcaatattgttccattgctttggattgttattgctattattgttgattgttcctattttaatacaatttaactaattttttaattgataatttaaataaaatgataaaattgtttaaatgaaggggtaaaattgaaaaggaaaaatccagcccaaaagagtgttgtatcccctttatatattgatatagattattattattatatatcaatctgtctgtcttatctgaatgtgacagaccatttttttcctttttcttcttcagttgcgttaattgattgtataatattgtagcaagaacttgctagccaatgcagagtatctttgcctgagcttgtcctcaagtatttatgcaatctgtcttattgttcagggtttccaaaggtgtgagagatctacctggcagct

SEQ ID NO: 4193 - DNA, 1215 bp, Medicago truncatula
  Intron number 28 from transcript Medtr8g021940.1 (locus Me dtr8g021940) derived from phytozome v7.0 (chr-ID MtChr8; p os 4228451 to 4229665)
taatcccacggtatgtgatgcatataatgttgatagtttgcctttatttggctgtgaaattgggcttatcagtgtgtacttgtgtgttctattgttagatatttttatcatattctgtagtttttttttttggtaattattgtgtactatacttggctcggttatcaactcggcgggggtactgggtcactgggtcaatggtcgaaccagcgagtcattggtcgaaccgcataactgaaccggattaaaccggataactcggtctatatgaaaaatgtgtacttgtattaaactgatatggatcagattaaactaatcactcaatctcaaaaataaaaataaaaaaaatcataaaacctaccaattgtcaaaatcatcaaaattaatcactttatatgcacatttcatacctacacaaatgcataccatatttaaatgaatattaaaaatatatatttagagagaatcaacaattattttttttgaataaagagagaaacaacaatattaaaaaaatatgtattttacttataaatatgttaaactgggaacgttaacggtttattataatttaaaatagagttaaattaagtttttttacgagttaaattaacaactacttgaatcatgggagcaatggccagggtgttgctttgtctagggaacattaaaaatataataaataaaaagtaacagttatcataaaaaagcatgtggtgtaatggttaaggtttctgccttggttgttgctggtcgcgtgttcaactcttgcccatgccaattttaagattttttattaaaatatcagaagcgcggtacactgacccggccggttttcaaaaaccgccgggtcaccggtttttaccgagtttgaccggttctttccggttcacaccggtttaatagcatacccgatccaatacttggctcgagccgttcaggtgtccgcttcccggttcaaccggccggtccgagccgggttttaaaactatgactatacttctatcttcggtcataggccgcagtgcccacatgcaccatatttttatgccagatttttggcttgctaccattatccactatttgccattgataacatttgataaaattatttgtgttattgtgcatagcaatgtcaatctgtatcttttaatttttttttacctgtttttgtttctaggttcttgataggattaactctttggttgaacctag

SEQ ID NO: 4194 - DNA, 2151 bp, Medicago truncatula
  Intron number 7 from transcript Medtr4g079460.1 (locus Med tr4g079460) derived from phytozome v7.0 (chr-ID MtChr4; po s 15982922 to 15985072)
atcctgttgatttgccaactcctgcaattattaaggtgagaatctcagattataaatatggtactttttttaataactttctgtcgtatgaaaatttgaccaatagcaattgttgatatgtggagactactcatgaataatttatgtggatactactcataagtatcaaagttgttgaaatttggggcctaacacaaccccacaaaaccggcttgtaaggtgaggagtgcctcctctttataaactcttctcaagagtcctatctatccgacgtgggactaaatccaccccctcaaagccagcacaacgaaggtgttggaagctgcaatgaaggcaaactaaaggccgcaattaaggcgactaggggcagaccacaataaaggcggaatttctaacaaaagtatacggagaaccctcccataaaagctcccataaaagctagctatcaagggggaagacccaaaccacttaaatactccaccaagcattccattctactcaatatggaactttagtagcgcaaaatacccatgtctctatcaactacctatttaagtattggtaaggagagtagaccatgtggaggatagttaaatacttggatattgattttgcgttgaggatcttcaaaaccatgggagatccccaatgcaacataatatctagactttactcatgataggatatcataatattatttggtcacgtagctggtttcatcaatatgggtgaaaatgtctttggttgttctattttagaacttttgaataattcaaatatcaccttgattgtgtactttaaattttagaccatgcgttcataagtatgtcatatgatttccaattctacacatttgaatcttgacaattgcttcttagctatgttgttaatcgcggatagcaatagcttctgctgtaaagactaaaaacaacgtacaaactacttaaattccaataggatacatagacactaaaaaaatagcaaaatacaaaaaaaataaaataaaaaaataatcacttttgctccccaaggatcgcgattgtgcgattttggctcgtcattatttttggagcgatcttggcccttcatgttttcctcctttgatttggcagtcccctcccaatttccccccaaatttatgtcaaggaacatcacttattgatgtcacacccacctctcattgccattgttatttatttaataaaataaaaaaataaaaaacacccaaaaacttgaaatcctaattaagggtttcatacgctctcatgtctacgagctgattttttgcattttttcattaaatgatgccatgtcagcctaaatttggaggggaactgtcaaactacaaagggggaaaacttaaagagccaaaatcgctcaatcgcgatgctagggagtcaaaaatgcaattaaactttagttttactaaagataacagtagagaagtacagaaaaatagatatacactagggattcgtattgattggtgttgaaatttagggtctaactcatccttacaaaaccggttcataaggtgaggactgccccctctttataaactattatcaagggtcttatctatccgatgtggacttgagtttttcccaataattgggttcaatttgtatcaacttgagatacaactcctatatattgtaagatactgatgaccatggttggttggtaccttggaaccacaatcggttagcaaatcagatatgtcaatcgttggaacaatcatggaatgagatctagagtagcaatgagaacaagaacagtagtatccagtgcgaagttaagggcaatgtgttccataaggagaatataatatctcctttgctttactttcttccttttaaataattccaactgttttttttttaaatttcctgaaaggattgtgttataaagaataaactaacaattctataaatcagcgttgactttcatgccaagaatagattagtagctttgttgagtttttcacccatgattttataagcgccatgaatgaaaatttgtctgatgattcaatcatgttttgctaatttatacgaaaagtatgcatatatttgtcagggtctttacattcgtgtctgcaattatatttttgcagccagttgaactctggagtggtaaacagttatttaa

SEQ ID NO: 4195 - DNA, 1812 bp, Medicago truncatula
  Intron number 2 from transcript Medtr5g037140.1 (locus Med tr5g037140) derived from phytozome v7.0 (chr-ID MtChr5; po s 15588265 to 15590076)
ccaaagatctcaagtctaccaggactggttcttaagtatttgcgatcttagtaataacaattagcatccttctcattcaattcatcatgttcatcatcgaaactctaagctacaaagagtttctgtcaaaatttgcaagctgcccatcattctccaactagcattacatattctttgtggttactgctagtacaaaaggctcatttaagtgaagacttgcagtgtatatatctaaacaacctagaacaccgcatacgatgttttgttactgaaccacaaacttcaacaccgatgtgcatccacaatgatcacagcgcagtcttaaacctaacagactcattaatacatccatggcttgaaatatctataataaagcctaactttcaaaatgcatccggatgaacgcactaggcccaaaagggtagttcataaacccttgtagttagggtttaggtttgttttttgtttttgaaaactcggtatccggcttaagagggattcaatcccaccgtccatttgtgtgttccttctatttgaaaattttatgaagaatcaaagttaaaagtgatttttctatgaaaatgtattttgcaatcagcaataaaaacaagagatgaaatttgaagaaataaagaagaatgttgaaaacagaggagtgtagagatagataccagatctggaacttcaaatcgagttcttcaaactgaaacaggttagatcggagagatgactgagaccgattggagaatcgaaagcgatagcaaaagacgagtgttgtagttaatccctagccttgtactcgaaataatttgtagccaattaagccactaataaaattggtagcaatttcattcaccaaaatgaatttgtagcaattttaatgactaaaatatatcaatagtcccactaaatacgaatagtttggattttgatccctataaaaaaaatttaaaaacgttgtttgaaaaatatttatctttttaaaatagtacttagactcaattaaacgatgattcgtcagaatctcgtctgtatggtagttgttaactatgcaactttgttcagatctttttgatgtgagtattttgttaatttacaaattttaaaatcaatttaaaaaataagaaaatatatttttgaaattaaaaaatgataatatgttagttgttgactctgcttttctctacaatacctttctcttaattatatcttcccatatacaaactcttgttttgatgatgtagaagcctccactggtggcacgatgagttgcgtcgacccttcgcaccaccctcttaccaaatcttcaatgattctgcttcgagccactttctctttgtcgtgtggtgttgacagttttcttgttgtggatccccttgaggttgtgaagctgattggttgtttttaacaaaatcagaatttttattattgacaagggaagtcttttatgtttgtcttgttcaacccatgtatgtttctctctcgatgtgaatgttgtttttgctacggtggcatgcttgtgtgtggttcaacttgtgtgcaatatgggctcgattgttaacaaatttgggtcgatttatgtggctcgagggtatagtgttggattcatccttcgatatgagttctatgtgcgtcaagagctttcatgttcttgtgatccactcatgtccttcacgaatgaattgcgactagttggtcataaatagatataagttaattgttgtttctcgtagtaatggtgggttcatggatttgtaattgtgctagtgtttggtttcagtcattgtttggctcgaaagggccttttgcttg

SEQ ID NO: 4196 - DNA, 3407 bp, Medicago truncatula
  Intron number 3 from transcript Medtr8g101670.1 (locus Med tr8g101670) derived from phytozome v7.0 (chr-ID MtChr8; po s 22110603 to 22114009)
gttgggaatacgtggtatgtttttgccattcaaacataggtcacataaaattttatgtttttctaagccttcaaagtgctccagttatgattcataatttcatacttgtgcttattaaagtaaaccattatcagatggattggttcaccttctcttgctcatgtctcgcctaggatattaacttaaaatcacaatctatagaatgagggtttcaatattgtccgagcagtctaacttacaagaatcagcatatcttgcttctcaactgatatgaagagtttatcattgaactgtggctactgtgtttgttagtcatttaatttcgtttaaaatttcaagtattaggctgctaaataaaaaagttcaatttataagtctattattttctgcatgagatgaagccagatgcgcaagcctgcatctgtaacagatatggccagattgcatctggaatagaaacagatgagggatagacttgacctgagatgggtttaaactacttccaggactaggactggtaagctcaagctgcatctagaacataagttgggagttggtttgcattcaaataacgacaaggtagagcatgtcttggacaaagactgagctcattctgcatctaggactaggatgagactacagcacttatgaaacaaaagccgaggttagagagtgcctgggacgaggatttaagcttgagaccttataactttctcatgtcaatgctatgctagtaatagaaaagacagaaatgctaaatacaaacgcgcagacactcactttttagcacacgcctgtatacactgcgacgaccttataacttgttaactggcttaaccagttggtgtatttttaatttttgtatgactttgttcctggaaaaaagaggccaacggttgctcggggtctttagtcatccatgtgtgactgcaggtccttggactctagatccccacctttctaggttcaacttctttcccattctattccaaaaataaaataaaaaatcaactgggttattgcttcagcagagctacaacccataaccataactcctttaaaaactaccaaccccacctaagatcctcactacccaaatcaaatccaatccatgaagaagccccaccatcaccaggagaggaatccacgaaagaaacacccatctaagaaattcgaaacaatgattcccattgtggaagtagcagaggttgtttcttcagcaggtccttgtactcttaagccactcaaagattttcaatttatgaaaccatcggaattgatgcaaattggctttgtctttggtttatgcaacctgttaatttttttgttaattttataattatttgatcttacgttgcaaatttgaacttgagtggttgttgatggtggttttaattagaaagaatggtggatagtggtggtggttggatggagaagacccttcaaattgctactgcttcgtaactgtgaaatccaaagtaaaaaaaataaaaatgttatgcgaaactgagtaacaagtggccaaataaattgtttgaaatatggatgacgtggtccaattaataagagtgtgatcacgagagtttgttttagcatttgacgccagcattgctctagaaaagaatgaactggacgaataactttactgtatgacttctgtgcaatagatgtgaagtgttttaatctaagtaatagttgtgctttaagttattttcggataaagcagaggctagataaattgtaagatgggaagactaaagatctcaattggttgtgacttcaaacaaccagacgacaatcgctagcctaaacgaagaatgagattgtaaacctccaaagtggaatgaggtcacaaataactgtgtcttctaagccttcaaagtgctttagttatgattcataactgttcatattaaagtaaactattatcaagtggattggttcacattctcttgctcgagactcagttaggatattaacttaagagaacttctactgtgcacaagctagtttggttgtgcttggtacacaattttatttatttatttatttaattttttttttacgattgaatgatatagaggctcacgaaatctatcataaactcatcacactggattttcttctcacgtactcccacctcctcaaatgtttgccccacttgataacatctgagtccttgatatttgtccatcatcctcctcgtccctttttgcatcttcttcagacagactcataacttcatgcccaaatcctaaaacacgttgctcacaaaaaatatcacttcttcacagtgaaactagttcaaatagaggaaactgaggaagtgagggagggtcatgtttctccaacaattcatcctcaacagaaatttaaatggtgtttttctcacaatttacaccctgaaactaaatttcaaacccattgactgaaagtggggagactcgattacattaatcccgctttaacagaacccattgaagtgagaaggaaagtttgactggggaggtaaaatggatgtcagagataaagaaaaaactctggtaggataggaagagagaaaaagattcattgtagagagtggactattaaatatgatggatttctttgatccgatggtaaatatatattaggcatgatgcaacacttattgtacttgtgcatgttagaattggccttaacctgaaatcacagtctatagaactgggatcagcagaccttgtttctcagatgattgggggagtttattattgaactgtgcttgtcagtcatttaattttttttcaattttcaagcattaggcttctcaacagaaaagcccacttggtaagtctctatatgtagttttgtgaatgagatgaagctggactgcatctggagcagatatgactcgatgcatttggaatagaattatagaaacgggcgggggattgagggtctagactgcatccagggctcgaacttgtaagttcaagctgcatctagagcataagtttggggttggtttgcattcaaataaagacaaggcagagcatggaggagatgccagtgaagattaggcactgaagtaatgactaataacccattatatgatgcatgaaggatggtaatgcattgataccatgttgaaattataaggatttaggtacaaaaggaaagaaagaacagaagctgaagactctgaaactgattgatttgttgtgataagatgcagtagatgacacttaattctaattaaataagaaaacaaaattatgaaatatacaacatatggaaaccgtttctaacagattatccatgatatgctaacagcggttattgttattgttggtgttgtgttctttattaacaaatgcgttgatcttgttgcaggtcaagaagcaccacacaccattgctgaaggtttg

SEQ ID NO: 4197 - DNA, 787 bp, Medicago truncatula
  Intron number 8 from transcript Medtr8g128540.1 (locus Med tr8g128540) derived from phytozome v7.0 (chr-ID MtChr8; po s 30040565 to 30041351)
cagggtaatattttctcactgttctctctttctccccttttttgttatttttctgcacctaatattctcaagttccattgttaagcagctcgatcagcagtatgcataattgtcatgttggatttggtagaatcttttaaattaacttaaaacaaaaaacttttatattaaggggaggtgcaagtgattttcttatatttatatatttgataccttaagtgtatatactgctttgcttgctggaacctctaatactgtagttttggtgactgtactggaaaaatgtagttttgttaattgtggtgttcattttccttttccctataaaaatattataagtgaacttaaaaggaagcttttggtaacagaatatttttttgattttggctacttgtagattgacgtacctcttagtactagatgacttgctagacaagaggagtgccatagacactctttccaacattctctctaatactcgctcttttattgggtgaaacatatgtgagtctcaccactttataagagagtggctgttagaaagagagtgttgctagcatttctcactagacaattttgcatacttctgcacctatagtttctattttcaaattctgtttttttttgtttgtaaaaatcatcttttctcaggttgaaaatgtgcaatgattttgatcattctgttgatgcatttcttggttcatgggataaaggggtgccaaagttgaaaaaacagtgcatttcactcttgaagatgttttcatctaaattattgttttgcacaggt

SEQ ID NO: 4198 - DNA, 3921 bp, Medicago truncatula
  Intron number 2 from transcript Medtr6g044220.1 (locus Med tr6g044220) derived from phytozome v7.0 (chr-ID MtChr6; po s 9384081 to 9388001)
agtcatcaaatcatatcttcctccattgtgaggtggtaaaggtcggtttggcacaaattaatgaggtggttagattttaattttatggttccgccgaatctttttatccgttgggaatgttggagtgataagggatctattaagaggattctgaagggttatcagttgatttggcatgcggcggtgtggaccatttgaaaagcgcgaaacaacctcatctataataatgaggtgtgtggggtggattcgataatagaggacgttattgttctatcgtaatatgtgtaaaaacataagttgagaaccaatatttgattcgagtggaactcattaaagatggatagtcaaattcttgaaaagagattaatcattagcaaacttcgaagctctttcatagatatcagtatcattatcaacaatcggtactctacaagtagattaaaattcaaatagatctagttattgatttaaatctttgttgactaattatccttgtctgaattattcttccaattgagttttgtttgtttgtattgttttgttggggggtttgatcctcttgttgttaagaacttttgtatctttttattccatcttaagcacattttgtgtttgactttttattatattttggcttcctaaaaaaagttatgtgaaccaatataaatttagagcgtgctgtgttttcgtttggtgattgaaatggtagctaagctattagaacggtttcattttccgcatctagtctccatcatgacaacgaagattacgctgcaatttttgtttaattggaagaatacgatagttttcatattttaatagatttatcaatctttttttgtgggatgcatctgactcatgcaatagtgcaacgcatgagcgacatatgagaaagtccagtagtaagctactgaggtgacttctccccctcaaaaaagtaatttaatatcgtgtgatccgttggaccacatatcagatattaaactgataagaacatatattatcaatcttatatagacgagatcacaataactattagaaattcatgcatgttggtgaagaaatcagagttcagacatcaatctcaatatttgatctaacaattttgatatttttaacagctaagttagtactcgtggatgataaaattattttttcttcttaattattcaatgatgactatatagaagacacatgtttatcaaacagttgtcacaaaccacatttttcaaaccaaattgaaaatgaaaacttcccaaattcataatatatataaatggaaacgtaaggtacttttcctttctgatagacttgaaaatatatatttgtaatgtgttatattcaaccaacgatggtgatgctgttgtttaagattatgataactcttgataaatcacaatcaagaagacgatggttgagacaaatgaataataaataaaacacaacaaaacttatattaatacattaaaaaatacaatatttgactaactatggattgatttaagaggtaatttttttttttatctccttaaatattgttaaaatgatacaaatttctagaatatttgatatattagactacggtttaatgtatgtgaatttttttgctaacttttaaaaaaaaacacaaaactacacacttctacttctcattttaatttaagttgtttgcttttaaaaataaaagtgaaatactaaaaactaaattattttcaattattagttaaataaaataaaaatttatcaaaatgtaaattattttaaaagtgaaatccttgcatgactcacgtggatgagtgcatctcattcagtcatttctttcattgctttggaaggacaatgacacaaaatattccattccttctgttttactttctttcctccattcaaaaaaaaatactttttctgtcctttctttacaaactaaatcaaggtgacacccaccgtagctttaattatattcgtagcttttgttttttttttatacttaatgggtgtttggaacaacgttaactttcaatttctcgcgtttcaatgctcttctgccgtgatttttgtgaagttaaacattgaagttttagacttaacgtgcgtttctttcttttttcaccgctaaaacaaaaaaactacttaacttatgcagctaggttcacttttactaaatttaggatggttggttgtaattttgatttgattttactcaagtctcggccgaacactagattatcagatcctttctcttgagaagatgaaagttaagccaaaaaaaaataaaaattctacacataaaattaggccttgatttaaaaaaatatgtaataagacaatattatgcacttctcacttaatcttaccctctcaattaatatattcatattatatctatgatcaaacatgaccatatggtcaatttggtagaggcaacaaacgtacctactagaacatggcaagttggaaacatgaagaacctgaataataagtcaaagacgtggtgcaaattatatggcaccaaagctggcagtgacaatttatgtgcccccactttacatataaaataatgtgtgacatgaaatttgacataaatttagtaaccaatgataggctaaaatttgcagttctatcacgccactttatatatgtttgtttatatgagaacaatatgcgtgactatgataccctacaaatgctttgtatcttcatgaaaaatatattttgtcttgctatatatctaagtttctgagaatgttctaggagaatattttaatttttggttacaatgttcaaggagaatatatgcctacaagttgtcgcatgacataaacaaaaatcaagataacttatgtacaaatgtaatctaaacaatttttttttatattaatttattaagttttcaatcttaatgttttttgtttggtataaatgatagtttatttagagttaggtcatgtctataaattttaatttttttaagtaaagagtatataaatatcaaaataaaagaggtaaaaaaatgggaactttaaaaataagggtcaaattttaaattggggcaaagttgaaattttttaaaggtttagggaccaatatgtgaaatttgaaaaattgttgacctattgtgcagattttgaaacataaagagagaccaatctacaaacttgaaaaaattatagaaatcaacttgtaaatttaatttcatttggtaatgaaatatcttacgaaattccggtagaatgatcacataaacaacaaagctctatctaaaaaaaataaataacattattttttgttcaaaacaatcaataaattctgaatattatgctaggactgggttttaaataacgaattttttaacactccattttttaatctactcatccatgttggtccattgaaatgatcatttaatataaagaatattggagtcttacgtgtaaaaataactatattccgtatccatgatcaatcttgaagattagattgtattgtgtacgaaaaaatattttggagatcggataatttggaactagatttaggtgtattgtattcctggtatggttcttaatgtaaatacttttaatctcaaaaccataattttctttaaaaaaatttagtcgatctttaagtatgttatcaccacaaaaaagtgtaaattatattaggaactatatgaaaatacatacaaaattgcacttgttatgatgtgtcagatgtgtgttaaagtcacactttagatgaaagtgtttgattagacaacacataactcataaatccaatattttaagattttagggtgaaatgattatcaactcacttgtttggtcgaccttagtctaatgcgttgattcatcttgtttgagattaatttttctaatgtcttgttctacttaatgcagaagtacgagagatttctggtgttggatc

SEQ ID NO: 4199 - DNA, 1715 bp, Medicago truncatula
  Intron number 13 from transcript AC146630_6.2 (locus AC146 630_6) derived from phytozome v7.0 (chr-ID AC146630; pos 2 3124 to 24838)
ggtggctcagcatgtggcaaacttaattaagaatcagattgcatgtacaaaccaatgaggtctggctctttggctattggtttgtatgtgagtttccaagttaaaaggattgaatatttgataaatttcataatgatagctcaaaaaagcttacttgaatttctttatcaatgctactaatgcatttgttttcttcatgcttatcatcgctaagagtattcaatgactttgtagtgctcatttcctgctaagagtattcaatgactttgtagtgctcatttcctaatgtagtggtaaaaatcagaatttgactcctttaagaattagagcttagacatgaaccaccttaggtggcatacacccacacacatttgtgatatgtggcaaatacattgaaaaaagagatgaaattactaaaatacccctgaaacatggggtgtacatgctaggtgtataaaaaagggtgtctacctatctttttcctaagaaagtgatgaatttcgaagggtgaaatgtataagtacattgttgattgaaaaacctacatggtagaacattataatttcataattttctatactatataagtacatataatttatcacaaatacagtttttgatttttcaatcaccagttataattttcatattatccactatgttgtgcctattacatttataaaacaatcaaagctattagatctgtagggtttttgaaatgaagagaatgttcgagaaaagttaatgaagtaattatgtggttttatttgaatgagaaaaaccaatccagatgaataccgaatcaatatttagggggtgtttggaagagtgtgtatagacttatcttgtgacttataagcactttgtaagtgtttaaaagaacttttgcagatagctaaagataggcttataggttgtttccagttattttcataagctccttagttaacttatagaatacaacttatacaaaatctatgcagagactaccctcatgttctattcgtttgtaaaaatgacttatacaaaatctatgtagatctacctaacttaggttgaattctaatataagtgcttattgaaaaacgctggattaagttgtttactcaaacacctccttatagagatacaagtagtttgcttaatgctctaattaattgaatttcaacaggactgtaacaactaacaaagttaggtagaaggcttgggacctaggagtgtgctcctctctaggtttcatgttcgaatttcctaggtggcgacaattcctgtgttaggcttcaattggtcccttcggtagtggacgatgggattggtcccccccggagtagtcgttccttgggccagataccaagtttccaaacaaaaagttaggtagatctactaactactcaaacatgagcaactatacagatgcgacacacactaccagatgccaactgcattctatgacattgtagcgcttgtctccccgtcgtaaaaagtgaaaaccaccttagttgtagaaagagtggggtaaatacttttgtaattaagacaactagccatgatcacggtgcttctgtttctttgataagcttccctaataatctgtttgttctcaagttttttttttcttcctcatttactatggcatagaatgattattgtagcataatatatagtttattctggccagagatttcaaagcaggttccaagtagcaggttgcggga

SEQ ID NO: 4200 - DNA, 804 bp, Medicago truncatula
  Intron number 2 from transcript Medtr8g109290.1 (locus Med tr8g109290) derived from phytozome v7.0 (chr-ID MtChr8; po s 24473991 to 24474794)
agaccacaccgccaggtcttatttactatctttcaagtatttttgacatgtttttgcgacttataaagcctatatagttgctttggtgctcatatattaccctgccctcaagcagcgactttggggaagaaacaaaaaaaaaaaaaaaaaaacgttttttcctttttatcattgtgggaagtttacctaaagtttcattcttgtcaccagagttagaagaatgatttttttccggctcataaggaacaaaatatttgaccaaattcaaatcatgttaatatgaatgttacttacagaagcatgactaattgactgttgactgcaattttttcaaggaaataatttacacattggcactttgatacattgcattgaagtttagttagtatttatgttgctacaacgtttcacactattttagtggtcttaatctggattagtgcagggtgattcagtattctttaaactgtaaaatttgtgtttcaaaacatgttttgtcaaagctatcaagcattctaaatctttatctccttagctcccctaacttgaagggttgaaagattcattttttaaatggatcatgttattgaatattttgtttgtgttttgtagatattgtggaattggttttttaacactacaaactccttccacccacttggtcataatgccatgacatatatttttctgaactattgtttcatcccataaattcttgctataagtagataattgttgtgaagtgattttgactcccttatttatccagaagggcaacatattaagactaatcaacagaacata

SEQ ID NO: 4201 - DNA, 967 bp, Medicago truncatula
  Intron number 1 from transcript Medtr7g076400.1 (locus Med tr7g076400) derived from phytozome v7.0 (chr-ID MtChr7; po s 15535580 to 15536546)
ttagactcgccgcagttcgtgttgtaagatcacttttctggattcaatttttaacattttcatgtattctgtgtaggtgtagtgtagagaattttcgcgtatttaagtttgtgtttgattctgccgtgaaaataattgattttgactaaaagtgagttgtaggttaagtgacttatatttggatacatgatacattcattcggaagcgagttgaataataaattagagtgtaaaaatcaattctacttgagagcaaccaatataattgtcaaaatcaatttcacatctctagaattgattttagcgctttcaaaaatgaaaccaaacacacactcgggattcataataatttatggatgagtgcttgttaaagacctatttgaattgactaattttatacttatctattgactgtgaaaccctttgccaaacctcgtgaaaactcttttattcttcttctgttgaacgggagataataggcatagtatagctctattaaattctaataatagtttcgaggtttataaacattaaatgagaagagttataggtttgagaaaacagatgattttctctctgttgatgattgtttctccttaatgggtttcattgaaaatatgttttttttctttttatactaaatcttaattttggtattagaaaatatacttagcatcaaggtattaaactgtgattctaaattgcgatcaaggtttagaaagtctcatcgcatgtatttatttgtaatttttcacaatataagatatcaaaatttaaaaccttgcttaacaagtgagaaattacatatgtaggtgttattttcatttgaagttgtatacttgttacgtcaacgccaaatgattaatattctgattttgagctgcttgtgcaagcataacaatatttgaagagttgatggtagattagttgtttgaatgatgtgagttgttgtatttcaggtaacttc

SEQ ID NO: 4202 - DNA, 1669 bp, Medicago truncatula
  Intron number 1 from transcript Medtr3g110590.1 (locus Med tr3g110590) derived from phytozome v7.0 (chr-ID MtChr3; po s 27883025 to 27884693 reverse strand)
aatactcttttaagcttgaagagaagaaagaaaaagtaaaatctttttgggctaattagttgtgttactatgtgatgttacttgcactcaaaagtcatggctttaacctgtcttattctcaataggatgctacagtcgttatgtttcatacattttcattgaaatgggcttgaactctgtcacatggttatgttctgttatgtttatctgatctttaatgttgtcattgatattagccttagctcttgaatggtagatgtgaggtgtgtatgaatgattcatgtgtagaattctttcataggctgcatttaaatgttgatttgaagagaaaattaactatctaataaatgaagagaataagtagaatgtagcgagggtgttgttatgaatgaggaaaatagagaaaataattgacagaccgtaacacaacaatgttatgcagagacttttaaagataaatttcccttgcaaaattagtacataacaccgtccctcaatacgatacatcatttttatgcagatttttacatacatcagtaatccctacctagggtttagtgaaaatacaacctaattggtctgctcttagtaggttttaacagaattgactctttatgaagtttggaacaaaacgtctacccgcatttatgcacatagctattgtgtggaatgcaggatctgttagctatgtgtgtgtcaaccaagctccttcaataaacttgagctattgttctatcctcagattcaacattagagccaacagcactaccctttgtacttttccaatataaaagactaataaccttagagtaatgtttttctggttcctacaaaatcactattgtactcccctgggcaaatatccattttaggcggatagtaccggcatgcaaataagatcccacatatgattcaattcaagaagtaccactgtaggagtgtttaggggatcaacagagattggaacataagaagcaggaagaaaatatgattctaaagagttaactcttgcaatattactaaactctaccacacatatatgagttagatcatatgtaaaatctcttttgcatgaactttgacaagatcgataaactttcaattagtcaattctatagttttaccctatatttatacatggttttggctactgatatatgttttcaaataatattttgaagtacataaacttgcatgagatcaagattcaggtataggatttgggtttatcaactcctcgctatatcgagtttgacatgaaaacagcctttagcattgttgatgatctaaactcttaagtattgccgtggataggcaattctacctagtgggaacaaactttcaagtttgctgaaattattaatatatactgtcaagctagtttttttttcatatatacatttgggctaaaagaaaaaacctggagcaatttttctaaattgctttgttcatgtccttatgctactaaactttatggttaaagatataatatagtgaatatctaatatctaatataaattcaaccaaaagaaagataggaatgcaaaagcttaattttatcaaatttttagtgtttactttgatttaattgatctaaaactttgacatgcattggttgtttattgacaaacttttcctctcagttgtacgatatagtgcgcaaagaaat

SEQ ID NO: 4203 - DNA, 728 bp, Medicago truncatula
  Intron number 1 from transcript Medtr6g039000.1 (locus Med tr6g039000) derived from phytozome v7.0 (chr-ID MtChr6; po s 8560334 to 8561061 reverse strand)
atcagatcaagtatctcttagaacagttgtataagcaagcccaaccttagttgcacacccaactctagcttgttttttacttttgttcttagtagctgtgtccttgtatcttaatccttctttctatatatatattatcattgtttctgaatcttgtgctttttcaccttcaatatgtcttacaagctttcactctgatgatatttactgttttcaatgctgcttgctctgacagattatatgtttattcttttgttttgttttgctctgatactctttcttttgtttctattctttttgttgatgacaaaagggggagtaaatgtatagtatttttaaggcactgagccctactataaccacttctaaatttcctttaaatacttctgatttaattttataagtattttattgaaatttaattaataagaatagaacttagggggagcttacaaacctcaccttaaagatctattagactcagggggagcttacaaacctctgtcccagtagtcaacttattaattagatcaacaacaattgaacattttaaatactattgtttgtcatcatcaaaaagggggagattgttggaacaaaatgtgtttcacaataaaccttattaagttttgatgataacaaggtattaaaaattgtcaattggttattactaataattgttcaagtgtacaggaccaaaggctactcaagttttttcaataggtctt

SEQ ID NO: 4204 - DNA, 2421 bp, Medicago truncatula
  Intron number 1 from transcript Medtr1g010230.1 (locus Med tr1g010230) derived from phytozome v7.0 (chr-ID MtChr1; po s 1654040 to 1656460)
attggaactggtatgattcgtttttctgtattgttaggttaaatctactacattttgtttactatatagtttgtgcatgtttggttttgcggtgacaaagatagattttgaattaattgattccggctaaaaatgagttgaagagctgacatgatttaaaattggatgcatttatgtagaagtcagttaaacaatgcatttaagtgtaaaaaattaattctggaatcaaaagctacaatttttagatttcagttagaattaattctcgaggcgaaatcaattttactcgattgcaactagacatttcaaaatcaattttacacgtttataatcacttttggctcctctaggagtgaaaccaaaaatacacttaaactagttgtgagactgtttgggggaactcttgaaaatagcttatgttttcagcttattttcataaattctccaagatagcttttatcttatacgaaaataatttaactttattttatgttttgttataaaaacagcttatgcataaacactttttatgataaacgtttatgctagaatctgcaaattaagttgctaatcctatcaggatcacagttaagctagttgtgttatctagtgtgagacaaacaaatggtagttactagctaggcatagagaaaaagggagtagttccacaacatggggaacaatggttggaatctctattagaagaggcaccacattcaatcttgaaatatgacttggtgcgtgtttggattctgaagacataaaattgattttggtatgtttgaatgttcttgattagaattgattataatttaagctaggatttgtagcttttggctctgaacatgatttttacactcaaatttattgttgaactcactttcacatgaatgtatctaaacataaattattttaccttaaactcatgtttaactaaaattaattcaatgaaaatcaattttcgctaatgtagtactaaacactcctatggtagaaagagggagtttggattctttgtagtgggcagagttgttggatacaggtgactgattgcacccgaatctaatggttttgcagccactgcacctgtgtagttgctgcataggcatgtgggtttaacagaaagagtatgatgcaagacaatatgctagaatagaatagaaaactatacggagagaataaaatgaagttataaggattaggatgcaagttgtggtttgagatgtcaataaatactgatggatggtccgaggcacgagactcctatcaagtgggatataagtaggtagatttaggaatcctcatcctcactagaaaagagactgttcctagaatttgaactcgttgtgaccttcaggttacaagacgacaacaagctgctttatcagtatcaataaatactgatactatttgatattggtaaaaacccaagtcccacatcggatagatgagactcttgatgagagtttataaagaggagacactcctcacctcacaagctggttttgtgatgatgagttagaccccaaatttcaacaagaaaaagttatcattacataaatgtactttgactgatagcattaaaatttcatggtattattaacaaattgaacttgtttatccttttgtggccataaatatggccaagctatttgtgttagcattgaaggggagggttgaggcttcctgttattatccttttgtgactataaactgttcttattgtgtttgatatgactggaccagagaattaacaggaacaatgacacagtaggcaatttccatgtgcagtataagtcttaattgaatttcaatgaaacattttaaatgaaattgagcaacctcctaatacaattgctaattgagaaaattgcttattctacaaagaatcaactttttatgggattacagattactcccaccaactgccctcataactaactagcccgtttcagctttactaccgacagttacaacttctctacttgtttacatacacttgattgataggaggtctttgagttctatcagtgtttgcatttaatggtaagggtgaggctttctacttttgcatttaatggtaagggtgaggctttctactatgtgtctagtcttcgtagttctatttcctcaaacttgtataacccaatgttttgttagtatgctataggctagcctaatgtattcctgatctctaaagagcacatgaatatttgttcaacatgatatggttccaatattatcatttttacataataaaattacgccattttattcacaatcaaaatagtacaatgtgaaatagttttatttctaacttttatgtcattgtctctttactgcttagaacttttcaactaacgcatttttgtgaattaattgttaggcttcaaaagaaaaaggcctcgaagtaaagttgag

SEQ ID NO: 4205 - DNA, 1388 bp, Medicago truncatula
  Intron number 1 from transcript Medtr5g044020.1 (locus Med tr5g044020) derived from phytozome v7.0 (chr-ID MtChr5; po s 18229822 to 18231209 reverse strand)
cagcattctcaaaagatcttcacagcagttggttggttttttctcttgtttcaatctaagttttaagagttttgtgatagagagccttgtattttgtacagtcaaactactacataaattttggaaagcaattcaatgaaacagaatcatctaaaaagacagtatagatgatgatctccaacagaaaaaatgttttcttttagtatcattcagggaaaggaaagatgtatttgcactagtattcagtttcagcgagattatagtgaaattcttttgtaatgtcatctttcggaggaattcaaatctaacaaaccttccgtatcttcggtctttggactctacatacaagtcttatcacaaccaacaaaagtgcagttgttgagcaatatagattcataacaaatgtgtctaaatcatgtaaaatagtatttaatagaagtttgtttttttcagtttttctattcttatttgttctgcttcttgtgattcggggtgcatgtcttgctgaaaagcaattatgggttggccacgaaaacaaacatataatgacagttatgttaacaaaataaactagttaatatcagtaagataaagaacatgctagactcaactgcacgaaacaggataagcaacttaccgatatatcagtaagataaagcatggcattattctattaaaaaacacgacgaacattttcatcatacttcactgtaatacgataatagcatatgtctgtaaaaacagtttttaaaatcaaaatggaaaactagcatgtcgaccagcatgaatcattcctatcataggtatcaaaatcatacaggctataatagcatatgtaatgcaaacttaaggaagtgttgtttcaaaatcgtattgtacgatgttagaaacagttagaacagcaaaaccaaagttaatatccttttcataactgagaagcattaagattctaggcaaatactcattgtggcagacaacaatggctattgaggacgttaacacttaacagtagtggtagtctacttattcattctgtcaaactcaatttctgtagcagttacatttttcaccaatccattctgaagtatagtctacttattcattttacttctttcaaatactgctgttttccccccctcccccaaccccacaagtttcctttaaggtttctaccaaagaactggcgattaatgtaaacaacatctcatttgatatgtaatgcttgtaatagaattttctcaggttgaaaccactgcataatgatattctctcccccattccaattagtaggtgtacttgtgataactgataagcacaatatgagagctaagcctatgaataagcaacaacacttaggtttttgtatctggttaggtcttgatttggga

SEQ ID NO: 4206 - DNA, 6688 bp, Medicago truncatula
  Intron number 1 from transcript Medtr3g139760.1 (locus Med tr3g139760) derived from phytozome v7.0 (chr-ID MtChr3; po s 36058974 to 36065661 reverse strand)
gtccaatttacaggtttgtttacatgacttctttcttgttgcttcttttttgggttaaattagtgtatgcttgcttgtaatcccacaaatttattagattcaagtgatcaatcaacttcaattaagacaaatcattgtattagattcaaatacctaccaaaatgatatttgatcaaattttactagaccctggaaataccttttcaatcgaagagatcaaaagaatttctagtgattcttttctctagaaatcgaagagttaaaagatcaaaagaatcactcaaattattaaaattattcaagggatagattgacatgtttcaatacacccaagaaatgtacttgcatttgatattgtagcgcaattgtaactactttggtgaattgtagatagtgtaccacctcacactagctaccactttatcatagtcaatggatgatttcaaatgcttattctcttttttttttcaactcaatctgatttagaatattaaagcttttgcttttgaaaagatattgatcttagttgcacatggatagctagctattcaaaatccttttggggggatggtcttgagaagaatcatgaatcaatgatggctggttgggtaagagggcagcttggtgggttgctgtctctggaccctggaaattgaaaatgatatatcaattgataaaaacaagtgattattctataatccaattgcctcttttttttatttctcgtttattcatttacttcttttcttcctaaaataaatcatacaaagggcccagctgagagcaccagcttcgtatgctttcagattatttttcattaaaaaaaaatactttattaatagtttttttttttgtttgaaagaaaaatactttattttttttgaacaatcaagaaaaatactttattaatagttgtctattctcatattggtcaatgccggttcgacttattatagcatagccttgtttgatttcttttgaccaatagtaacattgttgatcttgcaatgatgtttcttttgtcttgaccctcctagcattattaattaaccagggaaagaagaaaaaaaaacccaattgataatatttagaagagttgtgttatttgaacaattatttggataataatttatgcgacaatcataaatttacaataaaaaaataagtattgacacgaaaattaaagcaaaaaagagataaagtaaaaatataatgtgagtatgagaaagaaagttgtgaaagttgttaaaaaataattgtacaaataccatttttctatttagaatgactctgagaaaagtgaagaaagttttgtcaaaaaagaatgtgaagaaagtatactcattttccgcctcttctattatttgaagattcaacttcatttctcatagggttttatcactataaacatagtcaattttatttttaatccccataagataatgaaagttgttgtccctataaattaatttgtttaattatgcttaaaaaaatttaaacttttgaacgattttttacaaattactgatattataaaaagttcatccgaaaaaaaaagctcaaaaattaatttttaggtctatattttcgttaatgttttcatgaattttggcaatgaaaaaaattatattttatttactagatgttaaaattctaattttttataaaatattttcttataatgttcttaacatgtttgtgaaaaataattcaaaaaattataaattaaaacaattcaaattttaatttaagagagactgaaactagagactaaaaacttatttaactatttctaatatatgctagaagcttcattcctttattacatatattatggtggtcatttttgaattataaaattttacataaactaaagcaaaacaagaaggatgaaaagttaaaagttagatatcattatgcttgcggatatctctgaggtatttagacagcatattgtttagttttttttccttcttttcttgttttttatttccattgataaaaaaagagtaaaaataatttttactacacatatattcaaacttattcaaattacacatatattcaaacttatttgtaagggatattcaagcttaacttattatatttatgggttaatatttaaacctagtttatatgaagtaattacaaccaattcctacttttgaattattcaaccaaacgagaatatataaaaggtcatgctaaccagtgacttcagaacactagttaagaaagtaaaaataattttttttattaaaaaatagtaatttttttacttttaaaaagttaaacatcccactttttaccacttttcaatgtaaattctttggcttaaatgcacttttggccctccaagtttcacaagcttgtgattttgccccccctattttcaaaatagcacatttgaccccccaagtttcaacccctttgcaaaaccatggtccccttaattttgactcagttaaaactgacatgtcgcgtttttttttccacatagactgcctacgtggattttagaatgaaaaataaataaaatttccactccttaaccatttctccttcatccttcttcttcacacacaaatctgcatcctcctccttcactcataaatctggttcatccttcttctcaaacaccatttttcttcttcacatacaaatctcttctcaatcgattttcccctttttcacggattcaatcgatcttcacacacaaatcctccttttcactcgtttttcctccttttcactcaattcatcctcatttttcgtgactgatggctcgacccaatgattatacaacttcatcttcttgtagaaaacgaaaaggcaatgttgtatgctactgtggagttgagtctccattggtaacttcatggacatgataatcgtgggagaagatttcacgtgagggaatttttttttcattctaaaattcatgtaggcagtctatgtggtaaaaaaataaaaataaaagcgacatgttagctttgaccgggtcaaaatcaagggggccatggttttacaaaggggctgaaacttggggaccaaatgagctattttgaaaataggggggcaaaattgcaagtttgtgaaacttggggggtcaaacgtgcatttaagtcaaaaagtttatattagttttcttaatttgtacttccatacactagttaatatttctcataaataaaataggatatatcaacttatttgctatccatttgtcgaaaacactcctttgttgtcctcacacaccaaaaggcaaaatggacccatggaaagagcctataataattagagaagtgatatatgcacaactctttggtacaattttcatgacaattttagttttctctctttttattggttaaaaataatagagagaaaaatgaagagagaaaataagaagataatgtgataatgagagagaaagttgtcaaaaaactgttagaaaatagttgtacaaatatcatttctcgtaataattattgctattccaaaatcatacaatttggaataatcagtgtctgtgatgatcatcatattctgaactcatcagtatttctctttgctggtgaatgattagcttactaaaaataacacttgctaaaattgatcatcatattattgtttctaaagaatgaatgtaaccaaaaggttattgctattccaaaatcatacaatttggaataatcagtgtttgtgatgatcatcatattctgaactcatcagtatttctctttgttggtgaatgattagcctactaaaaataacacttgctaaaattgatcatcatattattgtttctaaagaatgaatgtaaccaaaaggttattgctattccaaaatcatacaatttggaataatcagtgtctatgatgatcatcatattctgaactcatcagtatttctctttgctggtgaatgattagcttactaaaaataacacttgctaaaattgatcatcatattattgtttctaaataatgaatgtaaccaaaaggttattgctattccaaaatcatacaatttggaataattagtgtctgtgatgatcatcatattctgaactcatcagtatttctctttgctggtgaatgattagcttactaaaaataacacttgctaaaattgatcatcatattattgtttctaaagaatgaatgtaaccataaggttattgctattccaaaatcatacaatttggaataatcagtgtctgtgatgatcatcatattctgaactcatcagtatttctctttgctggtgaatgattagcttactaaaaataacacttgctaaaattgatcatcatattattatttctaaagaatgaatgtaaccaaaaggtggctttaaattgcggcggaatctgaatgatacggtgtctgcaaattaaaaggagttctgagcccatgatatcataaaaagttcagcaaagagtgatggggagagtaagtgaaagaaattgatagataaactaaataagggaaatgttaacgaatatctccggaacactcttttatcactttaaatagtaagttttttatgaaatgttgggtaaccaatgcattggaaattgtaatagttgactttttaaaagaataattgttaaattggggatgcttaaagagtgtcccggagacactcgttaacaagactccttaataatactccctttaataaaaaaattaaaatgacatccattctactttgggttaaatatgttattggtctctataaatataccaacttttcgttttagtccctctaaaattttccttcaatttttagtccctaaaaaattttccatcttcacttttggtccctcttttaaagtaaactcatgtagaattcatatttttgaatcaaattttccagaaaaattcataatattataagaatctctcccgaagaaaatagaattttttaacaaaacatgaatttaatatgaatttttatattatttatggttaaaaattcatatataatttatgtttacttaaaaaattctctttttttttttgaaaatgtttttacaatattctacacatttctgtacaatttcattaaaaaaatactaaaatttattttgaaatagggaccaaaagtagtgactcaaaattttatagggattaaaaattgaatgaaaattttagagggactaaaacgaaaagttggtatatttatagggatcaaaaacatatttaacccttctacttttattcctaaatataattgtaatatgtcatgattttttattttgtttttctagataaacgaaatgacaataatgaatggaaactcatacaaacaagtggatgaggagtttgaatcccgattacgtctctgtttgttttggcttttcagcaacaagaagcacttctacaaacctcagaagtggaaattgagttttcaatgttttttggtttgacattttagaattgcttctatcctccaaaagcaattctccttaaaactacaattcctagcttttggctttcctagaatcaattctacattaaattttatattttgattattgcaacctattatttttctttattgccctttataaattcttcttctttttgctttgtaattaatttcatgaaccaaatttaatcagaaaacttaacgagccaaattagcccccgaaaaaatgtttatggtcatgagttaccaaattttagattttcctttacgctgtccccattcagatttactgtattttttattttacgctatattttatcattttttgcaactaactctaatattatttaacttaaatatattttatcaaaaatataaaatatatgaataaatattttgtaaaaaaaaattagtttaatgatcgtatttattatgttttaaattaatatatagaaaatttatttatttaaattaaataatatatctatatttagtattgatctacatatacattcaactatgcacatttacttgaatttagctatgtccatttcggtaattatatattcaaaagtaattttgataaaaactatccaaacaacattcagtttgtttaatcaattctgcattattgtatccaaacataaatcaattatctcaaaatcaattctatcagaatcaattatgtcaaaatcaattatattcaaagctgaaccaaacacacacgtacatcgtttggcctaccaaatttaacattttggttaattgacttaaaagacttgtgaacaaatattccgtgaaattattgtctattttgtaaatggatattacggtacatttttatgtatagatgtgtaatgtgtttaaccctgactttaagtttccaaaacaaattactactcctactattattaataggggtatatgtggaaaaaagaacaaatatatctaatcatttgaaataatatttctatttagaggcactttttttcttagttaggatagatgtataaacttttcctaccttcatataacatgtcttgaaattttattgtctctaattaacttgattgtatcttttggggtgtttggatccggttggatttagtcagagaatgtataatctttaatttttctctctaaatccaacggtttctacagctatagaatacacattctttctttgtctactgcaaaaactgtttattgttattaatatgttcctaatatttattagtgcagatttcat

SEQ ID NO: 4207 - DNA, 2246 bp, Medicago truncatula
  Intron number 2 from transcript Medtr5g104080.1 (locus Med tr5g104080) derived from phytozome v7.0 (chr-ID MtChr5; po s 41729816 to 41732061 reverse strand)
ttctcgtggtatgttgttttatgtttgcttcttgtgttccatttttacaactgaaattatttatcaataaaaaaagaaaagagatttatttgatcaaaatctgatgttacattagtttttgtagttcaatggaactttaaagcccattttgttacaattatgtttttcctaagagactagctaaatttaccactttcaagctcttgatatgactttcaccacatatttattagattgatgtctgactgcactgatttaacgtatcagtaagatttttttaatgtgctgtgagttttcacttattgtctggaagttatttgtagagttttcttttgcatgttgaaaattggagaaattttatttcagtattgatatttctggtgatctctgtgtcttgagttccaaatcttacagggattctgaaaagttgaaactacgatacaaccacaatttgggttgcacttgatgccagtatcacattattactagtgaatttggtgatcgcccaaggtccaatattattagactatatgctaggaggcataagaggcgtaggacacaggatctgactgtaggccattgaattcagtcttgtttttctttaagaatctgatgtttgcctttcatgttcaaaataaataactagtatgtttcttatagtaccaaaatatttagatttgcattcactggcttgtacttgagcaatattgattcattgctttggaaactacactgcattgcaatgtattctgtagcaaaaattttagaaaaattaccgtagtacgtctactgcatccccatgtgtacacaatgggaacttgtaaaggtgctgtaggctgtaaccttatagaagtacccatgtatcatagataatgcagtttatctccttttaggtgactgtttagcattgaattttcttagttactacctatgcaaaagtgcctatttctggcatctccaagtattcttttaagttttgttttcactgaaattggggcgggaacacgaccagatgttgccgtccataagttaaatttcttctaggttagcagccgggttgctccttcattttactaccattagctttgtcgaggagactgaactgagctaccttgatattgttatgcattatgtgcaattgtattctacattcccgtttctttttcttacaatgtactccatgtctgccagccctgttctctttgaagtatatctcttggataattgtatacattgtgtgatttgagcttacggagaaaacttagggaccatgaaagtcaagtgtcaaggcctatattccacttttataaactttcactagcaatcagatacaatatcaagatacctattatctagaacaagtccaataaccccacaaaatgttgctttttcataagtgcacactcacataccctttccaagaagtaacaaattttgggaaaattccaagaatgatgatactcacaagcttctatattttgttcagaactttatacaattatacaatatttctgtgttcttgggtttgtgtgtgttgagaaaaatcacactaacaaaggatcaataattggaacacacacaaacatagtgcaaagaaaataacaaaagacgcataatttacgcgattcagcaccttttgcttatattttggagatgcctcaactctctacagcactgtctttatatggagctggtttgtagcttggcttcttccggaaatagataatagatatgaatcaatccagctttccaagaccattaaaaaaaatgccttttcatcagaagttaaaatgcgagcttccccaaagtcaaatattaattgtaagagaataactgttttctatgtcttgcaaatcattgattctatccttttggtggtgatgtccaatttgttagtttactacaaccatgttgtagtttcattattatatggtcattttgctccctaaaacatggaccatttgcaaactgttgcttttgcaataaattgaaaccactacattttgcaaccactctgaaatttcatatattaagctgcataactctatcttggcagtttgcacttgtgccactaatccttccctccccctatttacaagtcaaacgcgagctcaagaatttttatgttgataaggtgatgctttatccacttaataaatatttttattaacttgttagttttttgtttcatgtgttgaaaaaccaaactagtgggccgttctctgttcggtggattaagcaacagt

SEQ ID NO: 4208 - DNA, 882 bp, Medicago truncatula
  Intron number 2 from transcript Medtr2g104710.1 (locus Med tr2g104710) derived from phytozome v7.0 (chr-ID MtChr2; po s 24773516 to 24774397 reverse strand)
tggttgcaggcactcaagtggtgagtgctttattcgattctgttgttttatatctgatttttgtgtgagcaatgatggaaatttaaagttgaactaaattaggttcaagttagattgttccatgatgcagcattttgatttcgatatatggtttagatttatgatcttataactttgtgtgatttaagtagttggattgatactttgcgatttattaaactattctagccgttcgtatccaaggtcctgttttttgacgttattaattactctgtttcgttggaaaaagaataatactttaggactgatgttatggatgagaaggctagtgcagtcattattttttgtgttaattgctgaactattttgggtatttattcttctatgttagttcgctctccaattttctatagaaatggctcacttgaccattaatatgtgattatcgcctatatgagtaacacttgactgctctgcttggcatatataatacacgtgactctcaaactttaaaacaaccggcaatgttagttatacatagatttgacgattgatgaaatcagtttataaggacatattactgattttgtattcgtgaataactaaattagcatatctgtctttgtttatactcttgatttataatttccagtatcaaatagtatgttccttaataagtggatcagagatttattgctgtttttgcaagtatcggtttttagttgttgactcacaataagaaatagtttgtagttcatgcttcttgatgcaactgacgaaagttttctgaaatccaccatatgtagtttgttctgtacttacatcttcatatcttcattctcacatgttttgatatttcatttaggcatagtgattcaaaaa

SEQ ID NO: 4209 - DNA, 2820 bp, Medicago truncatula
  Intron number 1 from transcript Medtr5g096220.1 (locus Med tr5g096220) derived from phytozome v7.0 (chr-ID MtChr5; po s 38232710 to 38235529)
acatcgactgaagtatgagaatcatgttaacgatgataatatagaaatcaaattcatattctctctagatgttagggtaaatattgatgttttattagtttactacatggacaagattccttggttgtccatttaatatatgtggttggatatcgtcgtcttatgagctataatttttaaattataatgccaggtctaagctcatttagcatgattttagactcggattaaagatgacaatgtatgagagtcctacattgctaaggttccaaaactgttagatgtagagttaacttttgtgagtgagatccaaactcttttaacattgggtacacacttgtgttcacgatagtgtagcctctttgtgggttgttgacgtttgaaatgttcacggacaatttggttctcgatttcattgttttgtttgcgagaacttcttgatctcctctcttttggctaagtaagtgtgtctcttttatatgtcaatgtcatagttggcgggggagaaagtgtaattgatcatccaattcaaaaatcgaatatattgtcaatctaatcgttgttttagaccctatctaggttggtggtctataaagtatattaaaaaagaactttgctctgctggtgtagatttgaaacttaagaatgtgcttctctaaagatatcaagttcgattcttttaagtgctaacaattgttgtattgaactaatccatatcgtgttttgctctagtaaaataatttgttgcttatagacaaaagtattcgatcctaaatttgctctagtaaaagaatatgcttctaacatgcctttaattcttaaaggaataaatcattagttgtatgtggaagataccatgagaaaaacatgttgtgatttgtttcaacaacttctaatcttatctaaccagttatttgggttccttttatgggcttacaacagtgttaaaaaatttgaaggagagtttcatcatcaattaccgtcctaattaatttgaatgattaatttttataattgtacgcaaatgacacccgattcacaacaaaaaaattgtaacttcttttttatcctgcacatcaatacttttttgttttatttttaaaataagcacttttggttggcttggacttctacttttttcgggcatggtactaacgtaaattattttgttctgatttagttctcaacaactaatttagacaatattttgtaaaatattgaaaaatcaaatgtaaggggttggtgcaaagttacaccaatgcatgtttatctcatttctctaagattacaaccatgtagtacattagagccaagaagtactaatactaacaatattattgttaattttgtgggattccaaaaataaagaccttaaagaaacctaccctaagaggagtccttgaagattagataattgacatctttaaaaaaaaaaaaaaaagaaccttttctttggtctatcatctaagtggacaacgtggctaaaggaagacactataaggaaaaatagccctatcaatggttgcttactttgtagtttgtacaatagggaatgaattttagtacaaaaagtggttcccttgggatattatgatatgtgacatgtctcaatttttgtgatgttcttcgaagctaagcctttgagtgggttgtgatagtaccaaaaacaacaatattggattcgaactttttcattaacaaatggacatttatataaggacaagtattgggttggtggtgttgccatttgagcatcatgacatatttgtaattgaaatggaatcttatctaaatgacatatatgtatggttacacaaaaggccaatttgattcttcactatgtcacactaaccataagttttcacatcctcttttaggagatgttgcttttttgtgttgttgttttatttccctccataggttgtggagcaaatgccataaacattattttttctattcatttcttcacgatgatcatgaatgaaatagaaaattatagaagcatatccactttggctacattgatatttccactaaggtatacaatctttttgtgcttgtctcctaaagtttgaacattttgtccattacaaaattatctttatctttatgaatgtgatcctatatacgtgccagattcttaaacagccaacttaaactctctagtgggatcattgctgacttttttttattggttagattttgaaaattgtttttcccacttcaaacaaatttaagaaacatgatgaaataacgagtttaactccaacgacagttaactgctggtgaattttaatcgacggtagttaactacctataaaatttatggttaaacttatcattttatggtatttcttagctttgtgtgaggtgagaaaaacaatttttggatcaaataagcttccaagtggctaaagtgtctccaggcctctggctataggcccaatctagagttgaaagtttctaaatcactattcttagatttggattatgaaatctgaaatgtgttaagatgttgaagagtattttcaaaggaattatgctctttacccaaatcgtttcgctcattgtcaaagtaaatgtcacaaatgcccctacgcaagttagcatgcgttacgtgacttaagtcacgtagggtgacttaactcacgctaagtactattttcgttcaaaacccaacaaacaaccacaaagctccattttttctttccctccacctccaaaaacccaaaaagtgagaatttttgggtcaaaatcttcattctaaatcattgcaaatcgtcaggaaacaagttctacgctcatcaagcatcaaagaac

SEQ ID NO: 4210 - DNA, 2519 bp, Medicago truncatula
  Intron number 1 from transcript Medtr4g133950.1 (locus Med tr4g133950) derived from phytozome v7.0 (chr-ID MtChr4; po s 32200884 to 32203402)
cagtgcaaacccttgtccgagcaagaggtgaatctaatttccttaatcctttcatttttatccacatttttcactcgcggatctgttttacattgattcttctagagtttagctcgatttgtgaattgatctgttgcattttgtaccgaaaattgattttatattcttgtttcgtgaaaatctggattgtttttttcgaaattgaatggcgcattttgttgcatattctatcagatttggggaattttttttcagtgattctaggttttgaattcattttttggtgaaagtttgttactttctgatctaagagatttttttatgattgatgttgtgatttctgtatttaaggagtggatatgtgatttccgagagttacttgaaaaggagaaaaggaatccttctttatatttgggtgttatgcattgcaaaggatttttttttttccttcttcagattgagcttgtatgacttcgtagaagcagggtgattgggttgttacttgagtttttcgccagctttatttgggagggtactaactactaagtgccatggaatgaacccttcatgttaaccttgttcgatgaaacacatgactgccgttaagagagttagatacgcgttggcatcgagtttctcgaagaagtttagtgttttatgaaactgtaatccctgagttaaggttacaaccaaaaaaaaagttctattgctattgttttgctgcatggacaatctgtgaatatttcaaaatagtgggcggttagtggcaaaattattttgtcccgtttagtagtggaagctttccgcaaggagaaatgccaaaaaaagctggttccttgggctcgggtatatttttaataactgaaaaatctctactatagtcatgcacccccttaaaacatctgcagtagttaagctaaatatttcgcttttggttattttatttttgtgcattgtattattggggtgggttcactgcttaggtgttgtgggtttggattgatttctttttgtagagtagttaatagcgtcggaccgcattgttatgttgccaatgtggggctgagatgcttcttcccactttgaaatccctgtctgcatcgcatttttgcactgcatagttcacaatagagatcgagacacaaaaaatcacacctatattgcagcagcagttctgaacaggggcagtccttgttttttccaccccttttagaattgtctataatttttaacaggaggatttttgtgttaacagactattgcgaaacccccttttaatggaagccccaatctctgtttccaggtctttgcttttccgtctctgtatgcacaacttggttgtttgcaactttctctttcacatagttctgtacttttcgacaagcgatagcgtgcaccatcctttttagccttggtactccttgtctgtaattttgagtctagaccgtgacttttgattattgatgacgagtttgtcttctttttatttatttataaatttttaagcatttatacctttgtagtataactttttaatctcttatcccactatcccgcaacagtattattaggatggctgctttgcgcctctatgtaggattggcaacaatgctttttgggtataaattgaaactaaaccaattaattggtctaaatctgttctgttctggttgattcaattgatttttaggcaaaccacctttttttaaagttaaaaagcagcaaattggctataccaatttttttaaataggaacattatgtgtatgcgtatatgtttttaagagagttaggattaattgacactagtgtgagacttgtgcatttacatcgttaaaatactaaattcaataatataattgttgaagctgaaatatttttttggtgattatacatatggagttttctagactcatttacaaaaagttgaaaatttattaagtggcgtggatattcactccctctccagccaggtacaaacaccaagtgaagaagtgtcgctgcaccactaaaagtctacatatatgcttatgaccatgctctcaatcaacggaagtgcactttgactcattgaactagaatacgacgagtttggctcggtttcataaatgaacactataaaccaactatgatactctgatatcaaagaataaatacaagcataactaaacactgttttgtttagttttcatggtttgggttctagactgatttcttttgattatggataatcggctattatgctaccttgagatggttaaaatccgtagaaattataaaagttttcaattttactctacctttttactttatttgagactgtattctatttccccaaaaagcagtttcatagtctaggatatttgttgtcttgtatttgattgattctcttctacccctctcctctgaaaaaggctttcgccatcgagacaatgcggttcttttacatttcgttatccaactctggcttcactcatatatgcaggttagggtcttgtgtgataaggcaaaagagatttt

SEQ ID NO: 4211 - DNA, 4208 bp, Medicago truncatula
  Intron number 1 from transcript Medtr5g067170.1 (locus Med tr5g067170) derived from phytozome v7.0 (chr-ID MtChr5; po s 23814884 to 23819091 reverse strand)
tcaagccacatcgtagctctttactctttttatcatgtttttgtcattgattgtgatttcactatacacttgcttactcgattagatctgcatctattgtcgttgtttgaccgtttagttgttgattgtcattgatacttgttccacaattttagatttattgatgtgaaatataatttccgaattcacaaacagaattgattttgtaaacttgtttatttccaataggaacaagactatacaactcgttccgaattcacaactttattgtccctctcaatttctctttaggctgaaaattacacttttttgtgttatctattcaaggtcttaaaattaaaaaaataccctttaggagttatcttccaaaaaaatttgagaggcccgggagacatttctgggggcgcaaaaagaaattatccatgtagtattctacaccttcccgacttttgttccatataaatagtgttttctccatttaatttgtcttgaaaattgcttttttccatttgtttttactcattcccttcccaaactaccaaaaatgtccccaacgcgagttaactcacgctcggtagacgcatcgtaagttaactcacatcaaaagtcagtgtgtgttaaatcacgttgcgatccatttctcttttaggccatcacttgtacctccacacttcaaacacacactcccttccctcttcacctacaaaaattgaaagtgcaaaattttggtgcaaaagtttgagctcaaatcattggaaaacgttaggaagcaagtttctacactcataaaacgtcaaaaattatgtaatgtatcatctaacaccattatgtaatgacccgattttaagattttatttatttaattgtttggtatgttatagttattggttatttggtttttatagatattttgggtgtggagagttatttttatgagaatagtaatttggggtaattaatagaatagtggtgtgtgagtaatattgagggttttaatgaagtaattgtgtagtaacgtttcatgagtggtagaaagttactaagcccattagtgaatgtggctaagcccaagagtatataagagaatagtctttgtgaaaattatggttaagagatcatttgttcattttgagaaaagaggcatagagagaaagaggtagaagaggagattgaagagaaaggaagatctagcttgggggaaagatcaagagggagatcagagtgaagatttaagttgcttttgaagattaaggtaactggaaatgtttatatttaccattaagtgattatgagtgatagagtagttatgggtcatgtttgattaagtgattttcatgaaattgtttatttgattaagtgattttcgtgctatttgattatgtagattatgggtatgttgaactttgtgaaattaagttgtttatgtgcttaagttcatgtatgaggttataaaataagttgtttttcaagttttagcttaaatgagtgagaatcatgattttgttgatgattattgttcaaaacttgtccttaatgcttgctatatgattttgaacttatatgaacatgaattttggaatggaatcaaagtaagtagtttctaaaatgaaatgatgttgttatgatttaattactgtgaatacgaatgtagaaggagtatgcagatttatttgtgattgtgaaacttggattttttgtccttaatgtttgtatgtcgagatctatgtaaatgattgtgttaaaagtgatttttggatgaaattgtgggttttataaattttagaaaattgatgatgatttcatgaatttgaagattgaatctgtgttttgaaatgttttgaatattcttttaaactatgttaacattggatgaagtttgtaaatctattttggatcaaatgggatcaaaaataagatttttggggaaatttttggaggtttcctgagagggaacccaaaattttgagttcccaccaatagggagctcgcctggcgagcagatgctgcgccatgccgagcgagtgttgaacaacacttgttgtttggcactttttgaccttttggggtgtttccggacatccctaagtgttccttatgtgttgttttgatgttgtttcgatgaattgagtctatgtaatcatgtttgcttgatattgattaattttgttgaattgagacgaactttgaacttatatgaacatgaattttagaatggaatcaaagtgaggtgtttctcaaatgaaatgatgttgttatgatttaattactatgaatatgaatgtagaagaagcatgaaggtttggtggggattttatgtttgtgaaacttggatttttgtgaaatgtaaaatagacgaactttgagaaaattgacaaaatttggcaaaatgatgaattacgacatgatagcttgtaaatgacattatgttcatgataacatgatgaattgtgattgaattaatgatcattatgcatatgttgaatggattaacttagtgaaagtgcgtaatcgtctttaaatgcaaattatactaaatgtttgattgttgtttcttgatgtgttaattgcttgatgattattatgcttgatgatatattggtgaaggtgatttatttgaggatattaaatgcatgatggtgtgtatatgcatacgtataaatggtgatgaatatatgtatatgaattggtgaaattggtgatggtgatgtcttgtatgaatgtatgcgtttggtgagtcatatgttgtcggatatttagtatccaaagcggtgaaatagggtgttttaggatccaaattagtgaataggatattttagtatccgaagtggtgggatcaatcggtaaaataacttcgacattcaaaaacggtactgcatgcatatagaatggtgtctagagcattgcatgcatataaatatatttgaaatgatttatacttgattttggtgaatgatgtgcattaagtgaattatgtgaatgatgtgaattatatgcattagatgaattgtatgcattgatgtgaaataagtggaattgaatatatgattatattttcaatatgacgatgctggtgtaatttgatgagtatgataaatggaggatgatgtaagaaattcttgtatgaatattgtggttgatttatgaaagtattatattatgtgatatttgaaattctattatattatacttgaattcattatttcttaatcttgaatgtaaacttatcttcaagtggttgtttggtataccgcctcgccattgtaagatgatgtagacatgcaggtccagatgcttgaaatggtgtgagtaccgaggagttgcctgacgcctcctctttctccttgcttttggagtctagattagggctctgattaggaccttttgggatttattatgtttatgtactatgttggagtttcgggagccttgttgttttatttatcgtatctaagatttgaattattatattgagttgctgatacaatttttggagatgttatttattccgttccgtaacttgatgaaaatttttatatgcatgttttggagtttagtgatgtggcaccttgaacatgatatgatttatctgttatatttatgttaaatattaatagtggggttcaagggtgttacactttatatttatgttaaatattaatagtgggattcaagctgagttcattacttttggagccttgaacgtagcatgagttaagtaatgttgagtttccaacgtgagttaactcatgttgaaggccaacgtgacttaacttgcgtttggtgtaacatacatgacttaacttgcgtttggtgtagcatcccgatttttaagatattattattataattatttatttgtttatttgatgtgtttaaattgttgggttaattgttttttattcgagattagggagttaagggtattttgataattttatcgtgaaaggtattttagtaatttagaagtataagataatttagtgaacttggtagaaacttgaggaattaagatgatagaagtggatattaaaaagagggatttagtgaagtaaatgtgtagtgttattttcaagaggaagaataattgactaatctcagtaagagttaagtgaaccaaacccaattcatgatgatatataacagtgatagtctttacattttaggattaggaaatcattttgtaagttttgaaatagaggcatagagag

SEQ ID NO: 4212 - DNA, 1224 bp, Medicago truncatula
  Intron number 2 from transcript Medtr5g078740.1 (locus Med tr5g078740) derived from phytozome v7.0 (chr-ID MtChr5; po s 29170557 to 29171780 reverse strand)
cccttttaattataacactccagtcaaattattgggtatgtagcattacaaattatacactgaatctaattattatttagagtacaatatacttgatgatctaatgaacagattgagtacaatctatataaataattacatggtacgatcgagtttctacattagttagtaattaaggacaattcgttaaccaagttccagggaaactatgggagaaagtctggacacaaattgtttcttctaaatattaaatttggatttttttggaggagtcatttttagacgaagtttattaactattgagataaatcattttgttgaaattagatagatttgattgttttaatataagagaaaagatgagaaatagaccctgaccaaaaaaaaagaaaaagatgagaaatagacaacagtccatatttaaaatacacttcaaacttaaaatatatttttttccctagtgttacaataattaacaagttattagatttcacgtgaaaaaagctttatagaatttaattttggtaaattttttttttttttttggataaatctaatgtttttttgtttgtggtaaatctaatgtttttttttagtgtggtagatctaatagtgtaaatattgttttatgccacgtgtaattaaaagaaaattacagtctagacggtttggattaataactcaatatcaatatattttaacaagtgcgccaaaaatttgataaacacacaagtatacatttttatcgtttaatacaagtgtggatcctacaaagacatgttgagtatcaaatgttttttttttttttttttaaaagttatttaggtataaaagatttgatatttgaaagatagatgattttgatctttcgaaaatatacattaaaagatacgccttgacattattagatttcattacaataatagagaattcaactgtacaaaactatatttagtgaccgttttgatccgcatcagaacaccaaaaacgtgtttttggaacgatcaaacatggtttaactgaaaacttttatgtttggctttcatacatatgaaccgcttccatccccaagatcacagtggatatgaagctatgatttggagcatttgcattacgcagaatcgattatgagttttaattttgttttccaataccaaattcccttattaaccttcctttataatttttttttccggctaaaaaataaaaaagttgttgttcaag

SEQ ID NO: 4213 - DNA, 2235 bp, Medicago truncatula
  Intron number 4 from transcript Medtr3g114380.1 (locus Med tr3g114380) derived from phytozome v7.0 (chr-ID MtChr3; po s 28928906 to 28931140 reverse strand)
ttgctagaactacagaaaaactggtaggcttctgttcttttttgcagttgaggcttatgatactatcatcggtcactttatacaatgcttttcttgtgatatatggtattaataatttttttttattaatttaaccaatgttttagatgttgcatggacaatgacaataattgacgtgggagttattctgtagtgaataattttctattttatagaatctaccttactatggtttaggaacgatacatagtttaagatgttgcatggacaatgacaacaattgacgtgagagttttatttatagaatctaccttaccatggtttaggaacgatacatagtttaagatgttgcatggacaatgacaacaattgacgtgagagtttattcttctgtagccaataattttctattttatagaatctaccttactatggtttaggaacaatacataggttgtcactgggcatagtttctagggtaagattaatggaagtgttagaatatctaaaaaaatatgtcagaacttttttattgtattttaaagctattttaaaatatattggatggttgttttggacagaacacattagtgatgtttaattcgtatggcttacaccatttagtgggaaaagggctttggttgtgcttgttgtattcgacattcaactcaaaattgagttgacaatcgtggcattactgctctgcagcatgtttcatgacctctgtgacatgcagaggcagcagtgcgtcacattttgacggtgacatgtccatcacactacatggatgaagatcccactttgcccttctttatgttttcctcttctaggaaaatcgactgtcctcctgcctactcccacctctcttttctactttcagcagcccacccgttttcttgtgattttccaacgagtcagtggttttctggccaagtcctatcttcttcacatgtttttttcccccaatcctggcattttccagcaactttacccctctgccacagctgttctttattgattcggttccactcttttcgcccttgttcacaggtctcaacacattttttattctgttttttccttatttttattttcatttcttttggctgtgatgtgtatttactacttaccacctcacagttaacagcatgctaattttgatctcacaagtttattcatattgataacttttttaattgattgcatcatctttttaaaaataaaaaacttccttctatggtgtattctgtttttgataaaattttgtgttcatatgtttggttaataaattattagttagttatgtatccataatctttgggatattagcgggaaactttgtcaaagattggaaaccaatccatataatatatcgtggaaacattcagttgtctaactgagaaagtaatcttcggagttgtttctagattttattctattccctgctttatttccttatgtaactttggttagtagtcataggctgcatttgtttcaaaacttttcatgatttatttattgaaataatttcccttgtaataccatgatgcgagtactattattgggcaccttttaaaatgtatttggctaacatgtataacatccccaagagtaataaataaaagcgggatgttgaggtagttataataagaattttaataaaatattaatataaaacttcattccttcccactggaatataatttcccaaccacttaggaataaatttttaaccctgtaacaaacataggtatacacaggaatggatcctctcaatttcccaattttcatccttaaatctcctctttttatttcattgaaaatcctcttcctctctccttttcaatggaaggtgagaacttcaatggaccctcgtgtcaaatgagaggatccagtgccaatttcagtgggctagtttggcttcttaaaaaaaataaaaacgaggatccattcccgaaatatgcatttcctacctatatattcctggaacatgttttctaaattatttgacaaacacatccttattttagcggatttggagttgtactagtaaaagtaatgctacagtagtatttaaccttgttatttgtaaaaataagttgagtcatcaactctttccaaatttgtttgaaatccatgtgttgtaattatttgaagtgatgttatcaaagctgatttttcatttgtgtctgatatgtactactttcctaatgtagggaataacacaacgcaaga

SEQ ID NO: 4214 - DNA, 1859 bp, Medicago truncatula
  Intron number 2 from transcript Medtr3g100490.1 (locus Med tr3g100490) derived from phytozome v7.0 (chr-ID MtChr3; po s 24057518 to 24059376)
tattggcattccctcaaccaccaccaccagcatcggttcacccattttggactccaagttcgtgcactattatgtgacctagttaattagttttctagggtttttaataatttagatgctccccgtaatttttttgggtttagaagcatttttagtttctttgagttatattaacctctattatcaaaagaggattataagatatgcaatttggtttttttggcttgtttctctttttagcttttgtttctgtttccatgtttcaattcctggttttttattgtatttgggttggagtgcctttgaactcaattttctatatattattaacttcatccaacaaaaaattgcaacttttttgaaacaaatgtaattacggttgttactcctatctcccaagaattttatttgacaaaaatgttgacaaaggcttgtacttttacgttattcatattggttttttgagaggtaggttactcatacttgttgtattttataagtattttgagaccaaatcttaaaaatctatgtattaagtaaattttgatgcattgattcttctcaatcaaatcccttgtataacgggagatttctaaaattcggtttttatttctttttctgaaaaggaattttttttatttgtgtagaaaaaaggatgttttaattaagcattaattaattcaataaaaacgtatcattcttcataaataatcaaatcaatgaatcctttaacgacttttcgataaataaattcataaataatcaaagggtcatgttaaccgatgccccagactaactaaacataccaaaataggaaactcatcaaacaaattactcgccttctatgttccaaagtttttcttgctacacttctacccgcaccaagacattaacataatttagtttgtatccttatttatttattttgttagttctgcagcaatttaacctaattttttcccgctcatttgctttattaggtttgcaataatttaacctaacaaattcatctacaaaaatgcatcgcaccaatttaattcctatcctcttgccttttttttttttttttgaacgaaatattttttacacttatttgatgttgcacgattgttctagaaactatgacaatatcgatgattacgtttgatgccttctgttctatactttttttttttttttgacaactttttgtacactttcttttttaagaaaatattttgtacacttatttaatactaaaaaaaacatcacaccaatttcattcatattctcttacttttttttttacaatattttatacacttatccttattaattttgttaagtcttccttatctcaaattattattttcttttattatgattttcctatatacttttgttgtagggacgatgcatgtgttatagtaaaaaaatgaaaatgtactaaattttgtgcgcaactttgaggcatttcaaaggaagaggtgatgagacaataaaaagaggataatatttatggtcactcaccaaaatagaactgtatacctttgagtatatgtactttgggagctttcatgttttccttatattaatttcatgcttttatttttgttttgtttttcttttattttaatttcacgattccacctctcttctatttcacatgtttttgaattgaaaaaagtctgacaaataacttattgtttattatttataaattgaactcacaactaatatattagacattcgtaccaaatatttaaaaactctatgtttaaagtatatctactattaaacataactgtataaatattgctcgggggtttgcccgggtagaggtctagtttttattttatgaaaggcccgtgctggagcag

SEQ ID NO: 4215 - DNA, 1161 bp, Medicago truncatula
  Intron number 1 from transcript Medtr7g139240.1 (locus Med tr7g139240) derived from phytozome v7.0 (chr-ID MtChr7; po s 33258981 to 33260141)
caaacacttaaacctgggctgttgtcttcatcaaggtcaagttctttacatattttgtttccattacatgcaacaacaacagtacaaatatgaaattggatgtgattttgttttatttctagagatgtaaaaatttcttttgtagatgaatcttttttagttctgatgctactgataaaaaagtctgttttttttatactaatgatataattgtaaaattgtgttaggactgtttttggatatgtattatttctttaacttctcatctttatacattttcttgttttgcctcatatgtgatgttgaagattctgtagtttgttaaatatgtcatatgaagctcaacaataaaatgaagataaaaaattaaagaaataatgagtttaatgatcattttcatgattttgtaaagatgaaaagaaattattttacctgtctgtgttcttagttttaaaaagaatttcctgcaacgagagaagaaaatgaagttaaagaaatgagaagaagaaaaaatgtagataagaataagtcagaaaaaagaggaaaggaaaatgaaagaaagatgagagaatatgagtattgaaggataactataaagtctatttgaaatttgaattttgaaattgagaatttggctccattgattggattccgtgtcaaccaaaatctggcttatagttggcatgtaatggaactgactttttgaagagcaaaaaaaatcaaactataagctttttatagttaaatgacataatagtagttaagtgaggtcatttagttagaaaaagtaatttttagacaaaatttacccttaaaagtgatatgtggcagccaatcattgatgggcaaaaataagttttccacaacatcttcccttcttatattaatattaaagagggataattttcaaagagtagcatattaaatgatttatactaacactttataacctccttaattagaaaacaataatatgccaacctctcccctccaaaaccctccatccaaacataccctaaatttgttttttagttgttgctgttgctgtgtttaaatgaaacatagatgatacctcttttgtgattgattgatcatgtgatgtggtgtattgtatttatctgtgcaggtgatttgattacatttgagtgagttcccacaaca

SEQ ID NO: 4216 - DNA, 3210 bp, Medicago truncatula
  Intron number 1 from transcript Medtr5g016010.1 (locus Med tr5g016010) derived from phytozome v7.0 (chr-ID MtChr5; po s 5520847 to 5524056)
tctttgtcagtttaaagcatatttttttttctttctcttgttatggctttctttctcatttacatattttaatttatcaaattctgatgaaataaaaaagttactgttgttatctgctctttcttcatcttttcttaaactctaattaatctaattttgaacaaaccctaagagtgtgtttggatggagaaatgttttgagggaatgtaatgttttgagggaattcaactactttgagttgaattcaaacaatagaattcaccttaaagtagttgaattccctcaaaacatttccctatccaaacacactctaagagtaacaaaactatgatttctattcacttaaactttgaaaaatgaagcatgtgttatcttccagtcttgacatgcgttcaatctttgccttgtgaaatagttccttttttgttgtgctacttcatgcttttgcacagttaaataattcatcaacatacaaattacaagaactgacgaagaagccgatggtgagatgtttgttttgacagggatgattcatttattgtaattaaggagagagaaaataaataaaacaaaattacattactgccaattaaattaagtggtttttcaaaagggttatttgggtttttagtccaaaacataaaggtgtactccctccatcccatattataagcaaaagaaaaaaatcacacttataggaagatgtaaaaacaatttttattggtagttgattatagaaaaaatgaaaaaagaaagcaaattgaatgcactttacatttaattttcctttggagaagataactttttaaaaaaatatataattaaatatgataaaagttgatctttttttgcttataatttaggataaagaaaatgtgttttgtttacttataatttaggacggaggaagtacaatctaatttttgagtgagtgtgcattagcatatatatatatatagacacacaaacaaaatcaattctgatattaatcttttagtttttgaaaacgatataatgtttatttgatgactaaacgtgaccttgagagttgagaaatggagtgataaaaaaattcagagtttcatttttatcgtcaatataatactaacaatatattaacttcagttgtttcaaacaaaatcttctagtgttgttgggttggaatataatcaaacgattttaacatttcatttccgtagaaaggattttcaatttagttaaaattaagtagggttgttgtccactatgtcctccatatacatcttcaatggtgtgaaaaattagaatatgttcttattctcaaaaggcacccatgaacaatatgttggagatgatgttatatagtgtataacccatcattatttgtaattttaaggaatatagttcaaatctcacctatgttggtttgcaaatgtgagttatatgttccacatcgaataaaatagtatggttttggataaaagtatggtgtttttcttgtttgtgtggttgttctagcctcaaatgtggacggtttccccgaacttaataatgatcatcaatactataataatgatgggtaataataataataatttcttcttttttgaatttaaatgtgtaatgtattatttctttggatacaaagaacaatacaaattgcgtctatttataaacatataatactatatgttcagagagtaagaaaaatgataagtgtccttagggggttatttaagaaattaaaagaggtatactttgtataaaaaaattgcgtgtttctttctttgacaaatattttatttgtattttcaagaaaaaagattttattttaaattctttaaactatcgataaaaccgtgaataacaaaggttgaagtgtgattcttatcatcataaaccatttgcaggttagtccaacaaaaaatcatttgtagatggtgtctattctttttaaccgtttgggcgtttcatacgggcatgattagattactagactaataatgtcttgaaactgatggcgattgtgagcccataacattgcacatggagatctcactataaagcaaaaagtactaacaaaaatctgtagagattttatgaaatttgaagtaaattgaaaacgaaatgtcaggatgctgattcgatacagacaaactaatttgcctatcatattccctaatttgtcttgtttatttggttaatgcgattcattttgcaaatcacaattctaataacatcatggctcaatcgggcacctatctatatgattattggttgttaattaacctaatattcttaatctatgacttttccactcatcatccttttccctggtgagtggagtcatttgttgtgtagctagctcttatccagtgtgtggggctacctttattgctaagagatctcacttttgtgtttcctagaacctattgcgattgctttaatcttttataatttaaaaaacagttgttgccttgtgttaacaagtaattcatcatgtaaccaaaaaaaacaagtaactcctctgggttacaaaatgccatcaatttttagcagaacaaacaatcatattttttttgtgttaaccctcctgatttagggaaagatgtcccgataatttagaattggtatgtgagataagtataatctaacaacaaaattatgaacaaatagtcatattgtttattaatattataatttttcaataaggttttaattaatatatgatctcatgaaaaccattgaatcattctctttttttaattatcggatcattatcttgatcataaattcaagggttaatgatattttaccctctgtaatataggtcattttttgttttcccccctgtaaatttttttttttttggaataccttcctaataggtcataaaaaaacgactttattctttttttttgaagaattttttcatttttttatgatctattaggggggtattccaaaaaaaatatattttacaggggtaaataaaaaaaaatattttacaggggaaaacaaaaaatgatctatattacagggggtaaagcaccattaaccctaaattcaatattgacattatatttttattatttttaataagattgtcacttaaattaagcttaatttaaaagtgatttaataagatttgatcaatttggtctttggagtatctaatagagttgtgtctttaatgtgcagagattaattgtctgtttggtttagcgttct

SEQ ID NO: 4217 - DNA, 2701 bp, Medicago truncatula
  Intron number 3 from transcript Medtr7g090250.1 (locus Med tr7g090250) derived from phytozome v7.0 (chr-ID MtChr7; po s 20081662 to 20084362 reverse strand)
gttgagaagtggagcttatagtactcaatcaggtgatttcgaaataaactcatcagatgtatggtgatgctggaggttcgttggggtaatctgatgctgctggttctggttattgtgtattgggtgagttgagatgtggttgccacttgacctttatttatcaattatcatgtgtatcttaaagtagttttgtggcagctatagtgtatactacgtaattgtacgttcactatggagctgctttccacatcttgtgctagtttgctcgattttaatagaagtttgcttattaaaaataaaaatataatgattgtttctgttttggagtcgcattggatgagaacaattttcgtatgttataattattatctaataaatcatttacgtgaacctaagtccgccaggtgagtagcaaggctttattggatcattcaaattcctattatttctttagtacttttattgttgaactattttccttttctttttcagcatctctctttctcagctttgaattagaatcaatttggtttatgttaaactatagttatttttctatgtattttcatttacttatttgatggttttattggcatctcttcccacctatattgcaaagtcatttcactgactgggatgtattttttcttcttcaagaagtttatttgccataaacattagccacaaaattgaaattgtgacattattacctggttttagtttttaatttcttcttgtgtgaatctttttaaggttagtttgttgcaaaactgtgaatttagaaagattatttttcgtccgaagttcatctgatcaaatattcaaagatttcaagtattcgaatccccaagagatgctggtacgtagtgttaaattactaagatcgtctagcacagcttcttccttacaagacgatgacaagttacagtcatgttctgatatgaaaacaacaatgacatgcttctagagaagatcgtgaacaattttatgagatgtacaagggaagagacaagcacatgcacttgaatgcatgtaaccaccacaccaaatgtttctagatttctgaaagatcataggaccataatttgtctgttttgcctttgggtttgatatttgtttcataatgctgcttatatgtaacaaaaggaatactaacaatatactttcaaatacatttattcagtgatgactcttttatctggtgaaatttatgtgagctatacaaaatcacatagatttcactctccattttgtaggagttggatttcacatcaagagtatatcgttggcatttttctttataatgatccttttttaacttctatctggcttatatattaataaaattttcatgcagtttacacattttgcaaatctgaaattaaccttttgatgatttgactccattgggcaacaagggaactgacaactgagaatatgctgatataaggcagtgagaatatactgataaaatgttctgtgagtgttcggaatatgctactgatacttttcagtgatgttaaagttgtagtcctttttgcacctttatagtattttatattttattaattactaatattaatcctatgcattgattcactttgaaattttattcttagttattaaatttaaaaaaatcccattattgaataatttcatgaaaaaaactgacacgtcgtggttagatctatagcaaaaaaaaaaaaacgttaatcttctacaatgaactaatctttgaattttaatttagagaagtgttaacatctagtgtctcgaataagattatcttagatcgatgaaaccaattgaaaggaaaaagaaattgagataagttcacaaattttgaaatcattagttaaaaaactaatatttgaaaccaaactatgatactattattactagtacttggcttttaaatttgtgcattccactcctaggtatttgaaaaccacatcagatcttcactattcaagtcccttcaaaaaaaagttatataaaatttacttcgtatatttattacatgcaatattagaatataaaatgaaataactccgaaggtttgatttaggaataaaaagataagttttgaactcaagattccgggtaaggttttctctatcttaaacttcaactaggacatcatccctcacattaaatttttttcattgaaaaaaaatgtaaaatttaataaaatttctacaaatgtttttcttttacaagcttattggaaagctcttttatactgattttttttagctcttggcatgcatttttttacattatcattagacatgtgattagaaactgattaagaaattattaagaataataaagtaagatataattcttaatagtgttccagcaaatcatgcactttgttgtctaagtcaataaaaaaatgattgagtgagaaaaaggattcaaaacaaaactcctagaatgttgttgttccttcttcactctgtctgtttcctgttacacacgactactttttcacctacaaattatttctacatgattcgtttcttacgtcacaagcttcaattcgatttgtctttctggtgataatagaattagtaaatattaattaaattttgtgttgttttatatgcacaacatttcttaacgctctaattgctttttgattgatgcatgttgttatgttctctatgtgtgtgttcctattttgtatgtttagaaa

SEQ ID NO: 4218 - DNA, 792 bp, Medicago truncatula
  Intron number 2 from transcript Medtr4g023870.1 (locus Med tr4g023870) derived from phytozome v7.0 (chr-ID MtChr4; po s 5333512 to 5334303 reverse strand)
catcctttttgcggagctcacagctctctatcaaggtttgcttctagcaaccaatcttaattacaacgagttggcatgctactcagattctatgcttacggttaatctcatcaacgatgaattgaacccatatcatgtctatgctgtgctcattcagaacatcaaagacctcattagtgcacgtaatttctctcttcatcattcactaagagaaggaaaccagtgtgcagatttcatggccaagatcggagcttccaatgatgttgatttgctaattcactcccaccctccagacgggctctaccctttgttgcagtcggatgaattaggaacgctctttttgaggtgttagtttttctttttttctagttttgtctcttctttttattagccatgtaaccaaaaaaaaaaattaaagttttataaaaagataacttaaaaaaaaattgaagctcgtaagttgctggccgcctcaaataaaataaaaaatgctggttacaaaatttttatctacgaacactacttttacacaggagtttgaaatttttatccatgaacactacttttttttataaacaaattttttatgtataaataaaaagtagtgttcaaagattaaaaatttatccataattctttaaatttttatctatgaacactattttttatccataaaaaaaaaaaaaaatgttggctacagtgagatattatggataaaattttcctttataatttcttaactaatgccctgaagcactagttaatatttccttaaacttaactccagctcac

SEQ ID NO: 4219 - DNA, 680 bp, Medicago truncatula
  Intron number 3 from transcript Medtr4g136750.1 (locus Med tr4g136750) derived from phytozome v7.0 (chr-ID MtChr4; po s 33485359 to 33486038 reverse strand)
atttcgttatcatcagctaatttttccattgataggtaagtagtttatatacatggatctaaattttttgtagttgtaattgattattataattggtaatttacttatgtttttgagaaaaggtcgaatgactcacatagtgattttgaaaattatgaacttcaaatttcaattttttttattttgatcaagattgagataattgactattgttgactaagttttgaaaatttgttttcaatttacagtaattttcatgaactaggttttgattaaaggaaccatctcttcctcataatatgattcttaactacaatgatcaaattgtatttctcattgattgctacatgtaggatacaacttggatattacttgcacgtataataatcaatgctacaaacaatatcttctacatcatatgtaattctccattctttgcatgagcattgccttgcccttgtatataattttgtatccttgtatcaatgaatattctgggctttctataatcttgatataattcactgcatttgacttatcttacgaaatttatttttttatataaattctgaaattcattttttatataaaataatttcattgaactagtttttatttttatgatgtcaaagtgtgatttctaggaaaactaagaatttggttatttgattgacagtgca

SEQ ID NO: 4220 - DNA, 2251 bp, Medicago truncatula
  Intron number 2 from transcript Medtr7g093690.1 (locus Med tr7g093690) derived from phytozome v7.0 (chr-ID MtChr7; po s 21071380 to 21073630 reverse strand)
tggttcacggaaggccccaacctcaagtatgtagttcactttcttatacaattaactcctaagttagtttctacaactagttatagtaataatagagtaatttagagatcatcctgatccaataagtgtttcaacttttttacaatcagattttaccaggtagatttttttcttctgaggaaaattttatcagtagatgtttcttaagatatctattctataaaattatgatgaaaacaaatactataaaatcaagggaatgttatattggtttggggggttaaggagtaaagtgacaaaaaaattgaatgaaggttcattctttactatcaatagataacaattactactaaaattaacttttggtacaatcactaaaaaatattaacttttgctgtcaaaaaacaacttttcataggcttaaaatatagataattcttataatttataatataattaaaaaaattagattaaaagactctaagtatggtaattttcatcttactgattcttcaccatggcccctgaagaagaatgtgtcggagattgcttgttaccttcagaactaagttgcttgactttttcggttacgtacaatttctcctcttgaccatttcctacatgattttcaccaaactattacgttgtcacatctttgaaaatcctagagttttaattggtccaactctagcaatattctttaatttggattattatgtggcctaattttggcaccatccatatgatatgaccgtgtcaaagagtctcctttgctgaattaaaatcgttggcaacctccacacagtcataattggacgtatcaatcgtgatctgaatgattcgatagtgctgacaagatatcatacgattttagatagatttgtgataccattttagaactttgggttgagtttaactcaatcttaatgaagattgtcctcacttataaacacattttcatgccatatcttattaaacttgggacttttatcaatgttttgatacttattacatttttttatagggattactttttacttttatttttttattattggttaaaagttgaaacgtgtcactgtcccaccacttttgacttttgattaattcatgaatcacataagtatttggtaggcttgagtagtttagagtatttagacatagtaatttgaaaactgatttattgtttgactccaagcatcaattcttacagtttctctcatttctactagtgttaggtaaagtaatactaatttccaacagaaaatacaaatattattagtactataggtgacctaaattttcatttgcatcaattcaatactactagtatactttaaaactcatcaaactcacatcaacttggcaaaatcctatttcagtgtccaaatcctttgtttctccacaaatccatttttactaaagatgcaacttcttcatccaagcatcttctcattcttgatcacaaccataatcctaatcaaaatcccaacatcatcttgtgctgataatttgcagcagtacaataaatgcagttctttatttgactgtgcaaacctaaaaaacttgaggtatcctttctggggatcaagtagaccacaatattgtggccacccttcttttgagctacaatgcaaagatgaattagcaagcattaccattatgtcacaaaattataaaattcttgaagtcagtgattcagatcatagactcaaagttgttagaactgattattggaacaatgtttgtcccaccagccttaaaaacacaacattagattgcactttcttcgattatggttcggattctcataatttgacactctactatgattgtcctcacaccccatttcttatgccagatagcttttccccgcagtttaactgtagtataaatggaactcaaatggttaattattttatgttggagagcgttgctgataatgccgagagtttggattcgtttagtgagacactgagaacatgcaaatctagagtggttgttccatttttggagtcagaggctgaaagggtcgcaacaaattcaagtgtggaaaatttgaaggatgttattgataatggttttggggtggagtggaatgcaaataatagtttgtgccatgagtgtcaaagttctggtggacactgtggttatgagtcaagttcaagggaattcacttgcttttgcaaggatggatcctttccacattcatgtagctcaggtgaacaccattgtaggttccactgttgtg

SEQ ID NO: 4221 - DNA, 1282 bp, Medicago truncatula
  Intron number 2 from transcript Medtr3g110440.1 (locus Med tr3g110440) derived from phytozome v7.0 (chr-ID MtChr3; po s 27828756 to 27830037)
ttgattgtgactcatccctcgaaattgtgtggaaggtactcaataatttttcacttattgcgatatatttaaaatccatcaaaagtatatttttatgaaattgtacaatttcatgtttatatgattttatatggataccatctataagcaaaacgttattgttttaaatatctactatgcattatcttagaattgattttaagacctcatataaattaattagtacaatagttttattattaaagtctttcttgcttctcagttgtacgatgagtctcaactctcaagagttccaatcattgctccaattaatatttaataaaatcattgctccaattaggtatacaatatatgatagatagatacattatattgtaaaagaagtaggagaaatgcaatactattattctgaagtaatggtaggattatattatcatagatatgttgttataagttaattgtatatataaaaaatattcttttaatatgtatctaaagcatattttcagggaatactctatagaatcactaaatagcagttcaaagaatggtttgaatggtttatatggatactcttggagatgatttattgctaggaaattagttaggggtctttgtttatattacgaatggtttttgaaccctattctttgtcttaatttttgatgtagggtgtttactttttgcgaggcgagtaccccttgttctttttctgatttacgggttaaatactttttgtacttttctcgttatataataatttttatgttaaaaaaaaaagcagtttaaagaatatttccatgggatactctataaaaccaccaagtactagtacaattaaagactggttcttcatctactaggagtacataaaatatttgattgctctcacgaagtcaaaattatctaatatactaataatataattttatgtacatatataaatagcaaaacttaagaattgcaaagaagtagtatgtgtgtgtaaaatctttaaattgctcagggtcatagacatatataatgatatgaaattttctcctattttttattagatatgtaggtgtattcttttttgcgatttctcttttttgttttagggcaattttgcattttctcttatgttttataattttagtactttagatatatataacatagtatattttttttagatttaacattttttttgttatattcattaactcaatttttttttacatttttaaaaaaaacttcttggccaggttttcagaaaattacttgaacctataattgagcc

SEQ ID NO: 4222 - DNA, 1535 bp, Medicago truncatula
  Intron number 1 from transcript Medtr5g038220.1 (locus Med tr5g038220) derived from phytozome v7.0 (chr-ID MtChr5; po s 16133075 to 16134609 reverse strand)
acgatcggctagccaatcatcatcttcgattcaaggttcgctccatccatttcttcaccgcattgcacttttccgatttcgttgctccaacgaaattttcgtaaccgtagaatcttgatattttcggcattgcgtttttttttttttttttttaggattttagtttctggaactcgtgtgagttcgttttccgaagttggtgattttgatttcatgaattttgttcagtattagtattttttattactccgaaattgatcttgagtgttacattgttttaaaatgattatgaaaaattgaaaatatgtaagtatatgaaggactataccaattgtacaacattttcattattaactataaagcacagactcggacacaaatacgcagacaccgatagtaatttgagaaatgatataattcaatgtatcgtatatgttggtgtatacataactacattgagacacacctaatccgaggagtatctgtgcttcgtagctgtcaacacatcacaatcaatcatgtgtgtgactttagaagtgattatgagtaagataaagttatttttaatgacctaacaattatgattaatttatattgtaaaaactctttcgatatgaattaaaccctaacattattgcaaatgcataattgagcataattaacttgagaataatgtatatagttgcatcaatttgaggtagaattggattaaaatatgtaataataataaaacaaagaattggattaaaataattatggttacattgaaaacataaatttaaatttatgcttattttgggacaatttttggcttgatttgagatttgtcacttgcaggatacatttattgtttgtctagacaaattgctattgttttgcgatacactattttatacaacgtgtccccaaataacaattttagtggcactatagcctatagccatgtagcgtcacaaaattagaacaaattgatattttttgcgatactcaattacaaacactggtttgaaattgagaaatgttgttgagtgtggaatcttgagttttagattttatcagctgagccatgttgtttatggtagttaatgtatactttatattttcagagtgaaaagtcattttctttatgaactaagcggttcctagtgatctctaacagggtgaaagagtaatagcattctactttgtgaaatattttgcactgcttaatcaactttcagtatctttttcttcggttcttttactgaacttattggttgaaacttgaaagaagatagcccgacacattgcacaggaatatcgtttaagagtgtagtttcaatctagcacaattatgaacacactgaaacagaatggagtgtcattttgctgaacttatcattgaaataagttcacttatattacgttttcgagatttctgcttcatggatgatattatattgtatattcattcacacttatactttgagattttttgttaattgatatgcattatgccaggggaattcaatatccactacaaagtacaacttttt

SEQ ID NO: 4223 - DNA, 1113 bp, Medicago truncatula
  Intron number 11 from transcript Medtr4g159170.1 (locus Me dtr4g159170) derived from phytozome v7.0 (chr-ID MtChr4; p os 40106321 to 40107433)
gcctgccttttgatcataagaaaggtgaatgaataatgagtattcctaatttaattacttttcgtgcgtattcttgttaattcatgatatttatttattgtgacaaaaccatgttttgggaaaatggtatccggtaaagattacaggcttgggaaataaatgttgttttgttgatcctccgggttaactgtaaaattaggatgaaatctaaaataacatttataacaattttttagccttttatatgaagtttatgttctttgaaaatagtattcagcatttttttaccaggacgtggttttgctaatggctggattttgatcttgatattgtttgattgactgtgaccatatccgacttaggctctgtttggtaaaaaatagtgaatagctgataatctagtttatagcggataagctagccgattgaatttgtagtgtttggtaaaattagtaattgaactagcttataaatatgaaatgacaaaaaattaatatatattttttttcaaattgagattacaggggtaaaattgagagaaaatcataagctatatgctacttgaattagcttatcaaaaatgctattatctagtgaaaataagttataagctcatgagaaaatgatggttaccaaacgactcttttttagtcgtatgaactaataagctataagctcaaaaaggtgtcttgcaaagagacccttagcagttgatcagagatttagaagtttttaagtgaaaacaaaacagtaggatggcccaaatgtctaaccttaaaatcaaaatttgtagattccacttgcacttgtgtattcactgtatgtaggtccatgtagataggacttgtagatggattcggttgctcttttgtgatgatgcaattttatttactttctttcctctgttcattgtagattaatgggattggatcattcagatcttcctgctttgtagtctttcctcatgctttataaaaaaaaaaaaaaaaaaaaaaaaatcatacattgacctagaattaacaagcatgatgctttggggtatctagatgtgtcatctgacagtagctcatagttaatatatatatgatgggtacctttcaggtatagttccaa

SEQ ID NO: 4224 - DNA, 2307 bp, Medicago truncatula
  Intron number 1 from transcript Medtr8g125580.1 (locus Med tr8g125580) derived from phytozome v7.0 (chr-ID MtChr8; po s 29316745 to 29319051 reverse strand)
ctacgacaataacaccgccgacatcgtttgtgaatacggatcaaggattgatttagcctttgaaactgtcaatcataacatgcagagttcagattgggtagaaggattttatgatttaaaaaaatttaacgtttttaggtatttgtagtttgtttttttttttttttctaattccttttatgtttttttaatgtgaaaaactgccttttcatgtgttcgtattttttattttaaaaaaatcactatttaattttgatggaatatatgctaactttttaggatggaacatatgctattggtaattttgaatttttacctttaaaatacaggcctacaaggtaaaatccaagtttttaccttaaatctttatttaatttttttattgtcaagtacactttcattcttttcatttctatccactcggacactttaatctttaaatatggttagtgtctctttagataggcggtctgtaaatcacgttttgcttgaaatcatgacataaaacaactttaacataatctttaattcttaactacttaaaatcaaggcaaatttacatctaatagcatgcaaatgcgcttttgcttcatcaaacccaactccaaaaaataaaaaaaaattactttgcaaaaataatcttattttaaaaataaaaaatgaccaacattttcttttcatttatgttaaaaaatttagtcaaacccgtgcaacgcacgagttgtctccctagtagcatttgaaacgggtttaaaaccaactcccatacaagatggaatagttgacttcttacttcaaaactcgccgtctacgaaagttgacataacagatttttaaacttaaacaggtattcaatttaaaaaaaaaaaaaataccattgttattgtaattatctaaaacaattttttttttcaatatctcgttgaacaatttatccaatctaacatacattattctttatagttgttcatggatttaggtggttgcattttgttttacgttcacgtctttgtaatccaatttcaaaataaaaggatagtttaggccctttcattgtagttaattttgagtctcctggttgagtggtactattgaaatatgcctattgtctcgagtgtatttggaaaacattttattagactgaaatcgataaatgcttatgcatgatatcggtggtggatgacactacaacaactattattaagttaatgcttatatattattgagatttactaattttttcaaccatttttttatatgtttttactttgagcttgtattagaaccaaataattggttagtattataattttaaaatatgctagaaatagtgaaaatactttttttagtcaacatttgacagcaattataatctacacttatataaatctaaatggtatgagtgtatgaccttgacacggacaccctaattaattttatagctgacattaatctcccctaaagtctctttttttcaaaggctaaattagattatctcattattaattaatatgtacaaataagagggtacatcataaaaaataagagggtctaagatgggataaggaagttctcgctataacaactttatttactactctaacctaacttacaacaaaattagtgtaagatgacaatacaactttatatctagtaataatagataaacacatcccttactacttaacactattattaccctgttaaaaatatttaaaaaaaaaaaccatacattttctatttatgatgacaatcttcctccaccgaatattctagcattgttgtaagcttttcaaatctttttcatttgatttattttttatttatatcaaatttctactataactataactaaaactataacatttgagacttctttcaatcaattgaagaataaaccccatgaaaaaagtctcagatatgttattcccgtgtgaaccctaagcagtgatgcacgctgcttaaagaaatgaacacagtcacatttatttggttttgtttctacagaacccattctttatcccaaaggaactatacgagtttcccttcaatttatttgtgtttgtttcattcttacaatgcagctcatgccatatgatttatgctctttaacatcaaatacttatcatgtgctcatgagaacgaactacttttatcacaaaattattgattgtggaatgcatcttgtcaattttttaatatttcatgttatgttaatatttgtttgcttcgttttttatacctctttgtaaacttttgatttgaatgatttcagagtgataattgataatgtttttggcatttagg

SEQ ID NO: 4225 - DNA, 2099 bp, Medicago truncatula
  Intron number 2 from transcript Medtr5g038230.1 (locus Med tr5g038230) derived from phytozome v7.0 (chr-ID MtChr5; po s 16144389 to 16146487)
ggagtgttttaccaacagttatatctcctcaacttgtaagtttctctttttcttcagtcttcacaaatttggcgaaatctggcatttttttgtgttaagagacccttgtaatctagagttcggcctcgagctaagttaagtcgggctaaaaattgttccactcagaaattgaactcaggttctcctaaacaattcatccttggtggggctcattaaccactttagcctatcacttttaaatgagttatccttagggaaaaaaaaaccgagttcttttattgcaaccatgttagtgtatgtttagatttgtggttgcaaaaatcacaatgactcactgacagtgagtcactgtgattctgtcaaacatgcatttactgtagtaaatataggttaggccattagtgatcatgaataatcatgtgcagaggtacacactcaacattagttgtccattctctatttaattttttttattagtccgttctctgtaaaattatcacattttgtaaaggttgttattttgcatggaattttcgtataaaccgagctccacacatcgcaaccctaagctgggtaggaccacatgagtgacaaaactcttgctcgtgagttttattgttgttgcattcttagagttcaagcttgagagttgagacctctgattaagctagaagccacacatgttattccatttaaatgctcttaggttgcatgacatttacatttacttattggagaaactaccaaattaccaataataaaaagtgtagtgtttagtccctgtgagcagttggtacttggtagggatattgcagtatgcaggggccggggttctaaccccggattccccacttattcaccttaaagggtgaatttctagccactacgctaattgaccccccaaaaaaagtgcagtgtttagtaacaattctagtatgaattatcatattctggagtttggaagctttcattttaaattactatcatcatccatttttggaagaaaaaaaaacttttgggtttgtatataaagactcttttgcatgcaaaagaaataactgcaaatttcaagtatatccttcattttcattagctcactcacccatttacactccctcttcattaatgtaagtatgaagtaattgataaagggttaattgacaaaaataattagttaatttaacattgaattaaaaatgacggttaaataagaacaaatcttttgaaaaaagctgacgattaaaagaagaagatgcagtactgtactataggttagaccattagtatgataatgtgcaaaactacacactcaacattattacattttgtaaaagttggtttatgttgcatgacatgttggtatgaactgggtattgcaacccttgagctggtaggaccacatggacagcaaaatctcccctttaagagtttatgtgctgctacattttcagagttcgaactcgagggctttattcaaactggaagagacttgtgtcaactaatttaaacgctcttgggttgggttgcatgacatttaaatttacttcttagagaaactaccaataattaagtgtagagtgtttagtaacatttttagaatgtatatctcaccttgtactgaaggaagaaaaaaatgtacatcaccggtcattagtcggtttttgaatatattgcatgaagttttagcttcaagtttccttcccatcttttattttagtaaatccttaatgaaattgtgatggttatgcaatttagagttttaaacatatattttgccttttcaagtctctaattttatgatcggggttgtttttggattagctaatcttgtggtagataagcttatgatgaaaatcgaataagagagcttttaaaagagaaactgttattttccaaaaattaagctgaatcaaacatgtagttattcatgaggcatggtttgcctttgatttctaaacactaggcaaggtagaatataaatgtgctgcatggtgttttttgaagtttaggcgctgaaatttatccttcaatgtgtccttaactgctttttcattttactttccatttggatggggaaattcaggtttcttttgctgttg

SEQ ID NO: 4226 - DNA, 723 bp, Medicago truncatula
  Intron number 1 from transcript AC233571_7.1 (locus AC2335 71_7) derived from phytozome v7.0 (chr-ID AC233571; pos 35 151 to 35873 reverse strand)
aaagaacattgtatcaagaaatctcttcatttaaggtgttctatttccatattttttattctattgatttcctattttttgtaagtgttgcaagagttaagttaattagtgaatattttatacatgtgcatgttttgtatttcttaatcattttctctacaattttgaaggttgtgcaagaaggaaggcatgtccataataatgaaagtacttcaataaatgatggtactatatggttgttatttttttgtagtttcattgcatctcttagtgtatctaacatttgatatttataataacaattcggcctaataattcctatttgcactttcagcctcatctcttgttgttatttttttgtagtttcattgcatctcttagtgtatctaacatttgatatttataataacaattcggcctaataattcctatttgcactttcagcctcatctctgaataatgtaccagacaagcatttcttggaaaatgttcttgatatcatacaaaagtgaaaatcatataagcttatgattgtttaggcaatatatatatatatatttttttttatgatctcatcaattaaatgtgataaagtacatttgtacccttataattctttctagagggatatctaagtaactagatacggtttgttaataattaattgaataattcttaatattttatgataatttattacactttgttagtgatattctattc

SEQ ID NO: 4227 - DNA, 1451 bp, Medicago truncatula
  Intron number 3 from transcript Medtr4g011660.1 (locus Med tr4g011660) derived from phytozome v7.0 (chr-ID MtChr4; po s 1740745 to 1742195 reverse strand)
agaagaaagaaagcgtcaataatattgtcacaaaggtgagtgctgattaaatatttgtgtttggcgcaaccatttatctgctatcaatgcattgtcttctatttttttcccaatattctatttattttattatatgaaactgacttgatagaacctatattctatgttttttttttcttcctaaaaaagtgttcaatatgtttgttttcctgaattctatctatgttattcatgaatggaaccaaaacaatcaaaaaaaaaattattagcaaaagatattaacaagttgagtacaagaaatactaaactcaaaaaagttcattgtaaatgcaatcagatgaaactagaaaacttcctaccagcaaaagcaaaaaacaatatgtttccacacaagaaacaagatacagatacattaaccaattcatgaagaaccatcagaacctcaaaaaggtaacatttgaccataattattttctgtaataaacccacaaatagagaaatatagatcacataatatactttttctttttgctgaatcaaaagcattggaaaacatcaggaggaggcttcacatcccaactaggttggcaccccaagaccacctccatcctatgggaaatagagcccaaccatggtctctaacaaaacccggtctctaacaaaagcgggtaaatcattccaccaaaaaataatcgtgacaccatgcccaagcatagccaatttgtcagcacaaccgttcccctcacagtagaaaaagaatggagattatgccactgattgcgcaaagcaaatcaacaatagcaaacacaaataccagataaattattctgaatattatttcaaaaagatgagtagaatgttacaaaagctagatcataacatggaaacaactaaaaaaaaaaacaccaaagtaccaaaacaataatatttattttttaaataacatcatttccatgttacaaaaaagtaaagtaacattttttaaaatattttgaaaaataaattataatacttttataatgttatactacaaaagtttttaaatgttttcggtgttttccttctgaattgcaaataatgttacactacaaaatttaactaccaaaagtttttaaatgttttctgtgttttccttctgaattgcaaatattagtatttttttttcccttgtcaggactcgaaacttgaacctttaactcctcattttccttcaaagttcttgagttacccaacctctgtattttaagacctataagtttttatttttatgacataagcttaaatgtaatttattatctagccataagaataacattataccttttgttaattcagtaatatttttaaatgtagttatattttgtttatgttatatcactgacatctaactttttatgaagattttgatacatttttttgttaataagttgaagggtgtaggagaaaagtca

SEQ ID NO: 4228 - DNA, 1858 bp, Medicago truncatula
  Intron number 1 from transcript Medtr4g019550.1 (locus Med tr4g019550) derived from phytozome v7.0 (chr-ID MtChr4; po s 4006175 to 4008032 reverse strand)
gaactcgtcaacctcgtaatttaaggtacagattcaactttttatttgtttgggttaaagtaactattgataatgatttaggataatacaacatgtttaatcttttgttttgtttagatttagttgtagaaaaacgtatacccatttgtaaaaatttaatttttatgaaaataaagggtgtttaggttttaatatcatgtgtgtgattggtttcacttctagagggaccaaattgatcgtagaggtttggttgatgctagtgttggattaattaaacttttatcaactagtagagttgattttgcatctagaattgatgctacttgaagcttgaagctaggtttgagcttttgattctacaatggattttcacactcaaatttattgttaaactcacttctacaatcgatttttgatagaacactatgcgtcatttgattcatgtagctgaccccatttagtgggataaggcttggttgttgttgttgttgttgcttctacataaatatatccaaacataaatcactttattttcaatttggaatcaattttacagaatcaattgactataaaacattttttggcaatgtagaacctaatgtacactgaaagcaagttgaaggtaagctgtttgtgtttggataatgtagaaatcgattctagaatccaaagatcctattagtgttaatattaatacgagtgagccagtgaggaggctggaagggtctgattttgttacagttttgaggttttgtagttagctctaccagaaaagtttattttttttagtggttgtagttgcttaaaccctattgttgttttcagaattgaactgtattaggggtatggttttgttttatgatttgtaatttgaattcagagactgggggtatggttttgtgcttttatgatttgtagtttgaaagaatggatttacttgtgtttttcctttctagaaatgcatgcttatgagtgtttgcgtggaaattgggagggaaggggaagagtatgttggggaaagaatccatgtgtattggatatttgaactcaagtatcggggaaagtgtgtagtatttggaggaaaaggagtgaggaaaagatcctatgtagcaccagcacttcgaatcaaatgtatatgaggtgtttgacacttgttggggtctgacattgacatattggatcatatgatgcattcaatcacttctatttcttgaattcggtgtcgatgtcaatgtattcagtaactgtgtctgtgtgagtgcttcagagataaaactctcaccctgtttgaatgtcaaaccctctatctagggaaactttgaaagaggagtaaaggatggttttggagggttttaaaattttctaaacccctctcctttattttgaaatcttcctaaacaaggggagggtagggttatcatttctcttcccttccatcccctctaaaagtcaaatcaagttcggactaaaaccctccaatatggaggagctaaaccacgttggagggttctgaattctactgaacaaagcagtcgtgtttttggaaaacgagaaggtggtttttgaagttgaagatgagtcagggggctcaaatcaatatttagtggactagggcctgattttgctatttctattatttattcaatacaagtaatatggtttctttctttgtagttgtagtttcataaatgtaaaccccaaatttaaaacttaatgtattctttaatagtatcttatttgaaaaaaatggttattgttcttgaatatgaatagcatggcttaacagctgaaattagctttcagtggactagggtctgactttgaaattcctatgattctgtagtgaggaggatagaaa

SEQ ID NO: 4229 - DNA, 854 bp, Medicago truncatula
  Intron number 2 from transcript Medtr8g012660.1 (locus Med tr8g012660) derived from phytozome v7.0 (chr-ID MtChr8; po s 2191184 to 2192037)
cagatttcttaaagaagacaataccttatttcaaggtaacaagtcctaaaattcaaagttgaaagtactgttgatttcaagaaaatatgccgacatatatttgattgacagagaacatttatagatatttgttattttttctttataatttaaaattgagaatagggaaggcataccctcatgcaaggtcgaagagaaccaccatcctcattgaggatttataatagaatttacgtataacctaccaattgcagaatttcggacttgaattgtatgcttataatgattttgttatgttttagattgcacatatcgttaaagttagtttctatattgcagaattttcacagctgtggctagagttttactttcgaaatattataaccctccaaacttgagactggtgcacatttgaatctcaagtatccaattgagtgttctttgaatttctgatttttaatcacacaatcattcagaggaatgtttgataagttgtaccatgtcctgtcatctactattctcccattcaaaacaaagtttgtaacattttttgtcttttatcagcatcaatttcaaaactagtcctcaagttatataagtgactcgcaactttaaaaaatgaaagaaattttccactatttctgggatagttgatagtgtaattcacccaaggattataaactgcaacgtatatcttgtgactttaatctacttatcactccattccttaataattctgttctaccaatgtttggaatagtctaaataagatttaaaataatgcttatctaggcataactctagtctctaagtctaaccaaattttcttgttttactctaattgaagggaaggg

SEQ ID NO: 4230 - DNA, 2181 bp, Medicago truncatula
  Intron number 2 from transcript AC235488_33.1 (locus AC235 488_33) derived from phytozome v7.0 (chr-ID AC235488; pos 150388 to 152568 reverse strand)
ctgaagcctggtggattctttgcctttgaggtatgtcccttgttctgagaaagttctctcaaatttcttgtgtttgtatcgggcttctgcttactctcaaaaaggatccaaatggtacccccaagcataattggtcaaattgcaaaaaaaaattataaacagtccttttaataaaaaggttttagtcatttgtaattctctaaaataataagtcaatgctcgttaaactaattttgcctgaatagtatcacctagccagaaatcaagttaactttttaaaataagcatatttcttggcagttcataaagttaattatagggattttctttctattggtatcttttattatattgtgtatgttgttattcgatgtcaatgtatatcttgggtagtttatatatgttgttttaaatctgtttggtctgttggtttagagacttggttagttagtcagttttttttttttttttttttgacaaaagcaaaattacaaaaaggagaaaacccaaaaacatggtgactagcccatgaaccggccgccctcgctaaagagtgagcaactatatccgcttgtcgccgaataaactttacctcgaagttggaatgtagagatagctggttattaataaccgaaagtagcatgtaaaattcagaaactccgctacgctgagacaatggagaattcacaagcatgcacgaatccgactcaaaaacgacattgcaccaccatttggttggttggttagttaagctgagatagattgggcatgttgcctataaaaacaaaagggtaattgaaaaggagggcagtcatttggtgaaaattagaattgtgattagggagagtcctgagtttctcgtatagcttcttgggattttcatactttctgtttattggaaaagaaaacattccttatattcgtcatcttagccagttcctgtcaaaatcatagatttcatgttagtttagaatacaaatattagcattaatttatattctcattgaagtatggaacacaaaatacctgacttgtttaatggttttgaagctacatacacatagctatgttagtgattccttgtttctcaatttagttttaaagtggtgacccgtgaaatattacttgtgcaaaatgctgcatatagagttgccacgcccacggtttccttgtttctcaatttagtttttaagtggtgacccgtgaaatattacttgtgcaaaatgctgtgttatagagttgtcatgtcacgcccaaggtttcattttagcttagaatacaaatatcagcattaacttatgctctcattgaagtaggggaacataaaatttgtcaatttagttatggtttaatggttttgaagctacacaactatgttagcgattccatgtttctcaatgtataattgatgcgattttaaataatgggtggttacaaagaatatgggtgttgcaactactggtatatgggctgtagttgatatatttgagaaaaattcccatgttagcaactttgaaaattttcaattttgcacaaaggccatgatattgcagctgctgtgcctgctttgcggcttctattctgtttcttattttaactacaaatagaaatcaactgcgaataaatttttgcagttagatttttaggcttaaattgatcgagcttaagtttaattgagtttagtagttgcaactattcctccttatcatcaattaatcaaaaacaaaaagttagggtatggaacaggacagatccatggagctgctgtaatataagacagtgcaaaggtttgacgatttcaaatctaaggttagcttcggtagattctaaaaaaccagatctccttgttagaatcaaagactgaaatccgtctctttattcttaggatttcaattaacaaaccatatcaattagcatttattctatttcttctgcatgctattatcaatagaggtgagtgtagtctgattcagacacacagaatctcaactagttttagaatcctaatcctttagcaaataattatgatatattgtggaatatacaatcaaccatataatcttcacaagtagcccagaaagtggaatgcagttatattaaacttaagctttcttcatgctattgtatattgattatatgccgcttctgactgtttctttcctaacttgttattgcagacaa

SEQ ID NO: 4231 - DNA, 967 bp, Medicago truncatula
  Intron number 6 from transcript Medtr6g098890.1 (locus Med tr6g098890) derived from phytozome v7.0 (chr-ID MtChr6; po s 21572117 to 21573083)
taattctactgaagaaacagaaggctcgagtaaaggttttaatttcagtcgcccgatgatcatcttgtttttgtccctacctgtgttgaaattattagggatgtgggtacgaaggtgaagagctgcgggtatagttgggtatgtaaacaagacctacaaaagttcaacttaacaatgatgaatcacgaaaattccttggctcagaagtgcaagattttggaaattgaagaatagtgatagcgtagcacataaggtatgaaagaatgctcacggaacttgcaatttatcattaatggaatatctaccttactttaacttgatcattctttattgtaattccaaggataaatgtttaaaaaatgacatcttttattctcataaccacttcacagagaagaaaaaacacatggattacaagaaggtcatcatgaagagtctaaaaaaaatggacaagaggagaggcatcgacatgatttacatctctaagactaaagctatttcaaaagaatcttgttaacaatataatcattttgtttttttacctgttttagttgtaatgttcacctaagactgatacaatttctgctctattttttaaatgacacaattgggttgagtatcaggttcttttttaattttgaaagcaactagtacatcagatgctatgacatatttatattgaacttggataattggattgaaaacttattctttgttatattgatttagcaatatggatgattgaaatttggagactttgttaattgttttttcttagtgaataagatatgatagcagttgtttttccagaaaaatagtatcaaaggatggcaatacattatggaactaaaaatgttgtgtttgcttactgttggctgatatatagaagaaatttggaaggcattcttttggagaatttgttgaaattctcctactgctgataagaaatccagaagactagcagccg

SEQ ID NO: 4232 - DNA, 2937 bp, Medicago truncatula
  Intron number 4 from transcript Medtr8g138870.1 (locus Med tr8g138870) derived from phytozome v7.0 (chr-ID MtChr8; po s 33698835 to 33701771)
tcagaaccatattagcttctcaaggcgagccaaaggtataagcattgataaatttaaggctgtaatatagtttcaaagtaaatttgtgtgattaaatgttttgaaggtcattgaaaccaattaatggctgttattatgtgatgcttcatagacctcccagttcatacaactttaagttttttccccaccattagtatggccgactacatctcaatcttcgtgcttcagtgttttatgtcaacgtcattattttctcgggtgagtgttcccctttggtttcttggcttattagccaatatagttttttagatccggtcatatcatgtgagttgtgttttctagagcatcacattcttttggagtgcaccatacactttaaagaagacaaatatgatcttactcaagccagacattcaactttaaagcaataaaatatatatttgattgtcctcctagttaacgtgtagtttagtaaaatgtatttaataaccattcgtgacaaagaatcaatatattttagaatactcgtctatgagatgtgggaagtgctatcactgaacctgtaatccagtgatggatataaaatatatatttgattgtcctcctagttaacgtgaaggtcggtaaaatgtatttaataaccatttgtgacaaagaatcaacatatttaaaagttaagaatcaatattttagaatactcgtctacacacgtgggtgtgggtaactgttatcactgaacttgttgtccagcggtgggtacatgttatagttagtgagggtaactgccactacttatctatgggatgttccattagaaatatttctaatggacacgaattattataaataattccagttcctcgttaatcatctacaaatttaggttcccacggttactcattaattaacattttgtgcaaagaaaggcaaataatatatttgaatgtccttctaacaatatgttttttctcatgggagtatagcaatatgttaaatgttgcattttttggtatactattttttttttttgtttagcaagatatattggtatgcgattataatatcttttgtattattggtttcatctgtcgatgaaatttgactgtcacaaattgttgtgttcaacaatgccgttcagttgacagcaaacaaggacatttcaatatatttgagtgtgaaaacctgatttttacaaaactggaaattccaggtgttggtggtaccccaaacatagatggtatcaaaataggggttcaaatggtaactatcacaagtgtgaacgttgcagcgggtgatgactgcattgctatgatctctagtactaagaatgtttggatttcatatgttctttgtggtcttggtcatggaatcggtgttgaaagccttggtaagaatgatggggaagatgttgaaaacatagatatgaggaattgcacattcagttgcacaaataacggtcttaggattaaaacacatgcttctccattgagctaaactttgaaggcttctaattttttctctgaagatattgtgatgaataaagtggttaattttgttgttatcgatcaagagtattgtctgaattgtgcctgcacctttaagattagtacttagccacattccaattctaatattaaacccactaaatcaaattggcattaaaatgtaagttgggtttaatattataattagaatgagggttaaaagtactaacctgattattgcaagcgctgtttggacaatattcttgatcaataacaatgagtttatacacattattcatcataatatcttcatagacaaaattagaaaccttacaagttttgctcaatggagaagcccatgttttagtcctaagaccattgcttctacaactcagggtgtaattcctcatatctatgttttcaacatcttccccatcactattaacaaggcttccgacactaaatccacgacaaggaccacacaaaacattggaaatccatacattcccagtaccagagatcatagcaatgcaatcatcaccagttgcaatgttcacacttgtgatagttaccccatttcagcaattgagctccctatcttgataccatttgtgtctaggctatcactgcgggttggaatttcaagttttgtgaaaatcatgtttccacaaccaaatatattgaaatgccattgtcagctgttaattgaatgcaattgttaaacataaccatttgtgataaagtcaaacttcattgaccgatgaaaccaataaatacaatatatcttgttaaacaacaaaatcaattagtatactaaaaaatgcaacatttaacatattagtcgattcccataaaaatacaaatatagtatttgccttggtagtattctttgcacaaattcttaattaaagagtaagtgttgggaactcaagatagatgatgattgatgagggcactatagcagtttatattttaatctaatgaaaatctcatagatgagtagtagcagttgccctcacaaactacaacatataagccacatgttgacagattcatgatggcagtagaccacaactcatagacgagtattcttaaatatctttaattctttactaataaggtcccctggagcttagatggcgaatggactgagcattagcataccatgattgttgtattgttaaatattgatcctttgctactggcaagcctatgttgcctgcctctttaaggattgctattactgaacagaaacatcatggtggtcctgagttatataggaaattatgagtctgttatcaattaaacagtgaactctgcttgtgcatgtgccatttaagctcttctgttttgcgttgtgtggaaatactaatcttgttttggtcattttcaaactaatttgtttgtaacaaagttttgcacatattttgccatcatttaggtatatcctaac

SEQ ID NO: 4233 - DNA, 2933 bp, Medicago truncatula
  Intron number 4 from transcript Medtr7g092580.2 (locus Med tr7g092580) derived from phytozome v7.0 (chr-ID MtChr7; po s 20420985 to 20423917 reverse strand)
tgagaaatgtgagtatcagtagaagttgatggttttctttcatttccttagtataatttcctggaattgtgttttttattaccccaatttccttgtcttcttgaatggaagtttatcactggtgcagtaatacttttagcaatgaagttcattatatgttgaagcatgtattttgtattcatggtggaatactgcgtcaccgtgtgttgagtttaatctgtagttttgagcttcgttaaaatcatgattatttattattgggatgtgagaaaagcaatcctatcgtcaaaccaaacaattgtggagtaaatcctaatgtgtggttgtgtttactggtgtattagaagaccttcaatggaagaatgacaaatcttacagttaatttagttgtattagttagacagggatcttaatactacaaaaactagaagggaaagtaaacgcagcattgttaaatagcgcatagtggcactgcacgatagtgctattgcatagcggaatttgaacgaatcgctattgttcagcgatacactatttagtacaaaatattgtgaaatagtggctatcgcggtgctatagtactgttacatagcggaatttgagcaaaccactattttctgcaatctgcaattgacatcattgaaaaatagtgggaggtctatgattttttgagtgaaattgggagagagtgcaggtctcttgaatacctagggtgctgaaaagacacccatttccattgtacattcttggcattcgaactttaatcacattcgttagaacttagaaggctttctttttgtaacgaagtttgctgttttccaaatctgatctatttccatcagtatgctacatcaatcccaagattactggttaaatagttgccggataccttctagcatgagcagttaatggtgacacgatgtcaacattgggctgcacctattgtcatgtatttcttgtgtagaatctgtatttgttaggtacctcacagttactaaagtcgatattaatagaaatacaaagggaagaaggcagttagggacaatgagggaaatgcaaggagggagcatattagggatctgaattcaaatcacatgcacatgtggcagtgggtgggtagtattaggaaggtaaaggagggagtaggggtagaatgtaaagttggagaagggagagtggagaggtaaggaaaaattgggggaagtttgggaaagaggttgcatgcagcctatttctttttccctttaattttattcttttactacctgtacagatctttctatccactgctacgtcttctgatagctgtaagcaaaagatctatagtacattttccagttctgaaatttggttcgtttcaggttttagccgaaattatctcttagtcattattctgtcaacttattttatgctggaaaattaaattaaattaaattctcagagattcagagcaattctggaatatatcatatgtattttttttggaaattttgcctttattgcagtccgcctctagccacctaatggtggcatttgggttgccttcattgcagcctttaacaccttcagtgtgttgggtggatttagtcccacattgcttagagataggtcatgtgtagtgtatataaagcttgggcagccctcatcttacaagccggttttttacggatgagttaggcccaatataaaatctaagatatgtacagaattcagaattatagtctgcagtggttgatgtggccgctaaaagttagttgtcagcggctgcatctgcaactatccacgatgatagagtgaatgaagtcataaaactttgccgggacaggtggtgttgtgtctgtgatagatgtgacaaaacagaatccaccactgcaaatcaccaatcactattgttgtagtgcagatctactcctaaaagttagttgtcagcggctgcatctgcaactatccacgatgatagagtgaatgaaataataaaactttgccgggacaggtggtgttgtgtctgtgatagatgcgacaaaacagaatccaccactgcaaatcaccaatcactattgttgtagtgcagatctactcctcaaagcttgtcttgtttgctgttcatgctcagccgacggctccaaatctttggttctcagccacttctgtggttgatttgtgttctgcgtcaatgggtggctgtggtgtggataagtgagtcagtgtaactaccagtgagtgttagatggaagttgtcttaatgttgtgaaggcaagaagttgtgacggagggaaagaggcaagagaggtgagggaaaaagggagtgtccatgactgtgatggagagaggatgtgagatatggagaaataatttttgaaatcctgaaggggaaacaaatgggacttgtatgggaaaattttggtgaggggtaattttgcaggtgaaagacatgaattgcgtagaaaatgtttggagagaaaatatgccaatttttgtaagggaaatgttaacaagtgcccctggagcacttgttaaggaattataaaaggaaatattttcttgaaaactgtacattctactttttgaaagttaaaaagatgttctttccaatgcaaaacttgactttattttctacttttagttccttaactagtgcccgtgccccgggggcactggttatcaagacccttgttgtaatagtaaagaggcaatatatgcgtggtaagaaaattttacccttgctaattatttcttttactttagatactccatccgttctcaagcattataaaaaaatgtaatactattggagttttgaatacacacatttagctactgtttgtttgttcctttgtcacataataactctggatatgacctatgaaacattgtactgtttggtgttattttttccatgctaacttctgatatacagtttttcaggagatttc

SEQ ID NO: 4234 - DNA, 1397 bp, Medicago truncatula
  Intron number 1 from transcript Medtr7g079910.1 (locus Med tr7g079910) derived from phytozome v7.0 (chr-ID MtChr7; po s 16734092 to 16735488)
ttcaccgctcacaatcaaaagcatcggaaattttggtaaatattttccaccgatctttgcgtgcaagctactttatttttgtagattgaaatttatatattaatgttacacaaatcacactaagcactttttttacttgattggcacccattacttcatgcacaaatgtttattgtaaaactcaaaataataatcaggcagcatattaagaaattttatttcataaaaaaactatatgaaacaattagtgactatgctttacttacctcttagccgaataatacaactcaatctaggcatcacatttttatttttttggtatgctttgaatctatatgttgttttactgtttaaggggagcagatacatgattatcaacaaaaatttttataaacagttatacacaaggtaagtgaacaacatgcactgttaatcatcaagctgcattgtaaattatttttcaatgtcaaaaccaatcatcttaaagctacatttataggtatagaagacacaagcttgttattcctgaacctttaaactctttgtaaaatattcacaacctttggtactaagaaatcaaaagtgtcaaacacaaatgatgctgattgacagaacacgtttttatcatcatgtttgaccactttgcttgaactgatttgagagatgtctgtctcatactaaaagttttggtctttaactccacacgtgggaaaactctaatcaagtccacacatttatatttacctcccacccatcggtacatcagaatacaaaaactaattattgttatacatctagctacatacaaatgagaagaataataaaaaatgatataataaatcatcaaaatattttactttatataatgtatagcagtaaataattaaataaccgtgtaatatattaccaatatcttacaaataaaagcctcatacttataaataaagccaaattatattgtttcacaatgtaattagactactgaccctacatattatatgtttggaaggacaatttttgacaaaattacggcggcattgtgcgtttgttgaaactttatcctgtgattggtttggcaagagtgaaaatattgcgtccctaaacacattttggttttttcagaagctagtgattagagggtttggacaaccaaaattatgaacatgacttagcatttttccaaacactcacttaaattatagctttcgtcaaaatcacagtgtaacccgcagctctgtcaaattcacactcaaagcaaacatgcatatactcggttatttaattgtttcgtgatttatgttttaccgtttaacatgtatatagctgataaaagaaataaacaaccggtcatgttcattgtcactaagttatttttatataacacaagcagggttcat

SEQ ID NO: 4235 - DNA, 1072 bp, Medicago truncatula
  Intron number 6 from transcript Medtr3g097940.1 (locus Med tr3g097940) derived from phytozome v7.0 (chr-ID MtChr3; po s 23584708 to 23585779 reverse strand)
tttttccgaagttggataaagtgacgcttcttcaggtaaatttttattaatgattttctctatatttcttttgtagtcagggaagtaaattaactcaggaaaaaaagaatttatttatgtttgtacctggtcctaacggattgtgtagcttttttcttaaatgtgaaagtttataatgttcttagcatgtatttgcctttttatagaggccttgggatccttggggacccatctctctttcaattcttcatcttgctccgtgtcattggctattaacacggtcacatagaggctgatgcttttgaagctgtatttcctctccctccttccaaaattgttctcatcattaggcctaggttatggctttgattcctttaaagcaagaactgcactttagaggaaaagtatgagttataatcctgttgaaaaatcaagttgtactttgtgatacatttgcatgttataacttcaaactttaccatctgaaatgcatccctcacttcaggagacaaattcaaaccatttgttttacttttttacttcctaaatttcccttttgcttttgatgaagattattgatggagtgacttgaacctttactctctggtggatgtttggcaattcttttacagaatcatttgctcgtctaagttacctctgttattgaatcaagtcattggcatcccatgaagaagaactaggaccaatgttcagtttgattctgcatacacatgcaattaaattctgtcattgtaaaattgtttagttcaaaaccatagaatctagtgcattgagttggaaaattagtttggtgcagttcataaagatgatgataagtgttcagctagggtgaattgatattctagttcagtttgattttctcagaaaactgagccatgaacaggcctaccaatatttcaacccaatataaaacaaaaaagttgcagggtcaaatgaccaaaactcttaaaaacgactacaaattgagggcttttttagattttaacaaaaagttcactgtagtagctgctaaatggctgttacagcagctactaaaaaatgcaatatgtag

SEQ ID NO: 4236 - DNA, 1656 bp, Medicago truncatula
  Intron number 16 from transcript Medtr4g080810.1 (locus Me dtr4g080810) derived from phytozome v7.0 (chr-ID MtChr4; p os 16668790 to 16670445)
gcacaaatactttggctgattctggtttgttgcactccgacccttctaattcataaatgttctcctttaaaaaaaataaattcataaatgttctttaccgcttgcttttttagtcctttgttataactagcgtgtgagtttggtccttcaattagaaggggattatgatttctaaacacatctccatgccaacaaaaccttttgttgttaaaatattctttttttatcttgtaaattaatccctatttatgattcacttagtggaattaatttatttttttgccattaaatgcaaactttattactctgctcattacaatttctgcccattaaattgtatgatttcaaaccactagatcaatatgaaatcaaacgttggaaaattgaccaagatttttactctttcatggggccatcaattagtgagcctgttcaaaaattgagattgaacaataattgtcatgacattggatgattcattgggttcaaaataacagatgattggttggattgggttaaaaaatagccaatccaatctatttggctatattataatgtcatctgatgaatgattgggttcaaactaaattccaattcactgcacatcagttttggtaaactttcattgtgtacaagttaatcagaactaaaaagttaataccatccaaatacataaaatttcagtttatacttgttcgttaaattgctacatgtgaatttttcaaacaatttttacaacacaagttcagatcaattatcaacataaaaatgtaagttcagatccagaaggggagtcaagtttttccttacatattggaaatgtagatatatctgaagtaaaatgtttttaagtaagatgtttggagttacctacgtgactacaagagttttggctcagtagttggagttacctttgtgcgactaggtcaccagtttgagtggtggaattagtctgtttgaaatgtgagataagaccgcgtacattaggtcacagtgcgacttttatagcaccaagttgcaatttatttttcatttgatgggttttcaaatttgaacttaaaaactgatccaatttcaacaactgtttctggtttaggtcgttttattgtggaaagttagtattctcagaattttgaagaggatagagttcttaattctttgatttttggtagattcctaagcttgaaataaaagttcaattttaaaggtgtaagaaagttgccgggttttttgttttgagcactgctatgcaaatggttagatagaaattttagattttgtcgtggatttgtcaagtaccctgtgttgctgtgtttagtcttcctcatcatatgaatcttagtgtgagcaaaaagcgtttaattctactaccagtattaacaaagtgagtcaaaatgcccatattttgtttacttagttagaaagcattaatggctattttgatattttgaaaaatgtggaggatgctaatctcctttacacaaagtcgacaaggttaatgtttccaatatatgtacatgtgtatccagcaacttctcaccttctgcattgtttatggttccctttgttcttgatcagataattgcattttgattgagtttgtaaatattttcttgattagccatatctccttgtgcagcttctttgcttcttggt

SEQ ID NO: 4237 - DNA, 1664 bp, Medicago truncatula
  Intron number 12 from transcript Medtr1g146670.1 (locus Me dtr1g146670) derived from phytozome v7.0 (chr-ID MtChr1; p os 32486321 to 32487984)
ttccagttgaacatctacactttgataagttgaaggtaagcattgattaggatctctcattttctctgactatttaagctttgtttcactcagcatgggcttgtgggaattccatggattttatatacccatggataatttagtttttctgtatgtaggccctagagcatgttaggacgatgcttcaccttatagataagtgggaaatatggtttacctctaccatttgattatttggtagcttctatgtagattctcagattgaaatctacttaattattgcttttatttcattggtgctatatcatttgcatcgaagagtcgaacatatcttaaatgtgttgtaacttgctagtcaatggaacttggaattatcattttgcttttatggtacttttggtggggactagggagttaagctttcttggaatcttttttcaggcgaaagccaaattgatgtggctaatgtggtgtagtgcttttaaaagaaactgtctttgtggttttcaaaatattaatattttctcaattttggtccgtaaatttcaagtttttattctattaatggaataagttgatggaattttcatagcattgaataattggcaactagtttcaagcggcattactagtaattatttttatgttgcattgaaaccttatattacaatatgtttgggggagagtttgagagggaaatcttctcatttcatataaattttctctaatttaacaatttagtaagtgtttagaatgaaatatacaaaatgatagattatcatgaaagttaaggtcctatctgttcattttatctcttagctttaaaatgaaaaacttaccttcccatatctttctcttcaaaactcctttccaaacaaaacccaaagtattcttcaaaatgctttcttatttatttatttataattcttgtatgtatcactcaagcaattccacaaatctcaagtcttaatctcttcaagaattttgttaatagaagagataaagagataagttgtttctgatatttactagaacgagtacagtccattgaaaattgagttatatatgcattatatactagctgattattggttaaaatatccattcttctattaaaacagttatttgcattagctttaggcttgactgcaggactgaaaatgggaagtttcttctatgcttgattaagattatgacactgatttaaaatgctaaaggggcgctgttaaaattttcagtatcatacccaagtaaacaagtaaatttgtatactccctccgtccctaattataagacccttttaagaattttttttgtccctttttataagacccctttgctatttccaactacattaattatttctttacatacatgcccctattaattatacatctttttcttcaatcagcactaaataacatgttgaaaacataaaccatctctctcttaaaggataaaattgtaaaaacaatactaattacaaacatatttaatacaaatatccactttcttaattcccgttattttttcaaaagggccctataattagggacggagggagtagtttattgtggaaagcctgaaacttatatgcgacactagattttaagccttgatagaagcttgaatttacaggacaacaaggctgataatagggacag

SEQ ID NO: 4238 - DNA, 954 bp, Medicago truncatula
  Intron number 3 from transcript Medtr4g165950.1 (locus Med tr4g165950) derived from phytozome v7.0 (chr-ID MtChr4; po s 41924023 to 41924976 reverse strand)
ttgtaagcaactattattctagttgttttccattttaagttaagtaggtttgaagttgattatcttctcttgcttgaagggatgtactaatttgtatatctgtgtcctcgtgagcttagctcagttggcatggacaatgcataatatatgcaaggtccagggttcgaaccccagccaccaccaaaaaaataatttgtatatctgtgtaaaatgcatcagcatcaatcaatttatgaacctgcatttatttggctggttatcttgatggaacggttatgttgttaaatcagatttttttttttttttttatattctacatgacacatgtacttcatgtcttttaccatttgtgtgataagagaactcaaactctgctgttataatttgattaacttgctgcttatcaaaacaaaaatatgagacaaagttgtagtgataaaaaaaaataaaaaaaaccttacttatggtagggtacactgagccggtactctgttcttaacaaaagaaatgtttattctctataataataacaataattttagggtaatgttgggtgagcaacgtgataccgaattcaaacataatataggccctatttttctggaaagtcaatcataaataaaatcgtagaataccaacattaccttggtccgagtggaactgggttctgatccttaaacaagttctcaggtttgagccatagtgatggaaaagaacgtggttgggaaggaagactctcctaaaggtggtccagccatgttcccccgagggagattggttattggcaaagtttgttgatacttcacaccaataacataattagcaaaaagaagtcaataatttgtattgttgaaatgttaatgactattgagtactgagtcgtgagatgcctgtttttgtagacatagtttctcatagtaatttttgtgtatgttcctttgtaggaatcctatt

SEQ ID NO: 4239 - DNA, 6074 bp, Medicago truncatula
  Intron number 1 from transcript Medtr3g043410.1 (locus Med tr3g043410) derived from phytozome v7.0 (chr-ID MtChr3; po s 11751318 to 11757391 reverse strand)
gtagaaggcgctgataccaaaggcggagtcgtggggtttatgtagataagaaattgattcaaagatgttcaatatcggagatggagagggtttctccgaagagatttgtatatgtgggaaaaaaaaatggaaagagatatagtttgtgagtatgtatgtaagaaacaaaccaatgcctaaaatgtgaactttgtacatctgaccaattaataaaacatatggaatgtcggtgagtttagctcagttggtaggatattacatattatactagtaacaaacccgtgctgacgcacgggtacaataaacgattatatttgaaaattgtctgaacttatttatgatccttgttatacagtgtaattgatgttgaatttgtttatctttgaatttgtttatctcatcaaactcataatcaaattcaattcttcattatacaaatcaaataactcatatttcattttaaaaacctcataaaaaatgataaaatattgacattttataacataaaagactaaatatataaagacaaaaaaagaagataaaaggcatacttgttacctaaaactaagttaaaagacgaattttataatcgtctttattaaaactcatgatctccttgatttcttgtgcataatggtcattttgcaatatttaatttatttgtttttaaaaaactaattacggataatggtcatcacaagtataactaattttcaccgataacaatgaactaatttatttatattgctcgacttcgttttttatatatttttagtagaagtagatgttagtagatttgtttcagtgacgacttcgtccatgtataataataattcttaaattaatagtgacaacttgtttcgtgtatagtaataatttttaaattggttacacttgtgatgaccattatccgtaactaattttataaaaacaaataaataaaattttgcaaaatgaccattatgcacatgaaattaaggagataatgagttttaattaggaggattatgaaattttgctagacttcaatttttatatattgttagtagaagtagatgttagtagatttgtatcaatggcgacttcgcccgtgtataaaaataacttttaaatttaacagtgacaacttgtttcgtgtatactaaattttatatcattcagaaattttggttccatttttttttttttatatttatcattctcaaattttggtccgtatattttatattgatcattcataaatcttggttttgtatttttatatttatcatcacacatctttgtcccgtgttttttatatttaccattcacaaatcttaatctcgtgtgttttttatatttctaagcatgtgtttggtttcaataccagagggtaaaaaatgattctagaggttgtataattgattttatgatgttgtacaattgattttacccttaaattattctaaaatttatatcaataacaaaatagcccgagtattataattattataaggtcatgctaactggtgcttccggggcactcgttaagcatacaaaaaaaaaaaaaattcataccataaaagaaagttttgttgacttatttatgaattaattaaccaattttcaatgcactaatcaccggttagcatttcccttattataaactttgtatcaacaataacatgtctcatgtatcagtattagtttagtcactgacaacttaacctatgcatttaagttaattatgaaataggatcattaaaaacttttcaagtgtatgataatttagtttaatcaatgtcaacgttttagtgcattttattaatgacagtttgttctcatgcatgatagttctatttaattgatggcaacttctctcatgcattttagtaatttctaaaactttagtatatattcaccttatccctttcttacattgtgtagactattttatattgtatagattttttatgaaggatatattgtatagatttttaacagcaacaattttttcagtgtataataattatcgatttatataattttataacatgttttataaaatatcatgtgcataataatcattttaaagtttatcaatgacaaaatgttctatgtataagtgttattttttaactaatttatgatcgataaccatttaagttaatgtccaatttttccatgcattttaattatttacgaaatttagtgaatgtccacttccgttgattttagttgatttttttttttggttacatgattttagttgatgatgatttaatataatttttgaaatacatctccgtttttaattttgactaagtgatcacaaccgttgactaagagtagcaataatgtctataatggtgatgatttgacagtctaaaacaattttgcacatacaaccaattaaaacattttttgttttgttaagataacctgttaaaacatttagaattgtcatatgaattaatatttttaatttacgtgacaattaattaaatattttaattaattgtgtgtgcaaaattgttttgaacggtcgatttaccataattaaagtctaatatttaacttactaattgtaaatactcatatcatcagtttgtttagtgaaaatacactatcattattgatattggtaaaagttagtttaatgaatgacgacttatcccatgcatttgagttcattcttaatatttattagtgaaaatttgtccactatatgacaatttaatttaatcaatgtcaacttctcttgaacattttagtcaatgtccaattatctcttgcattttagtcaatgtctccttatgtctccttctttagatattttttattagtgaaatatattgtccctagtttttatagattattaacaaaattaagtgcaccaatcaaaaaatatattccattttatgaaattgaaacattgtattattcaatcattattagaagaaaaaaaataaaacaaaaatgaagatattttattatccattttacaccataattttatatacattcaaaaattatgttaatgggctcaaaagccaaaccagaacatagtaacccacaaaagtctaaaacctccttctaaccctagccgccacctcccttctctctctctctctctgctgtttctttctctttacctcacaaaccccaaaacctccttctctcttcatatgcaacaaactccggccaccataaatctacataaaatcactatttttatccgcatactatcctctagggcacttgtttatttttagatcaaggtaaatatgaattttgagtccaacttctctcctataatttgctttctttgaagatccacaacaaaacccacaagaaataacggtttttgaagacaatagcctcagtttcgtcatcaaacatggcaggcgacctctttagatctcctaccgtaggagacttgactctttttttctttttctttttagcaaaagagatgttaaccattggataatgaagtttccattctctctctctctctctctctctcctctctatgggaatcattctttctcttatccaacaacaacaacaacaactgcagcaaccacaagaacacccaaatcttcatctccttccccatcacaatataaatctaattactccttttgtacttgcatgttgcttgctccttatgattatatttcacttaaataacttgagattgctcctcaaacttcatgaacacatatctgctgctatatttaatttcaatttgcaggaaaaatgcttcaatttcaacttcggatgtccccaaggggaattattgaacaatcaaaacaaaacaaagccaaatcggtattattgaaagatgaatttgaattccaatttgattagcatttaaaaggaattgtcaaaaaattgattaaatctgcaatttttttttatctttgatgaatatgaaagttttaatactttatttattggacttgtttgaaatgttaagagtagaacaatgaaggaaaattgattagcatttgagtaccattcttttccaaatttattccagatctgactattagttttttgaacaattaagagtagaacaatgaaggaaaaaaatggatatttagatggttggaaaatctggatcaaatctggtgttcatattataatgaacaaagaaatggtttaattggcaaagggagaataaacagagagggatattagagaaaggtgaaagctcatgagagttgagagggaagaagacaaatgaaaatataatcaagtgtatttgatctatggtgtgtttaaccaatctaacggttagaaaatgtcagaagatcaaaaaaaaaaaaaaaaaaaaagaggtcatgcacggtaggagacctataaaggtctcccaccctaaacgccaccatcaaacatgcagcaacaaaaacaaacaaaagaaaaaatttggtgtgattctttgtattttcaagagaagtaaggatgtttttttgtagaacaatgaatctgttttagaggtttcttcagatctgatacaattaacattctattgaatcattgataaagaacctttttttttatttgtgcatgcaaaaatcattcaagaaggtatttttaccacaaaaatacttcatttttaatcgaattttaattttatttttgtttaaaatggagacttttctgtgtaactaaaagtttttttctataccggtgaataaaccacaaaaatacttcatttttactcgaaaattaattttttttagttaaaatggagacctttctgtttaagaaccgaaaggtttttttttggtgtttggaatttttctatccataacaatttttattttttcaaccttcattttctgttattattttttgatttaataacaatttaaagtcagattttatatttgtagtaaataaaataaaaaagtcagatattatatttaaaattctttctccctaaaaagaattatttaaaattctttctttgagtattaacacatagtttttttttttttttttcaatcacaaattgttatggctaaagaaaataaaattcttttttgagtatcaatatggaatttttttttttcaatcacaaattgttatggataaacaaaatatcacaaacatatattatacactattgttaatacttttatagttaatactctagtaagtaagatcaccaagagctcattcctctgtccttttcatgtgttttttttttctttagctttgatttggaacagaaccttcaatggcgagacttcctctttccacttatatttcatctcttcacatgtcccttttatgctattcaaaggaaaaacattagatcgtaagacaagtttgtatgatagacaaagaatatacaaatgatatattttcttatgaagttgtttcttacttgttttttccttgcttttgtagatctatgacttttgtagattttgtagatattttttgttgtaaagataattgtaaaaatatgttagtactgttttggatatgtattttctcatgtatcttgctcatcttcatattgaatttgaacatatgtcatgctgcaaatttgaacataaaagtgtagtttgtcaaatatacatcatatgaaggtcaacaacaaatgaaataattaatgatattaggaaaatgaattcttatacctgccgtgttcttcttgttgtcaaagagagaagaggaaaaggaaaatgagagaggagagacagttgagagaatgagagagattttttttttttttcgaaagagagagaatgagagagtattaaattatgaaagagcagtgaatgacaatataagagtatttgaaatttgaaattgaaaatttacctccaattgtttgtagatctgacattatctttttgtacaaaagaaaacttttttcgttttcggtgtcaaccaaaatcggatttatttagttgacatcaaatggaaatgactttatgaagagcaaatgaactaaactattagttatttgtagttacatgacatcaacttagtgaattgtggtaatttggttgaataaagtaagttaaaagacagattttaccattactttggtgatttgtcaattaacc

SEQ ID NO: 4240 - DNA, 618 bp, Medicago truncatula
  Intron number 1 from transcript Medtr7g083230.1 (locus Med tr7g083230) derived from phytozome v7.0 (chr-ID MtChr7; po s 17705652 to 17706269 reverse strand)
cttcaccttctggtgcttcgggttagaaaattttgatcgatttgtttttctgtattataatatatggataattattcactgcaaatttgtttacaaaaagtatcacaattattatcaattaatataaagggtaggtaaaaagtatacaattcattacggaacagacttatcattgatcagcctgtatgtcataagtctattccctagtgaagttgttatttaattgtctactccctaaattattagggaatatatgtagttatttgattttattctgcttctctcattctttcttagcttttagtcttactgatagacaaattgtttgctaaggcctgtgacttatatgtaatctacccctcctttgttgtttctttacttctccatattttcttaatagaccatttcctgtgaacaatgttagctatttccagtgtttaatatggtacagccaaccatttgcgggatcaacaattacttgtatttcctgtcagcaatacaaaagttctttttatgcaccaaaacatgactaatttgctgcatcaatctctgcttttcttatggtcccttcattatgattcaggagtgcttcgacgtccagctgaggttcttgggcaa

SEQ ID NO: 4241 - DNA, 1998 bp, Medicago truncatula
  Intron number 2 from transcript Medtr7g077370.1 (locus Med tr7g077370) derived from phytozome v7.0 (chr-ID MtChr7; po s 16247893 to 16249890 reverse strand)
catcttcagaatcagttgtacctgcattactttcactttgctctgaagttttacttccaggctctctatcatcaaattttacatgcatagattcttcaacacattgtgtttctgaattatacactctgtatgcctttgacctttcagagtaacctaaaaagattcctctttgagccttggcatcaaatttcttcagatagtctttagtgtttaagatgtaacaagtacatccaaactgatgaaagtaagagatattgggtcttcttcctttaaagatttcatatgctgttttctccaacataggtctgatatagatcctattttgaatataacatgaagtatttactgcttctgcccaaaaatgtttagctaagttgttttcatggatcatggttctggccatttcttgtaaggttctgttctttctttctacaaccccattttgttgtggagttctaggagaagaaaactcatggagaatcccatgtttttcacaaaaaagttcaaatggctcattttcaaattctccaccatgatcacttctgactttcaaaattttcaattctttttcagattgtatttgagtgcagaagctgctaaacacttcacatgcatagtctttacttttaatgaattttacccaagtccatctgctgtaatcatcaacaatgactaatccatatttacttccatataaggatgcagtgttaactggaccaaaaagatcaatatggagtaattctaagggtctggaggttgatacaatgtctttagatttgaaagaacttttcacaattttccctttctgacatgcaccacaaagtgcatctgaatgataatcaatgttaggcaatcctttgaccagttgtaacttgctaattttagaaattaatctccaattagcatgtcccaaccttttatgccatacccattttttatcattcattgacagaaggcaaactaccttctgatcagccagatcagagaaatttattttatagacattctcaactctctttccattgaatgtaatggatttgtcatccttgttgactagtgtgcagttggtcttactgaacgttacatcatacccattgtcacaaaattgactaatgctcaataggttatgcttcagaccatctactagccacacattattaattgagatggaggaattaccaatagtacctgtaccaatgatctttccagtttggttgccaccaaacttcacttctcctccatctttcattgtaagggtaaggaacaaagctttctctccagtcatgtgccttgaacatccgctgtctaggtaccatgacctttgtttctctcttgcccttaagcacacctgcatttttggccaattcagatttaggtacccatatcttcatgggtccttttgggttagttttggaggttttacttttcctcccttgtaccttagggtgaatgctgagtggcttctgatcattcaatactttaggtttgacaccttttggtattgttttttcagaagcagtagctgctttgttcttctgatccttttgttttggaattttagattctggtttaatcagattctgatgaacaggttctgatcttttcagaattttaatcttttgactcttaggatcagattttgtcattaccttgatcttaagattctctggctttgatgtgatcttagcctgtgaacctgaagcttcaggttttgactgaacagcagttatagcatttgtaccttcaggcacaaaggtggatttcaatccatccttgatacaatcacagtagctcttgagactgtattctttggatttctcctcagaatatccaatccctttgcctttgttcttgtatgtgctgtagatcatagaagcaactttgcttctgtctattccagccataataaatcatccaaggcaatctcatgtttattgcctgaacctttatcacatttttcttgtagcttctgacaaagactcttgagtgtatcttcat

SEQ ID NO: 4242 - DNA, 2239 bp, Medicago truncatula
  Intron number 3 from transcript Medtr5g102540.1 (locus Med tr5g102540) derived from phytozome v7.0 (chr-ID MtChr5; po s 41057466 to 41059704 reverse strand)
atcttcagagtctgaagttaaaggtgcatcatcaggtatataaattatgcttacatttcttaattcctataaagatatgcatggtctgaatactactttaggaacattgaattcattatgggtgatcggataaatgtttggttggatggcagggtctagttgacgtaagttattcattagaaaccaaaaggcatagtagaattagcatagttatttaggggaggttagtcagagtagataccgtgtgaatgatttttctcttgttcggcagtaaacatgtactcttatcgagcttttatatttatgtttttgtttttctgaaaccatttatagttctatgcattgaatcttatctagaatttgatagaataatcttgttttatactccaaattttttccttaaatgattttcatcgtggattctctcacttggtgaagaagcaaaaccaacaaggccatttgtaaaaagggaacttagttgtagctctaatgtgaaaatcactctactgtcatagtgcaaagaaattttctttccagaaaacaaaaatgataaatgaataaaatcaggtaaggaaactcataatatttccctcggtaaacatgattacaggacgcctgctgtatatcttatctgtaattctgaatttgatgaaatcatatttattcaattacttgaagagctagtggctggatttttgttgaactgctgaggctactagcactttttctttggaataaagaatctaccattcctttttttccaagttccaagtccttgctttagtattatcataatggcaaatcttgtgttatgtaagcttaaaaaatatctctgtttgtaccagccaggggaagattgaaaatggaaaaaaaatactgggatcatagacattgacaacgaagatatggaactgtgattttcctgttttattaaatccaaagagtaggaaatgtgttatagtttttttgagttggtgaggctactagtgattaaactggaccacaatgaaatacctataattagtcatcataatttgcgcggttatagtatgccataactaacaaaaattcaactagcactgggatattatgtttatctccagacggaatctgagtttttctgccataatgaattgacttgtcatgtattggctcattcttagaacagacctgttgacgaaggtacttgggaagatatattcatgagctgtaaccctaatttcggcctcgaggacagggtccgtgcttcaggaacctgaaattttagtaaatagaataggagagatgatgttaaagaatagattggagaccaattgtgtcgagagtatggttcaagggttagatggtatgagcacgaaagcccaagaaagtggttgttatggcagggtctagtgggagggagttagttatttagcagcgtcgagaaatagtactgaatgagagtggttatgcaggggaggttacttagaacaaacagatgttgtggatgattatccttttttttttccctctctttaggagtttagttatgtgaaagtagctattttttattttaacaggtgaaaaatgttggatggtataggtatacacaagaaagcccaggaaaacggttgttattgcagtggttggattttccttgaaatgctgagacagctagctatattttcatttgaataaagaatctaatctaccattctttattttccaagtttatgcttgagtgtattgtcatggttggtagatgttatgttagggttattttcatcttattttaatctaatggcttaaatgtgagttttaattgttaatcatgtgaccatctttgtggatctaaataccttctccaattattctcccttaattaattctcataaaacaaatttcctttctctcataaacgcactctttaagttttttatttcattctcataaaataaatttcctttctcccttaattactttttttttatttattttaactctcagaaaataacaaaatttcctcctaatgctctgtaccctaactcacccaattgattttgtacacacctaatttctctaattggataatcatataaatcacaataggatatagagtgatggctctccgtttcactccaacctcaattctacatgatggctctcagtcccatttctttcctttttgatttagatttcaataaaaaaaatcttctcatccataggttcaacaggtgagagtggaaagcttacattttaa

SEQ ID NO: 4243 - DNA, 1793 bp, Medicago truncatula
  Intron number 1 from transcript Medtr4g089670.1 (locus Med tr4g089670) derived from phytozome v7.0 (chr-ID MtChr4; po s 18732550 to 18734342 reverse strand)
gaagtgtttggttccctttcaataatttctttggttttgatgttcttcccacacaattggggattatttggatacattatcatatacacattatggttcatttattatctactagtcttgattattggactacgtcaacacatgcatgagaaggaggttgccaccaccttaccaaatgcttcaatagtatagaattaagtaccgtagtttgaaatgatatcttcaactcatttaataatagttgtactgattatggttttgagttcgaattcagccctaagcatgcaacaacgttaaaattcttatgaaaagttgttgtccatttaggtcttacaagactcgagatattagtctccacgtttgcgtacggaagatatccgatttacaccaacaaaattgcacttgtaacgggtacaataaagtgaaattacaaatggtaagtacttatggaaacagtaaaatccatgtatagttttggagtcttttatactagtgacaagtttcattttcatatcattcctactttagttttcgtatgattaattcagtatttgatatcattcctttaaaaaaaaaacacacacacacacacacacacaatatttgagtcttaatcctcaaattcttaaagaaaggcaaccttaataattcaatattcgatcaaaagataagtaaactttgatctccaactagaataaaaactcgagttctctctaacaatttatccttcgtataatctcatcaatcacttgagagttgagtccaactctttgttaaattcaatttttttttcttctagcattttaattgaacatccatttttatatgagaattgtagttttacacgttacaaattgtttaatgaaagattaaataactattattcaacaacggacaattgctatagcatattaaataatcaacataatgtaccttcattctttgatatttacttacaacaacaacaaaacaacaaaagaatgacaacataatacaaaaatatacttggaaaattgcaatataatagcaaaaaattgcaaattaatccacacactccaccagtttcatcggatgttccctatctttgatggagtgaatttttgatgtgtgttggattatcatgtgatttagagtaatttgaattcatagagtaggattaatcaaattgtttcaaataatttcgatgaattggttttaaagtggagaccactatgaggcactatctaatttatcccttcttgttgttatatgataatgtgacgttaatgatgttcttttgttgcagtaaatcgtttacaatgttgttttgcaatactctctattagcacaaaatgttgtcaaataggtctatagtggtgtggtgtgtagttaaatttgaacaaactatcattttccgtgatctgcatttgaaaacactgatattttgttctgtgttttggtcaagtcttttgattctctacgatagtataagtcaacttgtttgttgcaattttagggaattggtttaaaagagttggatgtaatcttgggaatattgttgtatttccaaacttgcataatgctacattgatgatttgtagtaatttgaatttctgtgatagaattaatttgaattcctgcgatagaattaattgcaacttgtttctactagatcagatgtgcacatgtttttacttgaacactaaaaccatttaaaaccaactcaccaaaattgtaaaaacagttgattaatcctatctaaggtaatttgaaagtttccagtttgtctcgtcctcttggtcctgctgttcttg

SEQ ID NO: 4244 - DNA, 5215 bp, Medicago truncatula
  Intron number 3 from transcript Medtr5g088830.1 (locus Med tr5g088830) derived from phytozome v7.0 (chr-ID MtChr5; po s 34479468 to 34484682 reverse strand)
ggtagtagttgatagttttttagtgttttttttattgtatatttttaatttttttatgacattttggcttgatgtaaattaatggcacaacatgaacaatttgttataaaggatatgcataaggaaaaaacatttttatatgtggtgtgcgttcttgtgttttcacgtggatcttcggttatgttgatttttattttttttgaattgggtatcctcttcatataattgtcaaggtaaaatatttttcgaggcttgtagttttgttaaaaaaatacaaaaggaaaattgaatgcttatttgctatttaaattttatatatcgtatcatatattatgaggtgtgtaccaaaaacatggtataatttttatccaactatatatcttatttttatccaacttcgtattctatcatttttcttttctatctttctttcaaagaaatgtttcttttctattttgttcaccaaacaaacccttaatgtgttggacggaccataaactatgatgaaatgtcatacacccaatcatacctatttttctaataaaaatcatcttcttcttgccatgcatcctccttactctcccatcatcttcttcaatgaatatcatcccactttcttctttgttattcacttttctccatttctttttactttcgattactccatcttctcattccttgcaaataatccatcaactataatgatctatttttccatattcaagtaagcctatgttgtagaatccataagactcacgataatatacctttttcaaatgtgcttatttaatacgaaatgtattgtattattacaaattaagaaaagcgaattgtgagtgaaccaattaacccgtatcttttttcttcaaaaaaattaaccgtatctttgtcaaaaatcattcgagagttaggacacgtttccatagttgcatattcatgtaaacttcactaattaaatttcgtaacattcaacatacgcttatgttaaatggaagaataacttgagagttgagtgctctaaacaaatttagtgggcaaccacatacatatgtcgatgtttcaaatatctaattgactactctatgcaatatggtggataaaactctttttttttaacgtcgatgaagtggatgtcaaacaccacctaaaaatcacataattgcaagatctcggattcaaattcaaatgaaagtgttcaatttgataaaagcatcattgtcgataaaaataaatgtttaagacacataaaatatcttggagttttataaacacacatctaaatcaaatccttgtctcataagtaaaagataaacccaaatctttagatactcaatttatagttgcaagttattttcacaaagtacaattaatgcaaaagaatgagaagaaattgaggacaaatgaaatgctttggggccactaccactaacaagcatatatatccaatcccttgaaaacacatgtaattttatttatgaagaaaaatctaactctctttttctttagacagcttatgtcttcttcataaagcttatgtagtccaagagggagacatttatgttacatatcactctcgtagacaatttgcatagtactcttttgtccataaattccatctcacctaggaccccattttcgtgtacaatttcaattcaatgtcatttcattagaaaatttcaagtccatgcactcatgaaacacggagacagaaatatcacgtatgttttttccactagattacgacaattgttagttgaggttgttccgtagttaagatgttttttactaacttgagttatttcttacttggtagttggttttctttaccactaattactttagtttatcatttgtaatttttgaattattttttactgacttcaaaacttcaatgactagaagttgccttctagaagtagaagttaacggtcctctccaccctcacgcttaaaaaaaatgaaatttttacttttaagcgacaaatttaaaatatgttagaccgaactaaagatttggtctaacatagatttgatatagactactcagagagttatattgatggtacgatctatatttaccagagggttaattgataaatagacttaactcttttacataggagagagatgggtaaatgggattggattggaaaccatgtgataaaagggatcaagaggaaagtataggtatgggcttattaattatgtatagaaaacattgggggggtcatgtgctaagaataatgacgtatgaggaaaaaaaatacttttaattcaaacaaaatttaaccatactaaaaaccttctatttttaaaatctttgggctcttagctagcacatgtaagtgattccattacctatgggacactcagtactatgatagctcaaatcaatataaagaatacataaagagtaactttaatttcattgccttggattctaatttatatgtcaatgaaatcatgtggtttttgagtattattgactcaagcacaatatggttttaaatttccatactcataatttgcgcctcaattgaagctaatttttagttatattttttttaccactaaaaaagaaaatctttacaatttctacatgaaatttaggaccatgcataaggctgtcataaagatatttttactgtgtgaccatgaagatgaatatcatgcatgtcttaaaattgtgagtgccaaagctttcccagttagcttttatacttaaaaggaaaatgatcatgttcaatggggggtaaaaaattctttatcaaaaagtgaaatccccatgtaatgattaaaattcaaaaattcccaatggggtaaaaatgaagagaatgatgatatatattcatcttctcatcaatcaatgaacactgttttattcatagtaccattaatggattgctaacacaatttaaagccttgcaaacaaagcttgcttccactttgttattgtacttaattacttaattacaatttctatatgtttttcattttcaaaaaacaaaattatgacttttttcgaccctactgacatatcctgaactagtaagagtgagaatatgcgcatatatagtctttaaaagaaaccacattttcttctattcaatccaaagatcatataacaatacttgataaatattagtatatgttgagattgggtgagtttaatgaaattactgtgattttgtttaagctccgaggagtctcaccgagcattaacatatttcttaattattctcataaaagatatatctgtaaactgtaatatctacatatatagtatccatgtttaatcaaatttaatcgtttttcaatctttaaaaaactacaccttaaaaccaaacatgtgtatctaatctatttgttatgtacgtggtgctgtatatacatttacatacggtttttaaaaaaaggtcctaaacgcattttagattaccacatattaaagctatttcatatcattaaccacaaagcaactgtggttgagatcgcaccaaccaataggaccacaattctctgcaacatcattaagacacaaaccatgatttgaaactatattacacaaattgacattcatggaagaagaaaagtttggtaaaatatagcataaatatgggatgaaaaaatagatagacccagttgaagaataatttacctcgcagagatccagttattattattcatgaataatttacctgaaacatttggatctatgggaaatttagattaagaattcaaccatgcttaaaaccatgaatatataacttgcatctgaaaagaatataaattaagaaagaaaaagggcaagaaattaatggattaactgaagaatttccttcatctcaaaaaagaaaaaacttgaagaatttccttggtaagtgcaatagggctaaaaaataggctaaaaatatgaacttacatgaatgatgtcactctttttcatccacttaaaagcatttgctatatgtgaagaattttcttgagtttgttgatgtgcataagttgtagtagaagccaccaaaggatgaatccaaagggatagcatgatcccaaatattatgagatattaaggaaattaagttgttaattaagtagctagggacttaattagatttgggatcaatgcgatccctttggatgcctcctccagttgcaatggattaattataaccaaatcttgaatataattcttctcttttctctcatggctgaaaggaaattgaatggctatgagtttgagcctttgaagaagaggctttcaatgtaaaggagaattggtccttatataacaacaaagactctctcttctcttgccacaccatcattttttatttgtttaaatatgtaaattatgagaatttctatagtatactcgataattctatatgtaatggtatgtttggtttttgaattattagctaaatgaatatattttttaaattattttctataaattaaatgaatatttttaaattatttgagcctttgaattattagctaaatgaatatttttttacattattttagatattatattgtgtaatttttgttttagtccttctttgagtgactacaatcaaataacattgataaaataccaattctaatatgaaataaattgtgcagagacaaaataaaatatcaatgactaaaaataaaaatttgtatatttacaagaactaaaaataaatatttacagagactaaaaataaaaaaaataatatatatttacagagactaaaaaatacttagacctttttgatttgagtaatctaaaactttctttcttgaaattgtaaattttatgcatcccttcaagtattttgaaattgaataccacaattttaaaggtatatgtttttattttctttcgcatttttagggtgagaggtgatgcccggtgcaaggggcaagaatacttacaaagaaatttatatatactcacctaaaattattggcgtagttaggaccttcagatccatatgtatcgttgaaaatatttagattttttctcaattttaatagatatttttaaagagatattttatagatgaaaaaaaattccctccataatgataatgtctatgtatttatttctgaatttccattaattggtagtatttattaagatttgcagaataatctgaaaatgttttgcacaaaattatgatattttattagatgtagaccccattcccaaaaaatccagacat

SEQ ID NO: 4245 - DNA, 1853 bp, Medicago truncatula
  Intron number 3 from transcript Medtr2g014530.1 (locus Med tr2g014530) derived from phytozome v7.0 (chr-ID MtChr2; po s 3769957 to 3771809 reverse strand)
cttagaactacgacaggtcaaattttctaaactaaatttcgtgcatgtgtgatgcatgttcatgtaacacatgatgccaataattttattgcgaactttttattaactttttaattatgtttttgttaatatctttgcatataacttttatataattttctttcaaaaaaaaacttttatataattcgatttaaaatttaatgatttaatgcttttatggaccattttttgtaaactttataatatcaaataaaacgcataagaaaatatattaagctaacgaatcaaggttgacccaatttatgaggattcaaaccatattcctgaaagattatgaaattaaataggtaaattatatatagatattagagtaaataaataactaactatatattttataatataaaaaataattatgataggttttttttaaggaaataatgataggttaaagtagtcaactatatattttcaccagaaaagaaaaaaaatatatagtcaattatacatcatctttgcagatgtacatatttttgtctgtataacaaatattaattatattttcttattcattattatgtttttcttttgacaaaatcaaaactttaaatcgttttcttacaaccaataaagttcgaatcttaattgatgataaatgtatggaaagagaaagaaagaaaaaactttttttgcaaagaaaaaaaaaatcgttttcttaccccatttttttatattttattctgaccaacattatatcggctagactatttggttttttggattgaccaacgacttgggccagtcccctgatttttttttagttgaatctattctatgtttttcaactatggtttaattgtattttatttttagccccgaattaataagtttagttgtgtttttcatgtaattttttaaaatttatcgtgactctctaattcaatagacactttttctaacgagtcatgataaatagatttagttattataattataaatgataaaaaatacaaataatttttaattattaacttaaagatttggtgcaacagtacattgaaatgttttaagtgtaccatagaatttgccaagatatagagcgaattctcatgaagtgcatgtgttgggttaaatagaaaaacagtttctttaatttaaatcctcgatttggttgaaaacatgcttgtagtggtgctaagttactcgaccctatcatgatggctccatgaaacttagcatttcccttttctaacatctcatttaagaaacttttactattattattaggttaatacataataattaacgaaaagagaaaaaaaaaatcaaaacatcaggaaaccttagagcgtgtttggatggggaaatgttttgagggaattcaacgtactttgaggtgaattcaaacaatagaatttaccttaaagtagttgaattccctcaaaacattcccccatccaaacacacttttagggttctcaacaaataaacgaaaaagggttgtcaatataagtttttcaccctctggtattgtaactttttcataaaaaatttcatattacatttacttaattagacttcatagttatcctaaattttcgctaaagttgtgaagacttatatgttttaaggagataatgtttgtagaatgattaagattacttgtattcccagttaataaaatcttttttctttttgccaattaaaagataacatcatttataatatttttaatagaagatttattattccttcataatctatgcctttagcaatgatatatcgagaaataaaagtttaatttaaagattttcatgatttgcatttcagatagagcacgagttaagttttcc

SEQ ID NO: 4246 - DNA, 1192 bp, Medicago truncatula
  Intron number 1 from transcript Medtr5g011370.1 (locus Med tr5g011370) derived from phytozome v7.0 (chr-ID MtChr5; po s 3068629 to 3069820)
gcccaagacacctgctgattatacgttagtagtttcttctctatatactttctcttctcatcatttttttccaattcattctttggttttttttattctaaaaaagcttaatcgtagttttaacccgaaaatcataattttaccacatatttttttgagtggttttgatctcttatatttccttatttataacatggcagtctctcaattttcatcgaaattagtgtagcatcaattattgacataatatccaattttcataagagttggaccagtgtcggtcaatatatgacgctacatgaaggtaagtttgatagagggactaccaaatcatcacaaagaagaaaaatataagggactacattcgctcaaaaaatagtatggtgtgtcacaattgcacattccgaacacttgagggctaaaatcacaatcaagtcaaaaagttactaatggtgttcctattttaatattgagtttgacttggttaaaaatttgattagtgcaaattatgtttaaaatatgaaatgaatatattgatttcttttatttgattttaaagggaaaaaaataaaatagaacaaaccttttttcttatatcaatttaacttaatgagatatataacccaaatttcaaaaccacaattgatatatatatatatatatgtttcttttattaattttcatttagttattggatccaagtaaaacacaaatgatattgatcatattatttttttggttacaaagaaaacaaaagaaaaagacattgattatattatgattaatcatttaatatttttttctttctaaaaatgcttgaatatgtttttactccatgtaaaaataagtttttttgtttttagaccttgtaaatataccattttttcgtccccgtgagcttagctcagttggtagggacattgcataatatatgcaggggttgaggttcgaaccccggacaccctacttctccacatttaattatgtgaggtcccgccactagactactagataaaaaaaaaaaaaaaccattttttctgtttgaccattatcgttttccatagctttcataaaatttattcatgttaaaattggtatttatgtaattttcattttaattgttattattttgttgcatgttttaccaaaataaattttttgttgtttccatgcagtaaggttacaagcgaat

SEQ ID NO: 4247 - DNA, 1799 bp, Medicago truncatula
  Intron number 3 from transcript Medtr4g022570.1 (locus Med tr4g022570) derived from phytozome v7.0 (chr-ID MtChr4; po s 4662952 to 4664750)
tgaagtactgtgataagtcgttgcctagcaactcggtatcgttttaatctcaaagagcggagactcttatcacggcaaggatgtcttgtttgctatgaagtttgaattgtgaatttctaatgtttttggttttcagatttacttctatgagaaattacttttgttctcttttttaacgtaattgtatatatgctcatcatgttatgtgtgcatgacaaatgaataagttattaatatataatgcaagctattgattgtggagtgcattgcattgcttgttgtcgctttgccatgacttatattacttgaacaaattcttgtttcctacttatttaagttctctttggtagcatgggttttgcattttttttttaagcagcaggttttgcatatttgtagcatacttttccttatagttacttttctgaatatataaaatcaataaaatctctgtaaaaaatctttatttatctgctttagtacttttccctcaaaaggtccattctatgaaaaaaattaatattggtagtagtagtactagtacatgctgcatcgtggttgtaatgcattcttcttcttctgatatactggttttgatattgaagttcatcgatgtttgagctatgttgaatacattgattaagagtatatttagaactaattaaggaagaagttatatgggcgattgagcattattcttgtggccctataggtttagtttcccttagaaagttatttattttggtaggttagctgaatggaggagttaatactatagttaaccgatctttacatttatgtacaaatattttgtggtttattttaggtttagtttttaataagatattgagcagcggacgacataatttcctcatgagtatatcttccccatagagcaaagcatagcacatgaagagaaaaaaaggcagggacaaggtaaactttgctaggtcaataacaaaatggttgtagttgcaagttctcctcctgaatttatcttttcttcttaacgatcattagttgattcattgtagcagaatatgaattcgtagcagcaaaaggcctaacaactatttgaaccaaatgtttctggttaccaatagcaaatgcttaagatttaagtctgaatttctagccccatcgttttctctgttctcctccattaatccaccaaactcccttttctcctccactaatccaagctgcatccttccacaccgatcgtgtcatgtccttcccgatggcaccaccttcaaaccccacctaatggggtcgtacatacaactagaggttctccgtggtcctccatcgtcgcaggatctagctatttctcaactgttatgtgctttttcctttcatcattgtttagattcagagaaaataggttgtttttagacccatcaaagggtggtctgccgccttgaccccctgacttggttgcggtttgtggctctgttaagtttggttgttaatggttctagaagatatgtggttgctgggatataaactagttgttgcggtgatttgtaacatatggttttgtgcggtggctaaaaaactgccgctactttcatcttgaaggtggtgacaattttggtgggttcaagtgaaattcgtaattgtttgtcgttctgatgctagttcgtttgaaacgaaggtggctgcagccacgccaccatcattgttgttctatttatagaggtttgaatttgttgattttgttctagtttcatgttcgatttagttcaatgttgctgtcttgagaatccttcaagttggggttgtgtttcggattgtag

SEQ ID NO: 4248 - DNA, 1471 bp, Medicago truncatula
  Intron number 1 from transcript Medtr5g039380.1 (locus Med tr5g039380) derived from phytozome v7.0 (chr-ID MtChr5; po s 16673928 to 16675398 reverse strand)
gtagaaaaattaaaagtaaggcacgtgtaacttctttcgttggttcgatcttgaagtttcagatagacattggatgattgttaaagaaaaacaatgaactgaagaagggaaaatggggagatgaaaggaattgggggaaaacaagggaaaaaaccctagaatctgaaggagtgagataccatcgcatataccaggatttaattaagccttttttaaaaaaaaaaattattttgctaattatacgcgtggaaataacttattaaaaaataattataaattaaataaattgtcaggtggcgtgccacatatggttgactgagtcaaaattgatcttttgcaaaagggggtagacatgaggagttacttttgccattttttttaataggaggccaaaattgcaacttttacaatcaacaaagtatcacaagctagattgatcaaattcttttagatccaaatcgaaaagaaaaaaactaaccaaggttatagtggtgtacatcaacctacatcaaaataaactggaaatgcttaaaagacccaataatccagaccattgtagaaaccactgtaacatgacatacataggctttttcggctttcattgctctatttgcaacctaaaacttgtatttttcatgtgacccttaacattaatgcggggacaaagtaaaataatctcacctttatatggacaatattgatataggcataaaataatgatccaaatccaagatgcttttacttttttcactctatgagtttctcacacgccttattttttttgctcggattatataatcttaacgctgtttgagattatataatccgaaatgttaattttttttttttctattttgaaatggtctggcaacctagatactgaaaaatataactgttaaagcatgacaaattaacattcttcatacgattcttcttctctgaatctctgattcatcacaaattcttcatacgattgtgtgatattctgtttgagacttgggtgaatttttttaatatttcaatatatttttcgtgtaataaataataatggtagttttttttttcttccagaggggaatagtaagtaataacgacactatctgtattcagtgtattttagtagttgttttaattgagatttgctagcaacattgtttgtagtaatataatggtagcaaaatcaatattttcttgtagtgattaaagacctagttaatgccaatcgtgtagatgaacacggataagaataaaatttacattttgttcgtctatctttcaatggttaaacacaattgctaaaatgaaaattgaagatagttcttgaaagatcctaagtagaagaaagaagtaagacctcattttcattatcttaataagctcatctataacaactagaaaagtataaagaccctacgatatgttgtgatggtaagtactttggaacaaattcagagaagaattgatagcacaa

SEQ ID NO: 4249 - DNA, 838 bp, Medicago truncatula
  Intron number 3 from transcript Medtr8g118660.1 (locus Med tr8g118660) derived from phytozome v7.0 (chr-ID MtChr8; po s 26689260 to 26690097 reverse strand)
atcggcctcgtctaatcacaaccttcaaggtgaataatctctttgtctaagcaacaacattattgaatctggatccttctattcatatttggcgtttactaattatgtcaacttgaacacaactttatgttcagttgtagcagatagagcgattgatgttcagtaatttgctaggaatgttctcatgaatattaatcaaaacatccctggaacattcaactaatgtgttcgatttagattttaaattccgagtaatcttggtcatttttacaaaatcacccttgttcaattttgataaatattcaagtcttgaatatgtttttggtcttcgaaatataattcttttttcgtagttgtttacgaatttgtgactgtggggtgggacattgaaagggctgggtcattatgagtgagcagtggtgtctttttacattgtcaaaaacattcccattccattccatgacgatgtaacaaccccgatccaaacccttaataaaggatccacaaattctctaattttgtttacaagcttgaactgctcaggggaactttagattccaaacctcaattttgtttattagcagttgacaagtattagttttttaaacaaagtggttgatactatgagcattcgcgtaaatcacattcctattggctagagactggtgttaacaaaacaccgccttaaaacgtcatgctacaacaatgtggatcttgaaatagagaagttcaattaaaaatttatgctaaacttcagagaatatgaaaaatggcaataaattattcatttttattttctttttgttgatattttatcagcctgtgaggaagggtacaa

SEQ ID NO: 4250 - DNA, 1603 bp, Medicago truncatula
  Intron number 1 from transcript Medtr5g077350.3 (locus Med tr5g077350) derived from phytozome v7.0 (chr-ID MtChr5; po s 28499650 to 28501252)
gtgtcggtttgtgagaggaggacaaagtcttcgcggtacggtcttttcttttatctttccttcttatccgcttcttcaaaagaaattgaaaattaaaatgatttgttgtggaacacgtgctccaaaataaaaaacaagatcttagttattattatttcaacaaaaaataaaaaaggatttgttaatatatatttctcaaggtcatgtttaaattcagtgttgagaacgcagtatttttaaatttttaaataaataaaaaattacgttatgttagatgtgaatattattcactaccaaaaaaaatgtgaatattattatcctcttcaattatttgaaaagaatatttgatagtcacacacaaccacaaaaataatgtataaaccttagaataaataaaatttacacgatcaaactgatcacattcattaaattataataaagattttaattttagagtttaatgatggtgaattgatagttcaaaataactttgtgtaatatgttgcattttgtatggtgttcagagttcgaacctccgataatataatatttttaacatttataaactatttttaagaatatcttcatattcttgtaaaataaaagaatatcttcatattattaaacaatgtacctcactattttacaaccaaaaatttcaactattccatatactaagtatattttttattcttcgaaaaaaaaagtttatttttgatttgaagggttaatgttaaatttacatttagaaggagggtctagaaggagaggggacgacaatagtttgttttattttctaaattgtcaacaacaattattattatttgaaaaaaaaacaataattattaattatgatgttattttatttttttaaaaaagatgtctaatatatattaaattatggatttacctctctaaagaccgcaaaagaaaaaaaaaataaatcaaagattagatatcctaacaaacacattagatgcacctactatatatatagcatactttgatttgttgattaattattattgattaatgataattgattttcattaacaagattgttgatattatttttttggttacacaagattattgatattgatagttgatacggtcaactattttggtattaaattgtaaaaaaaaaaaaaaactatattttggtctcaaagtatggtacgactaaaatattttactcaaagaaattaatgcaattaattattttcttgttttccttaaaaaaaaaaattattaatttcttgtttaacggcggttgcactcaatttttttcattgatagagtaaatttttatacacttttttttgggtaggttactcataaaaaattaatctctttttttttttagggaacaaaattaatctcttataagtgacatttatttcgagattatgaatcattaattaaaattaattaataaaataattaagtgataagaaagtgacgggttgagaaagaacgttgtgtctttagatccgaaagttaatccaaaaaagaaggaaacaatgacacctaacacaacccgacccaaaatatcacatttggatcagaatttacccgaaatttaacacacatttggttttgt

SEQ ID NO: 4251 - DNA, 4227 bp, Medicago truncatula
  Intron number 1 from transcript Medtr1g120610.1 (locus Med tr1g120610) derived from phytozome v7.0 (chr-ID MtChr1; po s 25997929 to 26002155 reverse strand)
aataaaggtagtgcccttcaaagtgaactcatcaggtaatttattcatttttgtcaagatttcaatttatcatactatatatatgcattttctttgtaaattttcttaatatatgtcattaaatagatattttataaaccaacgtaataaagtcatcttatagaataatttgattaaataaatatgtaaaaaaacatttaccttatggttacatgacaattaatttcaacttgtcatcaactattgaaaacgacagcatttttttttttttttaagaaaaatgaaaactacaacatcttagtgcatgtttgataatccaataactttatcaagatgataatgaatcatcgtaattttataaaagcttttaaacctagttttttaaaatcatgttaactcattgtaattttgataaatctaatgtcatacactatacatgcattagataaaatttaataaatatataaagtgcaaaaaatatttagacatacgtttaattataatattaagttgtgatattttttttttgttttcgctaatgtaagttctgatgttactgtttctttttttttttttggtcaatgatgttactgtttcttaagatacacaagtgtttcttaagatacatacacaaatgtctatattaaacttatgtgtaaaatataggtctggtaacacctaaaaaagagcttatagctcttagtttatagtttataagcttttaagctcgtttgacaaaaaactgtttggtaacattttttcaccatgagcttctagcttatttcacaagcttataagctatttttcagaagctattccaagtagcgtttgaggttatagcttatagcatctcacttttaatttcagttttacctttattattctaactaaatttcattttttagccttaatcatttattatattataaattaaaatacatatgttttaaatatgaatgctattttttttatgaatgaaagattctttttttctcaatagaaaaagatattttttttaccgttacatttaagtttttttttgtacaattgttacgttttttttgtgggactatttcaatatttaatgtcacatttttttttttgagaaatgacactttatttttgtgtgatatatcagaattgtagagaataagaacaaggacataaattttctccaacaaaaaaaatgagaacgttacgtttaccttcaatatatatatataaaaactatatttattgttacgtttaaatttttttacacttacttgaccaaaaaaaaaaaaaaaatttacactttacatctaattttttttaggcaaatgaaaataaatattaaattaacaatttttaatttttaaatactttaaacattaattgatataaactttattatggatttaaaatgtccttttatgtaattttacatctatcagctaattgaagctactagtcatcagctataagccatcagccatcagctataagctatcagctagcttatcagtcatccgctatttttaccgaacatagcctttgaggatgagcacatattaactatattgtatttgggtattgactaactactttcgtgttcttctgaactgtagtagttatctaagcacaccttgtgtttggcaactgcttttggttttggttatataattccattttagtttattaaaaaaaaaaaaaaaactatatcgtatcttaacatatgtttgtgcgatattttaataacttgtgtctcggtttttggttggtttattaatggattggatactgaatatttatattttcccttactttggggtaggtgactaggtgtgttaccagtgatctgcttgatgtagttaggtagaaggtcatgtcatgatatgattttctcttactgtagattgaacagaagtgtgtatcctttttttgtgcttttgtttgtttaatatgttgttcataaaacttaaaaaatggctgtgtgaaacttgtgatcgcgggaataaccacttgttttgtaaataagttatcatatacccaaaaaaataaaaattaagttatcataattccatttgtaacccaaaaagttataaatgacgggttagttttagcacaaatcatcattaggaaaagaaatataggaaaaaagtagtgtgatgttaattttaatttttttgcaaaatattaaaattaccctaaaataatcaacttttatataattaatttatgttaagggaaaaatgtgatcgggcatgaaagctcatagctcatagtttatgtaaaaaaataatttaatatattattagtgagtattctaaaatgagaataaggggcatgtatcgcatagatcaatttttcattgatatcaagtggcaactcattaattttaagattcaattacaagagtgaactacatgtcataaacagaaatataaataaaaactattaatgtaagaatacttatacttgtattgtttaaaatcgcctagtggtatctatcaaacaatagaacaatgtcaacaaaatgttatccttataatgttaggtaaatgtatttatttaattgacagaaacagtactagcatagtattccatattgctgaaagaggggatgtttcttcaattaattttgtagtaccatttatttgcgagtgaaaccgtggcattgtgtagatcaccttgcagctttggaattgcatgtcatatactccattattcaatacctaagtttatggaataaataaaatgagaaaagatgggtttacaccccattcacctcttacacaccatagtaaagtgctgaatatatgcagaagaattaagagtatataaatatcattacccaaataaatttttttttatttcagtttattttgaactgtcagaatgtttctttcacatatttatcaacaaaatgacacttgtcttttttgatttgtttttgcttatgtgtttggttttaagttggtgtcattccaattattactgtgacgaaaatgctatatgaatgacttataaaggttaaaaaaccattcattcaacagtagaagtgtcagtgtcggatttcatgtgaaataaaatactataaactttttagttacaaattcatgataggtgggccagaaattgcacaatataatggctcaactgacataccattaattagtctatctacatgttattattccttcaggtccatctacatggtagcatagcaccatatctacactcattgcataactttacatggcccatatttaatattgttataattacattttctttttaatacatattaatttcttggtttaattgcacttttctcccctatagtttgtcaattgtgcgattttgcacctcatagttttaaacaagcgattttgccccctatagtttttcccctttctgattttatggtccccataacatttagtgctgatgtgtctgtttttttatcaattaatgtgtgccacgtgtgcaattccatttttaaaaaaataaaaaaatggtatttttcagattttttggtagcttcgagtttcgtgtgccacgtgcctccttctctcagaatctgaaaaataccatttttttatttttatttttaaaatggaattacacacgtggcacatattaattgataaaaaaaacagacacatcaacactaaatgtcatgggaaccataaaatcagaaagggggaaaactataggaggcaaaatcgctcgtttaaaactatgaggtgcaaaatcgcacaattggcaaactataagggggaaaagtgcaattaaaccttatttcttatataaaaatagaaagcagtttctgttattttttatgtattttcttaaggcagaacatcaagggatgttcataaggagttgttaaattaaatggctatgattgaattgtaccctcattttgcaggcttgatgttttggctatacttaattgtgccattaatttaatgtacttggacagttgtacctttatggaacaaaattgttgctttggcttggcatgaattaatcatttggaaaatcatgctaattatttatgtgactcattcaacatgtttctcagttgtttagaatttcatacatcatacatgactctattcattgtatgtatgactcattcaacgtgtcggacaccaaacacgccttcattctgaattgttgattctacatgtattgatactaacacaatttaacaattattttattgcaacagatttctga

SEQ ID NO: 4252 - DNA, 713 bp, Medicago truncatula
  Intron number 5 from transcript Medtr4g165920.1 (locus Med tr4g165920) derived from phytozome v7.0 (chr-ID MtChr4; po s 41903310 to 41904022 reverse strand)
gctgcatccatcaatcaatcaattcgtatgttacttaattcttggtttttcatgattaggatctttgtgtctttgttagaatcaactgagagaatgggctttcattattggtagataaattgttgctagctctgtcacattttgtctgccactctttgaatactggcttggttcaaattaactttcattttagaatatcagtaaaatgttaattttttttcccattcgatataaccttatttattggcagttgacacctcaacctgttatttacgttttattgaactcttgctacaataatacattttagtcaaaacaaagattttacctccgcaagaactataattaatcatttctttactgtgtggccattatcttaaatgacaaataaaacaagaaaatcggagtattcatcaatgtcagtattttaactgtctttttactcgtgttttttttttttgtttttttgtgctgatatatggactatcatgttattattgagaagtcaagtcgtgttgtttttgtggggtggacaagaggtgtttggggtttcatttacaattatatggttatctattgaaatactagtttgaacatatcatatccttttattggccccctatcctgcctttcagaaccatatgtaatcattttgtttgccttggtctctgggtgcagaatccagaacctgcagttgattttgatacggtggc

SEQ ID NO: 4253 - DNA, 1176 bp, Medicago truncatula
  Intron number 1 from transcript Medtr5g012970.1 (locus Med tr5g012970) derived from phytozome v7.0 (chr-ID MtChr5; po s 3844554 to 3845729)
tccttgtcagcatcattgaaaacagagctaaggaggtttcaatcttcaatactcagttcaattagttttcatgcaataatggaatcataatcttctcgttctctttttcaatttacttcatcgtttgcttttcagatcaatttgattcttgtagttgattttgatcgaaatgaaattcacacaaattccaggattaaactgtgcttttaattattcttatcaattcatacgttgtaggaatttcaatcatgcaagggttagaaatggaaatctagatttgatttccgaatttcaagtggatttgcgttattggagctggaaagtagtttcattctcgtatttaattattttgtggattgcttcagaatgtgaaaaatgcattttatgtttattgattctgttatcagaagtgtttgacttttcctccctaattcttactaggataccagccagatcacatgcacctttgatgttcaaatttttttaattactatataatatattctgtattttttttaatcattctactgtgaagcgaactcaatgaaatttgctactaatggtacaaaatttaatgttttcccaaaatattcgacactccggttatttactcttttgataattatgtctgattgctataaccaggtttctatttcgtagtaaccggccactattagttctgtgtagtacgttcttgtgttttctcccttatactcctttaacagccatgaaggaatttgaattgatcatggtattcattgaggaagaaattgatgcatcgtttgttactaatataatcctaaacttgaaataactaacaagtcagatcgtaagcataaagagtgaaaacatgtcttccactaatttataaacattacaaaggggcttttgcctgttaggaattcagtcgagtgatgagaaagttcatacatgttcgaaaggattgttaacaaagaattcgtacataagttgaaattcccatgttatgcattttcgtaacttgaaaaagaacgagtcagtccaatttttagagtttagtaaaaaaaaattatgacttctaaggtattaaagaactggttcaagttaaataaatgaatttatagtgcctaacttggatcaaatcaactgaattttctgacaggttggattagcggcttttgatttgaggtctgcttc

SEQ ID NO: 4254 - DNA, 1358 bp, Medicago truncatula
  Intron number 1 from transcript Medtr7g070630.1 (locus Med tr7g070630) derived from phytozome v7.0 (chr-ID MtChr7; po s 14296834 to 14298191 reverse strand)
gtcctcaagtatagaacatctttctattctgtgtggtgcagccttgtggctctgcatctaatggtatctattctgaatgtaaaaaagacaatgttctgtataagcccacatattgaatgtgacagaaactttatgtaattctatacttatttactcacaagtttgctaatgtgatttgattaagagaatttatcaacaatattgtcgcaaagttgccagataattgggtcctatacggtcatgggttcaatacctggtccgtgcatatggaagaacacttactgggatagatcaataatttaaatgcatctccatacgttacagaattagtctgaaccttgggctcgaagaaaccttgggaataaaaaaatgggcattgttaattataggaaatatatatgtagatattattaagatgaatgggcattgtttaattttaggaaactacatactactagcaacatacatataactaggggtaaagtagcatgcatatatgtgccaaaacataaaagttagataacaagatacatcatagagaatatggcaaacattttgggacaaatctaaagcactgcacggattgagatgtaaagaaagatgattctttgttacagattgctctgattcaagtgcattgtatatcatatatcaagaataagtgatgtacattcttttcaacaaaacagtcaagctaagaatcattaaaagaatgtttggctaaaccaatcttattcgaatatatatgaggaacattatataaattcgtatgatgatcatgcagatttcaagcattcttcccttggattatttgctcatgctatttcttccaccctcattttctcaatactacttgcaattggagtcggtcttaattggttaaggatagggtaatctgcatcctgaggtttagagcaacatttgtgttgtatctagtcctcgggatacagattacttttttcttaataccaatgtgaaatagggacttgttcggtgagaatatattgggtgaggatgggataatctgcatcctgaggtttaaaacaatagttacgtaattacccctaaaaaaattagttacataatcgtttctaagccttggagtgcagattatcttttccttatcacctatgcagaataatgaaatcaatttgatagcttctattttccttaaggatgtccacatgtgatggagtctgaataaatattgggtataaggattagctaatctgcatcctgaggtttagagtaatattctagtgatctctaatccttggaatacatatataatatgaattaactaatttgatgtggttaatgcagaatatagtgtatcctttcttcagttgtaatcccct

SEQ ID NO: 4255 - DNA, 544 bp, Medicago truncatula
  Intron number 12 from transcript Medtr1g017070.1 (locus Me dtr1g017070) derived from phytozome v7.0 (chr-ID MtChr1; p os 3507249 to 3507792 reverse strand)
agtcatcgagcaagccctgaaccttctgcggatatgtatgttctattgtttttgtttacttaagatgtcttttctgttgtattgttagaaaaaccatcttaaaattattttgcatcaatgttcgtagttggtggcatttccctcttgtggtcatagttgcagcccttgtctgatatctgtgtggcttgtttattttattgtttatgtctgttagcacattgttttgatttattcctaatttggtggaattctgccttgatttgtgccaccgaaagctcaaactacaatgtttacagaaattttggtctgaatgatgatttgcccatgccttgtgttgaattgaaaaataagaatcttcatgtgatttattctgtggcatttttctgaactagtcttttaaaatgatctcattttccctgaccaattggtggctgcatttggtgattgtgttttctagctgagcttttgcctttagtttttgggtttgcccattcacttgtttttatgattatatttaggccgctgaaaaagaaagggaaaacaa

SEQ ID NO: 4256 - DNA, 2703 bp, Medicago truncatula
  Intron number 1 from transcript Medtr3g034010.1 (locus Med tr3g034010) derived from phytozome v7.0 (chr-ID MtChr3; po s 9280882 to 9283584)
caacattggccgatccaagttttagtagaaaggttcaattgtagtatttttttttaacaaaagaatgacaaacatatcttcttgattttatggtatttgtttaggtgcttgggtcatgatgactttagtgggtttgggttgatttacaattaatcttaaggatctggtgattatcggcaaacggaaaaggatttataggtttgaattaaaaaacagtataaggatttatggtgattactgaaaattattaaacttatttgaattaaaaacagtaaaaggatttataggtttgcaagtttgattgattacacaatatggattagggtttggttgatttaaatgattatcgacaattagggttttcttggatcccctttatattttttgttggaattaattgacttgggtttctattagttatgacatagtctttataaatgatggttttgatatgaaattgcgatgagttggtggaaagttctagtatttgtgtctaaacaaaaactatacttttgacttcccctataattttatcataatcataatatcatacttaaattcaataattaaattaaaaaaataataagaaatttctattgctcttgttcgagtgagagcaagatactcaatcctataccagaacctagagatctggtcaactgcaagttgaaaagcatcatagcgttcagaacaaatcgaaattatataagactatgatcataactgaataaaaactttcgttaattgaatccaacaaataaatagaggttcattgtgaaactctaatcataaaggtttaactactcatggtaactgccaacatattaaaataaaagtaaaacatgcgcaagaacatattgccaactttccgaatggataatagtgtgtcaatgtctctatttataggcctcttcccatctatggtttgttgagatttatgggggttttcttccgatccagcttagaaaacaagctggaagtccataaaacccacacataatgcacaccatatgcatgggcgaacaatacaatttttcatccttcttccaaaacttttctagtactattgatcttccttcttcagttttcataatcctcaatatatacaatgtcttgttttgtggaattacatgatttatcaataaaaagactacaacacctggttataaaaaaaaagactacaacacatatgaagttgcatgattagagaagaaactggattataatgactcgaatgaaaacaatacaaatatccctcaaaccatgaacaactccgctaaatgacctataaatattgttttaatatgataataaaataactaaaaacatagtctaaaacaacatacgatgcttcgtcatcatcttcatattctcatggttttctcgtcggttcgactcattagtctgatcatccatttactcctaaaagttcctaggttattatcatacttcactcgtttgacaaaagttttttttttctttccaaactcctcattttgctttgtttgtgttgctacaaatttgtctaacacatttttaacttataaatttgtgggctatcggaaaaacaatttccctttgaaaccaagaggtctagccaatttgtgaaggttttggttagattgagtattttgatttgaaatattttcacaacctctccatccttgattactatcaatgttcctttttgaatttttgcaagatgaatgattgaagattgtgttgaaaatattcatatgataaaaaaggatgtctcgaagttattagagttcatcactactatgaacgttccatgtcctattcctttctttttgctttgggaaaacaagcctaaggatgaaatagtctataaagtatcaattaatatatctaaagtatcaattagtctatctcaattagtcgagttctaacaatcacaccataatccgctttaaaaagcgataaggttagatcagagttttgaattcccttagcataagaaaataaaaggattatgaaaaagtttatcgtaggattactttccattatcccacgacaaaatggaactactcactcatcataaggatgaactacgtagtgaaaataaaagaaaacaagtaaaaccgaaatactttattcaaataacaagaataatgcaagagttttctaatgtgtaatatgatgtgaaatcaagtctaggcttgtcctatttatagctcaagacttcttatttcttgcacctttagaattataaagcttaattacaatcaattacaagttacagtcgtagccccatgttgatgctgttcttaccaacttctaatctcataaggcttgatcttttgcttgccttgcttaattgataacatttttggaacttatgatcacaaaatctgaagtgttggtgagtgattgtccactacttggctattgtaatgggtcttgattactccataacttagtttggtcaataagtcttcattctttgaatctttactacctttttgcatatttacttcatatatctcttatatttacctattagttattcaaaataaagtgaaatgtaagcaaaacttatttaataaacaaatatggcacggatacaggttaagtaaattgggggtatgaccccatttaacattctaatttctttatgagtttctgaatagatttaattttttcttaggtaaaattcagaggggagagatcctctccaccgag

SEQ ID NO: 4257 - DNA, 1013 bp, Medicago truncatula
  Intron number 3 from transcript Medtr1g106510.1 (locus Med tr1g106510) derived from phytozome v7.0 (chr-ID MtChr1; po s 22241726 to 22242738)
gtgcctcttatcataatgtaagttggtgtactcaacaacgtattctctaagggtctatttgggagtttggatggtaggggacgagagggttttggggggaggggtgtagagagataaatctttcacctttttagagagtgtttttgtagattaatatatttttaattttgtgattaaaataacaacatagattggatttgaagaatttacctaagtcctccaaaaccttcaaatatcctccttcaatacattttgagttccctcaaattagggggattttgtattatgaagaataaaactccctaaagctcccccctcccaaatcccttcataccttacactttctccttcctttttctcaaatccccccctcctctccccctcctaaacttcatcgcttcatgtttttcaaatcctaaggggcatttggataaacaacttagggcctgtttggatggacgtatttgagtctatctaatgacataaacacttgtgactgtttgagagagcttatggaaataacttatgatatgtccatcagttgtttttagcttattttcataagttcttcaagataacttatgaaaacagtttaaagcttatatatgaaaacattttgactttatttaatcttttggtatagaaatagcttatatgataaaagattatgatataactacttaattaagttgtttacctaaaaagaaacttaactaaatacttccaaaaagtgcttatggtaatcatatttttgtataatctgttttaggaatgtaagaaaacttcgtaaaagctttatataaagtgtttttatatgttattatgaggagcttatgagaataatttgaaacaatttattgacatatcacaagttcttttgaacacttattatgtaagtgtttttgtaatatgattgacctaaataagttattgtaaagtcatcactaatcctgatttttatgtaagatctctatgaatcgtgattgataaaaaattctgttaattgttgtaag

SEQ ID NO: 4258 - DNA, 1550 bp, Medicago truncatula
  Intron number 14 from transcript Medtr2g013650.1 (locus Me dtr2g013650) derived from phytozome v7.0 (chr-ID MtChr2; p os 3120000 to 3121549)
gcagacaataattctgggtttttattcaaatccaggtgatgaacattccttcttgttaccaaatattttaagaacaattcacatttttgacgtgtttttccttctttagagaaaaccacatgtaatctgtatacctgaacatgggtcttcccattcttcttcatttatactttctactaataaaggcttaattgcatgtttgtccccttgtgtttatttcaggtttcaagttggtcccctatgttttaaaagtttcgaataatttagtcacattttttatttttatttttatttttgttttattaaactcaatattatgtgtcagaagggactaacttattccaacgtgagtaacgttttagaccaacttgaaaattttaaaacataatggaccaacttgaaacctttaaaacataagggaccaacatgaaacctaagatatacacaagggaccaaacatgcaattaagcctttaataaatgtggcagatattagtatgattgagaagtgaatatttctttgctgcacatggtgattcatccttccttttgcgaaaatggttttcatccatttgaatttaccccacaatcatcatgatagtttatttccaagctctgttgtcatcgtgaaaatgcggcgccgtgcggccaacccataaattggtgcggcgtgggaacgtggtgcgtagcaggcgctgtttcggtggtgtgaccactaataaatttaatactaaataccatactattctaaaagtgtagaaatctagcagaataaagtatacttatttggcatatttggttttgaataaaagggatttggtagttatgttaccatctctcatcattgacctgttttattcctgtcattactaggttttatttttgtcatcattaggattaatttgtttccttttctggttcataaggtaaggatggctgagaggctacttactctatatataccattgtaatatattttcatattcaatcaatgagaatacaaaaaacttattctctgaaattctacaaaaagaaataccaaaataccttaaacattactcaaagtttcatgaagtattcataatatgaaataaaagggatagcaaaatcgataatcgctaataagaattatatacaactagtacaagttatcgttttactatttataggtctgctttgaccgcattccacttctgccacgcggcctggcgcggtggtcctgatttttctgctatagcagccggcgcgaccgcttttgacaacaatttccaagtatacaaagttgaaatttttgggcctgtttggctagagaaaaccttttgtttttagtgtatgtcttcacgttgattacaaaattgctaccttgaggaggggggattgttggttaacctgttgtttatttaaacaagttatacgggaactgaattgttattagttttgctattgactcctttttttacttgcatcatggaaacatggccaaacatattataacccctacatttccttgttgtagatataaacacttcattcaatcaacagtgttctaat

SEQ ID NO: 4259 - DNA, 1676 bp, Medicago truncatula
  Intron number 3 from transcript Medtr4g022340.2 (locus Med tr4g022340) derived from phytozome v7.0 (chr-ID MtChr4; po s 4523126 to 4524801)
ttgttgtcactgcagtggccaccgacacaagagctgtgagtatattatataatatatatatatatatctatattctattataagaagtttggtcttgcatatatttttttggtttgaattgaatgttatatgtatatgtatatacactagtaaaatatgttagaaccgatcatgtgcttgaggattggagtaggacaatagtccatactttgtttaagaaaaataaggaaatgcaaataaacaagaggaaataaaatagtttttatgttctcaaatgaaatttgtgctaaatatcaaatcaaacaaaatgagttagctaacaaaatcagcatgtatatacagattataaacaaatatgtcatcgtgagtttagttgggttgatagaaacaacgcataatatatgtaaagtttagaattcgaaccctaaaagaaaattataaacaaataaagaggctagagaaatgtatttaagcatgcagaatatgatttgcaattagcaccctttcatcaccaatcattacttttaatatctcatgattcaagccactaggctaactttgttcaatatcaagtagtataactgattaagtaaatacaaaaacaaaaaaaaataattataaaagaaaatttattagtttacttcatcaaaaattgattttcacaaaaaaaaaatacaattattaaaggaacactcgtatatatggatataataaaaacttatattgtttcaacgaatttaattcatttgataaggacactgcattatatatgtatgggtatgctaggggtttgagtcttggactttctatttattcatcttaaaaaagtgaatttctagccatccactatttaaaaaaaaaaaaaaagaaacttatatcgtaaactcaattttttatttctcaaaaagttaaaaattgctactatttatgttttcttaacatgtactcaaaatataagttagcataagatataagttaaatccaaaaagagtcgaccaagaatacaagaagggtacatgaagattgaggcacataaatccaaaatgctaagatgagagtcaatggaaaagatatgtcagcagcttttgtcctcactaaatggatatataaaattcattttttgtgaccactaattgtatctacgaacatgcatactgcatacatgttttgcagtgagatatttgactctatactcatcatagttgaagacatgtgggatttggaacctttgcttgttgcgtcaactaataactaggcacatatattctgaaaatagtttattcaaaatagcatatccttattgaacatgtagaaacacatactccatctgtctcatatatatatataaacaaaaaaatattcaatatgaagatttaaaataataaacacaagaaagttttaattaattctattaatttaatgatattgtgtttgaaaaactctttagttaatttaaagttaaagttttattaatttaatttatctttgtgaaacaagttttgataaattacaaatttggagattataattattatttgatatagatagatgaatctcccatattattgtttttttgacaaaggatctctttatgaattaattaatgtcgataatgacttgtgctaacatgatgcaatacaggtgggagaacttgcgggaatcgcggtgggagccac

SEQ ID NO: 4260 - DNA, 2294 bp, Medicago truncatula
  Intron number 2 from transcript Medtr8g044570.1 (locus Med tr8g044570) derived from phytozome v7.0 (chr-ID MtChr8; po s 10042615 to 10044908 reverse strand)
gtacatcgctacctgttgtaacagaggttcacaatagctctagaattcagcatgacctggaattattgcgcagagttaaggagtatgataaaaaagctgcggaagtcgcttttattcttgtgttaacaagaaagcagaagcagcaccttaaaaagaccataatataaatttgaagagcacttatactttgaactctagtatcctttataacagtttcaatgcaatttagcaatatgctcagcaaacaaaatgtcatataagttgtatgttattctgaagtgaaacaacaacattgatatttgatttagtaaatcaagggactcagcatcattcaacaaacatcactatggcatgtagatcataaaaaaaaaaaaaactaatgacatgcatgaaaattcatcagtttcaccatataactaactactagtttatacccaagatacaatgtgaaattcataggtaagccaggaagaacaactatcttatgcacttaattattaattataacttacacaactctaaaggagaaaaaaaaaaaattaaagtataaacaaaattctgctttaggcctgaattaagcaaaaattggatgcatgttaaaggtaacaaagctaaggatagattcatgacgtctcaaacatttttaaaacatcaaagtatcaaggattcaactccagccccacaaatagggttccaaatgcgcaaggttttcactggatgggatatgagaagggataatgtaggcaatcttatcctggaatcaaagaggctattttgaactcgtgacctccagatcacagggcagaaaccttgttgcaccaaggcctaccctaaaatccaagataacaaaatgttaaatgaaaaataccatagcctcttgcaaaaaatcattcgaaaaaaggactcaacaagctaaacaaatttaaattgtgcaaaaatcccatcccgaaaagacagagaacttattatccaaacttgataaagaatcgtgttagtaaagggcacactcaaaactcccaaaatcctgttcaaaccaagtcatgcatacataaaaaaagaaagttactttttctttctattaactagcatcaaggcactaaaataaagatttttttagtgtctaatacttttttttgttggttacgttttttttagtgtctaatatgttcttatgattgtgcattattcaatctattgtgttggattgtacttattttaatggtatttaacaaaaaaaatttattgatgacttcaataataatataaaaatgataaactggtgtacatgaagggtaaaaatagaagaaaaaatttaacccaaaaattatagattaaataaattttcttgtttttttgttaaatggaaggttggaaaaataagtcatatcttcttaataatgaagttaattagtacttgagtactaaatgaagaaaatatgaattaaaaaatatttattgatataagtcataaatctttatgtattaaataactatttttttttaaaggatgtattaaataactattgaataggtatgtaaatcttcatgaattgaataagtacctcaataaataaatttttggagtatacttcagtcctaattattagaaaagtcacacatttcaatctgtattataagaaaagtcatcaggttcctgtcctcacttcaaattaagtccatagttttgtagatggattttgctattatcactgttttttattgtagttctcacaatatagttactgctattctattttatgttaataattttggattcttaagttgtaaatatgttttagccttatctgtcttttcgtctataaccatgtaacaaccttctatttttagcttcagttttgtctctctgtataacaacactttaaactcatgtaaatctatataatagtgtacaacaatctatatattagggattcattattattgtctttttaggttaaaccagaatttacaactttcaaatgagcttttgtagcatatgcttaatgtgtgtccatgagcttttgtaagcctttttttattttctaatttatcaaacttgatagacttttaaatttcatttgaaagccttttcattaaccattactttagcaattaatgtttctaaagtttatcacttctgttaagttaaaaatctcttatgttgaattttattttttcagatttaacattccaagaagtcgacatgggtttgattttgttgcttttcttctactggtgctgagaagaaatatgattcttgccattctttacaagtttattttttgaagcagcct

SEQ ID NO: 4261 - DNA, 2119 bp, Medicago truncatula
  Intron number 1 from transcript Medtr2g080310.1 (locus Med tr2g080310) derived from phytozome v7.0 (chr-ID MtChr2; po s 18462236 to 18464354 reverse strand)
gatcaatttttaggtacttttcttctctgcaattgttactttatctttatttatttacttatcttttggtttgcttaatgtttttcttggagattgccgtgtttgttcttgttttgttgtgttcacatgtagatatggggataagaacattgggaaaaccaaaaaataaatataaaaaatgagtatatagtatataccttttgaagtgttgggtgaaaaaaatatacatacagagaatacgacagtgatatacataaatagttgatagataagtttttgaacgaaacggtggggtatggatttttctgggttgtctttaaaaaattgtagatgatttactaagtagtcacacgagtaaatttgtaaggtctatgaaaattattttgcaagtaacaagaactatatatgtttatgaagtacattacaaaaaagatgttaacgaagttcatgtggccattgttttattcatgttaaataaattatcaacagttttttaaatatttttttttttgaaggaattaaatatatgtttgtgaagtatatgtccgatcttgatccgagtttaaaatatgcactgtccaatctagaccgcacagtccagataaactaaatacatccagttagacagcacctaattaggggtcgccatgagcatgggcggagagacggccgctcatgacaccattttttaggccaccaaacttattatatttagtttgtagttttttgtaagaaggcaaacttggctgtagaagttggtgttggtgtgaatcgaacttgagatcttgagaggatcacaaaaactatctaagtggattattttacttagtagtaatagatataaatatttattttaaactcgctttgattaattttattgaaaatattttttaaaaaactttatttatgaatgaattttttgcagcaaaaaatatatgataaaaatacttaatcaaaacagaacaattttattgattcgctcataacatcaaaagtcttgggaccaacctacacctaatccaaataatctacctcataggtacttccatcgcgaagaaaaatagaagatggtttagtgagtatatatgctactgtaaacatcttctctctacgtgggacctctattatttaaatatatatattttaaaaacatatttaaatattaaaatgtaataatataaagttatggatagatgttataaaactattgatgaaatttttaaatttatttttgatgaaatattaaaccgaagagattgaatctttattaaatattcatattaaaaaattataagcaaataaataatacatacatgagagatatgcaaaataaattatactcctaagaggaagaaggaaaatttataaaaaaaagttgaggaaggaaaatttattgaaaagtgggtttccttgtttggccgtccaatcaaatggaaaaaaaaatatattcattttatgaatccatttgactgaatagtcttacatgccctttgctatgggttagagtgaagttttacaatgctaccgtattttattttatttttaagaaaagatgtttatattatttcgtgttcaatacaacgagatacaatataataattatgtatcacacattttaactatgtaatatactctatttgtatttgttgtaccacacatttttgttgaggctgcgtgaaaatgtgtggtacgaaaatactccaacaattttcactgttagataaaatattcacaattttttaaaaggcaatctagaaaaacatattctaatttatagttatatattctatcccttaactaaattaacgagccttattattgttattatattgggttgaatttctagagatttggtgtatggacttttctccttaaaaaaaaacttatattatacttcatatttgtgcaagtcttatttcactatgtatgcatttgatactacataacagagtacctttattctacgagcttttcccttctgttgataataatgcagcaaatacaatgatgataatgataatttcacaaccgcaagatcattaacaaaatcgtgtaattgtcttaccacatgtttttgtttgcagagaataagaacatctttaagaaaaagcgaccaaga

SEQ ID NO: 4262 - DNA, 1045 bp, Medicago truncatula
  Intron number 1 from transcript Medtr6g028100.1 (locus Med tr6g028100) derived from phytozome v7.0 (chr-ID MtChr6; po s 6285660 to 6286704)
acctcaatttctcaattacctcacaatcgattttggtgagttttttgttttttttttcctgtgcaatttgtgagttttatttacatggttattgtagtggagattgggttagggttaagaagaatttttgagttttatgcacatgctttgttgataaagaaggttgtgtttagtgtattcatacttttcatattactttgttagactcaattggatttgcttatttgcttatttgaattcctatgaaattggttgggagagattattgaaacaatatatagcatgtattgtttttattatgaagtacagatgctccttatattaggcgtgtccatgtgttggacacctacatttgtaattacactgaattatgtgattttttttaaattattagctgggtggcgtgtcagtgtcagtgtccgtgtctgggtccgtatccatgcttcatagatagttgtagtgttattagtttctactataattgatgatgataagatcccttgatacattatggttttttgtcctttgatttaagttaatttattatgtttttagagtaacagttggcttcggatggggcaagcatgagagattaggatatatctgctttatcttttgtttatgaaaagttttttgtgaagaatcgattctgaccaaacacagaagctacaagactctggtttgttaggattaagaaggttgattcacaaccagccctttgcatgtctcattttggataaattagtgttttcccttaatatatgttgggtttagagtttagggtaatgggtgtgtgaaatgaatgtgttgattcattggatagggaagggagggtagtggattttaaatgtttagggatgattgctattgattctgaacatgatactgatttgtattaacagagtgagcaatttcctgttttgtgtgttattctgtgtgactgaattttgagggtccatgggggatgataattgggatttgagcgttcattattatatatctctgtgcattgtttattcatatggtagtttagtttttcgtgaag

SEQ ID NO: 4263 - DNA, 1662 bp, Medicago truncatula
  Intron number 2 from transcript Medtr1g068750.1 (locus Med tr1g068750) derived from phytozome v7.0 (chr-ID MtChr1; po s 13794619 to 13796280)
tggggcagagtaattcatttaagcgtagaggagaggtttactgtctaaatctttggtttgttgttctgaacctcatttgattgtaagcatttgttgatttatttagtttcttttttttttaagcaaccattttttcctgacctctttgtctataattttttagtcatatatttgtgctttttagtagtttttttttagtttttattgtctgctttacatagcagggctctatacatgatagatgcttgtgtgatgctttgtatgcttgattgactctttcttctttttttttaaatcccatagtattattaggcaaggtttttggcaaaaggcatagttcatgataccttccttttcataattcaaaactgtcattattaaagcaaacatgctaacgctatacgatagcagaaaatgcgtgacagcactgaaggtaggaaaaatgcaaaatagtgataactactaacaaattctcaacgcatcacagccacgtagtagtaacagcagctaaagtaacgcaaaatttgcagcagtcatccgtagggacttcgatgccaaattagaattccgatattatcttagaagactatcgtgttgggtttcagccccattcacgatgtgtatacgtcggaatatcagcgttcattgctctgttgttccgttcacccccggattcaaattgctgaaaattcttttatttctccttttccgtataactcaagatgttgcttgcaggacaagttagaatccgttgcgtattttcttaatacattaactatatgtgcattactcaatgccatataagggacaccctattatgtgtgactttcgtcggatagtaaaattgccctcccaccggtgcacgtcatctgatcacagctttatagtggagtaacgatgccgggacactttacaagcccctcgaagtatatcatttctgtatgttggattaattttaggtggaaattcataatgcagtgacttataaaaaaaaaaacgccgcagctgtcagtagttgaattattttggtatttagaggtgattaaatattcaatgcttatctcatttgatgggagaattatgtgtgcattttatcttactcaatatgtgatttgttgaagatatgttggttaattataaatgatgaagaatattgtcaacggatttgttaaagatgtgttggttaattataattgataattgatgcataagcacaactttgatatgttaatagaatccatattagagaatcaaaaagtgtcttaccatttgttaaaaaagatgctttcatagatgcagcttttgtttttttatatggtctgtcagatgctttcatagatgctgctttttagtggtatgtattagagctaaagtttcctatgctacctcaaaatgacatttgctttattctattatctcggtgacacatgccttgctaatccctagggttgcataggatgtattgtccttatacaccaataccaatttagcttgccattgtgagtttgtagttgtttttgttgcctacatcctttttctgccattccccttttaagttgtcttcacccctttctcggttctttcatatgatttaagctgttcaatctgaattcttaatttttaacttcaatgtttgtttgaaatcagtccatatactgttac

SEQ ID NO: 4264 - DNA, 965 bp, Medicago truncatula
  Intron number 3 from transcript Medtr3g114280.1 (locus Med tr3g114280) derived from phytozome v7.0 (chr-ID MtChr3; po s 28897433 to 28898397 reverse strand)
gctttcaatcatttttgaggactcattgttaacaggtaacttttcttcagaataattaactattttgtttgttcgttttaagtatttgatgctatattcccttgtctgctacaatgtacacaacttactatttattagaatacacagaatacacccactagtttttatgaaggagtattttagcaacatgcaccttagggtgtatttaacttttctagcaaatgcatataggagctgcttacttacacccactgacttttttaggagtattttagtaacatgtatttaaccatttttttagttataacttgcgaaaatactcctaaaaagctagtcagtgtacaattgcaaatccctttattgttttctgccattcggatgcactccttggtaagttagtatcatcttcttttatctgtattgactaagcatctaatgatgaaaacctgtggagaaaagagaaattgaatgtgtttgggactattgttaggggatgatgccagggaaaacatctcgcatgttcataacttggatatgatgctcattgattgacttggaactatttgtttcttcacaaaatggatgacttcaatcattggatcattgggcagaaatggagattgatttataccgacacataatggatgataaattttccaacttaaatatcaatgttcaacaaaacatttacaaaaattgaaattggattagtaatttaagatatttgttgagtttcatgggaagagtttgtaattagcgtagttatgctaggacattggtagttgtgacttgtgagattataatcctcaaacactgaaattttcaattccttgctctacataataattttatgatgatttctttcttagctctcaattgtgtgtcttctttgaacccaaactctaaaatatcttctttgttcatctccagatttcctcatattattcttcacagaagcaattttc

SEQ ID NO: 4265 - DNA, 1874 bp, Medicago truncatula
  Intron number 2 from transcript Medtr8g132670.1 (locus Med tr8g132670) derived from phytozome v7.0 (chr-ID MtChr8; po s 31395378 to 31397251 reverse strand)
tcttcctccccaatcaccgctgcagttttcttcaggtatacttccaatttcataattgttttatttgatacttccattatatttatcacatcgagatatttattttctatttgtttcgtgaaagtaaaagtatgtatgttgctgttaaggtttttaaaaaactaattttatcacattgagatatttattctctatttgtttcgtgaaaggaaaagtatgtatattgctgttaagttttctaaaaactaatactacagactgaaataactgtctggcgtagttttttcttctgtgtggctatatctatacccttcatctcacctctccaacctgcttttgtgcatctaattatattgttattgttgggatcccacgtagagtagagatatcgctaaagtagcccttataagacttggacaaccctctctccatgaccaagcttttggagctagttaggcctagcccaagttttaaaatgggattgacggtctcagaatctagtgtcgacgaccaaaggttgatgttcaacggactttcaaatttgggactgttagggttttctgagttgggagttgggactgttggatttctaataccaagttgcatttagagagaaatacgtgaattattctgaatgactagagagactgactctcattatgtttatttataataaaattggttgaactaaatcccttgattatatatgggtaaaataaaactcaaaccatttcagcatctatcctattatttacaacgtaatattcacataggatatcttaaatcttaatagaatatttcaaatatctcagcagaaatatcaaaataatagagaaagaataatcccagtcacaattccaattaacacaatagaatgccataacagagatacaggctggtggttagccatcttccagtcaactctttcacggacatcaatatcatccaacttcttagcgacttgttctgaaaggccttaacctaagaagtaagaaccacactgcaacaacattctatgaatcttaagtttctagaggctttgaaatcttacttttctcagaggcttcagccttggatactcagctatggaaaactgaacacagagcagcaagaagcacggaaccaaaaaaaatggtagccttagaaacacaaaatctagggaagaacaaacctgccaatcacgagaagcaaatacggtccaattggtgcagagcagaatgagaaggtgatgacaagtcaaattagaccgtcagagaagacaatgacaactggatttgcatgtatgccaagaaccagggtcgtatttgaggcagggcgaggagggcgactgtcctaggccccaaaaaattagttcaaaaattgggggcccccaaaaatataaaaattaaagggttcattaagtaaaaaaaaaaagtaaggaaatgccaaaatcatatacattttaattgaaaaagacatattaggaaattgaatatcacacttcctaacgtaataaaaactatcatattcaagaaaaatattttcacactttaggaattcaattttttttattatgtacttattagttagggcccaaattataggttcgcccttaggccaccagaatctcataaacggcggccctgccaagaactcgtgctgaacagtttgcacatgggtgtgatgaattctctggcagcgaaacttcgaagagaattacgattacaatctacaattactgttatcctaaattatcggcttatcttcttgtaaccaagatttaatgtgctcagtagtatgcttgcatcattctcagtcctttctacaccatgttcacatggctgcagatcatttatttagtagttcttcggtgaaggaattagatacacatatac

SEQ ID NO: 4266 - DNA, 2871 bp, Medicago truncatula
  Intron number 2 from transcript Medtr3g005810.1 (locus Med tr3g005810) derived from phytozome v7.0 (chr-ID MtChr3; po s 484033 to 486903 reverse strand)
gctcaagaacttgaagtatgttagattccgaaaatgcttaaccattgctcctgtcacatgttttgatttaaaattttgagctagtgaaatgtatttacttcaacctttacttgtatcagcctcggataaagagtctgctttttaagatgaccattttagtttttaatagttttctagattgttaaaagggttagtaatcattcaccaaaaattagattaaagtattcaactccttagaatatttaggcccggtttggataaacagattaatttagcgcatatcgcataagcgtttatcatataattgtttatatgctacttatcaaacaaaatatcatcataaaataaagtaaattgtttttatataagctgttttcattagctgtcctagagagcttgtgaaaataagctgaaaatggctttatgaacatgtcactgttttcataatctctcccaaacagtgttacaaacaagtgcttatcccagtcaataaactcaaataagccaattcaaacttaaagattttcctagaagtaaaacagactagtagagtttaacttgcctagaagtagattcaatttgaattgattattggcataaactaacagttaattgtaataattgaactccaatagatggtataactataatgacatgctttatatttcatattttcatttgtgttatattttagatttgtcgtgtgaaactactaatttcattaaaattgtccactgtggtatgaatttgaaattttattcatttgcctggaactcaaagtttaaaagtatctatctgttggacagtctgtttggttgatcaatgacaaacatatgttgtatctattgcaagagcattgttctcatgtcaaaatcttgcattagtcaggttgagtattcatgatgtttatcaatctttatgcagaagataacatggtcagcaaggtcttgtattctaaactatatttaggttattctttgtacacgagcttgaaaatgtgaggagagtgaaaggttttcatactcttttattgatatgaagtgaatcatgttgtttttaattaatagggggaggcacttaggccatgtaaactgttccttcgtagattcgaacacggtcccttgctattacaatttacaaggatagacagtcaccattggattgagcttaactcaattctacaaaactggtttgaaagatgacagatgcctcccacttatatactcattttcatttcctatctcatctaatgcaagactcgtacctccccatcacgcttaggactagacatttgaagcgtaacatgactgcgagtggcccatcagatcttggatagactctgaaggcatcatataatgtggattaggcctaactaaaccctacaaatccgacttttaaggtgaccgatgtctcccacttatatacatatttccagaccttatatcgtccaatgtgagtctcttaacagattccatcatcatcagcctcttagtgggaaaaggatgaagccaatcttggataaatgcattgttacttaatttagtgggaaaaggctttggttgttattgtttgaatgtattaatgttgagtttgactcacattcatgataagtaggcaggcgcttgaccgcagcataggggtaaacttgtaatatggaatgtagcatttaatcacaactttgtactttgtaaccttaagcaatgcataatagaaaacaacaacggccactttgttttttgtagtcataggctcaattgaccaaactctgtgatcaactgtttctgtctttcgtgcgtttatttatctgtctactttagagtcgggtttgctgttctagcaattgttaaaatagatgttgggattctggtttcctgcaaatgcaacaaaatgagcttaattctggaacttgtggaatattctgtgtttataggttttgaggatgacatctgaagtaacataatagatccaaggcatattgaatattctttgaacaggctaatgcatatgtttttagattgtgaatttgtgatgactcaatcaatgttccattagtcctagttggttttgttgtgagttttaattgcaatgctgcaaattcacactacacagttgtaattgctttacaatttatgcatcattttgttatggaactttaacagctgcagttatgaaactttttgctaactcatcgttttgttccctgcatactattttccatgaatttgactacgacgcttttgtaattgcaattttggtccctaaattttgataattttttacacttttggggaccaaaattgccaaaaatcctcaaaattgagtgaccaaaactgaaaaaataataatgtgtacattgtgtagggaccaaattcgtgaaaaataaatcggagtatcaaagtcgtgaatttgagaaaacgagagacaaaaattgtatttaagccgtcattctaaataacactagaaagaaatgactacaacttcgcaaccagtttacaatcaaagtaattttacttttacatatgttctactgaaatgttaaagccataacttgtataatagttattatcctttgttgaatattttttttttttacttccatcaagggacaaactgcattataataatcatgttagttctataactctttgatttacttttcctcagaactaccaattatttccatactgattatttactccaacaaacttacatattttatgttaatttcttaaacttttgaggatagcttatttctattgatagtatggttgttaatttgaaggtatttgctccaatgttggtaaataaagagtagttgatttgaaagctcagtagtaaccttcaataaatttgtgcagcttgcagtcgagt

SEQ ID NO: 4267 - DNA, 3161 bp, Medicago truncatula
  Intron number 1 from transcript Medtr4g104470.1 (locus Med tr4g104470) derived from phytozome v7.0 (chr-ID MtChr4; po s 22818425 to 22821585)
ctctggaaaatccactttgcttgatacacttgcaggttcataactagttacttcattcttattatgctgctatatatgtttctttgtttgtgacagtacttttttttttttttatgctatgacttgaattgcccaaacatgagtaaattcaaggttttttaaaaaccacaatatcatgttatttggaagaagaaaaaatgttcaaccttttattggtttgatggtttctcactatggtggtacacaaattcttttattcaattaggattatgtataattaaatgtaccaaaattggatatttcccttttgagctttctttctgagactgtttgaagcttaattgttttgtttagtgtattgaatttactagtttgatgtttaatttttgttttattaaaaaaattcaactcaattctggtgacactaacctaagggcccttgttttaatggtttggtctgtggtggggtatgatattgttgtctaacaataaaaaacattacaattatggaccatcccgaaccaattctgtcaagtcaaaaatttatttgctattttgatgatatttggacttatttttgtacttcttaatcaccaggaaaaaaaattggggtttcttataaaaaatatacagatatttacaaaaatacgttagtgacctttccactatacagctacaaataatgaaggaagtggcattcagaaatccaattataatttaactaaggcattatgggaagaataatattaaggtagttaaaattgcttatattccctcaaaataaattgctcatattagagaacacaaaaggttaatgttttttcgcttaggacatgttaaaggtcacatgttaaggaatctatagatgcgaagggctcccttcatcctttaatataagggtattttgtccaaatcataagtattaagaaaaattgtcgcagtaataaatttatgtgaaaaatttgtaactattactaaattgtctttttaaaaataaatttatttaatgttgatttttatattctaagacagttggtagtattatactctttccgtcccaaattataggatgttttgggtatttaacatgtattaagaaatctaattaattttctatgagaaagagatattatgagttattctacaaaattgtctttaataaatgatataggaaagataaattaaaaaattgaaaaaagttaaagtaataaatagttaagggtatataggaaaagtaacattaagtttcattggtattgtaaagagacttataatttagggttatgttaacaagtgctctagtgcccttaggacacttgttaaggaaatcgaaattaatatgtttacattggattcaacaacattttgactttgaaaaaataaaattcctcatttttcatcatttttcaatataatatttttatttttatcctcttaaacaatgccctaaaggtactctttagcatttccctataatttaagacaatttttttctcaaagcaatttataatttatgacgcagggaatattactaaagggtatagatggaaaaaagataaatgaatgcatctaaaaatttataaatagtattatatttaacgacaaacctatttttttaaatagtcttataattagacacgggtgaaatatttattgaagaaaaaattcttcaaaatattttaaaaataaattaacacaatttttaataaataatttatatctttgcgacactaagatgtgtatttaccttttgcttatcttatcttatgataataaggaaaagaggggtgcatggagtattgatttatttttttaaatctcgtttttatctttttcttttctactgtgttggagatttgctcttattgtagagttgggtaacaaagtggcggtggcaactgtttctgtctccaaaatttatttccaaatctttgacagctgcctttgaaaagaacaagttaatagtagctctctatctttatgttattaaattttggtggttggaattgtgtgattggaaaattatattcaatcacataacctaacttaacttgtggattttgaaaagggtaggttcaattagcatgagaatctaggtgtgtacaattaatcaagtatatttcaatagaatttttttatttagtcttggctaaaatatggttttatttcctgcaaatatgcctcgttttggttttaattcctggagggattattttcaaaaacaaaaatttttgcagggaccttttttaaaaacaaaatattttgcagggacaaaaaactacaaaattggttcaattataatgtgtcacgtatgcaaatcatcacaaaaatggggtcagggactattttcaaaaacaaaaaattttgcagggaccaaaaacaatttttttttttacagggaccaaaaccaaaacgaggcatatttgcagggactaaaaccatattttagcctttagtctttaatatagattaaatgcattattttttatatgaatctaaaaagtcaacttccttttgtaatagagaccgaaaagaatatatatccaaaaaattattgcaaaagagtttgataaacatatacatttcattaccttcataagagttcttttatctcaattcttagtttttaaaaagaaatggaccttagtttagatttgaaggcaagtaaagtttgattaaacaagtgattgaattcaagtgttaataaggttcatcaaatggcaaatcgttcggaaaaacgagaaactttagtcatgttacccaaactacggtttataagttatagccatgcattggtgtttttccttttcaccaattatcaaattccatgaatattgattgccaaaacacactttaaagccccatggcccatgctggggaccatggtttttgtcttctcatttgcactataatggaatttgaccttttcacctaatcatcacatatcataaatggttgagtgttgcataatctatcatgcttatcatccagtgttagatgaaattaaaatcatattagcatcatcattaatcacaagataaaaaaggagtaacaaagtttaatcaataatacaattatccatatgcaatttgctagttgatacataacttttcagggctaatctaaatgtccaaatgctgttgcaggtagacttgcaaaaa

SEQ ID NO: 4268 - DNA, 4155 bp, Medicago truncatula
  Intron number 1 from transcript Medtr3g132930.1 (locus Med tr3g132930) derived from phytozome v7.0 (chr-ID MtChr3; po s 33541129 to 33545283 reverse strand)
aaggtacgtacctacacacaaatgatatatcttaaagttctactcatgagtaaattagtaataactcatcttaagtttaattaatatatcgaacactaattgttaaagtttttttttttttttctttaaagttactcaagaagaattgtggataatttatcaaataatcaataaaaattagccatttaaacaaatttgcaagtgaagtaaaaattatttgttaataccacattttttttagagagatttgtcaatgtcacttgcaaatttacccatgtaactattacggatttttttttattttgaaagaactatttcttatggattgttgggtaagttatccacaatttcaatatttttagtattacaggctaattccagcacctaaggaaccttatctttctgtgtcaagtatatcgttggatatcagcaacatcatgttgcaattttatcataacattgagttattttctcaatattttgcaagtttagttttcttaaaatttctatttattttttctactagatgagttgccatttgagatcattagatcgtgatttgaagattcaaggtttaaagttggtattttagtttaaaaaaaaaaacaaaacttattttcagtttcttatctcaaccgaacgatgacaaatcgtctaactgcatgactgcttgctcagatagtcgattaaaaagtaggaatgtctattttattctatctattttagagttagtatgtttgaacaccttaactttttgaacatccattcaacattatatttttttttctcaaatcatctatttacattaacatcatcaacattacatcaaaatttaaatgtttaacttttaaaattaaatataaaaaaatgttaaatacaatttttttttctttcgcaaattgtgttttcaaaaatgagaaataattgttttttttatggattttcttaaatagaaataaaaacaaaaatatgcaacagacgatagaaaccgacatgattgtccactagctatagagtacttaggttctagttgtaggcattcactcttgttctatgaagccccgatatccgacacgataccgatacaatacgatactgatacggcgatacggataaatttgcaaaatttccgatacgatacggctgggatacatttaaaattaaatatataaatgcacaatatataaacattactaaaattgatgataaattaccattcaaattactcaaaatgagcaaacaagtgacatttacatatcttaagttaagtactgttataaatggacatcattagtactatccaaaaaaatcatcatcagcactacccaaaaaggacatagtttagctattcataaagaacatcatagtccaacattcactccttaagaggaaacacggactgtatcagtctcctctcctctgtttccatcatcaaagaacattgtagcctccaacttcggttcatctaaagataactcagctaattcaattccaacaacatcaagcgggtcatgcgcataaaccaaatcttcaacccctttttggatccattttatttcttttgaaataatgaataaaagagtaagtactccaatttttttcaaaacatgatgaagaacatacctgaactcccagcaattttcaataagtgaaatcttgctctagagtatgaactcctcacctctttttgacaaaagttgcacctccaaagcttgtttccatctgcagaatcattattctgcaccacagtgacagtgacaaatctccatagtggtttactatcatcttgggggttcttttgaagcaaacgaactagtaacactttcttcaattgaagacataactattaacaaaagaaacaataataaaacattaacaagaggttggtagtataaataaaaagaaaaaataaatctagggtttattgtttacatatgctaaaaacaatcattaatacaaacaatcttattaagaagaaagtaaacattttttgtgaaacaaaagagaagattaaagagaaaagaagatattcaaaggagaagaacaaaacattagagagaatggaaataaatagaaaatagagcagtagagagaagagaatcaaaatagagaacctcaaaatgttgatggaggttttgttgttgatgttgagatggagcaatcggcaggttagaaggactggaggagaatcgctgacggtgagaaactcaaaatggattccattccaattccatattttttaaaatgagagagagcgcgcgctgcacttccacttatttatattatatttatttcttattgcttattttattattattcttcttataaaatgaagtgggttaagtaaaagctaaaataataataaaaaatattgtccacgtatcgaatgaagtatcggttagtttagctgtatcaggtgtataagttagccgtatccgatacgtatcggtaatttaaatattttttaaaaaaagttaattacgcgatacttctctgatacgcgcatcgggatatatcgggacgcatcggtatcggatacgattcttcgtgatttttagaatatcggggctccatgcatacaactaccatcacaaagcttaggaattgtttgatgccacaatcaccactgcacaaaaacttgcaactttactctttgcctttaaggtcggcttaagaataaaatcaccaaagtaatcgtcttaaacttctaaatataaaataaaagggtcatgttaacttatgcctttaaagcacatgttaaatattaatttcattctattaatggtaaaaatttattgaaaaaaaatgattaataaacaatttgagtaataaattaacacaatttccaatacataatttttgttaatagaattcttaacatattccaaaggcacaagttaacatttttcaaaacaaaattaataaaaacatctcatattcttgaaataaaatcataggcatgggatacatatcatcagtgtagattctccacacgcattttgatttttgcgtgatgaatacttttggcattacgtactatttatttccgttgaatttgtagcacccttaactttttacaaatctatcatatcacatcatgtaccaaaaacataatttatcatattccgaacatgacttttcataatcacgtcaatgcaaatacaccctccgtccatatatctaagggtaacactgggatgacatagagttgagtgataatgatgacattgaccaatcataatgtcacaatgtttgtgtttctctctctttcacaagcatcgtaacattgtgattgactaatatcaccaatgtcactcaactctatgtcacccaagtgttatcttatatctaagcacccatttgactttatttttgtccttaaatctaaaccctttttcaaattacaagatgcatttattatttttttcctaaacatacccctaattaaaactactaacttgtcttgaaatttcaaaagtcaaatttaatacacatacaaacaaaggacaatttggtaatattaacacacaaaatatacatattaattaccccgagagcttttcttaagaaatgtgaaaaaagaaaagggtgcttacattaagggacagagggagtatgtccttgtgatcgaccaaacggacctaccttatattccatcaagatcagggtctcaaaatggggacaacatgtctactccggttcgcctcatcctcgatccatctgtaatattgttcattctttttaatgacaaacgttaatgattggattggttgttagaataatttgttctcctttatttggatttaaatgaggatctccaacttttttatcgcttaaactcaaacttgttgagttacccaacctctaaaataatgtcaattaataaagcaagttgaattagtaaattggattaaatgcacatttggtgtcagatagggtttgggagcatttatgttaaaccatcgtcattttgtaaaagtttatttttagcaagatttgagaaagttagagtatctagcttttgtaaaatcacggtagctcatcgtagtattgacatagtaacagtaatatcaataataatgtaataataatacaaaagtactgatgaatatttttgcaggacaacgagaagaaaaatatacttgctgtacaaac

SEQ ID NO: 4269 - DNA, 532 bp, Medicago truncatula
  Intron number 2 from transcript Medtr7g093720.1 (locus Med tr7g093720) derived from phytozome v7.0 (chr-ID MtChr7; po s 21089055 to 21089586 reverse strand)
cccctttgcttatcaggtaattcgaaactcaaaataaactatcaatttagtttctgaactttcactatattaattttacttcgtcttgcgagtaaataaaaataacaagtagctcgtatctaacactttgtcacacgtttctttatagtcctactggaaccacagtcaaagaacgggcttgatgttttcaccaaaacatggaaatttgcaaaaaatagtattgtattagagattgtgttttgatttgattttttttggtagagtcttctaacataaacgtatctgcaaagtttagtagcattctaatatagccttaattgattttttttccttcactatagtactattttcatttataggagggacaatgtaggagaaatggtttaaattttgaaaagaaattgatgatttattctttcaaattatattttgatgccaatacattattattgactagttaagtaaattaacatttcaaaattcatgaaaaactgcaggaatttgtaaaggcagttgttgcttatcagaagag

SEQ ID NO: 4270 - DNA, 2340 bp, Medicago truncatula
  Intron number 1 from transcript Medtr5g096150.1 (locus Med tr5g096150) derived from phytozome v7.0 (chr-ID MtChr5; po s 38204443 to 38206782 reverse strand)
agacactctaacgttcaagtaattaaggtctcaaggtgttttgaggaatatcttggaccgagaaatttgtacattttttttaatatgacactctgtttatagattccaaaaagatacaataatgtgtgcatcatgacggtaataacattatggtgcaaaggtcaggtcaatgtttgatgacaagcagggctttgatggactttaaacgccttattcggtgcttcgcagcctttagtgacacacataatctttagattatgtgaaaaactttattggatcttagctttcttttgtgactttggatcgtagggttgggtgataagcctaattcaaatcaattgatttattttaaattgaattcatcctaatttatgtatgattttttgtcggtgatgtacgaggtagtaggttatctcctcatgattcataatttttcttatctgtttcttatataaaaaaaaagttagtggtgtactttaagaaaagaaaagaaaagaaaaataccttaacatttatatataaaccacacattctactactatatataaataactggcgcaagaatatcacaaccttcatagtagcacaccaggcaaattcaattgtaatgaattccgggttcgattcctggctgtgaaacattttttttaaatatcatatcaactctccccgtgttctttcaaaaaacaaactaccgcgtattttttttttaagaggaattgttccgttttagattgaaatctttttggtgtgtagttgtgtacagatgaattttttttacaagattgtgtacaatgaaattgtggtgtactgcttaatatttcttttttttttttattttttacccctttctcgtatttccttgaagataagatatacaattaaatttttaaaggatctcttgatcttcatatctcgtccatatttttgctcggtaattttacacattgcaattttggtcaaaaccaagatatttagccaacaaatggttaaatctaaaagttaaattaatttcatatggcaaatataatgttgagcataaggaaagactcatattgtataaaaacaaactttctctttaaaatttattgatagcttactataattaccctaaaataaaatagcttattatagttaaataaatagtattattagtaccaaccaaaactccatacttctatatacatcatattcttcacatgtcaatattacgaacggtaccataccatataccaacacaaattgcaaattatgtgactatggttcatagttcttcctttccttttctcataaaaaaaaaaaaagagctactggtttattttattaaaaaatatagtggttatctgtaaattaaaaaagaaaataattatggctagaagaataaaattccctgatcacgcatagtgttatactacatattaataattgccgatatcatatcatagaatccacagtagcacacaaggcaaattcaactctgattatgaattccgggttcgattcccggctgtggaactttttcgcaatctatattttttcattttttttgataccaactcttccgattatcatttattttttatgaggaaatgtttcttatattttcttgtgcgggtacaatatcatttttttttttatgaggaaatatttcttaaattatatcataaatgacattatgatatgatttaattagatacacatgttaaaaagttttagatcatcggtgcatataaattaatgtaataattatcttaatagatttttaaatccccaaacaataatttatagacggagttaacttttctccaaatggtggaatcattgtgataatcttttatctttttgataactcaagttatttgttgaacatattttttttcttcttaaaaccattaccaaattgtggccttccatcttgaatgtcattggttttcacgtctattgattgcataagtacttaagcagacttacatcctctatttttttttttttagagatttggtaactcaactgatttcaggataataaatttaaaggttatgagttcaaactccgatgaataaataaaatattaatttaacaaactatctactaatatttatcattaaaaaaattctcaatttattgttcttgaagttaaaaaaataattctagttccatatatttatatcgtttggcatgctttagtttattctatatgattatgtaatatatttgtctttgtcacggtatagatattcgtctttgcttctcacagtttagatcttgctcttttcttctttacaaggttctggatataattttgctgcatcataagattacaagttgaagagagtaaca

SEQ ID NO: 4271 - DNA, 2637 bp, Medicago truncatula
  Intron number 1 from transcript Medtr3g016300.1 (locus Med tr3g016300) derived from phytozome v7.0 (chr-ID MtChr3; po s 3118700 to 3121336 reverse strand)
tcaaagttaggcaaccacttgagaagttaatcaaggtaatgtatactatatctttataccatgtgattgcttttgctatagtttttgctttttgtgttattaattagattagatactattccttttcaaaaacactaattagataatgttgattgctttagagtgaaggaagcagtattttaagaattagtatgcgagtatcacagactcaaaactcaaaactggtgagatatatgttacatttgtgatcatctaattcttattggttgtcgatcacaattgtaatatatgtctcatcaccaactgatcatctaaatcatagttcaactattataaaaagttgaatcaatcgaaatcactgaatcacatataatatatgttaagagtaatctaacatgtgttataaattagcatagttcttatttataaatcaatttcgtaaagattgagttatatccaacctaaattaaataagatgtcggtggtgtctatgtaaaatttgtttgacctgagcacccgttatctagtcacaataatcggatcaactttaaatatcaatccagtggtgcaaatttcaatttattttaattttttaaacattatactttggtcacagcaatattttgtttttattgcttagacaatgatagtgaatttcaagaagtcgtcaaacactaagtaaggacatgtctttctgcaaagattgaaatttgaagctgtagttaacaataatgttaagggtctaatgccgttcaaaaaaataaaaaataaaatgttaagggtctaatttttgttttcttctaactaaacctaaacaccggttgatttaggtacttcatatataattacattttgtttcaaacaacaaataattgatttttagttaagagtttcaattatgaactaaaaaataaataaataattaaatataaatatttaacatttaatttcaataatacagtaaatgatatgcaattatttataggaggattttttttctttttttaataagctaaaatgaaatatattatcaacacaataagttgttcctagcacaaggtgtaaccaggaaaaataaaaaagtctgtacaatatttacaacccggaaaaagaaaaacaaaaaagaaagaaagaaagaaaaaactatatgtagcccaacattattaggagactaagccagaaaccatggtaaagaaattttttgtttttggtgatatgttctttgttcattagagaaacaaaagtttatatataaaatgagacatgtgatgtcaatccttattctattattttaaccttcaataattgttatatttattttttcaaaaaaaataattattatattatattactagaataaagtatgagtttaatagtcctcgtgaacttcgctcagttggtagagacaatataagattcagggttcaaaccttgattaccacaaaaaaaaagtatgagtttaatagatgtgcaatgacggtgaaaaatatttttacataattatccaataatatccatcatcttgctatataagcatatataataacctctttttaaaataacaatccaactctcaattttaatggggtgttagagtaaaactaagttattctgattgtgcatctcctattttttcataaaatataatttttttatatatatttatttatctaatgaaataataaacacatatatcatatttgatatcaatattatacactttatcaagtaacgaaagagtaaaaaatcaacctacataaactaaaacttttgaccaagccaagtcaaccacatgcttgacttgggtatagttgcatggattgcccacagattaaactagtaaactctgttttcctctgtttttaaagttggatgtcttaacataatcttacatctctataatcagtcacgtggcattttgtttgtttataccaaactgcaaataacaacagaccatgcacatgtcatctacattttatatactacatacaattatacatgccatttgctagcttaatcaaggctaatttttattttcaataatatcattaaaaaatggaaaccaaaaaatattcttacaaattaaagacagaaagaaaatggaacaactcatataaatgaacttttctttgtctctatcaaacaactaattagtgccactacatcataatcataatataatcatattgccttaatatttggaggttggatagtccaactactaataacgaagggttaaagaaattaatgagttaaaagatcagagattcaagtcctgactaaaaataaataaataaataaataagaaataacacattttatatttatacattttttttttgaaagagcacatattttatatttgtatacgacatgatagagatagatcgttcgtaacctcttctatatacaattttattcgttagattaatttaatggctgggagatcaacacttccaaccattaggttaattcaaaaagattagaattttgcctaacgaccttatataataattctagtaaaaataaaattatatttttgttaaatgcatgaaagtgtttattgaaaggctaaaattgaaacaatacattttttttgcagcttctccgcacaaaatatagttgccaaaaaacatc

SEQ ID NO: 4272 - DNA, 2761 bp, Medicago truncatula
  Intron number 1 from transcript Medtr3g009890.1 (locus Med tr3g009890) derived from phytozome v7.0 (chr-ID MtChr3; po s 1590546 to 1593306 reverse strand)
atcctttcgggagaagccattggaacttattagtggttgggtgtcggtctagtttccaattaaaggttaaggtcaagagaatatgaaaaaatatggaaaaatagtgtaaaacatgtatttgttaaagtcttgatggaaaagtagtggaaaacatgcattgagaaggacgttagtcacatgagtttaccccaccttcaaactttgattttctatagcaatagaaagaatagggatttggtttgtcttttattgtgatgaaatctaataatttcaaaacgctttttatagttgcagattttctgaaaccaaatcattaaaccttcaaaacattcaatctttcctagctatacaacttagcgaaatactttgatactcaacaagtctatgtgatatcaatattttttttttattgtgccatatagtcatacacttggaggcctataaaaataaacctaaaaaaagtttaaatataaactcatgtataatgtaatgtctctatcaactgatttattcacatgaataaatatttttaggatattgtttatgaaatgaaggtgattttatataaaaaaatatatattcatatcctacattgtcaagtgtttcacttatcttttcaagacgatatttccctatttctttttatgagtacttaaaacatctccaatggaaggtccttacttaacaaagaccactcctcgttaaggactccccattggaggaagaaaaaatgaatccatgttaagcaacatacaactatataaggaccatctttctcatgggcaactagcaggtctcacgtttaaaaaaagtaataaaatatgtactagttggtcacacttgcaacagaagtaatatattacctatttgtcatcattttaaataaaacgtaattcatgcaaactattattattattattattattatttaacgaaggaatgtaaaatttgtaatgttaatttttttattttcaaattattaaaatgttgcagaaatttaagctcatacgaataaataaatattttatacttttttttaaggattttaatttaatattgtgaggtaatttataatttaataaataaataatttttgtataatgatgtaaagttagtgagacctatttaagtatttttcattagagttcttattagtgtattgacattggagttattgagttcttaatagatatttttattaaacaattataaataagtgatgtgtacacgtgtgatctatttaaagaatctctatcagtggactacgattatggatggtccaacttgttagcatgttttttttttcttttttaaaacatctaaactgcctctaagtattgacatatgttgcattattttgtttaatgtaaagccaccaataatatgtgctcacgtctaatgcacctgtctataaggtggagtgtcttatatatccttgagatttcgtatcttgggtctaagatggtgtgaaagcttcttaagtaacaaccaaagaatgtggggttgtaccggtaagagagattccaacactcaagttagctgtgtatcctaacatcatgacatgtcaccaaagatacccttcaagtaatttttgaggaggcgataagcctacttaatagagagaggatttagaagccagaaaatgaagggtccataaccctttggtggatgaagagttggacataaattatattgtaaataaactgttgttggtgaggttgatggcttttgttatttgacaaatggttgatagttttatgtatgcagagtaggcagctattttaggatagttttcaaaattctccgagtgtaataagaggcaaactaataaagtcgctcctaaattaacgagggtagttttatctgatcttagctccaacatttatgatgatgtaccgtcatgtatttatcatcttttaacttatgaaataaattgatttgcttcgttaaaaaaaatatgaactttatcaaactcgttttttcctaacaacaaatttaacagcattttcctctaattacattacttgctttgaataatataagcttaattacatatttgcccactctatttatacacatttccaaaattggtttctccattttaaagttttttatatagtttttttattaaaaataaataatataacatattttaaatgacgtgaatataattcaatgatgtagaatgatcacactcataaaattctattaaaaacttcaatttcccatcttttaagtataaaaatatgatccccctaaaaaaattattaaaacatgattgaaaggcctaaacccactcataataaaacacaaatactactacgaacaccaacacaacacagacatatcgacatcgataataattttaaaaaaaatcacataattcaatataattatatgttgatatattattgaagtcaaatatgatttatgtccaatatcgaaacacgtctaatttaaatagtatcttatgaaattttaaatttaaattaaaaaaaagatgttcaatttaacaatattgatatcatcggtcaaaaaaaaaatttttaaataattcttatatttctaaacagtcaaatacagtaagccacactttttgccgtcaactgtatttatatgtagaactagaagctgcagaagaaacttacaaaatgatgaacttgactcatcaaaaactcctttctaactaacaacaaattattaataatggttttctatcggctcagggaaagcacgtgtggagagtggtagggacatccta

SEQ ID NO: 4273 - DNA, 3488 bp, Medicago truncatula
  Intron number 2 from transcript Medtr1g108390.1 (locus Med tr1g108390) derived from phytozome v7.0 (chr-ID MtChr1; po s 23103153 to 23106640)
tcacacattacgaggtaagtcgtgatttaattatttttatcctcttgtgacttatcgtatattatttcacatatgaaaacatttattcattcttctcttttgttatgcaattatgatatcctacatagaagtgaaatctttttttcaaaatattctaaatagaactctataattcttatatattttactataatactccatttgtatttatattctaattctaatttatagttggagtattgaaagaagaaaaaaaattattctaagagttctactctggataaaatagaaaactaattgacacacttgtattataaataataactcttgttattatactatttcatataaataaattctaaagtcatttatgacttgctaatttaaaatactgttaaacatgtctttctattatttgaatttgaatatgatcgaagttgagtaaattaagtacaattgtttatgcatgatattattttatcatatttttttaagcatagacattattggtttgtataattgtaatctcacctatcgtggatacaattatgcaaattttgttaaataaattagcattatattggtgacagttagggctggaaatgagtcgagtcgaatcgaatctatctgagctcgacccgactcattaagaattggctcagttcgagccttggttcgagtttgacacgaacttttttttcagctcaagttcggctcgtttaaagttcacgaacataccctatcggtgtgttgttaataatataattgctattattcaatgtaccttaatttttatacttatgtcaaatataattagagtaccatatcaatatttaaatgggttgagatataagaattgtacattgtgatgatatagttcttacttattatccttaagatctcgaatgagattacaataagtaagttactctattaaatgacatgtaaaaaactatataaattttgcaatccaatattattctaattttgaattaaatttctacttaaatgttatttttgtatatatataaatattttggattgctattttccctttgttatgtgagtgacggacataccctatcggtgtaacgttacttaacatatcattttgtgatagagaaatagttgaatattttatttaaaatatcattcaaatttttaattcaactatcattgtctatttctatcaagtgggagaatctttgctgtgtattgtgtaacgtgatggacataccatatcagtatgacattacttaacataatcattcttttgtgggtaagaaaaataccttattagtttaactatcattcttcaccaagtgaagaacatataattcttcaacaagcgaggaaaattctacatgtcgattaactatatctcataaataaatataattatttgtttcataactttagatataaaattattgtagagacttatattgaggatattaattatattcttttctcataaattactatacacttccatatccttttatattattgtaaacttattttgtaatagcaatatgtcgaaatcctaaaattcttaacaactccattgagaaaaacttatttataccattattctaaataattataaatggtatatttgagatatttaattttaccattttaccatattttatattattgttgttctttaatacttatggaagtttatgactattttctcttatatcctcaataataataaagtataagtctggtgtatttccgctgcgtgtaacctgatattttttcaaatgtgtagaagtataattgtagcatttgagttttgagtgagttattaaaattgtgaatagagtctcatatcctattttataataatagagacttatctcactcatatgatgataaaccttttgtataatcatcatactctgtcatataaaggttactatatttataaaattctttggaattttaattgtgaaaggagatcttgtgttagaaatttcttaaatgaaaatttacattctccttaattctaaatgcataatatgtggttaactacgaaatccaattcttgataatacctgccattgataaaatatgtatttatgagggtttcatattatccttgagttaccacttgtgttaataattctgttatgttcatgtgcaaaatatgtggttgagttcatgaaactctgttagttaaaattatacaactacttatgttaataattttgcactatcaattaagtattccactgttgaatattacattattataatatttttgtatcagtgatcactaattagaatctcacttactcttgtttatatatatgtgggattagtgggagtgtgtatacaacactatatactatgagctcaaatgagaaatctcactcttgtttatatatatgtgagatcaagagaaatgtgtacacgatactatatacatataatttaaaattctcgtcattgtcatatactcttgtgcacactatataatatggcattgtttaagagactttaaactttagtctcattctattatattgagatatatattaaaatgctatcaatctcaataagcatcataattggatgcttaagtcaattttgttggaatatgcataataacctcttagcatgcaaatatatattgtgcttttcttttaccaacatttcacattttatgaggtcatagataataagtacaatgtatatgttcgttcattattgacattctagtggccacattaatccatttttttattttctttaaactaagtgtctatgttgatccaatttggagattcttgaatttcctattttcttacggattttcatagtcacattttttttttgctataacttggattaattgaatgtcgtagaacatttattattttgactaaatgtaattacactcttaataagttatccccataagtaattactattcttatacctatgtggatatatgactttgataaaacttaaaactcattggcataactacaaaccacatacttatatacatgagtattgcaactcataatgatttgattaagtctatgatattttgggttagtgggagtttgttatagcatttttaaaatgtttgggccattctttaatgacacgttcttttaattcaaatgtgtcactataaattcatcttttgttaaaaaagtgagtctttgatatgtatgatttgttttccccatcggattcatttatggagcattaaagcttacttctcttttgaatgattagtgctttgaccatacatataattttaaaatttaaaattctttatgacaagtgaaatttttcattcttttagtaattgaatattatcatccaagtggaagattgttggattaattatttaattaatcaattatggattgacaataatcaattattataagttaatgtcataatataaattatggtctattgtgttaagtactaattagttgatgaatatagtacattga

SEQ ID NO: 4274 - DNA, 4204 bp, Medicago truncatula
  Intron number 7 from transcript Medtr2g005100.1 (locus Med tr2g005100) derived from phytozome v7.0 (chr-ID MtChr2; po s 95464 to 99667)
agtggcattttcgacatatttttcgcggtaagtagcttggctatcttcttttggtttatctttgaaccttattttataatgtaaagagcaacatcgtgttataaaagtataaaactctttctatggcgggagaagaatcagatctgttgcgggtctgttgccttacctaagttaccctgcattcgcaagaggttgattctattgattcaaatttgtggctcctagtcacatagcagaactctgatcattgcttttgtggctcctagtcacatagcagaactcagatcattgcttcaaggcttccattcaaccttgttctatcattgttttatttctctgaagtgtttgtttggtggaaagaattatactacctccatccctaagggtctgtttgattcgggggttttggagggagagggtcagaggggagggagtattgtaatttttaagcctttggttcaatttttaggaggggaggggaagggagccaaatccctcctagtaccactttttgcttcccccccaaattgggttttatggaggggaggggaggggaatgaagatgtgttatttatattttaactagactccaacctgtgcatcgcacaggttttttgtagttttatgtataagttccaaattggctataatattatttgtcaacatccttaaatgtattatatataatataacattatataaaggctttaatgatactattgaagaaatcaaattagaatcatttttaatatcataaatcaagttatattcattttgtgaaatgagtaaataaccaactattgaacattctgaaatgaagaggatggtaaagaattgaataacatggcttacatgaagaacttagtccttataatagtgggtcaccaatgttaaactcaatctcttatcaatacatgtaaaaaaaaaagacatgagagattttagatagaagaaaattttagaacaaggaagacagtaattgattaggaccatatagattttcgaaagacacaaattgagatgataaaaaaaaatatagaaacaataaaagttgcggaatatactttattagaagcatatctgtatcatatgaaaattttagaataaggaaggcattaattgattaaccgcatatatatttttgaaagacacaaattgagatgttaaaaaaatatagaaacaataaaaacttacgacatcatatatttttttttttttttgacagaggccacataaaatttattagaagcataaaagtaacaataaatgtaaaaattgaaatcaatgaaaataagagggcgcagagaactaccaagcagcatgctttgaattacactagaaactaccgtgaagcttatgaaaccaacagaacggttgttaatatttgtcatgatatgattcttattggtcggaaagcacctattgagggttgggtgaaattaaatatggatggttcatgtagggtgaaattaaatacggatggttcatgtagagaaaatggaagagcaggtcgtggtggtattattagaggtagtgatagcgaagggcttggaggttttgctaaaagcattggagtgtgtagtacctatatggtggagctttagggactgtaggaaggtttgagatatgctagaatcttgggatttcaagcgattgagttgaatgttgattctctagtggttgttaatgctcgtacgcaaaatgagagagggagtccaatgggaagatctttggtatgatagatttggagtgggaagttgttgttaagcattcatattgtgaagcaaaccagtgtgcggatgctttagcaaactatgggtgctctttgtcaggtgatattagtttctttgagtcgcgtccgacgcaatttggccacttgctcacagctgttgtaatgggattatctatccctcgtttaattttagtgtagtttattttcctggcagagccctcttcgtcataaaaaaaagagggtgtagagagaaactatggatttggaaaattattaagggtgggagaaagaggaatgaaaagaaagttggttgaagtagcagagaaagatggatagataagccttgcctaagtagaaaacaatccttcaaatttctttcaaactcaaagcagtataaaaaacaacacaatgaatatagtgggtgggtcaacataaattttcgtttagcacttctcaaaccaatatcactttttttcttctctctttctcagtcaattttgtgataaggttaaagtgatgacactatttgtaatatgcagtttatttatggacaaaacttatgtacagtaccataggtactgtttttattgttgtcctgttaaaacacaacatgtgtattaaataattcaattaataattaattaatgagttagtgccgcttcttctcaatcgttctcaaaacagttccgttcttcctccaaaaccaacctccttcatcatgaaattataactgcagcttcatgaaaccaacatctcatttattcatcaccataaccaacaaatctgtgagaccacacatagaggctgcgagcaacaagattaatggcgtgtagattgagatccaatgctcccacaacaactttgcattgaatttgtaacgctacataccagagcatacaccggcgtcgccgagcacccctcgacgttatcagaagtttaaaaccacaagcatacactttcggtggaattaaattaaatcccacaaagcaatcaacctaacatcattcaagaccacaatacatgataaaataattcaggactgaacacctatgggtttaaacatcttaaaaagattcccttcatatgggtttaaaacacctggaaaatgtaatataatttggaatttgacaatcacagtgtggacatttccagtatgggtagttcaaagtgtcctattccattattgctatttataacctccatgtatagcatgtcagatctattaagcgaacctttgcttaagattttttaggttgcattgatcacacacacacacacacacatatattaaaagcaacactaaaacatcaaaaacactagtggcttagtagtagaaactgggtagcactagcatatggtattgggtttgattctctgcatgagttttttttcataaagattttctaagctaattaaaaagggcgggattatggtttaatcatcactaatcaacatttagtataataaagattacattgactaaactaccctcaattttatgtggaaattcaaaattatcttttatctaagtttaaagatctttttgctatttttatttgtggtttgattttgtgcttattccctctccttcacttagttcatcccttcttgttacggttgcaatcttttttatttttttttatttttacgttgccattttgttttttccctcttcttgtttacttaccatcttgttaatttatgatgcctcacttcttttaattttttttgttgaaaaaggttgtgtttcctcacttccctcgtttaccttgccatattattttgttgttttatactttttttcctgaattttttttacgttgcctcgtgtggtagtattgttgttatgtttagatatctcttatctcttcaaaaaattgagttgcaatgtgaacttttgtgtttgattatttgagttttcatatttatcatatattagttggtatttgaaatcatgagacatttataagattataaggataaaaaggtaaattagttttaaaatctctcccttccccttgtgaaccaaacatatgtttaattaaattcccctcttttgaactaaacatataggggagcccagtacactaaagctcccgcatacacagggtctgagaaggggttccaccatttggtgtattgtacgcagccttgccatgttttttacaagaggctgtttctaggacttgaacccgtgacctttcagtcacgtgacaacaactttactgttgcgccaaggctcccctttcttttgaaccaaacatatatttaattaaaatacatcccctccattagaatccctcccctcccctccaattttatttagttcagggaattttactcttgcgtttgctgcactctgtcattatgttgactttgtgaatacaagattttgatgttcaaactttcagtaagttcctgactgagtaatttacaggacaacccaggcgccacttactaaccactgggtgg

SEQ ID NO: 4275 - DNA, 1442 bp, Medicago truncatula
  Intron number 1 from transcript Medtr8g027070.1 (locus Med tr8g027070) derived from phytozome v7.0 (chr-ID MtChr8; po s 6023473 to 6024914)
catccaaaaagacgtagcagcacaacttgttgcatgtatgtcttctatttatgtctaattaatctttgatatgtataattgataaaagtccaattattagaagacacaagaaaagtaagtttttctttccctttcaaaactctccatccaaacatactataagttggattttttaggccctctcgtatacaaaaaggaagagagagagagagaaaaactaaagtattttattttaggactgagcattggacatatatggtcgattttggttccaatttggcttgatcatataaaatcgaacaaacctattttttgatcaatccatatgtccatgggcttaattgtgttttgttttcttggttgttttggaagacaaattggttgatagagatagaagagggatgaagttactaaattttttacttgcttgcattcttggtaaagattataattctatttggtaaataaagtggagtacatgcaagtgaagacaagggctgcaatgagagctcaaaatgaataaaagaaaaacaactagtaaagttgaaatgatgctgaaaatagaggattccgattgagtgtgttgctgccatattttttttagtctttgttttgtattttttatgaatcatttttctaattgaagatttctataaaaatgaaagagtgttttcagattttatgatgagattaataatatgaaaattgaagtcacaactaagccaaaatattactaaattgtgaatgtttaaagagtatttgtaggtgaaatttgtgaagaatgagttgcataaagtgtaacaattcataattgtggttcaaaaaacgtgttaaaagaacttcaccagctgttaaagctggtaaaatcaattgaaaaatgtgttccatgagttactcttgttgagcaagtaaccgtccaacattttgagttagttcggattatacaacccaaaaatgttgcagatacttttggataatacaatctgaaatgcttctataatgtgttaaaaactcgtactttgtagggtgatgaatatttcagattatacaatccaaaacttagactattataccatggagtcatattctactttcgtaaatcaaagataggttgtaaactaataattaattgcgttaattccaacaaagaaaggagaggggattcatggattccctaatcttcgttatacttttcaatcacaacaacctaatctcgcattgggcagaataattaaaatcctgcaaaccacttcatctcttttaattaaattattttcattaaattccactattagcaagttgaacgacaatctagacgataactactttattacttatcaaaattcgtcattaactactctactctagtttttaacattcgattggttttcttattttctttttggtttgatatctgtagggtttgaaggcttgaaagcctt

SEQ ID NO: 4276 - DNA, 2155 bp, Medicago truncatula
  Intron number 9 from transcript Medtr3g017160.1 (locus Med tr3g017160) derived from phytozome v7.0 (chr-ID MtChr3; po s 3558004 to 3560158 reverse strand)
gtagtttttggtgctataccaactgtcatattcaagtatgtattaagctaaaacctgaagtttaatgtttacaaccatgtacagtacggcgttcgtcctaggcagaatatttccgaattcttttccaagtcctaaacctgagataatttctttaggttgactttttattatgttactaagtatactattcgcattaatgggctaaacctgtagacccaatttgttacaacaacaacaaccaagccttatcccactaagtggggtcgagtacatggatcaaatcacgccatagtgttctatcataaactatatttggattcaactcattgacctctacatcctaatttgtatagtagtattttatatctttttatcttgattccaatttgtttagaatctggaaaatgcaatatacgtctttatatctttttatagtattttatagcatcttagatgttcttgtagggttgcttcctgattttgttagatttcttgatttgtttctatatttgattaggattcggagtctagtactagtatcacctcatattatgtcttatcaatgtaacgtccaattgtttggagtatctattcgttattttctccttccttacctaaaacctatgattttccacttggtatcagattaacacaattctttgtgacctattccatcccaattctagtactgagttctttaaaatttgttactcttttattttgtatactttatttccccaaactttcttttctgtgaccgcttcaccacacttttggccatgagaacttccaatcactaaaatgcttgattttccctcaacttcactttctccctttctcttctggaactgtgaatgtttgatctacccttctctgcgtatcttttcactatggatcttttcaactaactaaccacaccatcatctttgctggccccggattcttcgatgatagaagcagtgttgtcattgtaactctgacctgctacctttgcccatcaggatatttcaactttttctgtcatgttaggatgcgtcaattttttatttgtattttttctgtttgaagctaccaaatgtatttggagcttgctgtgcttgattgtttgttaactaatttctctctggttgaaggtcattctagcaatctcattatctttccagcaacattatcttgttgacattccctgcatgcttgggttacctttttggtcatgttttatagagtccaccatacatatgtgggcatgtgtgatgctttctgtttttacggggttatatgtatttaagcgtaacaagtttcagctcaagggtagtgttacgtagaattagaaaaaaaaaaatactaaaaatagtatattaaatgttaattgcattttagagtcttttcaagtatcttagatggtttcgtaggagtattctctagatttcgttctattatatgattttttccctttttttttaattgggattacgagattagtactgatataagtagggcttagtgatttgtattttgcatcacatcttattaccatatatcaatttaatatgttatctcgtgtgtttggtttgcaaaacagcaagtactagacagaacgttacaagatagaacagtacaacacaaggcagaacaacacaagacaaattttttatggcattgagtaattttttgttttatacgatttttgagggacaaagtgctattttggtattttagataatttgtacgtgggacaaaaagttgtgctgtggtttggtgagggacaaaaatatgagtttttgttctgtcccttgcctctagtttgtcctgtacctgaaacagttttacaaatcaaacactggacaactagagttgttctgtcctgtccttcattttttagcaaatcaaacgcaccctgagtctctattctctctttctcttttattacctacaccatataatttgaacactagtataggattaggacatacttcattcttattttttatattcatttagtgacatttttatggatgtttagaattatatttcttaaatcatccatgtaagcaacaaagagtgtacaatattttttcaaagagtgtagaattatattttgatgaaggtcttttcatatgtcaacataatcttttggttccatgcagttttctta

SEQ ID NO: 4277 - DNA, 2058 bp, Medicago truncatula
  Intron number 4 from transcript AC235092_8.1 (locus AC2350 92_8) derived from phytozome v7.0 (chr-ID AC235092; pos 25 783 to 27840 reverse strand)
tattcaactcaaggtgcttgtccacgtttcaacaggttagtgtgcgtatgtgtttgcgtgtgtctctctatatgtatgtgtatgtggacgcgcgcacgctcaagtaaaaattactactcttacaaggagtgaaaaaaggttcggtagagttagacattgaaatacttaggtccggtctagtaaacaaaatcaaggtttagtttgttgtatgtcgatggcttatttttaaactttattttaatatttaacatgacattttgatgactttgattaatgattatacatgttatcatatttaaattcttatagttaataatagtatatttacatttattaaaaaaatagtatatttacatatgtgaaaaactaatgttaactaataaatttaaacggcttaattcctcaaataaccattgtcatttggggaggtttaaaaataatcgttgtaaaagaaaaaccataaattcaacttctgtaattttagattctttatattttaaccatttacacagataatttctaggcatcatgacttttgcaagggctattttaaaacttccccaaaatatctacttaaacaaggtgagggaaaaataggaagagttcaaaattacaggggtgcaatctatatttttctttttacacagaactcacataaattagagagattatttgaggtattaacccaatttaaattactaattgaagactgtatatttagaaatgacattattcaatgatgtaaaaatagttgaatttccttatgtttgagacttcgaaatataagtaagtatttcttcacttatattcaagattagagcgatggagtaattaataagattaatatagttcgttcaaaagaagaagaaaaaaagagtaatatagtttaaatattattatttttatttattaatataattttgtaatttgttttgaaattgtcaaatatgttcattattttttctaggggattatatattatcgtgtggcagagcgactacatccatataataaagtcaaatcttaatcaaaatcaatccttttgtattcaaacatgcacgtataaaaaaagatgtcttttttagtcacatttgttgcaacaacttaattagactacctacatttttttgaatcgactatactaatgcaaataatcttcatgacattgacataacattatattttaatatataatatgttacttaaaacacaagtcaacatatatatttcttcaaaaagtagtatgttttatgtccatgcaaagtagggacggatacacgactagatttttggtgtggctaaaataataatgtcaaaaatttacctaataaaattaaagacaatgtactatttcacataaaataatagttttagtagttttgtttgagttaattttacgaatctaagttcatttgtgatcttaacaattgtaattggaacaaaatgagtgtcaactttctccaatattttattcttatagacatcacccaggaccgtatctgaggcatggcgaagagggcgaccgccctagaccccaaaaaataagtacaaaatttggacctccaaattttttttaggggtctattaaaccctaaaaaaagttgcttagtattttgtatcaagtttgatgtttgagaattgctcttcacccatttgtttttgctcattctcgtgctatatgagttaactcacgctgaaaaaaatgtctgactaatgttgaaaatacacctatgtgagttagctcacggtcaactattttatgggaatgggcaattctaaatgggagaagagcaattctcttgatgtttatatatatttattagttaggttaagatcaaaattgtagattcgccctatgccatcaaatctcaaaaatggccctgttcttatgtaaaaattcattggagaaaattcggcgtagctatagccaaaccaatctttatactagatccggccatgcatgcaagtattttgttaataaaatctcaaataagttttttaatcatctaagttgtacttaccgaaccttttttttcttattgttataccttgcagctt

SEQ ID NO: 4278 - DNA, 2069 bp, Medicago truncatula
  Intron number 29 from transcript Medtr3g105260.1 (locus Me dtr3g105260) derived from phytozome v7.0 (chr-ID MtChr3; p os 26309923 to 26311991)
ctttgcaaagcacctagaggtaaatttctttgtactgcctatcaaatataaagggttaatacttccaagagcccttgtaatttggtctgggtctgaaaataccccttgtaaaaaataagacacagattccacccctgtaattttttattcttcatattttaccctcactttgttaaaaaaaatatttggacaaagttggaaaatagcccccgtaaaagctttaaatgtctgaaaatagtccttgtaaagtgtaaaatgcgaagaatccaatatttaaggggtgtaatctatgttttattttttacaggggctattttcagacctcgcccaacttaaaggggctatttgatgtattaacccaaatattaatgttcttagatattatgatttatgatggttgtagatgtgttgattattacatgtagatgtatactatttgtgatttgtggaccgtcctttttttttttttggaatggcaaatgttagcaattactccctctggtcactattataagcaaaaatcaacattttaaattcattcattaaattatgtatgtggtctataataaagatcatatacatcattaattgaatgaatctaaaatttagatttttgcttataataattaccggagggtgtagttgttagataatttactcccttgtctgggtttgaacccaggacctccaactctttatccttcagcccaatccagttgagctacccaatccccaatgtgtgtcgtcgtgtctgaaatagtacacggaggattcttatagagagttaagcatattgggtgggaaaagcatggtgagatgcagtgtgccgggtatgtatagttgatgattgagattcgggcacccaatgactaatttctaaattgaaccacaattattttgttcttaaccaaggccatgcagattgctagctttgctggcatattggagttttaatttcatttttgggttttgagcagaagttatgaaggagaaagggatggctcaaattttaagaaaatgccagggtttttggtaattaattggaatggaaaaacattgaaagatgttatagagtgaaagaaatattgatggtattctcatttgtgttaaaagactgatacagaaggaatattgaaggcattatcacagaatgaactgcaccagcatctgcaattctgttagtttagttatcaagtgatgtctgttaatactgctagaagtaattatatttatgttagttaacttacgccagaatattctgcactcacttcatgtgagttcacttttattccgaatcatcattagataaataattaaatacacagaatatctcatcaacatatctttttctctcaacatcaaactcttgtaaagacaaacccttctaaatcttttcctgttagaattaagcctacgcttggcttaatattcctatcactcagaaaataactttgggtttgaagcgtggataatcgtagatccattttaccccctgcagcaattttaattttatgaagaacaatagactgtcatgtttatgttgccatgtcaaataaataattcttctacaagcttgcattgtttggtggaaatttggtaacggcttacttgaataatctgaatgattgtattattattttacagtatgtgtaaaacatagattcggggacatagttggcgtccctaatgattaggagcaaaattagtaacagctgaactatcaatgaaaacttctatcaaataacaattgataattataactacaatcaactggtttcatgatctgatattatgagaaaatagaacttacatttcatgtgggtttgctctgatgtagtagcttcatattgcagagtggagacaatttttccctgccttttattcaaacaccaatgtcttattataattataattgtgttctagtagctgtatattacaagtggagactgttctttcccgccctttatatgaattcaaacatcttattaattaaaaacattttgacccatcattttccacgtccttagcaagtagggtgacatatttcttttacttacatttcaggatat

SEQ ID NO: 4279 - DNA, 1710 bp, Medicago truncatula
  Intron number 2 from transcript Medtr7g104700.1 (locus Med tr7g104700) derived from phytozome v7.0 (chr-ID MtChr7; po s 23818490 to 23820199 reverse strand)
cagcttytcaacatctccaaaaacttactytgaatgtaagtcattcaaactgttttttttttttttttttttttttttttttttttgtcttgaatggaactagtagcttattttaaaactaaacaattatacaattatatgcacggaagtctaaaattcaaagaatcttgaaattagaagcggaaatctcaaatatttggataaactaaaactcgcacaaatggcaggggtaaaactcaattggcagagacaatgaacaatatgtaaggttcatggttcaaatcccagccagcacaaaaaaaaaaaaaaaaactaaaactcgcacaaatggcaggggtaaatatattataaccctaaaatttataactgactcctattcaatatattagaaatagaatctttttaattttatgaagtaatcatactcacccaataaaatataaagttaccaaatttattaactaagatataaatacatgtgtgtgtgtgtctaataagttagaaccttttattgaaaactagcttcaggagtaaagatagaatattttcaaattatatgtccaatcagggccctttatgtcataaatcgatttcattcatagacactaatgtatctatactaccaatgtatccctcaaaattatttgtttttttgttttcaaaaatatttatgtgttaaattcccgtagtacacaaaaacaaagctcatacatattccagttagtgaatacaagaattaaaatatactatttctttcaattagaataaacccgtaaataggtctttacttcaacttaatgttcgactcaaaatctcaattttatttataatttctaaaagacaacctgcatatactctattacacactcttcctttttaagtgtcgtttgattgtgatttaacgtttctaattaactgttgttttggtagtttaaagttacaattatacccggaggaagagacacaccctttttttttttttttttttttgaagaagacaaaatgaaataaataatcaccaagagcgattcatctcgcacaaggtgtgcaaagagaattactcctcaaaagagtacaaatcaagtatctgttggccaaataaaacaactaaaaaaaatgaagaaaaaactactccataacacccatacaagttacgggatgcccccacccgtcattataactgaaagctgaagttagcctattatcctgttgtttctttccttccacactgttcaaacacaagcatgccagataactttgaagaaagaacgtgtaactctcggtaaccccgtcatatggccaaactgatgaaaatggtcacgaccagaatttggagaaatgaaagataaaccgagccactggtaaaccctgagccaaacattgctaaagatgccgcagctgaaaaaaagacgattcgtcgtctcctgacaaccgcaaccacctatgcaaaaaatgtcttcgtgatgaagagctctcctacgaataagattatctttggtaggaagactgttgtggagaagccgccaaacaaatattgatacctttaacggaatggtaggaagtctgttgcggagaagccgccaaacaaatattgatacctttaacggaacctgcttcagcctcacaacgtcgtaaagaccgcgctccatagatgtatcatgtcgcgtgagatactgataagtcctcttgactgagtaaccgttgatagga

SEQ ID NO: 4280 - DNA, 1999 bp, Medicago truncatula
  Intron number 2 from transcript Medtr6g086610.1 (locus Med tr6g086610) derived from phytozome v7.0 (chr-ID MtChr6; po s 17744344 to 17746342 reverse strand)
aaacaaagctctcaagactgctgctgaggtccaaggtaataatcataccataccctttttttgttgtttgcattgtagctacaagttggatcaataaaaaaaaagtttgcatattcttctcttgcttgttatatttccaaattttgacactttttttagaagaatttttcacccttaatacaacaatttaaaaaggtaataaacatgagagcaactatgcacttgagaaaccatagtcgatttttagagggtgcaaacaactctatagagttggatctacaaaattttgaggcccaaaataatatatattgcatgtaaaaacgcaatatataccggtaacgtggtagaaaattcaaatttgttgatatggccgagtggtagaaatcagcgttggagttcccatggtattaacatgcgagatttatgtttttctcttttaaataatttttttcgagcatgttacggcctaatttctctctctctctctctctctctttctccccctccccctcaccctctccctctctctctctctctctctctgattcagtctaactctcgtcaacatattggactgtatatttacacgagtagtgatatttaaacaaccatttgagacaacttttgtgacaatttttttgttctctttttttattggtcaaaagtaatagagagagaaaaatgaagagagaataaaaatataatgtcaatatgggagagaattgtcaaaaagtgtcacaaaatgattgtacaaaaatcagatctctatttacaaaaaaaaacttcatataaattttttgcttcttatattttaagagcacttatggtaatttttgacccatacatatcgtataaaataacaaagctttaacaataaacatcataattctttcaaaaaaaaaaaacatcataattattctctcataaaataaaaacaaactttataaatattttttttccagaggcctatctttactatgaaagtcgggcctccaatttcatagggatgatcttatgtaaaatgcgaacttatatcccagtaaaacaaattaataaaccaaaaataaaaatataataagagaattgtgcatccaaaatcttgaaaatttcaaattttatcaattcctttaactccttaaaagaattagattttccgtaaaattaatttttaaacaacatagtaaattaaagacaaatattataatttgaaaatattttatttacttaagaaaatatatattaatactccctctgtcttaaagtaccccctccagttacaattataagcaaaaaaatatttttttagattcattaaataactgatatatttggtctataattagaccaaatacatcaattattcaataaacttaaaaaatagtttttttgtttataataatgatgagagtggtgtatgtcttattctttagttttaataatgttcattttaatactaaaatatgttttatttaccaaaatacatctttattaattgtagctgcaagactaattacatgactgaaatgcaatgaataatgatatgttattggaaaataattatagatgttatatttatattataaaaagataaatattttaagacaaagaaaaattgtaaataaggataactaattaaaaacatatagaatagttctcactatttacgcactcgcatatacgtaggtaactcaaatcagttgtcttgtggcacaagtgtagatctcttgtgggcaatgtgtacatgattaagtagccagggacaaacccaagttttttttttcattgggatatataaagagcgactggaataatgacaattttttgtactagtctttactttagcaacctctattttgatcactattcctgtcactaatcaaattagtgatcgattgttaatatttatactttagcgatcattatttcggcaactatttacgtcgctaatgaagttagtgaccgatttttataggtgtaacttcagtatcattggaaggaa

SEQ ID NO: 4281 - DNA, 2271 bp, Medicago truncatula
  Intron number 2 from transcript Medtr5g094000.1 (locus Med tr5g094000) derived from phytozome v7.0 (chr-ID MtChr5; po s 37042618 to 37044888)
atgtaagttttatacatttttatctgctagatgagtgtttatgatgtaagcgattctgttatatttgttgcttatttgataaatgatagggattttcaatgctgatttagtagcaggctgtggaagtttttatttgattgtttaacgagtaaatagttatctgggttcttgaatgtgtcagatgccgtcgctaccgtatttgaatgtatcaaaagtagaaaacatccccaaatatatatttcgttagtcagtttgattctcataagtgtttttgttagtcagctaggtccttgaatgtgttgtccactgtgaagctcgaatatgtgggtggggtggggatgtcatacgataaaaacacgtgattttttatttattttttaatttaggatacgttacgagctatatatgttaacaagtgattctgatgatgtgtacattgtacatttatgaggattatttttgttttatttattgcttatttgcttgtagtgattggggttttcaatgctgatttgttttgttggttgactgattgtttatcgattaaatagccatttgggtccatgaatatgtcgaacgttgttgcactctccttacattttcaaaattacaattacaaaaaaatccttaaatatgtctttcgttaggcggtttgatcgtcaaatgtgtcttttgttagtaagttaggtccttgagatgttgtccactatgaagctcgaatacgtaatgcaggtggggatgtgatacgatacaaatacgtgaaatttttgaactctaggacacgtaagagctagatatttttatttttttgaaggacgtaagagctagatatgttaacaagtgattctgatgataatgacaatttattaatgaaaatatatttatagctcaaatgaaaaatggaccccatctaaaactaaaatcgggtcaagttctaactgttcaaatggattctgtaacaataagatagccacatttttccattatatacagaatatatcttgtcatttttatttactcattatattatattatataaataagatatcgataaaaaaatagtgtttttttccgttatggatttcctggaacatatcgtcgtattttcaatgagttcgtatggaagatattcagtccctcatactacaagctcaccctaacccaatattttattttccctttttatctgcaaggtttggtggtttgagggttatttttgttgtatttattgctcatttatttgtagtgatagggattttcaattctgattggaaatttttgtctattgttgttttgttggttgactgattgttcatcgagtagtcatttgggttctgaatgtggaagacactgttactacaatcttcgtttgaatgtatcaaaattagaaaaacatctccaaatatatatttcgttagttggtttgattctttgaagtgtcgtttgttaataagttaagtccttgaatgtgctgtccactatgaagctcgaatacgtagtgcgggtgggaggagtgatatatgatacaaatgcgtgattttttttttttttgcatttagaatatgatagagctagatatgttaacaagtgattctgattctgatgtaagttttatccctttttatctgcgagataggtttggtactttgagtgtatgcatttatgaggtctctttttgttatatttgttgctcagttgcttgtagtgatagagattttcaacgctgatctagtagctttttgtagcaatttttgtttgtttcgttttgttggttgactgattgtttattgagtaaatagccatctgggtccatgaatgtgttgggcgttttacaccgtccttgaattttcaaaattacaattgcaaaaaatcctcaaatatatctttcgtttggcattttgatcctcaaacatgtcttttgtttgtgaatatggtcattgaatgtatcgaccattaatcgagagttgagacacatttatggatgtttgtataaatttgatacagtcaaggactttagcgatacggtcttgctcatttgaggaccaaaatgactgtttactctttgtttatcctcattatttatctgtttatggtttttgatattataaacgcattcggtatttttgtgttttcattgttggtgttattctgttgacaagataatttattttgagttgttgattatctggaaaatgtaaatggtcgaatgtgttcttttgatggactaaattgatagattgcccttatcttcatatttctttctattccaga

SEQ ID NO: 4282 - DNA, 1185 bp, Medicago truncatula
  Intron number 1 from transcript Medtr5g105070.1 (locus Med tr5g105070) derived from phytozome v7.0 (chr-ID MtChr5; po s 42186684 to 42187868)
tgctgaaacaacgagattctcctccaatccaatcggtgaagctttttctcattttcaatcctattttttcatcttcaattttttttcttcttcttcttcttcttcttcttgttttgtgattccgtgaatttcgatctagttttctgaatatttgaatatagtcaatttcagtcaaaaatttatgcttttttttttaagttttgcattttatggtcaattttgtgtggtgggtcattcaaatttcacttttttcacttgattctttgatatcagcttttctatgatgatgatgatgttgttgtggtagactagcatcaatagttgaattcactagtgtttaattgattgatttgggtgtgaattatgtgtggatcttgacaatatacttctttagagcatgaattgttgtaactctttagtagattatcaattttctgaaagtttatttcattatctattttgagcttcttaggttttaacttatcatattataatacaacaaagagtgtgtgatgaatcaattatgtgctgtggtatgtaggtcctgtttggataaacaacttagaccctgtttggataagcagcttatagcacaagtgcttatcatgataagcgcttatatataagcttacaagcttacataagttatttctatagtaataattgaagtaaggttaaattgtttttgtatatgtatgttataagcttttatcgtaggctatcttcgagaacttatggaaataaactaaaaaaagcttatgaaaaatgtcctaaacttttttcataagttcttctagatagtagttttacaaaacttattcaagtagataagctcaagtaagtcaatccaaacagacccttaatttgtagtatatagcataagcgggtatgtataagatatttttataacaaaggataaaattaagttaaattgtttttgtttaagctataaggtgttttcataaacgatcttggagagcttatgaacatgtcataagctattttcataagttcttccaaatagtcttcaagtgctaatgtcagtagataagctcaaataagccaatccaaacagttccataatttgcttgatgattaactgtgctagttgttgactgtataaatattttcatggacatgtcaccaccaggctctaacataaagcaattgtgattgcagaaaaat

SEQ ID NO: 4283 - DNA, 2656 bp, Medicago truncatula
  Intron number 12 from transcript Medtr4g062070.1 (locus Me dtr4g062070) derived from phytozome v7.0 (chr-ID MtChr4; p os 11916723 to 11919378 reverse strand)
gaaaaaaaatcaaaaggtggtgaggaacttaattaggcttaatttacaagaatgggatgaagtcaagagcgcaccttgcaagatcctttctaagaggatttaattataaggttcgggaattgacttcccctaggtatattaaatgttgacctaaccctatgtgaccttactacccaatcaaaatttcttttggactaattagatatggttaggaccagtcttttgtttagcctaggctatagttttgaagtatcatttaattgttatttatgtgttttagaagcattatgtgaggtttgaacctaagacacaccattgctttaatttctcattataactcttttcctctttaggattttgaaattgatttgtttcattcctccaagtgatattgacgtatatttgtcttgtgatttaatatttgtagtatttcttttatgacctaaatattcaatgatgaaggtggttgagttaagtttagggatatagtctatcatataattaatagaggttaaatgtgaagtacctttaattaatattgtattatgggcaggctattaatcatcacatcaaactgacctgtatgctttagattttgaccattatttgctcttaatgctaatatgctatatgtgattagccaagtacgtggcaacaagggatactagtaaaatttattaatcctaacaaactttgtcattttgaacccttaattattagattggtcagcgtattttgaatgttattattgtcaagctatttatgtggtgatcattgatcatagatgaagggtagcattttctattgcaagtccaaattctaatagggtcatgctaattagtacttgaggaacactcattagcaacaaggatgatatatgttgtctacttgatctttaacattgaattatggattttgttaacaagtgtcctatggcaatggttaagaaaactataaatataaaatttgttttaaaaatataaattttgacttttgattaagtaataattatactactttttataaaaagttatttgttttggttgcttaatcaatgccttaaggacactgtttagcattctccttgaattatttggtcttctttcttaaaaatcagatggttcaaacataataaatatataatagtttagtagacgaaataatttaacctatataccgaaaaatgaaaaagtaaattagtaaaccaaaaaaactaatagtatacatatacttcataatgatacaatgcaaagtggtcacactcacacacctttgataataaagacaccttccaccttttgcattagaaagaaaccacattacattaatatgctacatgatacattgaaggctgtcggatacaatcatagatcatagataagagaatagaagtaagttcctttgaccaaaaaatagaatctcttagacaaatcatcatatgtaagagaatagaagtaagctccctttaacaataaaggatattcccttacaataaaggatcttgacacttctgagccatttacaaatagtttgagtttgtatctgatttgatacacaatcaaatttaggattccaactctcctagatatgatatcacaaatttaatgctatatcaatgaagtatataagaatgtgatcatagagttgattgatttataacatgatctaataactttcaatagagatgacttgcatttaagcgctagcacattttttttttatcactacactaaaataaaaagacaggagatgcatcatgaaacattacagcagatcataaagtggataacctatcaagaaaaatcagatctatccttataaaagaaaagtcctaaagaaagaagtttcaaagaccaccgtagtacacaaaagctagtcagattatgatcattcttgatcataacaaatgttacaaaactatcctctctatgaaaatttgagtaaaagtattgatattcctagctattctgatgcaaatgaaccgactattatgtatctgccaagacagctttggaggcacccttttgaacacgtgtcctcattccaactgagttaaagttagtaggcttcactttgttcacatgcttcttattccttctctctgccttagttctctaagaaagagttggacaatgctgctcaaagtctgatgtggtggtttttgcattgtttgccacctcaagtcttttgtcatggctgaaagtgtccttcatcacctcttctacttcatcccccaaaatttgaaaaaaaaatcttcacttacacactctttagggctgcagcagaatggagagcgaatttgaaagcaagaatcaaagtttggcttgaagggagcttgtcacttgtcaatcatttgtcactgaccaaacctttttcacatttggattcaacgttgtatacttcagttatttttagcttatccatttcccttgcactcttttctctagagggagattcttcagaaatcatcaacttcatttttttttttaacaacaaattttattaaaacaaccagaccccttctcaagacaaacagaaatcggtgaaactgagaatacaaacaaaaggcgctgcatataggcggaacaccaaaaaataaacaccctaaaaactctcctgaggacaacacccaccaaataaacgtcaccacctaaaa

SEQ ID NO: 4284 - DNA, 1113 bp, Medicago truncatula; identical to SEQ ID NO: 4223
  Intron number 11 from transcript Medtr4g159300.1 (locus Me dtr4g159300) derived from phytozome v7.0 (chr-ID MtChr4; p os 40158581 to 40159693)

SEQ ID NO: 4285 - DNA, 720 bp, Medicago truncatula
  Intron number 3 from transcript Medtr3g139400.1 (locus Med tr3g139400) derived from phytozome v7.0 (chr-ID MtChr3; po s 35869234 to 35869953 reverse strand)
acttcaactcatctaattgtaataggtagatagaaaaaaaaaggtccaaccaaacaaagcaataaaaacaaacttagtgctatataataaccaaacaaagatccaccatttaactgattgagcttaataaattcaaaccaattaaattgattttatattttcatattcaggtccaaactgtactaaactaaacaaatctggcttttattaattcgggtatcgtttaatcgatcatttgggacctgtgttttggttttattttactttactttattctttataaaaaaaaaaaaactatattagtagtattatcttgaaaaatatattttatatatgcattttttaatcattatacattactagcataaagaacgtatgtaaaaatatacaataattctttgtagtttgtaaaataagcatttaatttttaaaagtatcaacctgattaaacctaacaaagctattatgttcttcatggattccgtttggtatagattttgtaacaagatattgcaaaatacaaatcaaaagaagccgaaagttttaattgtttagaatttcccaaaagaaaacagatgaaacttatcttgtacccaaaaataaaatcaaacttatctatgtttacttttgtttctggggccattagagtagcattgccataattttattttatatttcaatttaggaagataataggagcaaggtattaccctaaccttg

SEQ ID NO: 4286 - DNA, 713 bp, Medicago truncatula; identical to SEQ ID NO: 4252
  Intron number 5 from transcript Medtr4g165430.1 (locus Med tr4g165430) derived from phytozome v7.0 (chr-ID MtChr4; po s 41648115 to 41648827 reverse strand)

SEQ ID NO: 4287 - DNA, 273 bp, Medicago truncatula
  Intron number 4 from transcript Medtr1g031540.1 (locus Med tr1g031540) derived from phytozome v7.0 (chr-ID MtChr1; po s 7663436 to 7663708 reverse strand)
aagttgcctgatattggctctgattacgaggataggtgatgccattttttcttggtttaatgcattggtagtttttgagtttcttgtgctagttattctgaaaagtttgtacttcccctagatccataaaatttgtacttaccgtcttacatgtaaccatgtcttttgtttcaatttcaaatctgggaaaatttatatctttggtgttatgttttggtgaacaagaattaaatgaatagggattgagtatggatgtttttgcctgcagggatt

SEQ ID NO: 4288 - DNA, 1699 bp, Medicago truncatula
  Intron number 4 from transcript Medtr2g097280.1 (locus Med tr2g097280) derived from phytozome v7.0 (chr-ID MtChr2; po s 22782670 to 22784368)
atcaggataaaaagtctccttctgaagaggacatttaaagtcctattcgcgattagttttggtgtcgagactgtgcaaagattcaggaaattattccaaaagatattattgttttcttttcatttgttttagttgtttttagtaaagattcttaggaatttaatccccatgacatgattcatttttctgtcatctattaattctttgtagaacaaattatgataactttcaggtttctcttgttgaggaaagtggactaaaaatgatcatattgtcaatgaaaattttgtatctttaatggttattctactctagtataaagtgaacagattccttagagtattttgtaggctaaaagcagattttgtactacaaatcaaggcatgttaatacaccagtgcagagcataaatgcttaatttgaactttcatgcatgtatttacaatggtttttctttcttgaagttatttatagatatgtaaactctagcatgtattgtaggataagatttgcaagaagggtgctgagataacttgagccttgtttgtggatatttcaagtttgaatttgtagtagccctttgatttgaatgttacatatcattaccagactatttgatgatctaaaaaaaaaaagcaatttatattccttggagcatatattacttaaatttgagtgagactgataagatatgcattcaaattttgcacttgctaggagtttttcaattggtaatttactaaattgataacataattgatgcaatttttcgattggttatttttcatggtactcatcattgttaatcactagcatcgtacttcaaaagtgttgatttttaaggtgttttctgagctatttggtaaatgtcctatatttaagagaatacaatcaatactaatgacttacgatgatgagtcaactgaagtgagaaattatgggacagaggtgtactttttttagttgagcctcaatgttgggcctaagattaagtgtgtgtgagaggagggatgatattagtaaaataggggatggtgttaacatttgctcggtttgtcggttctttgaatctcgacattaaaagttgaggactaaaccaagttagtttggttcggtttgaattttcgatttagtcctgtcttttcgaatcggttaaatcttcaattgcatgtttttttttttttcttcttctttttcacaatccttttgaccctttcttaattagtccaaatttttagtgtgttatgcgtaacaataggaagagaataactgtaaacaaccgcatggtgtgctccactttcttactgatttgaatgtatcaaatatattcttcaccaaaatatcactatttttcctccaattatacactcattgattttttttatttgatttggtctacgttttttttatataaaaaatttggtatatttataccaaaaaaagaagaagatttggtcaattattttcgttccctttgttgaattctcctattattttgctcaattagttttctctcttagaaacgttttttggttcttacacatgcccttggctattggttcggtgaaatttaagaagatcagggtattactatttcatttctaagttcagggtattattatttttagcacaattacgtttgcatttgtttcgtaccttcttcaattccttgtattctttggttgtttttaggatttgc

SEQ ID NO: 4289 - DNA, 2287 bp, Medicago truncatula; identical to SEQ ID NO: 4117
  Intron number 1 from transcript Medtr6g062000.1 (locus Med tr6g062000) derived from phytozome v7.0 (chr-ID MtChr6; po s 11235847 to 11238133)

SEQ ID NO: 4290 - DNA, 527 bp, Medicago truncatula
  Intron number 2 from transcript Medtr8g109720.1 (locus Med tr8g109720) derived from phytozome v7.0 (chr-ID MtChr8; po s 24676552 to 24677078)
gtgttggtgatatttgtttttttttcttcttcttgtagttgaggtggaaaatgaagatatactataataccagatctgattcttagtaaaaataaatgattatggtttttggtattatgattttctctctcttgattttctgggttcgagtgtgttcttacaaattcaagaacaatgattttctgattttcttgattctacggaatcaataattattttttttgtcaaaaaggaattaataacatttattgtctataataaaaagaaaagaaaaacgtttccaacatatatttattgtccataaaaaaagaattaataacaatgattttctgaattaaaaacgtttgcaacattttttttttttgtaagaaaagaaaaacgctcccagcatacataatagtcattccaaaattttaattttagttttttaattttttatatacataatgattgttttatcctaattgcataaatggaattacattattgtaggactctccttgtgcaaataccaaaaatataacaag

SEQ ID NO: 4291 - DNA, 2216 bp, Medicago truncatula
  Intron number 2 from transcript Medtr4g078990.1 (locus Med tr4g078990) derived from phytozome v7.0 (chr-ID MtChr4; po s 15604239 to 15606454 reverse strand)
ctcaaagcagaggaacccaaacctctttgattagggttccacgataaatcccttcttatttattgtattcaattaataaggttatttattcagtttatgatctaaagtatgatttattttgtatatgtttgtttctataccgtatctctagatgaagtttagttggattgacaaccgaattttatccgaacaagatagtactgaactgcttggtttctaaattaaattcttttaatcgaatctaagtatgaatttagggatataactcatctcgaggaaatgccgcaattgtaatcagttgaattgcgatgatattaaaataaacctccaccgatttatcacgaggttatgctctacgttcttaaatccaaagagacaagttataaactaataattaaacaagttaactccaacaaagatgaaaggagggattcaaggattcattaatcgttgttacacctttgaatcaacaaaacataatcacgtattggacaggacaattaaaaccctacaaccactttcaaatctcttcttttatttactttcaaataaattcaaactaattaccgagttgaacgataatctctgtggaaacataacttactactttattacttgatacgaaatttaccatcattaagctttgtcatatcgatagattggatgttcaagtttatagatggatcgagtctttggatccaatccaaaatagttaatatattaaatgtgacatgtttgataaaattagagatcgaactactaaataaatataaaataatacaaaaattagagatcgttcctaaaaacttatttgctatatgttgcccaccattgaaagatccaaagtttagattccaaacatcttgactattgagggcaagatcaaataatagatatatatttctacaaaaattgcatcagcacataataaaaaaatgacattactattatataagcaaaaattaaacatacaataaaatcacagttgttagtagtttatcaaacaagcactgacttaattccaaacatcttgactatacatcattttaacatttgatttataccgttatttatgacaatgtgacaacgtgaaatcttcaatgaatgaataaataaaactcgcatagttattagtgtggtgtccttgactccacaggtgggaacataatgcatggtgtgaagactgaagaggaatggttgttgagagatgagaagattgcaaattctcatgaatgaaagtgggccatgtcattttgccttgtgatttttggtggtgtcttcggcaaatgcacatgccattccatgactttgttcacattgtagtatcagttttaatctatcctttggagcattgtgccgataaattggaccaaccgaccatctcctatgtacacacctcaccaccatattccaacatttttactatattaggataagtatatttttagattgattgtgattttggtagttttagaaaaattagaatgctgttttagtttgacaaacttgttcttgtttgaaaatgtatgactagatcaaggataagttatgcctaattggagataacctagtatttgaagattaatgttaagcttgtcttgtttttaaccttttacattggtccctttttatggggttgagttttttttttccatgttagacccaacctcgatatgtgtgtggtccctaacaaatattctatatgattaatgatgattgagacaatgcagagaaaagacgtgtgtcatatcaagtatatgagaagtatctaatgactccatccaaaagtcgtgtaactataatgtttatctagtcagactaattcctttgtgacgatcatattcgtcatccgatagccctttctcctcgatcaatatattcgatcattgaaactaaatattttcgtattgagcagagccctcaaacatggctaaaatgagaaggtgctcaaccaagtatcctaatgattaaaaattgaaaacaaccctcaaacgtcacggttgaagggtgaagatactctaactgaccgattatccaaatgttttgagatcaaacaaaattcattatcaattcaaatatgcaccaaatcttatagtcgttcgtatttcctatttaaaaaggaacaagactagagacataacacattgatactatgtgcttcgtcgataggtgcttcagtagggtcatcatagtctgccaccgtgtgatcagccatt

SEQ ID NO: 4292 - DNA, 2413 bp, Medicago truncatula
  Intron number 2 from transcript Medtr6g062650.1 (locus Med tr6g062650) derived from phytozome v7.0 (chr-ID MtChr6; po s 11539380 to 11541792 reverse strand)
cttgcttgtagctgcggtggttttgacgcgccgtggtattgttatttaactgttattattagagtttaatggtgatgcaatgacagtgtaaaatagttttacactatcatacaactaagaaactgccaatctgctatgttatacaactaattttgaaatagttttgtgatatggtggagtattaaagtttattggatgtcagtgtaaaactattttacaccgttggggcatcttctgttttgatgatttacgggtgaagttatgaaaattagtttagttatggttgggaaattgtggatacttaaggaaagattaggttcatgtctctaaagcatgtgtatttgtaaaatgttgaagtaccgtactgggtacatacttggtaccggtacttattctgtcatgagagaaatttgtcgttttcttatatatatatatattcttaacatttgtgtatttgtgatgttttgttgtgaattgaacaatttacttctcatgttatattaattagaaaagatcgtgttttattgacctacctgtccctattgtttcgtactcgtacccatgcatccttggttgatgttattggttgtaactgcgtttagagagagtttaactttcctcttgtgataacctccgagtattctcatgataacctccgagtaaagattttggaaaggttattgtgacattggctccaatgtaactgtggttagagggagtttaactttcctcttgcgattctgtggttatatttttatgattttcaggtgaaattgtggaagttagttaagttagggtttgtggatgaatgaggaaagattctgttgatgtagctgcagttgcgtttagagagagcttaactgtcttacagtgattcgttgtatcgtatgatgatttaagggtgaaattatggaatttagttaagtttaagttgcaatgtaattgaagttggatagagctttacattgtgtctgagtactttatagtttacattgtgtctgtcttacagcctcttgggtttgtgaaaaactattggttgcttaccattttccatacacactcaaatcaacagttgacatgtgtcttctgtcattctctgcgaatgcttttacaaatgtcaagtgtgttaatggttggtttgaattcagatggtaaattgtgacttcttaggagttgctcttgttcttcaagttagtttcaattgttctcttctcttgtatttgattccaaatgtcatgtgaaatacctcattttattcttgtagttaaggtatttgagttcgaccttcatccatctacttgtagaaacacattccccgcataaagttatctagtgatatactattgtttattacccttagtatgttctaaaataaaaataaataaaaaaggaagtaaaaatccactacatttattgaggaaaattatagtttatagtttattatgatatatttactgattgtatgaactataatcttttgattactattattagatgagcatttctatgattttatttatattagttttttgctaacttggtctcattctacttaaaatccaatatttgttagacttaaacattatcgggtttctgcaggtttataggcagtttcaggtctaaaaaattgacccaataaaaattacgtgcaaggtcagagactagcaaaacctgatctaaaccatctcatggacatccctactttagactgttgagctttatatggataaattgtcatgattgcaccgatttgttgcgataaacttttgttttgagaatttgagttgggcaaccctaaaccttacaaaaccggtttgtaaggcgagtgctccccaagctttataacactacataggccatatctctaggaaatgtgggactaaatcaaccccttcacacccaacacggtgaaggtgttggaggatgcaatgaacccaacccaaaatgccgcaattaggcggaatttccaacacacccgctcacgctcgggtaatgagcctgaagtgttgacaatgcgggaagcccgacaacagatctacgataggctctgatatcatcttaggtttttatattgggcctaactcatccttacaaaattggcttgtaaggtgagcagtgccactctctacaaactataatcaggccttatcttttatcaatgtgggacttggtttcttcccaagaactttcatccaagattttcctgaagtgacattactttgaaacacatttttctttatcctgagaaatgaattaacaaatgcaaattttgtgacttcttggtttacttgtactttatattataaattgtctacctttcatgtctagaaatactgtatgtaatgagaggaaataaataatttgatataattatgcaggataagaagtaaaaagtacctgggcactccatttc

SEQ ID NO: 4293 - DNA, 782 bp, Medicago truncatula
  Intron number 5 from transcript Medtr2g091570.1 (locus Med tr2g091570) derived from phytozome v7.0 (chr-ID MtChr2; po s 20657417 to 20658198)
caaaatcatcgtgtgagtatacatagacctagtcaataaattattcttcaaaatgataaattgtcataaattggagtattcatctactagatccatatcgttgataatccatttggttttatgttgggtagatcaaccattgaagttatacacttggtacggagactaatggagagatattgggtatggaaggggtggaggcatatgcatggtttttagtgatttagaaaaaggtgtatgatagagtatctagaaaggtaatgtgaaagactatagaagaaatgagtttatttgtctacatttagattgtgtttgttgaacatatccaaaatggtgcctccatatatacttcatgaaaattatataatcttagtttagttacactgtcaatgtacaaggacgatgagaatgttatgatggattattgttatacaagacaagatagacttggaaatgcaatcactagagagaaatttggggcagctttcattgtgaacaatatggtaaagtctcaacttagatggtttagtatacagataatagtgcaatagttagaggtataggcagaccaaggaaaaccatatgccaaactattgaaagagatttaggggtaaatagtcttatttttaaatttaatacatgacaaggttttataggtagtttatggcatgtcttattattgactctatcttagttgaaaaacaaagttcaatgaagtttataatatgtacatgtttgaaatttagtacaatgtttttatatctaattttggtaatgacagt

SEQ ID NO: 4294 - DNA, 1368 bp, Medicago truncatula
  Intron number 1 from transcript Medtr7g029600.1 (locus Med tr7g029600) derived from phytozome v7.0 (chr-ID MtChr7; po s 7509030 to 7510397 reverse strand)
agaaagcggtagagtccttcgtcgatcaatctaaggtaagggtgggacaaaccttctttaatcataagtatgtaatcctgaaaaagggtttaaccttgcagttgttaataggttttgatgttgtagaattagggtttgaaactaaaattgatcgtagaaagagtagataatccgatgaatttggttgataattggtgaatttctaaaataatgttttgggtcaagttttatatggttttgagtgtcttatcatgtatataaatggttagacaagttttggaatcaaatttggggatagggaagttaaaattgggattttggggtgaaaaatgggtttttcccgagagctgcacagtgacagcatctcctatttcatgttcttgcgtctttttcacacgtttctgttttgaattggcctttagtgtaaacatgaaagttgtagataattgagttagctttccagtggcaaaatcagaaaaaacaacctatattattcaacttcactttcattcaaaatcatcacaatcgtcactcttaacctaattctcaaattctcaaaaaataaacctacaacatgttaaatacaattttcagaatcatagactcaagattattgaatgttagtctcacccttaccttataactcaaaatcgccgctttctaggtctttctccattctcttggctttttctcccttttctccaaaattgatcgtacgttatgtttttttctaaactaggtttctcctatttataactctttattctcttttatcttatttctctttctccccaaaactctctcaaatctcataacaacccttaaactcaatattattttattttcaaatcttattctattaaataatataataagctacctaataaatcatataatcatataatatattctaaactcttcttaataaattctagactcaattaaacaattaaataaaacaaataattcaaagagggcgttacagaggaatttacgatggagagggggctgagacaaggcgaccctttttcccctttcttgtttcttttggcggcagaggggtttcatgttttgatggagtcactatctgtcaataacttttatacaggttatcagattggtatcaacgaacctattgttatgtctcacttacaatttgcggatgatactttaattgtgggtgagaagtcttaggccaatgtgacgggtatgcgggctgctcttcttctttttgaaactatgtctgggttgaaggtgaatttttctaaaagtttattggtcagtgttaatgttgtggggttatggttatcaatggtagctagggtgttgaattgcagggttggttctcttccttttgtgtatttgggg

SEQ ID NO: 4295 - DNA, 2305 bp, Medicago truncatula
  Intron number 1 from transcript Medtr6g038750.1 (locus Med tr6g038750) derived from phytozome v7.0 (chr-ID MtChr6; po s 8413073 to 8415377 reverse strand)
gagaccaggtaagcttggaagaaatataattttgttttaatttttaactaatattaaattaatataataaatatattatattttttttgtgaattaatttttttttattttgatgagtaaataatttatataatttatttattaggtattcttcattatgtttttcatcttttgttgagagtattttagaaattaggataagtttaaaagaagtaattcttgaactgatttagagtcgataatgtgtatttcgagagtttatgttaagatcgaatgtgtgaatttgtagttatcttgattgcatataggatatgtgtgctaatttttcttaaggtttgacaattataaaccttcatggtttcttcaatcttattgaaaatgaatgttcttctgttacgcaattacattattagagattaagatcattcaattaagatcatactcgtgtttatatttgactcaacaatttttaaatcacataatattattatggcaaattttcaataaatacttgcattctctcccatgaattatgatcctgggaaatatgtgctttttacttcacttgttttattatcttatacattattaaatgtcttaaatattatttgatgcggcacacatttaaacgtaaagatcaacttgttaaaactttatcgaaaaaaatttctttgatattactgttggaaacattgaagtcaattatgattttgggccacttaatattgtctaattggactaattaactaagcccaaatcatgctcaaactgtccaaaccagaatgggattaggttttggtattttatgagtataaataatgttttttttttgtttgagaccaaaccatctatacattcatccgttttcatattttgttgttgaaaaatcaaactcaacggaagctaaattttgtagatcaattcagtagttaaggatcccattttatattttcatatttgtatgtctaatgtcaatatcatttcaatgatttattatcttttggttttgattttcaatatgttgatcacaatatcttccctttaatttatgttgaatgcttttttcaaattaaaaatctaatttcaggatcacacttcaagaaaatctagaatttgatttacaataattttggaaaaagcgtcataaaaccacaactaatctaaatattaaatcaaattaaacctacaacaaaacattacaaatctaaatattgaatattgatataaatcaagtgtctaagtaaatgaatttgataaacctaggcaaaattgaactttacaaatctatgtaattgaaagaagcattcaacataagtgaaagaaaatatattgtaatcaacgtattgaaaatcaaatggaaataatattaaatcatagaaatgaaattaacatttctaaattcgtacctcaaaatataaaaacgggatgcttaactactaaattgatctacataatctagtttatgtggggtttgatttcccaacaacaaaatataaaaacggctgaatgaaaagatggtttgctctctatcaaaaaaaaccttatttatactcctaaattaccaaaacctaatccattctattcttgacagttgaaacatgatttaggcttaggtaattatcccatttaggtaatattaagtggcccaaaatcgtaattgactttaatgcttcagagattcacattttttttttaccataaagacgtttgaaatgggcttttagtataaaaatgaaagttgtatctctattcattttctatataccaccaattgtttgatttgtaaacccaactcagtgttgttcaagtgaagggagatgttgtttatgttttgtgcaagtgataaattttcccaatgccttccttctgctatagatatggtattgagagattttggtatttttagcacgttatgaatgagttagatataatggacgtctttgatcacaaaggggcgacttaggttcaagaaatcaattgatgtggatatataacagtgatagtcttcacaattaagggttaagaaatcatttggtaagtttttcaaatagaggcaagagaaagaatagagtaaaatataagagaaaagggttctaaagggagaaataggagaaagcttgaagaggcaaagagaagaggtagattaaagcataggtggctagcttattggattaagaggtaagagggaagatttttttttttttttgaatggcaaaatatatatataaaaaagaaaaaaaccgcaatagttataacaaaatacacaaaaggagccaacaaacgactctccaccaaacctccacaa

SEQ ID NO: 4296 - DNA, 1017 bp, Medicago truncatula
  Intron number 1 from transcript Medtr3g151340.1 (locus Med tr3g151340) derived from phytozome v7.0 (chr-ID MtChr3; po s 40110517 to 40111533)
tattgaacaatctcagccaccacagcaagatcaaggtagttaagtgcactcactctcacacctttctacgattattcttttttttttttccttttgttttaattaatacgtgtaatacacattaatatattgcgttcatcaaattggatttgaagacttgatgattaatcaattagcacttttagcttttaaggttgtgtcaaaaagatatttgtttttaaatgttcatgaaatgacaactcttctcccagtcaaagtgttcacaaatcatctttgatatttttatttaacctcttttttttttatagacgcatattagtattagtaagttaaaagttataatgttagttttctgcgatcgaaccctaaaatcacccgtctatatttccttctttttagggaccgtttgtatttcctttggtgtccaatagcttatcaaatcagagatacgtagttgggacaacatctttgatattttattatgtcatatacttaaatatggaaagagatcctctgaaccactaattcactattgttcgggtgagtcacaaatttttagaaccaaaatcaccattgaacactctgtccaatctagtgaaaaactcatcggagaggatctgtttacactcaaatacataccataaggagtgatttgaccggtcaatgaattcaacacattcatttaaattgttccatagagatcatatgatttatattgtaactttataaaatatgaaaatgcaaatgactatggtgcatatacgtacccttcaatcttttcaacaattaaatgtaattatttgtcccactttttccctaacacatatatataattgaacatatatattggtctcaaataggtagttcaattgaaaagtaaagagaaatcaaagaagtttgaagcattgcgtccaaagttttaaacgcgaaaactaatgtagcaaactaacttactactagcattcatctataaaaaaatgtgtatatattgatttatttgctattgatatgaaggga

SEQ ID NO: 4297 - DNA, 1456 bp, Medicago truncatula
  Intron number 1 from transcript Medtr1g043800.1 (locus Med tr1g043800) derived from phytozome v7.0 (chr-ID MtChr1; po s 10370708 to 10372163)
aggttctccatttccaacacttcttagatccgcaggtacatccttcatcttcaatttcacatcctctcattcttttttcatcttattcttaacccatttatccttatcttaatttacgctaattcttttacttttaagcttaagctcaaatctatgttataattttaatttagttttcattcaatttttggtataaacacattcaagcttgcaattcacgtgcatttcaatcttacccacaatttatttcttcctagatttgtagatacagattacccccaacgctttttgttcttgttagggtttcagtaatcttcccaaaatccattttttgtatttatttattgatttagtttacatctgattgaattgggttgggattgaatgtgtggggcttgatggaggttgttttgttggattttttgtttaatatggcatgttatgaatcaaaaagttgttgagtgttttaagtttatgcttttgatttttcaattgggtctctgaactctgattatgggtaatttgatccatgtagccgacctcatttagtgggataagactctgttgttgtctgaactctggttatgggtgtgtttggattgacttatttgagcttatttactgtcataaaaacttgcgagattgtttcaagaggttatggaaacagcctatcacatgtccataagctctttgagatagcttatgaaaacaacttatggttttgttttagcttttgttgtagaagtagtgtatgcataagcacttatacgataagtgttgctataaacacttaagtaagttatttatccaattatggcctataactaattggtaatttggaagtttgtcttttgaggtctgaattttgattcatgtgctttgattttattggatagccgtaaagttaatagtcaattttaatttattgtcctcttaaaaaaaataaatttgaactgtaatgttttatttgactatctttagctttggacaatttggtttgaattgattaacccaaattgtttttttttttctttttttttcggtctgaactctgataacgaccaagggcctaattggatcgacttatttgagcttatctactaacataagttttgtaagactgtttgggggaaacttatgacattgttcacaagttgtttttagcttattttcacaagttctccaagatagcttataaaaccagcttatacgaaaacaatttaactttattttacctttttactttagaaatagcttatacataagcgcttatcataataagtgcttgtgatataaactgtttatccaaacagggcctaagtgggtaaacttgttttttgactcacgtgctctgatcttattgtttagcccaaaagttgatagccaatttttgtagcattgttttatttgactatttttagctctggacaatttggtttgcattgattaacttaaa

SEQ ID NO: 4298 - DNA, 800 bp, Medicago truncatula
  Intron number 8 from transcript Medtr3g139660.1 (locus Med tr3g139660) derived from phytozome v7.0 (chr-ID MtChr3; po s 35979708 to 35980507 reverse strand)
acaggttaggtacccgaggggcacaagaaatcaaggtaagatgttcatcttattattactttctgctgtattgttgcgccaacgttcaatttgattgaaataataccgagagatacagcaacataatataggagccgaaatgaaataaagttgactctataatcttatcaaatatcagaaatggtattgagacagatttgatatcatccttattaattactaaggataaaaggaaatacgtaaataggaattacaaagaaagaaataggaaagggaattggatatttggagacctaaaccagggtaatattgatagagcagagccaataaaacagaataaacaatagaaactagagaatagtggtgaatattaagtagatggaataaagaaaagagttacaagttccagtgcaaagctcctcagcaaagtctcttgctgccggccctaaaaggatactaacaaataatctaattgcttccactagaactcctccccacccttacttatatagaaatactactaaggagatattttcggagaatatctttactaagaagatatcttcatagaatatctctattgtaaattactaataaaatattgctactaaggaaaggagatatttccagagaatatctttcatagaatatatctattatataatactaataatcttattacttagacaccctactaattacttaaataccttcttaccccaaatccaatatcctatcacatactgtgacaatcttttcatcatctacttatatacattctatatactccaggctcatcc

SEQ ID NO: 4299 - DNA, 1470 bp, Medicago truncatula
  Intron number 1 from transcript Medtr2g103430.1 (locus Med tr2g103430) derived from phytozome v7.0 (chr-ID MtChr2; po s 24110930 to 24112399 reverse strand)
aattcaaaacttctgcaattgctgaacctgcagaggtaaccattttatcatattttccttttcataaagtagcaaataattataacattataatattaattgttatatgattagtaatttagtattgctgaacgtgttctttcttcttaaatttgttttttttttttttgttgtttaagatgcatattcacgcattgatgatgatgaactcattttagctttttgcatgttcttgttacaaaaacaaatatcataaaaatccaaaatggttccaacttttcgtcttcccttttctttgaacttgtaatatttgtgctgtggctggtgttgtgagtgagaagatgaaactacccacggggttatttgagtggtccacgcaattcaggaaatatgagagagagaggtgtatcaccagtaataaaaaagagtacatgtgagttgtgactggctagtataagagattattttttttcttattttattgtgcaaaataatgaaaccatattccttatgggaggagtatatgaaaaaacaaaaataatacgagcattatcttttttacaataataatagtaataagggcgtcacaagcaataagagtatgatgtgacaaagtcatacaacaaaaataaatgagaagttaaaaaaaggtaagaacatgtcatgtgtccaaaaacaaaaggtaagaaagaacatgaaaattaaaatatgcggaatatggtttacacggattgacaggtttggattctctaaggtgattaaggcgtaaattaagaaaataaagccgtcatatataattgcgttttaaaaaaatctttagtcggtctttagatcggataccgaattttcataaaaaaaaaatctttaaagtaaactattattccttgtattattgcttaactatttattatatcctaccaaaaagaaatatttatctttctactgataaatagctaagagtattatcacaaaacaagatagttaaaaggaaataaaactattttcctctttcctcccttttcaaatcataatgattatgaattaatttttttttagaggaatgattatgaattaatcttcttccttcagtaatttcacacgctaaatattttttaatcaattaatttaatgatcttaaaacttagagtaccttttatgttagaaattcaaaaaaaaaatgtaagaaattcatattttcttggcggtactaaaacaacaatgtgcagtagtttgccatgtactagaaataagaaaaatctgtagagcaagaggatgcatgtatggtgttttggttatcaagataacgccgacatagaaaaatatatatggtatttttaaattttaattagaaaaaattgcatggagccaagaaaagcttgcagtaggatctccaaatatacagttctaacataacatttttggtcatcaaatgcaggcaccaattgttcctccaacatacgaagatccaat

SEQ ID NO: 4300 - DNA, 3336 bp, Medicago truncatula
  Intron number 1 from transcript Medtr2g076740.1 (locus Med tr2g076740) derived from phytozome v7.0 (chr-ID MtChr2; po s 17432328 to 17435663)
ggatattcctggttagtattaatgctatgaatcttataatttgtcccttcattatcatgcattcctttatatatggttattattgcctcatatatatacacatgacatgtttctttgtgtaagattctttgaatttatgcttgatgcatcaatttttcagtttgctattatcgttggtaaagtaaaattgagttgttactttctattatgtttgattaattctttgttttttttttttttaatttaaattaattcttgttctttattaagagtaaattgaggtgatgatagcaaatataatgcctataatcccaatctgcatgatactttttagtgcgtgctttgatatgaaaataatgattgaattgataccttttttttcttttgtacaaatgattgatagttgttaacggtgaccaatgatgtattacaaaatatcaagtttaatttaatttccaattaagggccagaacttgacttttgattaagtatcttgaaaatatgtcatattagaagagtccataatattttgatccttgaacaatggttacatctatgattagctgcttaattcatgcatattgataaatgaaagagcctaaagaaaacctatgaagcatgaacacttctcggattaggcgtgtttcggtgtcggatacgatattaatggaaacatgcaaagtacgaacacttcttggattaggtgtgtctcagtgtcggacatgtgccgtgtccaacaccaacacttataattacactgaattatgtgaccttttcaaattattaactgtgtctgcgtgtaagtgtcgtgtgcggtgtccatattcatatccatatccatatccgtagatggaaactaatattatactcaaattttcatttcctcattgaatcaacaccaactatgatccgtaattgttgattgaatatgcagtgtaagaaaaagttgcaataactacgtaaatcaaagacagaaaaaataaatttggtcaccaaattttagatgaattttgtcttttcccatctctaaattttcgtagctatttcaatttttttttaagtagatgttaaatttctattacttagtgaaataattagatcgaacataacattatttccaatctgcattttttatgtgggtcattaagtttttttttttttttttttttttgagcaaatgtgggtcataagttgacataagcctttgtattttaatgtatggcatggttattattaattcctaatcccaggcatatataatagagataggtaggtacaggtggctgcactcaagtactatataatacataaaaaatatattggaaaataatattatttttaattaggataaaatacattggaaagtagtttattatttaaaaatatattaatactattatttacaaaaaaaatttgttgctataaaatgtttacacaaattcattcatatacaaacacgcactttgggtcctgtaaacttaacttcgttgataagacgaatacataatatatttaaggtttgaaattcaaacccagacaaaaaaaatacacgcaccttggaaagggacgtagatagttgaggttagcatctttgaacagtaagctctaaaaatcataaatacacctctataagattacaatactttctaacattatttgcaagatgtatatcatcaccttaattaattaaaaataattttatttggaataaattgacacactgaacttgtcctgttataaagactttgatagtgattttcatgatcataatgcaaataattgtgtacaatgcaacaacacatgaatgtgatttaacttacatgtcatatagtaaagtgattgaactctcaagttttggtgatttttgctggaccaaactatgtctatgtccatctaactttcatgtcaaaaagaaaagatacaaagtgctgagagagacttatcattaggagggtagtcaaaattgcatatataatgtgtttagaaagatgtttcaaaaaaatatatttgtgtttagaaagagttattaagaaagtaatttactatgaaatattaaatataactaagattaatttgtacacgccgatgatataatttttttatcaagacataatttagtctcattatttgtcataatatttttttttctctgttacatacataaatatgtaaatggggagtaaaatctaattgaatgtatgtgtagaattattttacctatttgtgcatacaaattaaatccaatgttaatccacttgtattattttatgtctttaagaccaacaaaaaaattgtccattcttgaaatatttattttaaatttatttttttaactaattataaacaattttgtcaatttaaatagttatggattttttatatcaacaagggaaaaatagttttttaggcttgatatgatgggtcaatactgaagctttgataaagtaggccatgtgtttgtagtttaattattttgaaaatgatttcatactgtttgattatgaaatcgcgataactagttttggattttatataagaatgtcataatgaaatgaaaaagaaactgttatgggtggccaaattagaagacatctcaacaattgatggaagaggatatgtatattgggtctatatacaatattatatagagtatataataataaaaataatacatttatttccgctgttttcccacaaacaaaattattactgttctaataattaagacaaaggaaaaaaagtcatgaacatttaatctaaaggattaagtaaactcaggataatattgttaatgaggacaattggttttaattttaactagtcatagttgacttcaacacaaaacttatttctaccttttattgatctataactgcacatgttcctcatcttacttaaattcacatatcatatataacaaaataaaaagtctaacacccatgttccatttgacatatttcttttccaatacatactccctctcccacaaatataattcatatcacaaaaaataaaaataaaactattttttagatttattaaataactcatttatcaagtctgtatatagacctaatacatcacttattcaataatcttaaaaaaatgaaattttatttataatatcgaccgaaaggtgtatcttattttatatgtattgttttacaatattaatgagatattagttttgtttttctattatactcgcaactatttgttgttctatctttttactatttttgtgatttttcttcctcatagaaatagtatttttctatagttattaaaatcaatctaattaatgaatgtaatggaaatatatgtttcagaagcagc

SEQ ID NO: 4301 - DNA, 947 bp, Medicago truncatula
  Intron number 1 from transcript Medtr5g033210.1 (locus Med tr5g033210) derived from phytozome v7.0 (chr-ID MtChr5; po s 13543813 to 13544759)
atttcagttcaggtatctactaattcgtatcttattgatttatctgagtttatctattttcatagtaagtagttaaactatttaaatatcctgttgaaaaatttatgataagtttatatggtgttttcaatttatttttagaaaatctcaaagaaagcttataaaaataatttgagattattttatattttattatagaacttagttaagttgtagcttctcattttgtacgtttgcacaacagtgttagaacgtaaaacgaaacacttactaagttgtttattcaagcatagtcttttgtagatagactttttttagatgtaaacaaggtcgcaactttgtagattaatttttcgagtattatgagacctaaataagcaacaaactctttttaagagttttcatgttgttgcatgctcaatgttagatttgaatccagaactttccttaaggtaaaagagacatgtatcatctcatctaagcgcgtagatttgatattgtgcaacgataacaatggagattttcatttttattaatataatagactctttgacaaaattagttgtttttctataacttttgtttttaaaataaaagtgggaaatagtaacttcctattcctcttgaccaaagaaaaattctattcatgtgttaaaaaaatcaattcctttccattatttttataatctattgtgttagttagtatactaactataaagtagtttattttagaatttgtagaatggttaagttgtttagtactagtattttacaacaataaattctaacataacaccaattaatatttgaatatccagaaaatgcaagaaatactacaaaagttttgtaaggaatattttgtaatttgcaaccctagaatagttttgagttttccgtcaatttatgactcggtggtcaacttgggagttggttgattttagggccaa

SEQ ID NO: 4302 - DNA, 4084 bp, Medicago truncatula
  Intron number 1 from transcript Medtr1g084040.1 (locus Med tr1g084040) derived from phytozome v7.0 (chr-ID MtChr1; po s 16810425 to 16814508 reverse strand)
tggttggtgggtaaattatccaccattcctcaaaggtaatctagaaaaaacctatagataattgattttatttaaagttaaaatttgtagttattgacttctacaattgattttagtatttttttttttaaggaagtcttaaaattatttttaaattcacttttatataaatatatatgaacataaatcactttacattcaacttacttttattccaaatcaaagttaacataatcaatttacttcatatcaattcttgtctcgcaaatccaaacatacacttagcgacgactaatattcgtctgagaacatgttagtaattcaagatgatttctcacattacaatcaaatttctttcatacgcaagagtcaaagattgaatttctcaccacttgcttatgtggttggaatatcttatcacttgaaccaatctatatatatggtgttttaatggaatgcaaattaaaaaacttcaatcatattgcaacactcaaagttcaatatcttccactttatattggttgtaaatgtaaaatacactaaacttgataagagtgttttagcaaaagttttttttttttttttcatttatacatttttctttctttctttttattttgaagccaatttatgcattttttttagtatttgagtagacaagttagcatttttatttttattattatgtgttgtcaaatagataaaaaaaaaatatatatatatatggtcgaaggagtaatatcattattgctattaagtaaaatatttgagattataaacaattacatcctctctatccctaaatataatactagtacatataaattgttgaattattttagataaaatacggtatcatagaaataaactaatatatatttaaatttaagataacttggattaaaaaaatataggttgctttttttttggccaaaagaaaaaaaaatataggtagcttaagagttgtataattttttatcattatagtaaaatgtgtatgagttgtatatgttgtggcattaaaggaccaaaaatgagtttcttacgtactatccataacttaaattattcttcctttatttttttttttgacaagaacttaaattcttctttctatattttgattttttttaatattaaaagaatatgcctctccagtaccaataaagaaaggctctgtcttcagctattttgaattgcataattcgtattaggcatttgtacttgtggagtgagtactttatacctatatgatagtgggctctgatgaatggtccttatattgttatgattgtgtgccaaacgtttggttcgtggttcaagattctatatcattgtgttaaaaggactagacaaaatggtgcaacttcgttcaactttagtcgattcatgaattaaagaagtcaaattatacgcaattctagtttagttcatttgtttattaatagccagattcattatcaaattgaaatattttgagttggtcttggtccattcattgtactacctccggtcctatttataagagaaatttaggtcaacaaaagtgaatgtatttggactgaatttttaactagatacatcaacttttgttgacccaaaattctcttataaataggaccggagggagtaattgctattctcctgaattaaataatataatgccaaagcatggtccattaatatttaagcaaaaaattgacaagtttgaggttagttttcgtaatggttacagcagttatagtaatgtacaagtgtagatcctgatagtacttatctcacatctcaatagagtttggttaatcaggttagaagtaagtggtaaatgacgatgatatgagagcttaaaaattgtggtaaatattgtaggttcaaagtttgagacgcatagcattttccagtgaaaattttgattcctgacaaattgacgcacgcttgagaattgcataaattaaagggtattgcatatgtgtatgataaaagttcattggctttggaattaagacctcaaaagcttatctcgtctgaccactattccactcctaccacctcacgccaatgccatcacctagttaattagtatctttagtcaaacaacaaaacacgttatgcagatttttaaaaaaaattcaagaattttacggtaaaacaaaaggtgaaagcagattttggttgcgagttgagaggtacatgcatgcaagtaaggtagagaaggagaggagtgaaaggttttaagataaagtgtatcttgagtcgtgatctacggacacttttatacaaccgtcgatgtgacagttgaatgtagtcattggaaggctgttgcgaaaggcaaagttctattaccattgatgttggataaccattatggtcagaagtgttattgataaccattagaccgttgggtcgtgagttggtgtgagtagggtttgggattttatatagtttggatttcttgctcggcatgagggattttgggtcaaaggtatttttgggcgttctcctattctcgagcatgggtatttggccggttcataacgaagtttaaatttaaatcaaatatgtttgactttgtaaatatatttaaaactggattgagtagttttaaaacgggcatgcattaaaaagcaatatgccatagaatttttgttcactgcagagagtaaaagtgtactatgtcatattgaatattgatcatgaagcatcaaaacagcaaaatccaaaaacacataataatgaatatatgcatcatctttgtcaatagcatgaaaaaataacaagatcaatgagataatgaagtgtacatgagagtgcacgtgtgtacaattaatgtatcggtcttacttatgtataataatgcaacttatgatgtcacaattagagcatcactcgtattactatatctgaagactgaaacctctgcagttttttttttgcttgttaaataagttatctgttaccagaacagaataattaataactagttaatgaatgaatgatatgttaaacactattcacaacacaaaagaagagaccaaaattaatatattttgtgaacaacactcaacatggccaatgtaaaattaagtttataactttatactatcgtatatcatttactacacgtagtagtattgtacgctatgcagagcagaatgcaggacctgactcggttaatttatattgtacgtacgtatataaatgtacagaatatcatgtatctatatcataaatgtaatgagtgatatcacggttggagtagaattactgctcaacttttactacttgcatgattcataactatattatttgctgcattatatatatccacgtgcatgcaaacagaacctcttctgtgtattttcctccgtgcgtgcagacttgttctttctattttgagctgctgatcaagatttcggaatttagcttatatggagcaaattcttttatttccactcaatttagcttatatatatatatatatatataatttcttagtagattaaaatttgaaagatatcgatcatatagtagtattattaattatacgtattgtagcctaggaaggatacgtaggtggttaattttgtacatatacaaatgtttaatgtagtttgttgtatgtccttcactgctctgcaacaaataatttttacatgtaagatgtataattgtcaatttatagaccctcaaatgaagtaatgaatgcacacatgttagtgaaattaaaattcgctatgaatagcattattcttttttaaattgataacttggtcgttgtgcgaaaatagctagtggttcacgaattaaaatctttattttatttttgttcttgatttttttttcgcaccattaagcattttcctatctcaactcaaaacattatcggctgacgtaaaaaaaagttttgatgtcttctaagttaggtccacaacaattttgacagggtcaatacattgctcttaataaggggcttaagaattttgaacttatatgaaacctctaatatgaaggtggagaaagttttaatggagctggttatttagtttgagcaactgaaattttgtttctatttttttaattagct

SEQ ID NO: 4303 - DNA, 2295 bp, Medicago truncatula
  Intron number 4 from transcript Medtr5g012280.3 (locus Med tr5g012280) derived from phytozome v7.0 (chr-ID MtChr5; po s 3462448 to 3464742)
gcataggattgttcaggtatgtatcatctctgtgtgtgtgcttcctttcttttttcttctcatgcattatacttgttaaaataaagcttgttaaaaaaaatttgttacgaaagatttatacaagagaagaatgcataaaaatgtgatgtttgaccaattaggttatggctgatcatacatgctgagagtgggttgttgttagttgtaagtgttacatgctgccgtacaggattcttgcatttcttgtgaaacttctctcataagtcataacaataagcactttccatagaattattgtgggcctctagacttttcatcatcagtttagtagatcaatttgtccttctaaaaggattagttattgtttttgaagcaaatagaacttaatacaatcacttaaaggctctagaactgtaaaaaattacaaatatttgatgaatatctgtcatgatggtaaatgcatgttgacaaacaaatgaattgccatcaatcgatttaacatttgataatgttgacaaattgagttgagcaccatgaaaataaagtttgaatgtgcagagaaaaataaaccaaaaattcgacagtttgatggaagaggtttatattcaataacctttcctttggcttgcgtaacttctccatttccctacttaacttttggttgaattgatttgttaatggatgtaacaactaacaactgataggcattgagtcatgtgactcacattgagtcatgtgaatcgtacaaccattgtcaatgagccaagtattcaattcatatgaattgagggcttgtgattcaataaataaatgctcagcgctcacatttacctgttttttgggttgttgttgacttgagactacttttctttattccgcaatagttaatcattgtggcctaggttttttttttctctaaaaatcacagtgaaatagaggtttatctttgaaataacaatctgtctctgtcatttgttcgttggcaataggagcaagggaaaaaatcaccctttcttgaagaacattcattttccctaatccctccatcattatagaaatatagagactggatttttcagaatgccttcccttgtttttgcttgaaaggcaccttcactaactttattatcttttcttgaaaccctttgctctcatgcatgaagcttgctgattctgtattgtgagactttgcaaacttttgaggaagtgaaaccatgatctttgctaaaacctttttatctgtaaatgcctcaccaagatgccacatttgatttaccgcttccatttacctgccagaattatctttgacagattctttgtccatcatcttcatcaattcaatttctctctgcaatgtgaggatcctaacagatctaaccctgttactgccctcatattcatcttggacagtgtccaatacctgtttagctgtttccaagtccatggttttgatgaaaatatgatctgtcagtcatgaatgaaaacaagtgatggctttgtctttcttcgatttcttctcctcattagcttttattttagaaacgttaggattctctctcaatggcaatgaatcagcttcagtgatcacaacattccataaagcttgagacaccatagttgcctacaagaaatatctcaacctcactgtgtttaaccctcaaataattaagaacttttcctcacatcccgaaagaaaatggctctttgataccatgttgacagtttgagttgagccctgtgaaaataatgtttgaatgtttgagaaaagtaaatgaaagatgaacaatttgaaggaagaaagttacaataaaagaaaatgcctataaattggcttacaggaccgaacgttaaccccataaaaaaatctaaaacaacatctgtgtttttggttaacaagaatgacttacgtacaatataaagaattgcacatctgcaataggaacagagactatctagattttatctccaacttattcaaaaataaaatttcgaataaggcataatctcataaatctaagagataaatacctttctttttatatacttttatcgattggttagttagatgatagagtttatcaattttgtattactcatcctaatgattagatacttttttgcatgtattgtgagtttttattgcgtaatgatgtttgcgactaatttactagtaattatttttgtgaacaaaggcagacccagaaagaaatttcagttgacctttttttatcaacactgtggttgaccttagtattatttattttgatgctttaatatcttctccaaggtaattaa

SEQ ID NO: 4304 - DNA, 1663 bp, Medicago truncatula
  Intron number 2 from transcript Medtr1g068420.1 (locus Med tr1g068420) derived from phytozome v7.0 (chr-ID MtChr1; po s 13625540 to 13627202)
tggggcagagtaattcatttaagcgtagaggagaggtttactgtctaaatctttggtttgttgttctgaacctcatttgattgtaagcatttgttgatttatttagtttcttttttttttaagcaaccattttttcctgacctctttgtctataattttttagtcatatatttgtgctttttagtagtttttttttagtttttattgtctgctttacatagcagggctctatacatgatagatgcttgtgtgatgctttgtatgcttgattgactctttcttctttttttttaaatcccatagtattattaggcaaggtttttggcaaaaggcatagttcatgataccttccttttcataattcaaaactgtcattattaaagcaaacatgctaacgctatacgatagcagaaaatgcgtgacagcactgaaggtaggaaaaatgcaaaatagtgataactactaacaaattctcaacgcatcacagccacgtagtagtaacagcagctaaagtaacgcaaaatttgcagcagtcatccgtagggacttcgatgccaaattagaattccgatattatcttagaagactatcgtgttgggtttcagccccattcacgatgtgtatacgtcggaatatcagcgttcattgctctgttgttccgttcacccccggattcaaattgctgaaaattcttttatttctccttttccgtataactcaagatgttgcttgcaggacaagttagaatccgttgcgtattttcttaatacattaactatatgtgcattactcaatgccatataagggacaccctattatgtgtgactttcgtcggatagtaaaattgccctcccaccggtgcacgtcatctgatcacagctttatagtggagtaacgatgccgggacactttacaagcccctcgaagtatatcatttctgtatgttggattaattttaggtggaaattcataatgcagtgacttataaaaaaaaaaacgccgcagctgtcagtagttgaattattttggtatttagaggtgattaaatattcaatgcttatctcatttgatgggagaattatgtgtgcattttatcttactcaatatgtgatttgttgaagatatgttggttaattataaatgatgaagaatattgtcaacggatttgttaaagatgtgttggttaattataattgataattgatgcataagcacaactttgatatgttaatagaatccatattagagaatcaaaaagtgtcttaccatttgttaaaaaagatgctttcatagatgcagcttttgttttttttatatggtctgtcagatgctttcatagatgctgctttttagtggtatgtattagagctaaagtttcctatgctacctcaaaatgacatttgctttattctattatctcggtgacacatgccttgctaatccctagggttgcataggatgtattgtccttatacaccaataccaatttagcttgccattgtgagtttgtagttgtttttgttgcctacatcctttttctgccattccccttttaagttgtcttcacccctttctcggttctttcatatgatttaagctgttcaatctgaattcttaatttttaacttcaatgtttgtttgaaatcagtccatatactgttac

SEQ ID NO: 4305 - DNA, 2655 bp, Medicago truncatula
  Intron number 1 from transcript Medtr6g083780.1 (locus Med tr6g083780) derived from phytozome v7.0 (chr-ID MtChr6; po s 17145720 to 17148374)
acacggcagagaaacttcttcgtgaaatgattgtgagagggctactgtaaaattaaaactaggtaagaggtttttctttttgtacactgttattttcaatttatatttctgcattattgaatgattttatttatgtacctccctcacctaacaggcagaagactttattattgctgtttcatttgttaaatgtgtttaccgaaacctttatagatactatgtatattaaactacctaattgacgttgcctaaattggacgtcgtttagaattttctatccattttgctggaaggtatagaaagttcgatttttattctgtctataaattcactttatagaactttcatattagagatgagactatgaagttgtggacactcattatttgtagatttggacattagtatgcctttctgcagaattggcgagactttgaaggatccatagactaatggccgtggaggagttgccttaacaattgatttgtttgccagcatatggcagcttgcgatatgcctagttaagtgaaattgaaactggcagtggcaacttatttttgttctctttactttattatgctactataaaaggtaaatagatgtagctagaacatttccctctcacctgtctcacttgcgcttggtagtaagaagaatacatggctgtacaatcatgcaaaaaggagtttttgagaaagaattctcttcaattttggtggaataataataatgcatttttacagatttactcctagatgtacttgatgtatgatttcacaatatagattttaatcttgaaaatttgttttactgtaagtggacacagctcatccttattgcttagaattataatttttttcaaatcaattatattttattggtttattggaaaatgttagaaatcatgcatattcttctaaagtcctgaggttgcattgtcttcaataacctgtattttttaatatatgaagggactgatatatatctatattaaaaagataaaggttgttcgctttagatgctgaagcaaaggtgtccattagatgaaatatagccattaattgtctattagttgtcatgattggacacaaaaactgcgactggattggggatgaactgcaagtacgcgtgtgaccaagtcttccacctgaactgaacctgcgagtgcggtcaagatactgtgttctgaaatttgagtttgatgtttgattacgtgttcttccatttgttcaactgagttcttgatgttgttgatattaatcttgtggttgcatgtagcttttgtttcgtgttttgacatgaattagattatataagcttgttggttgagtacttgaatctatcaatatcatcccagccttggtatatgaaagagtttcccaataaatggaattgagtttcataatcttaaaagtgttgatatactatagaaattttcctgcattttgaagaatgcctctccatccaatccattgcaaatcaattattaccagtgatatgactgcaaaatgcctcacaaagatgttgtaaatgttccaatatatgaaatacgcattcaacgtgttcggtggaatggctcaaaggaatgtaatctcgtgaaacactgttttctggatttgttggaattggtaacattgaatttgcagaatttttgtttgattcaattcacaacagagattttgtgtgatttcttggaattctttgctctcctgttacttcaaaacaacgttggttgggtttaaaattttgttatgacgaaatcactgaaaattcaacattagaacgctacatttgctcaatctatataacatcgtatcaggaagagaaaaaagcatacaagctcaaaaacattaggatagtttactgcaaaagaagctggattgttttaaccttcagattttgtcatgggaagggaatgaaaacatttatgttatagctgttctgttgtctggtttaacaattacttagttggttatgcatagtttatctttggttatgcatagtttatctttagtttaacaattactcagattttgtcatggatagtttactgcaaaagaagtttatctttggttatgcattacaagtacttttacattaattagttggtaacaatttatcaggatctatcttactatatcctcaaaaacatcctcataaaagatcatatgcgccctataatgttaagcacctagagcatggattaccataacaccaattaaagagatgcatgtaaaaagaagtgaagcacaaaacatagctccataacaagttcacttgaaccaacacatgcaaccctcccttcaatacaaactttagcttcaccaaatgcacagttgcagcctggaaaagttcagcttgtctgttccaagtgttcaacataatttgaggaaataaattaattgaatgttctcacatgtgtaggtgtcatgtcagtgtactgttgatcacaagacttgcctgagtgttggtgctacatagatgtaaatacatttgtttactctgcattcttacaacaggaaatatgctaggcagaactgaagtttgaaagaacaaaaacggcagaaaattgaaaacataattttataaggcatcccattcattatccactaatatatacaattctatattggattaaaattgctgagacggatc

SEQ ID NO: 4306 - DNA, 1544 bp, Medicago truncatula
  Intron number 1 from transcript Medtr6g015090.1 (locus Med tr6g015090) derived from phytozome v7.0 (chr-ID MtChr6; po s 3708281 to 3709824 reverse strand)
tttcgtacttgtaagcatttcgttcgtttttttgttgcaaatttttcattcgcattgtgattactgattttgctagtttagtcaatagaaggttgaattcgtaggaaattaacaaattaggtttgaattattgttaatgtttttgtataattgaaatccgcggttgtaaactgaaattaagttagaagaattcaaattttcgtgtgattttctgtagaaatgacttttggagcttgtatgaattttgcgatatacgtagttgattgcatagtgcttggagcttgtatgaatttgaatttttgttagaagaattcaaattttcatttgaattttgaggcttgtatgagtttcacgatttttgtgaattattgttaatgtttttgtataattgaaaaattcacgattgtaaacggaaattaagttagaagaattcaaatatcgactagatttacggtagatttgacttttggagcttgtatgaattccgtgatatatgtagttgactggtgaattagttatagttttcagattttaattagttaattaattatttacaatttaggttataaataattagaaatttgcgaaattagaagaattcgagttttcatgtgatttactttagatttgacttttgaagcttgtatgaatttagcgatttatgtagttgactgactgcgtagtgattgatttgcttatttagttatagttttcagttttaaattaggtaattaattattgataatttaggtcatttgttcatggtgatgtttttaggtttagtttataggaagattagtgttggagttgcatatgttgaatgctggtataatattcataggtgattagtagttacatgtttagttatagttttcagtttttagttaattagtgaaaagggaaatcatatcttaaatttagttgtaggtttagtttacaggcagattagtgtttctgttataagtaactgatacttttattattggcaaagagggtttgttactatagtttgtgattgtgagattattgaccttttttcacttttaccttctaatttttattcatcatcggattcgttttcattgtaaagaataggtaaatgtagtgttgtcagttacggaccgcggaaaatagctgtttgttcaaattctgctacgcaacagtgttataccgccgttattttacaatgttttgcactaaatagcatatcgcggaacaatagagatttgttcaaattccactatgcaatagcgctataaccactatttaacatgtctgaggtcatggtaagtatgagcaaagtttatgccgactgcatgaatttttatttgctgtgttctttttttaatatgaaaaaagtgacattcattccaaccgtttctatgtatccaatttttttgtcggtttgttgaaatgtgtcgttttatgaatacatgttgttgttgttatcatcatcaatcctgcttatgtcatcagtatcattacttagtgttgaatttaatacgattttatttacgttgtcatatataggaatttaagagacg

SEQ ID NO: 4307 - DNA, 5786 bp, Medicago truncatula
  Intron number 3 from transcript Medtr2g024510.2 (locus Med tr2g024510) derived from phytozome v7.0 (chr-ID MtChr2; po s 6225299 to 6231084 reverse strand)
attgacagtgaaaggtaaaaccaatattcgcgatcttacttctgattttgaaaatgactggtagacctttatatatatgcatatattattgatcgaatgttccatacttcaattcatgaatgtatggatcgttggtgggttgggagagtgtgtggcacttcttattgattttatcttggtttttatgtttctgcccaaactccttttcagattatttattttttattttttttgtatatatgcgatgcacacatgcaaaatatacttgctaataatgatatcattgaccacgatagcatcattctccaatgtaaaataaaattactgatttgttttctttttagagttagagctaagcacaaacccccttcctttatattttatatcttttcagttagaactgtaagttgttttgaactaagggtgaaactcttacttatttgttcaccaggaaaaatattattcagacttgtgtttgtgtaatggctatacagttccatgggagtggtcatttagtttttaggttagcagaatgacccagggtggccacttttgctttttatttccataagcaagggataataccttattatacatgaatttcaggattgtagaggtctagagggggttaaaatgggatttttgctgccatgatctttgaaacatggagacatgtgttcgacagtgacactggtgtgacatgtgttagatgctccttactaagtttccatttgatcattttactgacagtcatgtggcttgacacttgaagtgtatgacttataaaaaaatcattttattatttagagaagtaatccctaaagtataaagaagttaaaaaaaatagttaaaatcggaaacgtgttgagaaaaatctccaaggcactttatttggaaatgtcaccagtccactcaccactttctatgtttatccttgtacatccacacatgtattaattcgaagggtatcaatcaagtaggaatgtgaaatgaggtaatcttgacagtacaatcacatgatcaatattaacttttttaatgctctcaacttatatatccatggtacatcctttttatagatgatatagtcttagttggagagttgagagaagagaaagatgacaagtcggaaatgacacacagccttgagaacacgcgggttttgcccaagtagaagtaaaaagagtgtatggagtccaagtttagcaagacaaaaacaaattataatgtatagatgaaattagtgaacatacaatatcagaagtctcagatttaaagtaccctaggtctaacatacaaggtgacatgaagataaatagagctgtcttccatataattcaaggtgggtgaaatggaagaatgtttcaggtgtcatgtgatagaaaaataccactcaagtttaaaggataattgccagtacctgatgtagagaacatgcattttgaacatgtatggagaagatatgttgaagctctgtaaggagagtagaacaaattgagggtagtccaatagttaagagatagaggagaccaagaaaaatagagtatatagaccaaaccatcaacaaatatttaaaggtatatggtctaactttggacctaatacatggcaggacttaatggtatatgatccatgtagccgaccccactattttggaaaagacttggttattgctgcacatatatttgtatgtaacgactatttatttatttgtgtctatatgtctatatgcatgcgggtcttgctaattagtaccctaagggcaatggttaagaaatcaagagagaaaaattatttatgaaaaaaaccaaacattggtagcttatgaaaatggcttacaacttacacgacagcagtttaactacattccaccttttattatagaaatagctttatgcatatgatgatatgacaaactcttactcagtaggcgcttaattaagatgttacccgagcacactcttaatcctaacgtctctccagttcttcataattgatttcattgccccctacattacaaaaaaaatcatattaatctcggtaaatttacaaaagataatgctgtgtactttgagtttcatcctaaccattatcttgtgaaatcttctatcttaggcttcaaatgaagtttagatgttatcttgtatgagtttccaagccgtcagcgtcagcctctatcactatcaaattcggtttcttctgtttttcctattggaaatacactacttctactcactatgtacttaaatatgttgatcctagtttcttcacatggtatctcaggtttggacattccaaacacattatctttcagaaatgtgatataccgttttcaaaagattttactgaattcttctgcttgttgtgttggtaaattacatagatcaccttcatcccttcttcaggtgtttgatgaacctgttttctacccataagaccatacaacactcacaaactagacttctgctcccatgaatgcattatggtgggttattttgtctctcataaagactacatactacaagtgttctcctaattttgtcagtgtccgacatgacgccaactcctatgaatgccgacacctatgaatacactgaattataatattttctcaaattattatcggtgtccatgtctgtgtccgtgtttcatagatgtttattcaagggatctaatttccgatgagaatagattcccttacgaagagctgtttccttcaaatgcagcatcttatacacctactgtcctagagatgtcctttcaaaatcccgtggtcccccaaagcatctcactatgtctatggtgtgggacttagcaccagagggagaagatggcatcagtgaaggctgacttacttactgattaggatgattttatacttttagttaggatttgctgatttgtatactttatctttttcaaaatttgaatcatttatgatttctgtttagataaaattccgttgcatacaatctttatcagatgacataattgtaagtaattgctagttatgatcttatcaattaggatccctttcttatatttaacctgttaaaaggcagacttcaattggaaagaataatcaagaattatttttagaattaaaaaaaatctgtgttagtctaggagggggacccgttcaaggatgatatacttcttactttccctatagatttcaaggagtcttccgagtcttggcctgtcactcaatcctacacgaagattcataatagtctaatgtccattcctcacactcagtgcatcacatcctctcaaccatccttacgtatttatcccatccaactttttcatccatctctgttactaactcgtggcagttaatttttgtccaaaccttatctctcttggcagtccagcaagaaaacgttagtggcgtgttctagcacagaggcagagtacagaacctggagttctgttctttacttctatatttttgtgataaccacagtgcagctgccttggctcataatccactatccagttttacatttatgcactaagcatataccagacctcttcttttttagtgagaatgtgcttaattgacaactcactgttctacacattcgtgcacagattgctgaagaaggttctacccgcttccagatttcttaatatttctggacaagctcagtgtgcttgagcttcatatggtttctcacccacattgagcttgcgcggaggcatatgatcataaaaatttggttatgacagtaactgcagttttacttgttatggcagaatctgtgtgtaagagattgattgtaatagagttacagagtccatacaagaattcagttttcatcagaaatatttctcccccctctctctactctggacctttgagacttaatattgtctgtcatttactccctctgttttaaaaggagtgtcgtttaaggtttgtccacacaagttaagaaatgaaataatgatgtcaaaagtcatgacaattttactaaactagccttatttactattggtgtaatgctttggaagtaatgtacactcaattaattagagggtacagttggaagtaaaatcatatttctacattgaaaagcgcaggtgacattcattttaaaacaattttttttggcgaaaacgacactcattttaaaacggagggagtattatttattattcacaacacgcaaaacatatcattccaacttactccttgcaatttttttttttttatactattatttcttggtgtgaagctccatattttatcttaatttctttttttggtacatgaattttgtcaattagtatgcagttattggtttattgtacggaccaacaatgtgtagtaacctatgttgaacaacaatgtgtataacctatgtaatctgttcaactgagcttctggtcacagtgcattgggtaattcaacttatgtttatttctttttttaatcttttgtagtttttcgtatgtttagtatatagatttttggtttttattgacatcttttgcataatataaggccttgtattcttactggaatttaatttcctcatttagttttggaatgcatatcggtaaatccaaattttaggaaacaaagatatgtgccgacaacttgtacttttaactaacctcacgaggatagtttgttttcccgtgcctatcctggtctaagtgaatatcaatcatcaaactgatgaacgagcatgtcctgagtgtcaatgataactggatatataatattcatagaagggattgtagtttttttcttaatattcatatggagtcatacaatgctaatatgtaagggcaaagttgtttaggaaacaccaactgatctgtgctacaacttaggaaaatacaaaaggagaaaaataagcaatgaaaaactagaattttattctgatcttaattagacaattcaaatcttattttaattctaaccaatcttctcaactcccctaagatttttttacaagatgcttgcaattttaccggtgaaaaatatattggtattagagctgttgttgtcagtgggtcttgtacaaagcatgatctagttaacaatattgacttgaaaggtgtaaatccaaggatgtatatgcgtagttttactgctgttaacttgtagaatatattggcattggagctgttgttagtgggtgggggtacaatggataatttagtgaacattattggcttgaatggtctaaatctaaggatccatggagttgggggaaccagtcttcctgttattggaatgagtctataccacagaggtctttttcaatggttggcaccttcatgccaggaacttagataccttcgtctcagatcatcatttctctaaatctaaggatccatggagttgggggaaccagtcttcctgttattggaatgagtctataccacagaggtctttttcaatggttggcaccttcatgccaggaacttagataccttcgtctcagatcatcatttctctaaatctaaggatccatggagttgggggaaccagtcttcctgttattggaatgagtctataccacagaggtctttttcaatggttggcaccttcatgccaggaacttagataccttcgtctcagatcatcatttgcgattttggacattaaattctttcttaatatatgaattttagctggttgattttcatattagtttgaataaagtcttcaatttcatcaacttgtgatgtagcttaccttacaatttgtacctttgtcttattttccagattaggtgaagcagtggatagaactcttctcaacc

SEQ ID NO: 4308 - DNA, 984 bp, Medicago truncatula
  Intron number 1 from transcript Medtr5g094670.1 (locus Med tr5g094670) derived from phytozome v7.0 (chr-ID MtChr5; po s 37471507 to 37472490)
ttgaattctgatacattggctgttgttttcaacaggtttgcttctttattttgaattttgattctgattagtattttcatataaattataagttgttttcataagttatatcagagaatttgtcataagttgttttcataagttcttctaaacagtgttaatatcagttgattagctcaaataaggtaactcaaattggcctttattattggtatatgaaagggatagctttgtagggttgggttgtactgtcatgtcatgtcattttctttgaattatgaaaatcttgcatgttcaatgtttctaatagtgaagtgaaattattggtatttgaaaggtattggttagtttctaaaaacacatgtactgacaattagtgttttaaattttttgccgcgtagcaatgtattgtgaagaattgtggtatatgcagcctcagttgtgaccacaatgtggagatatttaaagcatttgaaaaagtaaaagcgttgttttaacttgttgtcgcgacttgggatttgaattccataaagattcatttcgcgcgttctgatatattgcaaagaatcattgtcaaatatgaaacctcagttgcaactacaacatggagacagtaaaaacttcgatgtcgtggcataaatttgcagacattttcttttatgaaaatcctatcaacaataataggcgaagatgcggttaatttgattattaactctcttaatttatctcatttattttgtttgttgatttgtgtttttattttctttttttcattttgcaaagtttgacatcaatgtgttttttggtggttaaatttattatttgtttttgtagatttgagtgaagaaaatagaggattagattttgaaattgaatatggtttatcgggtttttatacaaaaaataataatttatggtgagttttggtgtttgattgctgtggtttcaggtcgagtagatttgccaggctgctaggtattcagt

SEQ ID NO: 4309 - DNA, 1245 bp, Medicago truncatula
  Intron number 2 from transcript Medtr4g032340.1 (locus Med tr4g032340) derived from phytozome v7.0 (chr-ID MtChr4; po s 7726071 to 7727315)
ttccaaagaggaagagtttgttacgatccataacggtttgtaaccgtttttccgctgcatcttcttcttcaattgatcttcgtttgatcaatttttctggtttttgtgtgataaatcttcacgatttcacaccttgattcttctttcttgttctcgttttcttgttttgattgattttcttcaatcattgttatactctgttcttgatcttctcgtattgcatccatggcgccaagaaatgttgttcaacctgatactgaatcagtgttcttcgttcatcccagtgaaggtcccaattctctttctattactcctaaattcaacggttccaattatattgcttggagtcgcactgttgaacgctcgttgggaacgaagaataagcttggtttcatcaatggttccattcctatgcctgatgacgatgatttgaaccgcacagcatgggaacgatgcaatcatttggttcaatcttggcttatcaactcagattctgagtccattgctcaaactattgttttttgtgattctgcacttgaggtttggcttgatttgaaagaaaaattctccaaaattgatcgtattcgcattgcaaatttacgttctaacatcaataatttgaaacaaggatcaaaatctgttttggattatttcactgaaatgaagtccttatgggaggaattatcttcacatagacctatccctaattgttcttgtgttcatccttgtcgttgtgctgcatctagagttgctaagattcatagaaatgaggatcagattatgcaatttcttacaggattgaatgaccaattttctgttgttagaactcaagttcttctccttgatcctcttccttctatgaacaaagtttattctttagttgttcaggaagaaagtaatcatgcttctattacttctttgagtgtatctactgatacctcaattcaaatcaatgccactgataacagaaaacctcaaggtcgtggtaaaagcttctcttcaaataagcctactagactctgtactttctgtaatcgtacaaatcatactgtggatttttgttacatgaaacatggttatcctaatgttaacaaatcttcaccaagtgtgaattgatgagtcatttattgactatttatatatgcttttttgtttagttttaattagattttaatttattttatattagcattatttcctttttaggatagtttactacaaattgcattttattttatttcagga

SEQ ID NO: 4310 - DNA, 6562 bp, Medicago truncatula
  Intron number 3 from transcript Medtr6g080700.1 (locus Med tr6g080700) derived from phytozome v7.0 (chr-ID MtChr6; po s 16234176 to 16240737)
gtggtcattgtagttatttttatctgtttcgacaggtgcctatgttttattagcacctaatttgtgtaaatacttttgggtgggtttccctttgcacaccttgtgcgaggtgatccattgatgtttataatatatcattttagtttgttaaaaaaaaagataaatgcaaggtccggggttcgaactcagatatcataaaaaaaaaaaaaaaaaacctatgtaactgaagtagaattttaatttaataaattaaccattttagtattcataaatataaccttgtaatctatgttatatataaagaaaataacccattttgtctcttttgagttgacttttttccctttctaaattaccctcaattttaaatacaaataacaaatataacaaatagataagagtaaattcaaatatttaaaagtgtaacaaactcggtctttattgtccacgacatatcaattttttttccttatccttttaaaaataattggtgggagtgaattcaaaataataagaagaaaaaaataacaaacacaatatgtatatatatgtctagatatttcctttatcttttaaaaagtgtaacaaactggatcgagtatatttatactatatatataaagaaaatataagattttggtatgattttttcatcatctcaattataccctaaaacagctgtttttactttttataataatgattattattggtgtcataaaaaaataagactttagattatttttttgttatattgttggtgtcattgaattagataaacaaggttataatttgaaagcaacaatcgtttatatttatacttttaatcaaaatcaaaattttatgaaaaacatcgttcataatttttaaactttaccgcaataaaaagaacgaaaatattcgctagttaagataactaacataatgagtagaattaagtacctcaagaagacaaggagataaggagtcccttgcgtgcgtatggagaaaccaggttgcatgcagagaatccagttttgctgaaaattgttgccctacaaggatcagttactgttaaataaccattggtattttgtacatataaacatacttataaaaaataaaataaaaaatttatgatcatagaataagataaagaaatgaagcttgaattatactctttttatacaggaaaacttaattaagtgcttatggtataatgtttatcatataagtacttatggatgagttatttttataagaaaaaataaataaaatcaaactcatgaaaataagttgaaaataatttatttgaacatgaacataaattcttttcataagttcttcaaattaaaatggtctcacaattacttatgttagtgcgtaataaactcaaataataacaaaaaaataaaatagataaacttaaataaatcaatctataataatattttaaatgtgataatgttttctttggggtttgtggaaccagtatagtgctatattcgattaattgtactggactattggaaccaagcatatgaacttgtaacatttatgccatagatcaaaagctactttcttcattttatttctctcttccttcttaggcccctacttcacttctttcataatgcatgtgcattggtacgattaattaaaaactccaatgttgggagaaactgagaggacacctccatgcatagatccaatatccttacctcacaaacttgagatactcaataaatttataaactatatatatacattccacatgcatgtgaccaaggactgtaatctttgtgctgcctattcacatcttgtgttgggtatgctttcaataaatttagtagtttcaaaaacaaaacaaaaatgcatgtggccaattgtatatgtaataatgatttccaacaaattttaagggaagaaacttgtttgttattatcatatgttgaagctgctttcttatataccattatgcatgtgtgtgtattcccacataagttgttttctacaatacacaatgtggatgatgcaatttgtaccattaattgaagtgactacacaaactatagacaactcaatttagtacacagttgcctgatttgattggtgcaagcaaatttatattttgttgtaggtcatagatctccattcatatgttgtattcccacatatattataattttgtatacacacatcatctcacacttaataaattaattttgttagtttgactcatgtagaattcaaattttaagatatttttagattctattttgaaaagaaaaaaaatgacaataagatacaggccgccatcgacaattcggaagctccatagtaattttgacaactttcattttaaaaagtgttagaaaaataaaatccaacaccatttagagtgacaaatatctacgttataattaaatatacgagcaatgatttaaacattatatttaactataaataaatagatatttatctatggccaatgtataattgacaaaattgttgaattttagacttttacctacagaaaaatgacattttatgatagattttgttcgtaggtagaagttgtttttcttccttttttcaaactttgagacacctataaatttgaggctttgtgccaagagccttgatgcacttgcacaagatcagtcctgacctgatatcagaccactactctaattaggctccatatgtttagtttaattgtgagagaggtattgaaagttctatattaaacgtcatagccaaaaaaaacttatttacaaatgaaagtacatatattttaccttacaagctcttgtaagtttgattataaagacttggttaaaaattttaaaatatatttaatttaaatctttttttttttttttgtttgaaatcatatataataagatacaaagaattactccaacaattcgatgagagaacaaaggaaagaaatacacacaccctaaaaaggataaacaaaaaactacttgttggtatgacaattcactagtgagtaacggtctcaagctcggttgataaggacaatacataatatatacaagatcagtggttcaaacgccgaccaccaccaataaaaagttgagaaatatatacgttaaataaattatttatatttgtacaactcacttctatgatttactcttaaactcaatatagttatctaagggattcctatcatgtccaaaacactactttgttttaagaatatatgcactctattgcaaccaactatatattcatgccctaacttagtcccgatcactgaccattttcaagagataaaaaaaaaaaaaaaatcataatgcaaacacaaatgtataaaacactatttgcaattttggtcattccctactcatggacaaaaatttatgtgcataacttaaaccctaaatttaacacatattccttgcattataggaattagtcatgcctttggctagctaaatattttcataatcttagtgctttataatgttccactcatgtatactagaaatctatgattatttccaacagtaaagttcaataagaaatgttcactaaaataataattgtgatgaacaatatattttggctgctccacttcactcaagcaatatgatccatgcatgtgtggcatgactgctactgccacagtgtcagcaagacgatggatgctatactttgatgattcatttgacaaaagatctttgttactcctctgtctcaggattttcatgtcttattaaattcttagcctacattacatgccacttaacaatcatgctgtctccacctagttggataagaatttcaattttatagtcaagtatatatgtgtgtgtgagtaatttttttttttatcaaattagcacttccataagaaattataagagttggataatttgttctttaaatttgcaaaatagtaattttgtcttcaaaattaaagattgcaagtcaatttagttacatctaaccagtgtctcaggacactggttaagaaagctaaaaaaaagttttaagtcggaatggaagtaatgctttttagacttttgaggagttgactgtacaacttccaacatcatagtactatatttgtttcctttatccgtgttcggaagacactggttaccattttctttttttcacttccttaaccagtgtctgaatgcactagttagcatgatccgtttgaaaatttagcatcacaatcttaaagggttctatattttcttgatgtagcataagactattcaagaaaatatatagatttcattggttttgatacacaaatattttaatggagaaactaaaactacttacgttctctaatttaaggtattagagaatttatgtgtgttttttttatatataaatgaatttgttgacaaaataaataaataaatttactcaatatgatactattgccactcatctttataataaagaccttttttttaaggatatatgaagacctaggctgtcatgtaatccacacacaagacaagcatgttggggcttctcttttgctgttcttcataatatcacatattcacatatgcatataatttgagataaatcattggtttcttcttgtttaccattattttcaagtgaatattgatttaaagtaaaattttgtctaacacgcactaacaaaatcatcttgcataaatattttttatataattattggatcaataaatcatatcatattttattttaaatttattgatttaatattaaaaattaactcgtacatgatacaaaacttgtatgacgtgtctgcattatagaattagacttaaagtaaagcataattggtaattaatgaacttgagtaccaataattaaagtaacaaaacggatatagctgttggatatttaagacataaagatatacaactacaacaaggaaaattatatggtgaagtcataaaaatgatttttttcgtgaagttaaatgaccaatcattgaatatttatgtatttaattcatgtcacgtcattatatgatgtattgcatatttatccataagatgtgtcattatatctttacttattgcaattgtgtccctgattaaatcaaaattaaacatagattctcatttgtgtactaagattgaaattccctttatatatattttgtatgagaactgatttgtaaataagataaaacttaattttagagtggcccaccaacatgacactagccgacatgatatcggcaattatacattgactaaataaaataattttttcaaaaatgtcaattttttaacttcaccgtagaaaccccctataacaaacttgtagtaacatttttctttgacattaaatttgtaaaattgctaataatacagtttattattacgactcttcttacaaacatgtactgtgcgtcaaatacctcttaggcacataatacagatcctttcattttgattaaactttctatatgcataagagttattgttaaaccctaatcacttattaatttatttattttgaaggaaaaccctaatcacttatttaaaatgtttgaatttcttatcgctaagaacaatcatgtgtgatagtatgaattttgtttatgttttctgatgattaatgaagagttgtcttctaagtaactatgtatgattttaaagattattatttgtagttgagcttagaaaatgaaattgaactcttatatttagaagtatttgaatattatccaaatatttttctattatatttataagaaaaataatgattgaagggtatcgttattctttgactagttcttccactattctgcctacgaccaattctgacaaataacaagaaccaatggtttataaacatttatccacttttctttaacaaatagtccttcgatctgttgaacaataactaaaacaggaagataaactgcaaattctgtaaacataataaagttatagaaagatgattgtgaagaatattcattttaaagtctaaagtacatggaggtttaatatgaattataagatgagaccatttattcacccaaaaaaaaaagaaaaaagatgagaccattttaaagtctatacttgcattttagtaaaattattaaattttggtttgaaaaatatttttcatacatttaataaattagtgtaatagattttatttaatacaaaaaattttaatcgatgataaaatcttttgatttaatcttttttgaaaaaaaataatattaattttaaaaaagttttgattagtcttaattttaaaaatagaaaaatatgagacattattctggactagccaaaagcttaacaccctcaaattaaggctcaattctacacatgatcaagtgagtagaatctctttctcactttggaccctcttcacatcattatgtcccaacaatggtcatttaccacatttatgggccaatttcataacggctttctcaccattatcacataacggtctcctcaaccttatataaagagcaagctcacaaggtaagcatctctctatgtttcatcactactcttactcatatactgatattttattttatgtgatctttttaggctagggc

SEQ ID NO: 4311 - DNA, 3656 bp, Medicago truncatula
  Intron number 1 from transcript Medtr3g144600.2 (locus Med tr3g144600) derived from phytozome v7.0 (chr-ID MtChr3; po s 37544971 to 37548626 reverse strand)
tattatataacattggccattgagacaccgagcgggtaatcatcgtttcatacatttgattgaaaattattactctctctctatgtcacataattaccgagctttttgttcattttgtacattttaagaaaaaatgcataagtgaacgagagaaaattagttttatgatcacaatccaatgcatggccatggattgtccgttgattctgattacaatccaaagagataaaataccttaaccaaacagctcaatgcatagccatggactgtctgttgatgacaaaatacaccagaaaatttttcatatgtgtactcaagtaatctgcaccatttttatcaaacatatgtatagtagtagttagcaacatgattcagtgacatgtcatatttgataaatatgtattcatcgttcaatgatatgtcatattttttataatattttctactaaataacaactaaatatgtcagaattaattttgatctatataaaagtgaaaccaaacatgcattaaatctaacagaagaaggtgtagaattaaagtctgaatttttaccgtaagaagttactatatatatatatatatcattaatataattagctcaggtgggaaaaaaaactatatagaaaaataagtgttagttcaaatcccacaatgccatgtagcaaaaaaatagtcccacaataccaacctataagcagtggcaaaaagaaatgatgcatgttcgccactgcatgcccttactctaacttacttacggattaaaagaccaaaaaagggagaaaaaaagcatggacatattcaaaatctataggattaataattcaaagggttcttctttcaaaaaaaaaaaaaaaatattcaaagggttctgctttttctttttgttacaattgcaaagggtattgcttagaggattgcaaatataatcttatattatcgccgtgcgtagccattatgacgacatcagcacgttagcctcacgccagcaaaaaatattcacatttaatttctttctagttcttgttcaaattgcatgtttaggtttctacatagttctagctttctagcaagaaaaacttcaactcctttatctaaataaaagtatcattcgtgtaattattttgtaatcattcatttgcatcgcttttatctcattttatctaaataagtatcactcacgtaattattttgtcatttcatcatcttaatatagtgtgtagtttgattttctcaactcggtgcggcatagtttggtattcctttttgtagacaatatgacatgtttttgtccatatagtcgactcatttagtgggataatattttgtctccgtcttttgaaagcattaactcatgctcaacaacaactactatttcatttcataatcaactattatatatattagtcaataaaataatcaacttcttgtgcatcgcacgagtctaagcactagttttatttactaagcttcagtccgatcaatatccttttttgctcctctaaaaacaaaaaatatcatttttccgcttgagcttcagcagctgtgcattctaacccttcttttaaatttactatatggcgcatttgtgcttcgcacgagtcaataatgaacacaataaattaaaagcatgttaaatacaatctaattgaaacttcattacaacgtcatgagtaataataataacatcgcatgagtagtaataataatgagtaataacttcgttacaacaccacaaagctttgcatgaagtatctgtattcttttaagggtttttctacttcttttaaattcgtgtatacccggaccaacaatgaattggttcatgtgacaagagaccttagtctcttaagtatgtgaaaaagtgtttgattcctagttcatgcgtttggaaaaaatgtgtttggaaggtaagaacccacaaatttttcgacaaagattagtcatcgctaaacaggtggaaactttatacctttctcatgaaaacataaaaacaaaaatcatatgtatttgagattgtcattttgattgttataacgttatcaaagatgtttggtaaatgttctcgtaaacttaatttagttgataagaatcccgagcaccccgattatcatattaaaggtgaatttttaaccgcctaagttatttgaagaaaaaaaaaacttgtccaatgcaggatttttcaactaaacattaatttctacaaaatggagttaatcatgtaaggtctagttaaaccaccagataaaaacaaaaaataatacacattgtgggtaaattttctaaacggttagagaaactatacatgctttcaatattggccacattggtccacatacttttgggattcaaaataggaagttaatcacaaatattatgcaattaattcaagagatgatgacaatattatatggttggtgatctgcggaattttgtttgtgggttagtttgagttttgggaagttaaataacaaaaagcatgtgaaaaaggcaataagctttttgatgcaaaagtcaaataggcctcattcatccatcatatcttcccagccgatgcagaggaatatgatagatttgcaccaaagattttttttgctagagatttgcaccaagatttatcatcattgtcctgtgatatttttttctcttttacacattgtgccccaaaagtgatcatctttacaataaaatgaaatgatataaaagtaaccctacaaactgaataattacccgctctctttttcacttttattttagagaatcaatggtgaattgatgaatgataattttcatctgtatatttttttttaattatgtgtctattgttctattattttgcactcaacacaggtttcacttttgcccatgttataattattatctctacagtgatgggggcttttgcatgtaagtttcatacatttttaagttaagggtataaagagtagaaagatagcaacaccacttggttaacaatttgtcttgtattgttgactttcatgctacagtgaaattccactaactatgaagaatatagaatttcaaaatatttatagaacaaacataaaaaaatatgtattgaatcaatcaaatataccataagaaaaatggtgacagtacaagttaaggtataagttgaaggagttttttgacaaaagttgaaggagttatatacaaactaaccttacaaatccatttcataaaaatgaattagatccatctaaaaacgtaatatggcgttgaagtctattcaaaattcatttatcggttctattcccgtgccactcagctaatattgtgggagagtaccaaattaaagtagtagcaagtctgaaaattttttttatttttttttgaggaaactgaaataatttttgttcccaagctttttaatttgtcactactcataatttatttatttttctatatatatgtatatcgactagctagttattgtgtgtcaaaatcaaatgattagactaaagtggtaataaacgttaaaaatagttgtttgagagaatttgtgttcaaattctaactatttgaaactctgatttaaaaaaaaaaaaaaaaaagtccttttcctaagtgcaagaaatattagaaattattaacatatacatcctctaaaaaaaaaagaaaagaaagacaaagca

SEQ ID NO: 4312 - DNA, 1980 bp, Medicago truncatula
  Intron number 2 from transcript Medtr6g083260.1 (locus Med tr6g083260) derived from phytozome v7.0 (chr-ID MtChr6; po s 16840393 to 16842372 reverse strand)
ttgggagttggcaaattgttagaagagaagataaggtgggtgggtgtcttttctccattcaattcattataacaatcgttttcatttgtatatactggcagtgtaaagcttatttacacatgtatccgcttaaatcatgctgaggtagatatttatggagaaaatttaggaaataacatataaaaatgacactgtgatgtgagttgattggatgctcgtgtaaaaaggttttgcaccgtcgatgcattgaattaatctctattatttatactagaaaaaattatactttcatataatcgttgttcacatctacgaagcattaacactaacacaatgctgacacatcgacaccggtaataatttaagaaaattagtagaatgttatcacatgttcggacaccgggcatgtcttcgataaaaaatgttggtgctacaaaggttcacattgtcggaatgtatgaaattttgttatgagaaagggggaaggagagatagagagaagatactattataagaaaaaaagtatactttcacataattcttgttcacatgtattaggcaccgaaaccaaacacgatgctgacaagtcgacactggtgataatttaagaaaattaatcaattgaatattgtcacatgtactgacacttgtcagacaatagaacacctttgatcaaaaattcggtgctatttaggttcacattgtcagaatgtatgaaaatttgaatcattgattttgattatacgaaagggggaaagagagatagaaagaaggtactaagaattatgtagtgaaaattggatacagatttggtgcattgttagcggctctatttcgacacagcgcagtgtaatttggactgattgctattattttgtgatacacgatttagtgcaaagtgatgcaaattgtggctaaagcagcggtttagtgttgtagaacaaaccactatttcatgtgatccgtgtttgacaacactgtcacttaatatatttgaactctgttaaaaatcatacatctcacattttgagtttgtgttttgaatccatattgatgaagtgagaaacttcaaattaaacccgtcgctcttctttatttgattcacattcactgagattctggccttagtatcgacaatatttctgactccagccaattcagatctagtggaaaatatgtgaatgcggcatcatcttaataactatatttatattgtttttggcaatagagttttgtcatgcaaatcagaagaaattttttgttctgtgtttgtggtgaggatcaagtaaatgacttagtctataagcttggtgtgtgatgatagtgttaaaatatgatgtgctgtgctattttacggagtgtgatgattaatcttttgacacatgtgcctattctccttctctactgtagccgaatatgtttattatttatttatgactgtcaaaactcaaaatcgcgtgacatcgttccattatgttagtgatctagataacttccataagtttttgatgcattaaggcattacatatttcagcattatgttttccatcttttaaatttactactattacattacatctctatatgttgttcatctctcaagtcttaacccatcaaggagatttctaatcataggctcatgttgtggattatttgcctcctccatttccttgatatgtagatggcttaaagataatcatattttaagaattttttgtgtgcctttggtaaagagctcaatttagcgcttattaaacaagtgttcatgtagaagctaattagataatcaaagagtgaacgtggttaaactgagttgtaagatgttttcataatctatcccgggggaataatatgtaaataaatgacttatggacatatgatgaactagtatcatatgctttctcaaattttttacataagttcttataatttttatatctcaatgagaattctttccatcttacaatgttacagattaaa

SEQ ID NO: 4313 - DNA, 1043 bp, Medicago truncatula
  Intron number 6 from transcript Medtr4g144730.1 (locus Med tr4g144730) derived from phytozome v7.0 (chr-ID MtChr4; po s 36513620 to 36514662 reverse strand)
tctcgataattgctcagttcagacctacatcacaggtcaagagctctcacaatgtgtagcgaccaaaattaatttcttcacaaatgcttttgaatatggaattgagctttagctttgagaaacacagcagcaacatcaacataaattatctatgagatagagttggctacacataataaatgaggccataattcctcattgtagattatgtctaatgacaaactattggcctatagtttctcttagtttccttctatctttaactatttaactacccttcgtctgattttacccttctttgcaaagatttttataagtcttcttcgcacgtgtccaagccaaacacttaaggttagattctataatcctttccaaaataggacctaattaacattctctctaatacattcattactaatcctatctcatcttgtgtttccacatatctatcatatcattatcatctctagaacaatgagcttattttgtttttagttctttattcttcacaatcaattccataaaacataacaagtcttacaactgtgagataaacattttccttaagcttgaatggtacttttatatcacaatatcacgcaaaacagtcttctgtttcatcatgttttattcctataatttacatctctctctttccccccctaattttgtacaatgaacccaggatactttgactaggtgatttgcaatatctccaattttgtctgtaaggaagaattagtatgcccttactaaactggcattctatacgctccactttacttcaacttaaatgaatgttttgtgcttctaaagcttttcttaacatctctaacttcttacttatttatctatttattttctcaattctctcgatggaactagatcatgtgcaaaaaacacatcatagcactagctttgagaaacacaaaaaaaaaaaaaaaatcatgaaataaattgactattttcctaaatcacaagaaatttatggatattgtctaaaacattgcagatttcagatcgttcaacggcctggttaaaag

SEQ ID NO: 4314 - DNA, 1871 bp, Medicago truncatula
  Intron number 4 from transcript Medtr2g118060.1 (locus Med tr2g118060) derived from phytozome v7.0 (chr-ID MtChr2; po s 27914480 to 27916350 reverse strand)
attttgaaactgcaaaggctcgtgaggtgtgttcaattctattttgcagctttgattgttggattgattggaaactaggcttaggtggtttgagtatgtagagagaaatcctatagattctgtagtaaggagagtagatcagatgcaggatagccaaatcactagaaaagcagagtataagagaaactattaagaaagatctagagattattgagctggatagaaatatggtttatgatagaacattatggcgtaatttgattcatatcgcccgcctcacttaggagttcatctttgctccatttaacattcctccatttactccttttcaatgcatggataaatgacatatgtcaaaaataaatccaagggctaataataaaatcttaaaatagagactaattcatttgaaacaccaatacccatctagcttcttccactcatcaatatccatggctgcctctcccttttcctctcgccggtgccgccgccgccacccatcactttccttccgacagcggccggacagtcaccggaagccatggagaagatgtaaaggatcaaaactgtatggataacatgtttctattctgcatcatcaaacttttcaaccaacaaccgaaacccacacgccaattgatgcctacttgcttgctgatttataacttcagaatatgataaatgtacagaaatcaaattctacagtctatactatttcattcagttcataaacaaaatgaagatttatacaacacatatgagataaaaggggtaaattgaaactattatctgtgtacatctcatcttcacccacccctaaaaaaatacaatttgctagattattattattccaaacaaaattctctttttcagctttcaaaaaacaaatctagaagggttccgatcaacaactccagaaaacggtgaccgtccggcagctatcggaagaaaagaggtgagcggcggcgtgttggttgcgggatggtggagtgatattagcatgacgctgacagcaacgaagaatggtgtgtgaggctagggaagagatacgccgctggtatgggcggagaggggttccgtcagcagcggcggcaatgataatgggggaggaagatggaaagctatgagagaacagaacacgtgattgctttctatttttttattacctggatcctttttgttcttcatcttttaatgataaccgttagatttaattttgccatatgtcattcatctaagtcttgaaatgggataaattgagaaaacataaatggagcaaagatggactcctcacttaaagggataaggcttgattgttgttgttggatttagatatattagtatggatcaaatgtatggtttggattgtataaattgttcatttggttatggcattaaatttgactatgcgtttggaattgcgttggacttccatatatcttgtccaaaaacaatgtgactgtggttttatcaaagctacaaagtgtagcttcatgtctgatatatgccccaaccctttggattgaaggcaagtctgccttcgatgtttgtcacggatacaaaacggatacatgttgttaaattcaatcatttttttttgtgtggagggagaatcaatcacttttattctcttaagatatatcgatgtctatgtgttagtgttgtatcgagtgtttctgtttgtttcagtgcttcataagcatccatcaagcattcactgaaaacgaacatgatttaaaattatgaatgggtttatacgatgcatacaacttggtgaaatagagtaggttttctatatatggttttttctgtctgacattatatcttcttgcatagaaacgattagcaaaagaagctcgtgctcaagaatt

SEQ ID NO: 4315 - DNA, 1672 bp, Medicago truncatula
  Intron number 1 from transcript Medtr6g083300.1 (locus Med tr6g083300) derived from phytozome v7.0 (chr-ID MtChr6; po s 16853894 to 16855565 reverse strand)
tggaacaaatttatccaggacatttcccccatgtaaaatttctttaattaagtttatggtctcaagtttggcttgaagttttctcaagatattaaggatcatgcatcatgcatgttgatcacatttcatcatagaaacttaggcctttaacttttatatggtggattatacccttcagtttaggggcaaatgaattttccatccttcccaagggattaacatgataaggatattgtttattgcagtaaaaaattcagagagctcatgaccaatacagagatcatgtggcagaccatgatattcattgtatggttcaagctctgaaaatgtactgttagtgtatagtatactccactaatttgtccatgggaccatgtacagaatctactggtatagataacttgcatacgtgacattaaatgccagagaaaacgaaggtacaatgacaggaaaatgacttaggttgcaaggttaatcatgttaatgtcatattttggagttttggtacttgagattcagtatgaacaatatatctgtgtgccaggaactttacacatgaatcagcagcgcccaattgaactgtaatgttcaagtgttacccttcccatcccaaaataatgttagaaagagattaccaatgtaggtacatgtcaaagtaaaccattttacaccgttattcaatcaaacttcacaacttcattcaccacataaccttgatcgcatgttagctcacagaatgcacgtagcgtttgtctgatcgcattaatcactggctgcagcaatcacacaatcggggagatcggacgggtccaaatctagactgtccaattgcgattaaacaaccactgcattctgtgaattaacatgtgatctgttgtaatttccttttttaaagttttttttttattctataaatgattcatggaaagtttgtctaaatgattacttgactagttcaatactctaactatgtcttgccaattgtcacttgtagttggatgatagtgagagaaagtttatcaaagtgagtagttcattaagcatttattcaccttttagttgggtcatgtagatttgttgtactatagcagttgggatattacatcatgtgatagtcctttcaaacctagctttgacttaaattgaacattttgaaactatcattttcgtttaataatttactattaaaaataaacaactaacaattttagaataaaaatacattcaaaattgtttaatcctttttttttagtgaaagcttgtttataaactcagacattaactaaagtttttaattcatcttgtactaaagaattttttttttaattcatcttataaatgaaagatgattaaagtggattcttttccacaatcaaacagcatatttttctctttttttcacatgctactacaactataaccttcagctttgtaaactttgttacagttttcaagcatcaataatttattatccctgcttccatttaatttatcaacaacagatcttaataacagtagtactatattagatctggtcacttttaaaaattaaacatttgtttgcatcaatgttctttctgctcataattaatgtttcagattttaatattaaaatttaaatcgatctcttcaacatttttttttattgaaatagggtgtgggaatcgtgtct

SEQ ID NO: 4316 - DNA, 2369 bp, Medicago truncatula
  Intron number 5 from transcript Medtr1g019320.1 (locus Med tr1g019320) derived from phytozome v7.0 (chr-ID MtChr1; po s 3854065 to 3856433 reverse strand)
tcaagatctattggtatgtactttgtaatgataaattttactttatttggattctatagaattacaaactccaacacaaacacgtcgacactgcaaatgtgaaaatataggatgttgacaccgatacatgcttatgtagtatgattaaattaaatatgaatgttatttataaaatatgtttgcatcaaaattgagtaaattgattaaaaaaagttagaccattttctctcttctcactttcttcttacaaccaaaccaagtcttagttagcatgatcactgaatgtatcttttgttatagtttgatctttgattgtctcttttatttgtaagtttattccattaaattttaggtgtaacaggttggtttggttagtacaaaataattggtttggtttttataatcattcctcacaaaattcggattaaaccaaatcgatgaagaaacgttggtttggtttggattaaaaataaacataaaaagtaactttattcaaacattatagatttttatactattaaaataaggacataaactacaatgaaaaaaaaattatatagaattgtcaaaaattacacgaacaaaacacatttttaagataaaatttaggtttaatttcactttttagacactcaactcagatacagagacgtgtcgtatgggtgttggacacagagacacgcctaatctcctagaggtgtttgtatctttgttttggtattcttttagtcagttatttagagggtgtgagatgagacactgtaagtgattcaaaggagagattagagcggtatctttagttctaaagagggattttgagattaaaggtatcttctataatctggtccagtttatatcaatcttgtgtactaatttccagtggcggatcttgagttatttttttgggggtgccaaatattcgtagaatatatattaatcagtttaaaaccattatcagaattatgagttgttttggtggtttgcttgcttgagggttacatggatgacctcggttcaactcaaaccaggatatccttttttaatataaaaaacattaaaaatacaattgaaatataaaaaagagggtgtggaaggagttgaactcaagccctcaagacaattggggggttgtctgaccactacaacaaggagatccgcccctgctaatttatagagaagttggggggtgcagtggcacctgtgggtctccaaggagatccgcccctgctaatttttcggaagtcttctagtgagagtagtttttcttttttttagggattctagtgagagttgttgattactcaacttctggtccagtttatatcaatcatgtgtactaatttaagggatagttgtgtactttattaagaaatgaatggtgagagtattttcttgtttttccttttaattaattggatttagtgaatgtgaggggaattacccccccgcaaatcacttttatgttcccatctgaaattatgaatcagcgggaatatctttccatttactgcttgttcatcatccttgaatggggaaaacaaatatttccattttgaccctaatttttttagagtttgaaagataacctattttccctttgtagtcattcttctcggtttattaaatatgtatcctgttgaacataaatgacgaatcttgaactataagatcatctcatctccactttattcttagtttttagaataccgcttcgcttatgttttgtttagttgagaccaaagatcactgtagaaggcaattgaaatgaataatttgcatttagatgtccaatttagtttgattattcctcagagtcagtccaaaggctgctagaggaaattatttagtacgatgccttgcgccccctcttttcacgtagtattcttctgtgttaaacatttttcattctattcatatgaaaagaagatttaggacttcttattggttacatcgctatcttaatatttctgatgatggtaactttgcacaatgttgagagtcttttggaaaagaacatttcaatggattgtcgcattctgaatttgctagtggttttagtaccttctacttctagtagcgggacaatattgagatttgggtcttgagtacaccgtagttctacagtgaatcaagtatcaagtttaattttttttatttgaatggaaaatgcacaaaataggcattgattttgtttgtgctacaattttattttattttctaattcaagacaatgatgaccaaacttgcttgtgtatgtgaatgcgagtcccacattaattgtgttttatttgttaggatataactatttctccttaccctcgttgtgattttcaggagacaggtatttgaaaccgtcaattattccggat

SEQ ID NO: 4317 - DNA, 2751 bp, Medicago truncatula
  Intron number 3 from transcript Medtr3g064560.1 (locus Med tr3g064560) derived from phytozome v7.0 (chr-ID MtChr3; po s 14761517 to 14764267)
gtggaggttattttaatcaaatccttgattttaatggtcggtgttgcatataactttggtttttgtccctctattcatcgattggtattctgtgatttacttggctatcaaaattgtgaattaattctgagattgcaatacacaaggaaataatataatcctgaacaagtggccgattttgtctcagtttcgttggttggttaatggtgtctaaaaaccatttttcgtgaagtgaaatataaatgctgcgattgcgacacataaggaaaacaaagttgcggtacatgttaatttttacattttttgtgtgtgcattagtgtgacctatgcgtcttccattcctaacctttcactacaagaaaagtaccctgtccctacagccattttttaaagcgggtagtttttaccaacggacatatgaaaaactgtcactaaaaccattttatttattttattatttctattatattattatataattattattgttatattttttacaaatagagtgagatttttttttcacaaacacgtaccgtaccattcacactcacacgctcatcaatctcaaaatggctttttcttcatcaatctaaaatctcacaaactccattgatctcaaacctcacaaactccattgatctcaaacctcacaaacttaagctgtatcgattccctcacaaacctagaaactccattgatcaatctcacctcacaaacctcatcaagctctgaatcgattccctactgtatcgattttcaaatcgattttgttgttcgtattttgttcaaattgatttagggatcttcaaatcgattttgctcttaatcgttctcaagctcacaatcgattctgcgtgcaatttggacgtgatattgaaaagctatatattcaagcttaagctgaaacgcgcgtgcattctgccgtcaaaacaaacacaacatcaatctgtatcgattttgttcaaactgtatcaatctcaatcgtcgccttcatcgaccgtcggaccgccgatcttcgaactcgctctggatcattttcaatcgctgtgagtaattttcgttctctttgttttaatttttgatatgaatgtggtaattaggtatagtgttgttattcttgaaattagtatacgtagatgtgtttttgaactagattttgggaaaattttgaaatcagttcatgtgtatgtgtttttgaattggattttggtagaattttggaatcagtttatgtgcgtgtgtttttaactgaattttgggaaaaattttgaaatcagattatttgtatgtgtttttgaacttgattttggtagaattttgaaatcagtttatgtgtatgtgtttttgaactgatttcagcaccacgtctgtgtcagcatatttgttaaagtagtgagagttgaaatccttgtatttgaaggacttgaaaattggtggattatgttcatcagtgatagcttgtgctggctcgacgttacaatcatccgaatgagctacaaaaaatgcagcagttgtacgagcatggcttgaatttgtcacagccctatgctcaacacttttacattgattttccacatataaactaactattgaaacatatacattattctgctcaattaataaggaaaacaaaacagaattcaataaacttttaggtcctatatactttttttctctcctagagctcgctcgatttggatgaacttgtttgtacctatatacaaaacagaattcaaaacagaatccagcagttgtacgagcttgtttgtttgtattatgagtgttttccgaaccctctcctagatttaataccttttagtggatcaagtacccccttgcaagccacatgaatatttagacctgagctgctggctgtggttccaaatttggaggcagaggagcaatagcagcagcatttgaacgtgtagaacggaagaggtctagtctacgacgtgagtgttcacacactaattcaatgcagttggtgtggaagactaaagtaactactaaaacgaatgacttgataatacaccaatacgagatccgggagacgattatcaacaaaagcgtctcgcaattaaaagaaactcttgtaatttgtcataccttagtgggggtaggggggtgttctatattttgttacccttcacaattatgatgattttagtacttgtattactgttccaatcattaatgatatgttgcagctcttcttttgtaaaaaaaaagaaaaagaaaaagggtttgtattctaaaacaacagtgttgtatgcatgtacggcatatatgccatctacagctacttgtatataatagttaaaaagaagttatatggtgctagattgcaatgaatatttccttcataaatatatgaatcaattctcacataacattcatgatatatttcatcttttatttaaaacttttgaagggttgtttatgcaccaaaaaacatgaatgagtctataaaaggaatcactctacaagcaaatttgaatatgacatttctctagtttatgcacttgaattcactataatgataaaaatttggatagggaaaacatatgatatgagtgtgtaaatcaaagttaagagctagaattggagttcaaaactatattcatcaatcattagtagcctgttacatatgtgaaaatgaggatttttctatcagcatcaatcaaattgattccagagtttatttctattgcaggttgctaagaagatttgtatagaagtcaagtcttc

SEQ ID NO: 4318 - DNA, 1239 bp, Medicago truncatula
  Intron number 2 from transcript Medtr2g038860.3 (locus Med tr2g038860) derived from phytozome v7.0 (chr-ID MtChr2; po s 10949925 to 10951163)
acagagaagaatattttgctgccaataacattgaggtacataacctaacctcaactcatctggtttatttatttaaccatatagatacatgaaatacttttcacatttctataatctcaatttctcaccttatattttcacattaaatatacacccgttaatattatgcgactaaaaagaaatgacgaaactacaataaacacattttaatctcttgtaatgtggcgaactaatgttcaaatcctgatcacaatgtttaaatggtaacgaaaattaaaggagaaaaagatacatgcacatgtggaattccaattgtgcacattacttgtaccaacgtactcttttttttcatcatgtttgtaccatgtacttagtacttcaattgtgtctatcatacatgcatctaggcgatctgaaattatattggttgtctagtttctggtagcagtcatatcatacaaattatagtaacatagaatagaatattgtgtgaattcacgtttgaccatgttttactttcatttccatgtgtccaataaataaatgattttataatttttacagttgctcattattcatgatctacatttttttagaggatttcatgacctagatacatacatttacattgtaaaagggcatatatattgttattattaatttatacctacttatatttatttacagctttcacaataagtttataaagcttttttaaaattaagaaaaagggtgagagattttagcatgaagatatttttggggatccaattaaattgtcggttagaaagttctaaggggtccctacattatgaggatgtcacaacatagttaacaaagaaaaattcactatacaaaacaaaacaagcctaactggctgtagggctatcatgcaaatcatgtgaaccttatttctcccaaacatgagcttctcatgccaataataattaattcttgctttctttttttatatataaaaaaagaaagaatataatttagatcttctagaatatcctctccctactacacataagaaattaacaaccattgactgttgtataatgtataccttttcttgcactaacaatgtcttgaatttatcttgtggttggtgagatttgtccctaacttttataatactgaataaaatatttcttttaattctttttgttggaaataatttcttttttttttttttttttttttttgtaaattagtcaacatccgtgggcaagaagt

SEQ ID NO: 4319 - DNA, 3720 bp, Medicago truncatula
  Intron number 1 from transcript Medtr5g014830.1 (locus Med tr5g014830) derived from phytozome v7.0 (chr-ID MtChr5; po s 4812415 to 4816134)
tctacaggtttgacattttcgattctctgatgttcaagatctgttgagatctgcacgtttcaaagtgccatgtctgcctccattgtggtacttcatgcttgtaagagcttcttgctttttgttcaaggagttgttggattttgataccttgttgacggtcgaatcatttgccatatttaaaccctaattgttcttggcagatgttcattcttcagatactatttttttaacctgctttcacgcctgtacgtgggttcgttgggttgcttttttaattagtgaatttttgttatgatagtttatgactggtccacttggtcagatttatcacgttgtatttctttttggttgtgcattggtcaggtctaatgtctccggtctcaataatatttctttctttttgtttaatattttttattttgcagaaaaatatattgataagctataagcccagaaaattaaactataatttcgtgagaaaagcaactgctaccaaacgaatcttttttagtcaaataaacttataagacataagatataagcttaaaaataggtctcaccaaatatacctttagacactttttttttaattgggacttataattagagcgtggagtatgtccataatttatcataaaaatttagagtgaatactaattatagtccctaaaaaattgtaagaccaatttagttaacaataaaaataaaagaaactcaatcttttgataaaataaactgagaccattcagttattacctgaagcatggaaagtttttattttcttttttgcgatgacatgtttcgaatgagatgataaagtcattgatgctaattaaaaatagataattaaacatatgccaaaaatttaaaaaggcaaattaagtttcatagcaacaaaacccacttggttttgggtgcgggtgcataggaaaatctaaaccatttttacagcaaaatgattttgacataattgagttgggatttatgcagggtgctggaaaccattaagtacatctaatgattttggagtacaactcaccataaccacagctcttggtttcgtccgctcccctttagggtttagattcgattttttttaatgtcaattttaatagactaatttgtgtgcttcaaaaaaatctcataactaaaaaaatctctaaataatatgttttttaatcaattacgttatttgttaaaaaaaaaaaaagcactttccgtctgcaactagagatattacacacacgtgcgaagactaatatattgaagtaaatgtatatttgttcaagaagttgattcgatcagaaacgaactctaaactatgcgattaagaggataagtattgatcacttttttttttctctctttcaaaaatcacttatgttacattatgatggtgatcggctctttttaatttaaagaagaaacaacacttgtaccaagcaatcagtttgccaacaaggaagttatgaattttttacagaaggaaagttattaattaatcaactttggtgtatgtcattagagccgggatgacggatcatatgggtccatgtgatttaaatttgatagttgcaaactaattaattaatttacgaaacagcttggacccaccatagattttgtgatctccttgctaatctggtaatcgttttaaaatagtgtacatcaatttcttctagagctgtggtctgtggttgctatcctttcccaaacagaccttgattattaaatattgtgtttttaaggcacgactatataaacaagaacaaaaatgcaaaatttatgggtagatatattgttgatggttatgaatatttttatacagaagatgattgattaattattaatgatgattattcatatttttaaggaacaaagttgcgtagtttggccctctctgccgttctggtcataccattacgaagaatggcttaattagtatttattttccttgaaaaaaaactccattattttttttaaagaattcaatttgatgcaacgtgttaagagttaagaccgaaagtataaacgaagaatttagatattaattaattatcagtgatggatctgtataaataaaaaaatattttaacataacaaaagattagaggttcgatttcggacttatatgagaactacgtacatcttatatatactgaaaaacttcatgcgtataacatgttacataaattctctctcaaaaaaaaaaaaaattgttacataaatattaattatttaatgtcaaagagaaaataacataagtatatttatctaggtgataaaaaaaaaaatcagaaacatgggttgggaccattataatatatttttttataagctcttagaccataattacatcaaaactctacgattaaaataaacaccagcaatacactaccataaaaaggtaacacgtcctagaggaggatgagtgagtaactgggaactcatggataacccgtagtgacctaatttgtctatttataaatacgtcgaaattggatgtatcactttgctttgtaaagcgatataatattatgttatattgacgaggaccaatataatatcaactaaaaccattgaaaaaagttaacacacctaagaggatgatgggtgagtaatgaaaactcgtggattaatagagagcatatccacgagccagtgacggatcttcatgggatcccatgataatcatggctcccctcagatatctaataaatacaagattaggatgctatttcattgatttagcatgtgtcgtaagaaattaaaggccttttgtatcgtgaggccatgagtttgagtcctcatgtctcctttttttgtttttataatgcatttttatttttataattcaaaccgagctaattccaacctactttgtttgtctataaatatgccgaaactgaatttgtcactatatcctaaaacggtataatatcaatgttaaattgacgcatcctaaagtgagagtataccttaaaggagttccataattttttctaaaaaaaaaacggtataagaaaatttcagcactacaaatttgacatgttggttcctgtatgcaccgtcaactttctgtccgccatatatcatgttctttagatcttccatcaaatggttaagtcaacaaagcagctttaatggcaaaaaggttacgaattaaaaaagatgatggagattggacttaacaacttcaacaacgattttccgtccaaaaaataagaactttgacaacgatttctttcatagtgataataatcatttgaactttttgcattacctctttccaaaatctacttctaattaatatcttaacaataatttgttattttttaggatttactttggcaaaaataatatgtttattttcacttaccattatcttttgttgctaatacacttatctaaatgttgtataaacatgaaattttgaaacatttgtaaacatgaaactgtttttaatatttcttttataaacgtctatgttctttattctcaaaaaagaaactttgttatatttatcaagtcttacgaacagtaacaagtgtcctaaaaggtttgtttagtgatttattatccataaaacaattatttttttaggggatccataaaacaattatattgcttttgatctttatcaataaatctactatggttaagtgacttatttgggttaaaactttctctatttagtgcagcgtttacttcatacagaat

SEQ ID NO: 4320 - DNA, 3850 bp, Medicago truncatula
  Intron number 1 from transcript Medtr4g100960.1 (locus Med tr4g100960) derived from phytozome v7.0 (chr-ID MtChr4; po s 21726083 to 21729932 reverse strand)
gaggtatttttctcactccactcttgattataggcatatatatatatatagaattataatatactatgtatcaatcatgttttatttatttatactacttgaaaataaacttactagtgaggaaaaacataaaatcccatatgaattcatttttgttttttaatttttactttgtcgttaaattttcttttttctaacagtgacaatcaataagcttgtagaaaatagaggtgtttcttcaactttgaataaaataaagtaaatacaatcaaccattgattaataactgtattttctcctttacgctttataaagtcaaatactagtaaactatctcattgaaatatgaaatcttaacgatcaatgatgtttcataatatatgtattctcctctataattgaattaacctttcttaatctaccaatttatgaatgattgtgacaatgttggtatatgtgtatatagtatcattatcgatttgatcatgactaccatatgtttaattatttaaaaaatcgtttgaaggaagaaaaaaaaaaaaccctactaaaaacaattccagatcggactagcaaaagatagatatggtatcatggtagtaactaaatataactattacttgtcaaaaaatctataactattaatatttgcataagtgcgtgaacaaaaattaatatttgcttaaaagaattagggttaaatatgtaaatgagccctttaaatataccaacatttaattttaatctctctaaaatattccttatgcttttggtccatctaaaaattttcatatgtgaaattagtccgtgctctacattaagcattacactagagcagggactaattttattgatgaaaaattttagagggaccaaaaccctaaaaaatattttagagtaactaaaatcaaatgttgatatatttaaagaactatttacttatttaacccaaagaactataactaataggttgcaagttgaagtgtaagaaccaaacatcattttaggtgtaaaaatgtgagtaaggatatataaatatatgatcttaattagacactcgtattatatatacaaagtgatatatataaatataaagtgaagggttacggtcatgcatgcatttaagcctatccactcacatgacatggttttccaaaactcttatcatattgagctacatgccacaacttgacaactcacaaattcctaaattggcttacaattttaaaccatgggtttgttggaagaattgtaatttgtaacgatttttcattgtgtcattgtcaatagtgtttggcattattgtatagagctaagagtgactttcttatatcaaaatgtgtaaccaaattgcccaccgcatccttttaacaattttgttgctctttctgtcaaataataattgttacatgtctctttcaattttcaaaatatagaattagaaaagtcataagatgcaagtttgcatgtacaaacaaagactaaatataatggaattattatggccaagcatgcgggtgttgggtatttgaccaaattcttagtctagtggcttcaacttgcagcagaaacagccatgatgaaatttgatacaagtaataaatattgctttcaacccaagttataacccctttaatttcttttagataatgctgctgatagcaacataaaggaagggaatgaaactttgaaataatgtccataaattatataaaattttgctttttgatattaatcgcctgttctatatatgataatttatctcaaaaataaaagttgatattttatttccttaaaaaaaattgttattttattgtcatgattgaaacccgtatccttaaaacattattttatatctttcattaaaaaaattatttgtataatgtactgtactgctataaatttaaatattatatatatatatatttcattgactattgttaaattaatatgtgtctctaattgaatcctacttagaaaatgtgtccacaaaaagaaaaaatatatattgacaactatgataatcataatcatagaatacattagtacaacttggtgaaggttgttgaaatgatctcaacagcgatgtgtcatgtgtgagtgtctattctataatacttctgcatttttgtattttttttaatcaattaatgagattacaaaagatacttttaactcataaacataaagattacaagtttaaatgttatgcaaacaatgtccctaaaagagaattttgatttgagtcaccactttaattgggtatgctatttcatctttaaagagtattttatttctcatatttatattccacgaggagctcctcaaattagtattgttgattattttttaaactatcatatgatgctagctagtaagatttagtctcaaaatttctccatttataaactttatgtcattttcaaagttagttagttttagtttttggcttgtgcttaattgggcatttaattaaactggtcggtctttctatctaattatagtttgaactttgaacaaaagttagaaagacaaaattgcaatcaaattgtagtgtggagacattttactcatcaagtttaatcatgtccactaaatttccggctagttcttaaattgattagttcgttaactcattctcctaataaagtagtaatcatgaattggacttgggcaacatgacgtgtccccatagttggcccacataaaacccagcttttcatcttttcacaataaaaaattcagcttaagatgagtctacgcaatcccaaagttggaaattctcagcaaaatgatatcattcaagttcaaagtaattattaccctaactacttgatccacttctataaaaaaattcattaaagttttgcttaccaattataaattgattcaagtgataactccctctgtccctgaataagtgatctatttgactatttcacacagattaagaaaaatgtaaagatgaagaaaaaaaagatatttttactgaattgcccttattattatttttaaaccttcattttaaataataattactttaattgttccactacaaacttttactgcaaccaatgaataaaactttgctatacatgccaaagctacgtagctgtcagctatcagataccaatatgcctatgccatgaaacttgtagcaataaaccaaattctgattggcttagttgtagcgtaaaccaacctttaatgcaccaatctaaatccttagccaaagttctgattgctttacgtgaagtagtaagcatgtttgtcactcaatggagctgacacactttttttacatggagatcatacaagcaattataagggataaaattgtcaaattttgctttaaaatttgagaaggtcaaatattttgcgacaattttttttacaaatatgtcagttattcagggacggaggaaataagtgattaatagtttgatcctaactcttgtgtatagagaattctctcaggtcgaaacttggtacaaataatatggtaaatatttgcgtctttattgacgctaacatgtgtatatatatacaactaattaacgttattgttgtagtttgtctgtaaggatattctatgtagaatttttggtttgaatccggtcaccacatttcctgttcgtgtgtgtttctttgaatattggttggtcaatagaccaataactaataaaaaaaaaatataaaagtactttgtaaagcctaaatagtgattgcatgagaaacaaaaatatacaattagcaatacgaattgataactaggtctgagtgtgacataaatgtgcattatagtaaatatgtattaatgtttcaggccctggttgttcttcaattggct

SEQ ID NO: 4321 - DNA, 2892 bp, Medicago truncatula
  Intron number 11 from transcript Medtr3g025510.1 (locus Me dtr3g025510) derived from phytozome v7.0 (chr-ID MtChr3; p os 6611347 to 6614238 reverse strand)
ggatactcaacaattaaatttgaaggttcccaaagaaatttcaattgatgatatcaatacctcttaaattctaaaatagtggagattgaaaatgcttcattttttaaagatcccggggttttcgagagtcgaacgctaaaatgtgatcaaccaaattattcaatgtattagcagattaacaagcattgaaagtaaaatatttattttcacctgaagttattcaaaaaattgagacagtatttacaacttatgttatcaaattgatttcctctttaaaaataatttagtaggtgcttgtagtgctttctatacatgtaggtaaataatatgtttctatatttgatagtgtttggagttattgtaataacagatcagtgccttgtttggaaagattccttgctaagctagctctcacattttaatttgtatctctatcagaatagaaagatatatgcatccactttcaaagctcaattgtagtgtagtgtcatgcaaggataatattttagcaaagataaaattaatgccattgactttggacaaattattaaatgaacataatacctccttgaaaattgttgtttacactttgcaccaagctaaggaaacaccatgaaatgacaaatttaactccaatttccatcgatagttaactaccgccggttaaaatccatcggcagttaactgtcgatgatgttatattggtaatttcgtgatgtttcctagacccctttgatgtgggaacaacaattttctacctcattttatagttaaacggtccatttaaatgaaaggataatttcttgccactactattccattccaaacctatatgattttcattgcttacattgattctttagttttgtatctttttataatctatgaaattaagcaacaaagattgagaagaagcaaagggtgtaaaagcaaattaaaattgtgtttgaattagcatttgacaaatgtgatgattttgaatgaatttgattttataaaactgatttaattaaatatgaattttacataaagttatctatgttggatattttacactaaaacatgtttgataaatctaacgaagagttagatttatttacttcttggcaaactaaggtttgaagataaaattaattttaattcaaagtagccaaatatccacaattttcttttcctgaaatcacaatcaatgaaaagcaaaaccaattttgatgctctatctgaattaaaaaacaccaatgaaatcgattgaaagagaatgggaaatatattatcacatgtacacgtgtgtagggtctattcatattgtcatgtacacgtgtgaaatgaagtgtgaagttattaatagaacgtatctagtatctctctagtagtctaatgcaagcaacatttaacttctactaataggtattcctcattgttaattaataaggaggttggcatgtcattatcaacaaattaaaattggttgaatcactacttcttcaattaatatatggtaactttagactagtatgttaagtagcctagaacagtggttaatgtaaggccaagtattatcctaaagaaattgccaactgtccttgctacaacaaatggtatatatcaaaaggaagttgtattttcactagttagggttcttttctttaccctttttatttttttttttttttttttgctattgaggtttacgtaggagtaaaaagggtatgattttgatttgataatcacttttagagactatttgagatgtaacaaattactattagtgtattttctcaaataaggaatctgattgtgtataattggtggaccatattaagaaagtgacctaaaaatggttattccctcaaaaaaagtatgtaatgaccctaaaaaatgcatctataagaaatggtagatgttgggatgccttttgtattgtgttctatgctgtgtttgccttcttttccctatctcttcaaaatgtagagttgttagtaaggctaatcgagtttgaaaccgaaacctcgtaattatgtgcaagttttttgatggtatttaccgcttcatttaagtgacttaaagttaaactatagtaaataaataaaataatatttaaaaaattgattgtagtgtaaattgattcaattgaaccaatggttaaatcaaattgaaccaacctatgaactagttattctcaactcatttggttgaaatatctaatttaatcctctttttagtagaataatttgatccttttctttataaagaacttaatccaattgttaaaacattgattaaaataatggactatttgcattatttaattatatatattctcatatcataatgtgctaatatttttatattaattacattagctctcatcaattaagatttttaattgattagcgatcaaattagctaattagaataattatattacaatttggacaattaattaattaatcaatataaactcgaatatgatcttagaatgacagtttcaaaataatgagaatcttatttaatcatcacactttatataggtcatcatccccaatataccatacacaatgggtattacctcatctctctataagtctcaatgacattacgagtctccttgaagaagaatcatacgtcaatagtgaacgttactcattttttatatttttgtgtttcaaaaatattcttataatcatcgaagataaatatgtcatagatcctaaaattgcatacattatatactcatttgtttatttggctttcgtatgattgaatattgattgtagttataatatgtgtattgaacatattatgtattgattattaggttaattctaacataaaatagttttaatattttctcctccatacatttcttttgcttcataaaaaatataggaa

SEQ ID NO: 4322 - DNA, 1275 bp, Medicago truncatula
  Intron number 7 from transcript Medtr4g114600.1 (locus Med tr4g114600) derived from phytozome v7.0 (chr-ID MtChr4; po s 26259505 to 26260779)
ttgagattttcaagcaagctcttgttaacaacaaagtgagttgcagatagttaaatcttaaatatgtttttgtccctggaaatgttctagttttttgttagagcgtaatttttgttgccgttgtagtccttgaagcataggaaaatatgtttttgttccttgttctgttgatttatgtccctgtaatgtttactcacggtggtcacagtcctctccctgtgatatgtggaccatattatttgtccttggaacatggatggtagaaagattaattccaacaagaacaaagattatacgaaccaaacccaaagtaacaagtacaaaaagaaacatcctaatattttacattttagggactaaaaccaaaaacaaatacggaaaccaagagtggttactggtatattcactgggacagaaaatgtctatttaagctaatttgagtgtcatctacattttcgaatgtatcatagtttcacgacttgattgtcagaacgctttacaaacatttccttttccctatcttgagctgaacatggaacttcacttactgtatttattctcgtggtttaaacattattttttggacgggtggggggaaaggaggaggtttcatatgcttgaaatagatagcggaaattaatgattttttcaaattccaatatgctacagcgtcactatttgacaatattttgtagtaaatagtgtatcacaataatagccgctatttgacagcttgaaatacattaatatgtttgagatacacatgttgctattcaagataaagttatctattggtgtgtttgctttaaggtttataaaattattcctagaaatgtgagattggaaatacgtaattcacatgtttgtttcaagttttaaaaaattattctccggtattttttattccaagaaatgttatttacacattatttctccactttttattcccatgcttaagagtgggaatctaacattcccatgggaataaatattaactaactataacttcccactaccactcacattcatttgtattttgtttttgtttttgttatattttttaaattaaacaaattttaaaaacattcgtgggaaatataatttttttaccatacacatgagtaggaatgttattcctcggaaccataaaaagaatgtaatttcaagttatgaaacaaacacaccccaggctattcactttttttctttttgaaagaaataggatatttacttgtatgtatcttaatttagattggtgtgatatccaggttaatc

SEQ ID NO: 4323 - DNA, 1161 bp, Medicago truncatula
  Intron number 2 from transcript Medtr7g105440.1 (locus Med tr7g105440) derived from phytozome v7.0 (chr-ID MtChr7; po s 24152406 to 24153566)
caagctcttgtggaagttccttttctcctcttcgggtaagaaccatagctttgatgtgttgtttcctttttcatttctttggagggaagctgggcggataataaatttttgcgtgaatgccaagagagagtagtcaaagtagtatagatttgtgatactgagtaagtaaccatcaacatcttaatttaatttattcaaaaaaataaaaacatcttaatttaagacaactgttttaaaaaagaaccgaatttcaactattccacggttccttcactaagcaaaataaccagggagtagataattgtagattattctgtctttgtttaaatcggatatataaaggagtgtggaaatgaagagaaaaatgaatggttacattgcacccacaattagtcattgttgaagtgttattttaagaagctccgattcaggtctgacccttccctgcaccttgacctgatggaagcttaatagcattgtggtgttctttttatttatttattttcattaagaatactcttagcttttgttctgtccttcaattgttttactggaattgaggtgcagttgtacaaggtccttccttttcttcaggaaataataacaatttctcaattctcacaagatgtccagataatttacatttgtcttgcagttaaagtattttcaaccgtgattgatgaactctgttgaatagtttggcttttgtttgggactaacaggcttcaaattgttgaaatattataacctaaaacttcaactgaaaattcggagttgccttttccatgaaatggtgcataggaaaatgcttgtatttcttggccaagataaattttgaagtaggctctagtggaagtgtggttaccatgactatttcaaacaagacctgtccaacgcttaagcttggcctgatttaattggaatttgacctgttgttgaacctagttgttcagagtctgaaagactaaggctctgtcaaaaggctgagcttaacccagaatagataatataattttttttggtatttcaccgattcattacttgtttacttcatcctctaacatcatatgctcttatttgacataattattcgctcttttgttacctaaaatttattggatatatcaaacaatgtttttatcacattcttgcaggttaaca

SEQ ID NO: 4324 - DNA, 1509 bp, Medicago truncatula
  Intron number 2 from transcript Medtr2g006540.1 (locus Med tr2g006540) derived from phytozome v7.0 (chr-ID MtChr2; po s 686432 to 687940 reverse strand)
tgaggaatctgcagaaaataattagtctgattaaggttagtcaccttgaattcttttacctgctgtttaatggtgaaagcaatggtagtcctgttttttcttgctacatattacccgtttttgatatgatagttgtactttttttcagcagcaatacagtgccgagttcattgttaaatatacaagttaatgtgttaaataagtgatcgctttgtacctttgtatgagatttgaactatcaattattttctcaaaaacaaaaacttgacgattctttttatagctggcaatggaaacatttttcaaaagctcttttgagttcactctactgctgcattttttttattgatttgtagttttataccaggagattgaagtattttgggtcattgaaggggagttgttaggttcatatatttattaaattagatactttgccacgtttactaatttttttgagaggttggtggattttgcaaatagttggagttattgaattagtcttcttgtaaatgtggtaataccgagactatctaatgggtctgatctttcccaagaccccccttatgaccgtaagttgtcctaaaataatcttaggatgtaacctgtaaatatttggtttgacaggagtattgaaggaagtacgaaatgattgtatatgtatgcgtttaatgtaataaacatgagcattttcaaccgttttaaatgaatataatccccataatattttatgatattgtgaaacttattagaaattaatcatatttcttcacaaccattcatagcatgtatattatattagaagggggtataattctaatcactactgcttcaaatctccattaagattattacaccccataaacatgcattaccaagtcctaatcactgataattcacatatgtcaaaccaccatagcatgatcatacccatcagatttctttgaactcactataattatccttaatgcatgttatcatatttcttgtttccttcacatctttgtgcataattacccatcagatttgaagcagtagtgagtaggaataacaccatttaaagtgacattaagattcaaatcttgtagtgatttgaaaattcttgctgtgcattctcaagttcacaggagttattttatatcttaatactacagatgtagttgtttttatattgaaaatgaaggatagaatattgttctggacatgttggactcttttatgtttattgtattagaagggggtatagttcaaagaaactccacaaactcccctagaatctccgcaaataaaatgactaacagattgatgacaactactaagaaatagacatgaaagagaattatagttttccaagttagccaagcgatctgaatatttgtttggttctttgaaagcaggcttaaggataatattgacccaatgtctcttacaacggtatggcaacaatgaaatgggcagaattctaaaatgaatgttgtttttgcccccaggttgctcaacctcagaaaa

SEQ ID NO: 4325 - DNA, 5999 bp, Medicago truncatula
  Intron number 2 from transcript Medtr3g037080.1 (locus Med tr3g037080) derived from phytozome v7.0 (chr-ID MtChr3; po s 9952785 to 9958783 reverse strand)
attgacacttagtaacatattttgtccagacattcgtcttttttcaaattttgaagccctatgccaaaggccttgatgcacttgcatatggtcggcccttattcttttatcaattttatcataaatttgtggatcaaaacaactctttatacacaagagcaactagatgtgattgtaaaaggtctcttcactttaacaagagggtttgagtttgaatccaactcttaaaatacaacaatgttaaatctcttgaagaatagttttatgagatattattgttctatccaacttaaagtattagtctatacaatgcgtacaaagatcctcaatttaaaaaacaaatcaatacactctttatcctctaattctaactgtattctactttttttttttttaaagaaccgtattctattttttaaaagattgtattctactttgttagtttaaattcttgcaatatatggtacgtaatggatattaaatttgaatacatcttttagatggaattcgaatattaattcatcacgttgtgagagcttgatcgatcactgttgttgaacataaagggtaaccaatgagattaagtctattaaaagatactaaaaactcttacaatatttcaatcaaagtttaaattcaaataaaaaatagtatatttaattttcaagcaaaatgtaatgtttgtttagtcaaagaaaattaaatttaatgtttaaagtctattaaaaggtactaaactcttacaatatatttaaagtttaatgtttatttagtcaaacaaaattaaatgtgacgtctatatgctacctatgtataacggtacccctttttcaaaaatttgacatccgtctatgcttgccttccttgcgttttcagatggcgtaccaaataattttttttttgaacaaataaaaatggaatatattgctcaaatggacagtgaatcaccctgcaaatcgtgtactaaaagtgatgaatcacacaatatctgttacaagatcatgacaccaaaaatcaaaggttgcctccaccaaaataaaacaaaattacatgacatccatacataacagcggatgcctccaccaatcgtgaaagctaaaagcaataggaacaacatttgtggagagccataaaaaagaattacgctttactcttttagttatgttgtgaggatcgatggccgcatttgtaaagacacggttgttcctcgccttccaaattacccaataaaatgttagccaaattaccttgaaaaaaacatatgaagatcgcggcatacccgccaattgagtaaaatggctagtaatcgaaccaggactaacaaaagaaatcctgagccaattacatattaaagaccaaactctcccaaataaattacaagcaacaaacaagtgatccaccgtctcggagaagccacacccactgacgcacaaattattgtcaggttgaagtacctgtccacgcaccagatttgatcttgttggaattctgtcttgaagtattcgccggcaataatagacactttagaaggaaccaatttatgccaaacattagtaactgctacaccattcaaagattcatcagctgatgtgagaaaccaataagtcccctgaacgaaatagccatgtataggatctaacaaccacctccaaaagtctaatctattaacgtaccaaaaaaatcgtagttaattatttgtcaaaaaaatcttaattatttatttatgttcttcttttttatgttgtcaaaaagaaagttattaattttttgtagtccaagtgtttttgcaccccaaacaaaaattgaggatttatttttccttccactattcttaaaaattcaagaatgtttctgaaagtataatttgaactttgaagtatatatatatttttaggatgtttcaaatatatatttttgaaaggcttacaagcttctttttctttttctttttttgtaccaaacacatgtaaggagtgaaagatgctccaatattttttgttgaaagtccagtttttttttagggtaagtaggcccagttgtttctctttttctttttaataagcaaaataaatggaccaaaaacagtactgttgtcggttcattcacatgctaaatggacaaaaatgattaattaaatggacaaaaacagtcctattttatttcttttataaatgttattcatggacatttttataaactcgcggatactttaaatattattttgttgttattattcttggttatttattgcaaagaaaaaaatataaaatgagatattaaatgatgaaagttattataggaagaagataaattgttgtattaaaagtagtaaaatgtatttgttgtcttggtttgtataaaaaaactcaaaaataacaattaaaaaggaacggatagagtatgatattattgcatggccccaagacaaaaacttggtaaagtacggagcaaagaaagttaggagctatggtaaatgaaccgacaaaagtactctttccacatgcaagttatttaacaaaaaaaagaagcagtttgattatttttttaaaaataataattaatattgaattgaagagtgaaattaatcgattattttataagaataatttttttttacagaagaatcacttattaaatgacgaacagagtatgtccaaccaaatggaccaaacttccttgtcaacacatgaaaattactacaaaaacacataaacatgaattttcccttttcaattacattctagtttagaaaagaaattaaaaactaaattttacttaaaatacatgagtttttctattcacaccccatgtttttttggttacacccaaattttcttaaaagttttttataatatcaaaattgcccttttatataaattttcttaaaaccctaattttattcattgtgagtttcaccccacaatcgatcaaacaatttgatgttcaatatcaatctccatgaaaattaaagagtgaatcaaaatatttttcatccatactcaattggatataagtaagtgaatttattcttctatttgctagtttcaatttttttccttcaactgcactgatgcactgtacgattacggttttaatttacatcggcaaggttaacttaaattcagtttaagtaggttcatgtaaacctacttaaattgagtttacatgaacctacttaaactaagtttacatgaacctacttaaactgagttaacatgaacctacttaaactgagtttacatgaacatacttaaactgagtttacatgaacatacttaaactgagtttacatgaacctacttaaactgagtttacatgacctacttaaatttaaattgagtgtacatcatctaacttacataaactgagtttacatgaatctacttaaattaaatttacatgaacctacttaaactaagtttacatgaacctacttaaactgagtttacatgacctacttaaatttaaattgagtgtacatcacctaacttacataaactgagtttacatgaacctacttaaataagtttacatgaacctacttaaactgagtttacatgtgcatacttaaactgagatgacgtataatcattgaataagattgaacttttagatgtacacttaaactaagtttgcatgatctacttaaactaagtttacatgacctacttaaacttagtttacatgaacctacttaaactgagtttaagtttgtacacttacttaaatttagtttacatgaactcagtttacataacctacttaaattcagtttacatgaacctacttaaactgagattaagtatatacacttaaacttagtttatatgacctacttcaacttagttttagattaaattttatgaaagggtaatcttgtcattttggagtgcaaccatgattaactagggtgcaagtagaaaaactcaaaatacatttgtgcccccttaatatacatcattaatgatgttgggtctctattttcaaatatgtaattttggtaatgaatgaatataagaatttttctcagttgttaatttggaatataaaagtgggtgatgtagcaactgagatgttgatgtttagttgcattaaaactcatccatgtattttttcaacaaaataaaacgtcatcatacatcatgttgaggggatgcttgtgttgtaatttgtgtccacacatcattttcctccaatcttaaacacatgaccatcccaaggtacccacttaggaagaaaattcaattggtactccaccgttttaaaaaataagtaaaattgattttttaagtttatttatataatgatgtatgtggttcataatatggaccacatacatcattaaatgaatgaacctaaaaagtgaattttacttatattttaaaatggaggaagtactaaatgatgtttaggtttttaaatacattacgatgtgcaatgatgatgtcaaaagttagagtttttctattcacaccctatatatttttggttacacccaattttttaaaaaagtttttgataataccaaaattgtccttttatataaaaaattttaaaatcttgatttcattcatcgtcgctctaaaattccactctctttcacccaccaacgatcaaacaatcctgatgttcaattaatctctatggaagattaaagagtgaatcaaaacatctttcattcatactcgattgcatataaataatcgaatttttcttctttttcaataacgctggtttcaattttcttcttcttgttcaactgcactgtacgacagtttcagttttacattgttgaggttaacttaaattcagtttaagtaggttcatgtaaacttagtttacataatctacttaaacttagtttacataacctacttaaactgagtttaagtatgttcacttaaactcagtttacatgaactacttaaactaagtttacatatacatacttaaactgagattacatagaatcattgaacaagattgaatttttaaatgtacacttaaactcggtttacatgacctacttaaactgaatttaagtatgtacacttaaactcagtttacatgacctactgaaattaagtttatatgacctacttaaactgaagagaggttttagggtgtaaccaagaaaaaaggaagatgctttttgaaaattaaattttatggaagggtaattttgtcattttagggtgcaaccagaattaaatagggtgtaattagaaaaactccaaaagttatcacactcttactaaattaatcttatttattttttgtttatttctcaccattataaatgcaaagtgttatatacaataaattttttttatcctctcaaaaaagatataaaaccaagagacagtaatattttagatgtagtatacacaacattaatttgagaacatgattagaaacataaaattacttattcattaaaaaatgtaaataatgttgattttaaaacaaattattttgattaaagtgacaatcattttaaaacggattccgtatttatatatatatatatatatttttttttttttggtacaaaaccgtatttatatttctaacgttgacaaactaacagaaaggactgaatgtagtaacggtgagaaacttagaggaccgaaataaatcaatttttagttagagggactaatccgataccaattaaataattagaggaccaaaagtgtaatttagccttaattttattccattaatagtaagaatttaatggaaaaaattaatattaaactacttgaataataaattaacacaatttccaatacacaattactattagtagaattcataacatatgctctaagagcacaagttaaaatttcccttaatattataatcctattagttgagaggtagttgagggaatgtttggtttttcactatttttcaaatgacattattcaataagttcaacctaatcaattgcattttcaggaagaggtaacaagattggtcaacaatttggcaag

SEQ ID NO: 4326 - DNA, 1252 bp, Medicago truncatula
  Intron number 23 from transcript Medtr2g033780.1 (locus Me dtr2g033780) derived from phytozome v7.0 (chr-ID MtChr2; p os 9321765 to 9323016)
gaatttcagcggatattggagcttaaggttataattacctatttcttaccagttctctattaaattcttcagtatgtggattacttgttgcattatttttttgttctgctggacctctggtatttgaaataaaaactgccagggctcttttatttaacataggataagattttatggataggtcaaaagcacttgggacaccttaagaaagcagtgatattattctgcaaacttgaggagcatagcacaaaaacactttcaaaatcctctctataaaaattagtaaattcttaacaaattcaagcaggtcactagttctgttgataggccactagttcattagcacgttattacatgtatataatttaattaaaatgtttgaagaaatattaaatccgacaatatgaataaaataattgaacacaaataagaacttcaaaaaatagaaatgagtaaagatccttcaattgtttatattttgtttatggttgatattttaatcaacgttgtcaaaattgcgtgttaaaacgttgaaatgtaaaatcaccctattttatgtttctaggtgtgaatttcgtgttaaatcggtggtgaaattggaattgaatcttattttactacgagttaactctataacatcggttaacttttaacaactttagaaacttctaaaattctttttattggatagttttttggattttttatgatttagtgggataacttatgtatttgatacacagacgttttattacggtgatttggtatattttgactttagaattaagttaatgttttgaattattgatgtatttatatcattatattagtatatatatgtcatgtatgtgatttttatttttgatttggtggtattatttatggatttcgatacaaatctatgagcatgacattttattgtggtgatttggtatatttcggctttataattaacttattattttgaattattgacagatttatagtattatattagtatatatgtcttgtgtataatacgtctaatattattttaagtttaggtagtttacgagtcgatttcacctaggaaaaacgagttgaggtaaaaactcgagcctgactatcttgattataatgctcatatggtttttcatattcaaaagcaattgagtgcatgatttgtaagttatgcacctctgcttcatgttggcatgacctattccttgtgttttcagggacttaaaaaagctgatcaacaaagcatactcga

SEQ ID NO: 4327 - DNA, 2930 bp, Medicago truncatula
  Intron number 1 from transcript Medtr4g104580.1 (locus Med tr4g104580) derived from phytozome v7.0 (chr-ID MtChr4; po s 22888487 to 22891416)
ctttggcaggtttgttttacttcctaccccatgaaaatcacaagtcatgaaaaatatctcttgcattctatatatatgatttttatttttatttttaggtcattcatgttggtttttgtactaaataacgcacttcaaattatatacatatatatacatctattctctcttaactatttgattaaaaaataaataaaaactctatatctcttttttactaactacattatttttaaaatgtatacatctcttaaaatgaactaagtctttttttaagcaaagaaaatgaactaagtcttctctatcatcttgttcccttttgtatattgcaaagtggggtgagttatataatattcttgttgctatgaggggttatgtgcttcaaatcaccctataactgaaggaaggcctaagtaaacgtgattactgaagaaaaaagaatatatacaaagaaattgattagagaaaatgtatctgttttttcctccatggatgaacaaatgaaagcaattaacaggaaagagacgatgtgcatgtttgatattacggtcagtgtctaaattaagataactgtaatttatttattttttagggaagataactttaattttttagaacctccaaaacatagatttggcaaaattacaatatctcatcaaaattttaacaaattcactaacaattgttgcaattgttttcttctcacgaccacaaaatctatgaggattgttatttggtgtccgaaacaataatgttatgttgacacccttttttccctacatctcatgtgaaaggacattttaataatttcacaccatgtaaaagagagtgttaggtggggtggtgagggtcacatagccacgtgtcacatttatgtgtgtggtaaaagaggtatgtgccacctatgatggtcaacgtatcaccactctatctaaaagcatttcggtacaaaactaagctaatacaaagcggttctaatttttctttttggaatgaaaaaataaaacatattattttgggtgataaaacaaaactgagtttacttacccaactttccggattgctagtgttcatcctctagaaatcggatgattaacaacaacaaaaaatgtacaaaaaaaaaaaacaacatatttaagtccaaatattttttgtaatgttttgaattgtataaaatctattgtttctcgatcgttgttaagtattaatatttttaaaatattaacatgtgttattagagcacttgttaatatatgttattagtgcacttgttagcatacatagaaattttgtcattttttctctaaccatttgttcaaaggattcaaacctcttgtcaccagaagcaatccattaatgtcggtggttgattgacattctattcgttggttcacttgaaccatttccaagccaacatccatctaccatcaactcatagttagatatgttgaaaaatataatataactgaaatggaaatggaaatgttaagcctcccaatttataattatggcttttactatatattttttattctataacattttattattatatttttctacataaaagaatagaatttatagctttatatttcatctcattcatttttaaaataatagaatgataattttgttaaatttcattctaaaattttgaaataatatgactaaattttttatttcataaaataaactcaaaggttttttctagattacctttgaagaatggtgggtaatttacccactaaccaatgaaaatgaacaatttgttggtggggtcaagatagttcatggataccacttaaaaatgtgcttatatggctaatgtgtattagttggggtaaattacccaccattcttccataggtaccctagttgtcaccaaaatcaaaatattgttttatttcactttcttctgccgcatttttttatctttctaaaaaccattttcaaatccacaccttaatttattaagaacaattccattccattttattccgttcatcacattcattttgctcattatagtcatttcattatgtccatatttagctagaaagccattttattttttattttttattcatatattagcttttgcattcccttagcattttatccacagtagactagattaaaagttcatactaaatttgccggtacaaggttgaaatcaaatgatgtagattcatcatcaaatgtaaaatgatgagcacatgaagccattaaattgtacctgcattactcttcaattatttattttcttcaaaagaatggagcaaaagcatggtattttttttaagatcgataaaaattagcagaatattatatctatatatatatatatatatagcgacatacatacactgattatttatttcaaaatgtgaattgggaataaagaaaaatgcatttgtgggttcataaacatctataccacacccaacaaacaagacctactcacactcctatgacccatgttactttatctatcctataaagataaataaagttcaattattcagcggcagttcataactaacatagtactaacatctactcttgacagtgagaatttaatatttgacttcattgtcatggacgttagttggaaagaaaaaaaaaatgcatgtataataatatatgagcaaaatgcatgtacctgtacatttagtgttgtccaatccaaacaaagaaaaatgcatgtatatatatgtactataacaaaaattggtgggtgaatgctaattaataatctaaagtcctagaacctaagccgttattttggacataaggtaatgaaattttataactagattagtttatattattgagatttcttatgaacaaattaccaatgctaaggatttcaatttcaacattggatatataaattgagatttgttgcatttcaggtagactctctggaa

SEQ ID NO: 4328 - DNA, 1602 bp, Medicago truncatula
  Intron number 6 from transcript Medtr5g038280.1 (locus Med tr5g038280) derived from phytozome v7.0 (chr-ID MtChr5; po s 16158488 to 16160089)
aagatagaagatattaggtaaaattaattaatttaactctttcacaaatatatgtctgaatatacaggcttattcaatatagaaagaaaataatatactctgttggagacaagacatgtcttttcttggttggtagttaaggtcaagcccgttgattttggttgtattttatgccatattcaacatgtttttaaccaaattccaaagcaaaaccaaaagatatagatttttaaactgaaattgaataagacaagaaacagattctataatagtctttataaaccaatattttgttcctacaattcatgatgagagatatgaaagaaaacatacctgatgagaaattcatagtttttcgatgagggaaatacacgcgtaagcatctttataatgtcacagctttgtgaccttattgcaaatagaccactttagatgaatagtcctctcatttcatttcattcaaattaaaataatattgtctctttactaggacggaagattttgttcaaaataatgaagagaaatcacaagaacctacttgattgttgtataataaggcacaggtttgtagtctttcaattctgttttgaaacacttaaggcatagtagtttgacctgcttatacaaacaacaactgagattgtttgcgattgtttagctacatgagaaacaataactttaaactatagcggtcaaaatgaaacaacataattttcatggagattttttcttattcttttgttttatacttctgttagcaaatactagcaattggttagtacgcatagtctgcaaataaccaaagcagcataaaaattacagttttctgcaatggatctttgtgaaggaagattcttaggttagttgtttgttgcataacttgtcatgtattcctcgaaagtttttggaaaaaagggtaaaataattttgtttgcttagttttgcaaagtgagtttggtttcctagagtggttctaagacccaaaaaaaaaaatgaacagcattcatgtgctgaaaatgtttagtcaatgccgatttatgacgaaatctaggagaagctattattatataccaataaaggttgtggttggcacttggcatattagtgcaaaaggtcctccgttgagtgaggaatttcagattgggtagtcataattgtaactattatctgtatcttgtgatggaggaaaacaaaagatgtaatgattagacagccagtgggataagaatctttgcttgaaataattttaagaaatgaaaggtttgaaaagtaattattgacttatttcattatgtaagggaaacatctgtcattacatattaaaatctatggacagaacagttaaactatgatgagtcacaggcatggagtattctgcttgaccccactggtggtcatcactctgaatttggccggggacatttggtttttgaaaagaatttttagcttaatttcaggttaattttgtcagtgatctaatttaggcaaaatgtcagtctctactctctattttcaaggcaattgttgtaggcatttgcttacttgaatactaaaaatattttggtctgaccatgtacttttgagaccaaatgtgttaataga

SEQ ID NO: 4329 - DNA, 659 bp, Medicago truncatula
  Intron number 6 from transcript Medtr2g110340.1 (locus Med tr2g110340) derived from phytozome v7.0 (chr-ID MtChr2; po s 25906578 to 25907236)
aagcccaaccttagttgcacacccaacactagcttgttttttacttttgttcttagtagctttgtctttgtatcttaatccttctttatatatattatcattgtttctgatcttgtttttttttttcttcaatatgttttgctctgaaatcctatattttttttaaggtttatatgtttattcgtttgttttatttgctctgatactctttcttttgtttttattctttttgttgatgacaaaagggggagtaaatgtatagtattttaaggcactgagccctactataaccacttctaaatttttttaatacttctgatttgattttttatgagtattttattgaaatttaattaataagaatagaactcagggggagcttacaaacctcaccttaaagatctattagactcagggggagcttacaaacctctatcccagtagtcaacttattaattagatcaacaacaattgaacattttaaatactattgtttgtcatcatcaaaaagggggagattgttggaacaaaatgtgtttcacaatgaaccttattaagttttgatgataacaaggtattaaaaattgtcaattggttattactaattattgttcaagtgtacaggaccaaaggctactcaagttatttcaataggtctt

SEQ ID NO: 4330 - DNA, 2190 bp, Medicago truncatula
  Intron number 1 from transcript Medtr7g064470.1 (locus Med tr7g064470) derived from phytozome v7.0 (chr-ID MtChr7; po s 12970694 to 12972883 reverse strand)
gtagagataggtataatcattcttcaatttcgtcaatttttgtttgtttttattcaatttttgtgttgcttttttattcgtttgtaaaaaattgaacttttatgatgttatttatgtgtttaattttttttggcagtgtatttatgtgttgaattagttgcatgtaagtgttgatttggttttgagaattttcatttgggtaatttcatgtttctatttttgtatgaaggaaattgaaattcatagtagagaatagggttttatgtatttttcaattttattttttgccctgaattttatgcttatgtattttcaatttcatgtgataatattaagaatttttcaaataagtgggttttacaattttttgtatgcattgccattaaaaaacaattttttatatggacaattgcaattaaaaaaacaattttttacatggacatacaaaagtcccaactctttttacttcttcagctttttaaattataatattagttatatatttttaaaaaaataacaatattaataatatttttattgtttttaactgtcatgtgattgttggtactgagttaaactttcatacaaaagtcccaactattattttttttattgtatggtcttagtccctagattttcgtttaatgtttttaactttcatttgattgttggtagcactgaggtaaatttctgttagtacaaaggattgctcaaatttgtaacttcttgtgatgggttctctgcaacttgtatcttcctcagtatagttattgtatttactgctgcatctttgtattttttatctgctgcattggaatctgtgtctgtgtttttcttcaattacagtctctctcgtacatagtttattaatgttagtacaaagtatagtaaaatttgtttgctattattatctccttacattaatgaattgtggtacaataacgcagggtgttgacaatgtttcaatcttttttcatgttaattgattacataaccaacaaaatggaaaataatttctgggactttgttgaaaaaacatagagaagatgcctactcttaaagtagttatggggggtgcatcagtgtctctacagatttagctgttgattaattgtgatttagctatcttaattcagtcgtattttgaggccattttgcaatttccactcgttttttttgggctattttccactcaatttttttgggttattttccactcgttattttaaagggaaaaaacgagtggaaattacaaaatggcaaatttccacaatcagtcgtatattaacttgagaaattagaatcccattttgtattttaagattctgatgaccttaaaatgaatcttgagagattaggagtgtatgaatttaaccttgattacctttgtttactattattcatctgggattttctgcaggtagggaaaatacacattcacttgtccagtaagttggtacctctgaatgaaagattggatgctccgagttcgctttgtaaattgattttacctaacgtaaaatatgattttccaatcttcattaaccggttccaatttactgacagcttgaatgtgtgtttttcatgagcgaatatttttggtctttgttgagcatgagcgaatatttctggtctttgttgattatgcttaagatatgtcatatattttgctccataatagtcaagatgaaatgattttgactataacaataccagcagccataactctcatgtgtcgtgttaggaaaggtgtgtcatatacattacatggggcctatttgcagtttgatgtgttgcagatttctgtttggttttgcagtgaatgagaaagatatggctatctctttccttgtaattttttttgttgcttgagcccactgagtcagggtttgtctccaataaatgccagttactcttctagagtaggagtttgtctctagtttccaatttgaaagagtttgagtgagcaaaaacaaacctttttattttctcactaattttcatgtcaacagttatcatgcagttctggtacagaaacttttgatatcaagccaacatttgcattttctatgactgctatttcttttaattttttcctatacaattagattcctttgctaagctattttaatagtaatttttttgttgttaacagaagcactagagaaagcacaccttgtagtttaatca

SEQ ID NO: 4331 - DNA, 3670 bp, Medicago truncatula
  Intron number 2 from transcript Medtr5g026080.1 (locus Med tr5g026080) derived from phytozome v7.0 (chr-ID MtChr5; po s 10478667 to 10482336 reverse strand)
agagtaagtacatacttttaattgttcctaagagtctttttttttttaacagaattaagagtcacctaattataaactatagtttgttttgttaattatttatcctatgttagtaggataaaatcataactatttggtaaccgttttctctcacaaacttatttatttttgttactttgtctatggttgtatttgacctagatttgaatttgaaatgcatagctacttctctctatgtttctaaagaaactagttctagactatatttctatcattctatgtttgagcaagtcctttattgtaggacacatttatacctgtcctacagtcccaccctcacgagtcataaataggcattaaaccttcgctattgttttatgcgacataccaagcacataaacttcacattaaaaaaagatagctgtctcaacataaaaggatacattttttgttttgaaaagataaaggatacattaaaattccacagaattttaaaatatataaaaggtatgacttctgtttcgttttgcttaatatttaagtttactatggctcattttttttttttattttttaaattttattgtaatgatagtgagttgaagacgactctaatcatcttgtaatgatatccacagaaaggactcttaagatgagaattgtttgccaatggattgtagctagtggtccaatgaaaataacttccacactaaagtttcatttgcgattaaatattttggttacttaaatttaaagtaaggagatgctgtctcaatttaaaatagagaagatttcagggttttctgaccaactatacatatatttctcttacaatggattagttatttttcttacaaatttgtgagataatgaggacttcatacttcaccaaatttatgaaatgatgacaaaactataattaaaattgagagccatctattcgtcataaatgtcatcactcttcaaagatgcttaccgttttaaggatgaaaatgatgtgtagccctaaagacaaagggtggcatcccacaacttgaaccatttgttatgttctatcattttagatgtgataagggtgttgtcgttttgatttagatcaagcatgtaggaggttgatgtgtaaggttagtatgatgtttcaaatcacaatctgaaggtgggtaatacattaacaagacgtgtttgtggtggaccatcagtgtttttattaggcctaactactacccgttttacttccactccatggtccttctcaaggacactcacaaaatttagtttgtggcttcaccgtggggtagcgggtggtttaaaacccaaaccggcgattgatctgatcaagacacgggatcaccggttagattggtgaatcattgatcgaagctaagattgttgacctggttcctactgaagattacaaaacatagaaagtatctactaggtaacaaaactcaaacaaacaatgagattatgcgaaaaatatgcaaatcacaagctaaaagacaacaagattcgaacccgcatccttgttagatatgagctaaatctttatcaattggactaattaactttgacaaatcttttatttgtttttttgataatgacaatgaaggcaaaccttcaataatatgttttttttaaggacactaaattaatattatgtttttttttttttgtttgaatgtgtatactcaaattcatgttgagataggagtaccaccacccgcattttaatattacaaattacttgctatttggataggatccttttgtggggctctcttctctccttcttggctctttttttctttctttctcattattaggattgaaatgcttgagttagatgcaatcattgttctatcctatcattgcctcggaagcttcttcgtgtcttcaaaacttttgtctcatattaaacgtaatagtagtaggagcaagtcttctatggacataactccagatcgatacatgtgatatttgtataaacaccatttgttcattcgataattttatttgtcgttaaattaatactagtagttaaatgatattcttaaaagttataagggggcaattgaacaaatcgagcaagttcaaattgacgtaacatagaatctattaatccgaatgtaccgtggagtttatgaatttttattacttataatagtgaatattaaatattcttttacgataaaatgtaaaaaaaattaatatagtgcttataaacaatgtaatcatgtttttattttttttatattttttttatgaaataatattttttaaaatacaaaagctgagaaatagctttttaattcatacacatgatcgttaatttattagtttagaaaataaatatatcaaaacctttccctttgttcacctttttatgaaaagatcaaaattaaaaaaacatgaaagttctttttttacaagtaaaaatacattaaagtggacatcaaaagaaaaacattagtgtttataagcttatggaactttttttttttgttgaaaaataagctcatgaaacttttaaacactttaatcttgtgattgtataaatctatgatatgtgtgtgcataatcttgttattatatattgaatgattgatctgtactaacgtactaattggttctcaagttctctgaccaaacttgaaattaaaataaaaaatgtcaccaataatacttgcacgtgactatatgtggtttataattatatataatctatgacttctcaagagttttgctcaaaaaaaaacttctcaaaggtgtgaaccactaaggtgttagatctagcaaacattcttaaaagcgataaagtttaataaaaattcaagtgattaacaaaaatgatcttttaattgatatgccatgttagtattactatgacataaacaacatgtgtatttctgcaataataacatacaatagtacatcaatatgtcatgatcaactgcatttgcagagatatccttgacattgtttggaagccgtataaaagtttgtatcaactacaaagtaaaagatatccgtgatagagatgtgatagaatcttaattattcacttttgaccatttgtgacatacatatttgttttttttcccttccttattcaaagttctttagtatttgtgaattacttttttcaaatgagcctagttgagctatttgccaataataatgcaaataatttagatttcagtaagcctaaataataaaaattaattgggtaatgatgttttttttttttttttttttttttttttttttttgtttaagtagcttagtggcaagaaattcaccggcccctgcatatattatgcctgtcctaccaactgagctaagctcaaagggacgaattaaagttactttatgtgaccaaaaatatatcatgttttaattaattggaaaccatgctgtttagtcatatgctatttttggatgtatgcctgcataggttatttgtccaacagcagagaatatattcttgcattgttttggtattgacagcaagtttcattttagtttttgcttagttttttttgtgtcaaagatttcactttgtactagactatatttggttatatgtaataatatttttacatttaagcataaccccttttggaaaatcataaatatttattagtttttataatggaacctttcaggaatt

SEQ ID NO: 4332 - DNA, 4178 bp, Medicago truncatula
  Intron number 1 from transcript Medtr5g076880.1 (locus Med tr5g076880) derived from phytozome v7.0 (chr-ID MtChr5; po s 28210688 to 28214865 reverse strand)
gtatgtgtcttcttcctcccacacctcacaactcttaagaaacacgtatttgaccacatgaattaattcaactaattgataatttcagcttttttttatggataatatattcaaatctttttgttttgaatgttacaacgtgactgcttctcaaattataaattacagtgtccagcgccatacatatcccatcaactacctcaccttttcaatcagaaatttgtacacaaaataaaatttgagaattttatgttattcaaagataagaagaatgaaattattggaatctaaataaatttttcgaaagtcattagatgtttatcgaagcaaaatgcttggtgggaatccaatgatactaagaccaaaaagaacaaaagcaacaaaagtagggaacaaaaatataaacaccacgagccaaagagacacccgatccaacctcctctccgaccagacaagggttacaagattttgttgtagtttatattgtggtgtttttttttttttgagaaaaagtttatattgtggtgttattgcattaaaaaatgagaacttgtataacaattaatgtaaataaatgtattcttacccaattaggcaaaatctttatagtatagaaaatatggaatgattgctcaaaaaaaaaaaaatatatatatatatatatatggaatgaaccaaccactcttaacttttcaggactaaatcaaccactatgattaatatcttattttactcttttataagcaaaagtttccaaaaagcttgaaagatgctatgaattaccttgggataagacttggattgttttcttaacaattgtgaataatttattcaagattcaataaaaattaggcataaacttttgcagcttattttaccgattgatcaagtatcctcaaaatcttatcttacacaacatttatctgtagtaataaaaagagtgtaatggttatgcacagccatcattcaataaatacactatcgatacatatcatgttttatcacttcttcacactctatgtaaatttagatactatgttatttttattaaagcgttaattaaatttttagtctctataaatatattcagtttcatttttaatttttatgaaaaagaataacatttttattccctctaaattttttagttaaagttttcggtctgtgttgttaaatgagtttaacggagggtgatgtatcaacaatagggccggcctaagcataaggttgcccaagccttgtgttaggccccaaaaaaataattttattttgaattctgctcttcatcctgcactttttgctcgcgcccagctgattttcccaacatacccttgtgttaattaagttacgctgcgtgacttaacaaacacaccttataatttatgcgtgacttaagtcacaccccactggcctgggtgcgagttaactcacgcacgttggtcggtggtcagaactgaagaacaaacgttttttggactttggtcagttattcaacattcaatctacacgtttttttttttttttttttaccaaatttacacgttttttgaacacatttatggttgttataacttatattactattcccacctataaatacccctccatacttctctatttcctcacaccatatcactttttttccctcctcactctctccctctatttctcttcttttttttcttcaataatctctagtcacttgcgataaatggtggtcagttttgaggtaaatggtgggtagccaacttggaggaagtgatcaaccattgggataaaattaaatttgcttctttttatccccaaattttttttaccgtgggtaaaaagatcttgggggtataaaaagaaccagatttagatttagcccaaagattgatgatgtatttcctccaagaaggatgctcactattttccccaatagagtaaaacgaaaataagtagatttagtgaatttgaataaatgtatcaattattgtatgaattctattgataaaatgagatgttgttatatgtattaattttgttcatttcatttatttatatttggttttattttctaattttgtatttaatgaataaatccgaataaatattaatttagttcatttatttctatttttatttgtatttatttaatgaataaatttgaacaaatatttattttaagtgcataaataaattagaataaaataaataaataatttagaataacgtaaataaattcatttgaataaagtaaataaattagaataaagtgaaaaaataatttagaaaataaataaattagaataaaatgaaaaaataaattagaataaagtaaataaataaaaaaagtaagttaactcagcgtaatttaactcacacttaatgacttaacttacacaaatttttgcatttgcgttagttaactaacgcaagagtagtttaaatatttcacttggacgtgagcaaaaggtatatggtgattctttcaaaaaaaaaaaaaaaaaaaggcacatggtgaaaagcataattcttttatttttttacaggaaattaggcctcaaataaaaaaaaagagaataactttatctataaatataggcccgaagttttaaattaaacttaggtgattcagctgctggtagtagtcgtgtttaataacattggttcgattcttgctattgctagttttttagttcttaacaccactagtttttttgctctgaacaacattttttaaaatttaattaaatatagaaacatatattttaaagctcccttaaaaaaatatatatattttaaagctgaaatttagattagtacgtaaaatatagtaagattgatatatgcacctagacatgttttttttactaaatatatgcaactagatatataagtttgtatttttagcagtttatataatactagtattttctgttattatattttatttttatttttgaaaagtaaatatattattcaatacatatgatcaaattttaatgtctttataaaatataatttgtgtactattttctaatataaaagacctcaatcaaatttttgttgctttagacctcataatatgttgggccggccttaatcaaacaattttattttatttttgaaaaaaaattaaacacgttataaaaagattttttttaagttttttttttcttccaaaaaataaagctaaaattttgaaatatctaaaatactcttaatactaaattaaaaatccaaattttcttctatcctctcttcttcctctacttcttcatcagagtgtctcatcctcacctccatgctacaatagatttgcaaatcacccatctccctcaaaaaaagcttacttagaatagttaaatgtattttattttatttgggtgtctaaacataaaatacaactggaaataaaactcaacatattcataaggattaaaaacgttaaacagtatctttgggatattggttaaaagaatataaatagaaataatttgttaaaaaattgtaaaaagtgttgaattcaacattttaaaagtaaaaaagttgtaattttcaatacaaaactactacttttaatttccttaatcattgctctgaggccttggacaacaagattcaaacttaattaatcctctattaaaataggttaagttgttctatttaaatcaaaagataaagataaaaaaaaaaaaatgttggaagtcaaatggtaggggaggaatacggaaggcacgtcaggcttgagtaggttccgctttaaatgtggaaaagcgccgactcttaaaaacatgtctttgtacttctgctgtacacttgtttctttcctctttcattcaattcaactactttttcttctttatctgcaaaaagcaaacaaacaaacatgaaaaaacacattcaacaacaaacacaaagatagtggagatagttgagaatgagatgaaattgatactgcaatatccattttcttcttcttgtgtgggtcatagttgactttaacaacttaccaacaccacataaaaaaacaaagaattaagaaggtgtgtctgtctttctattctattctattctattctttgttttgttttgttttgtttgagtcaaacataagatttctcattttgtctccaccacttgaatttctctcacctgctgcaggttcattttctcttctcatcagatcttac

SEQ ID NO: 4333 - DNA, 970 bp, Medicago truncatula
  Intron number 1 from transcript Medtr7g076360.1 (locus Med tr7g076360) derived from phytozome v7.0 (chr-ID MtChr7; po s 15497424 to 15498393 reverse strand)
aagattgataccgtttctgggtcagttttttttttctttttttgttctaaattcatttcaagctacctatagttgaacatagattttatggagtctcatggttaaatgattcatgaatctaattatcattaaatgaaaatcaaacaattcatatttcaaatttagtttcaaaaagtagagtatgatttgttcaatatttttgagattttttaatcccttgaagcaagggaattataactgaggatcattagttgataccttggctaaatctctagttcgacaacactttgaaaatggaatctttgaagtatgtgttccaacaatcatagattcaactacaaatctcaattgcgaaaaatcagacaagtagtactcgatttggcaaagttagaataggagtagctcgattttcattcaacaatcgagatctgttgattgcgaattcggttttacaaattcagaatatgattcattctatccttttgagatttgttaactttgaaaatggaatctatgaagtatgagttataacaatcacaaattcaactattggatgaaaattagccgaatctcaattgttaaaagaaaatcatacaaattttattcgaattggcaaagtcggaatatgagttgttaaattttcatcgaacaatcaagatctgctgattgcgaattcagttcatttatggttccatgtcgctgttgctgccaatctatttgttttttttcatttgatccaaattttatttgttcatatatttattttcatttcatctactttgtttttgatgcatatgcttatttcttgattcttattacgtttctgaactatataatttatacttcaccttgcaactttgcttatgtttttttgaaggaactaatagaaatctaacagaaatttgttgtttgtttgcttgttgggatggttgcagacaaaggaaatcacgcaagagacgcagtggtggaa

SEQ ID NO: 4334 - DNA, 1232 bp, Medicago truncatula
  Intron number 1 from transcript Medtr7g027090.1 (locus Med tr7g027090) derived from phytozome v7.0 (chr-ID MtChr7; po s 7054311 to 7055542)
ccaaatctggctcagggacaaaagagaaggtagagaaaatagagaaactctctaatattctcaaagaaaagattatattatttgaatgcttcaatgcttgatgattcttgagtatgccaaaacactaggtggtgagccttatttatactactctaggaaggctctcctttacaaactagaaatatctagaaacaaagaaaagtctagagatatggatactctagtacataagcctagaaggatctagaaaagttaagaccctagtgcttatttagtagtgtctagtagcttccttattattccctagtattctagagacttctatattattctttagtgttctagagacttccatattattcttcatcaaatttattgtgatgttataaagagagttcaattttctaaccttctatcaccctaaactcttacgccaaaatcgttttgaaaatttaattcaaattgtaagttcgtcatagatcatcaaaatctcagaaacggtcttgcatcttccacgtaaagtttcttataccaattataatgcataatgaatatgagtaaagtttattcacaattctgtaaatttgttacacatcactttccaagtgttttgcagtttcacgagggccaagagtgagtaaacaatattcaatattgtattgaataaaatgtggatattaattaatttataaatgaggggattcgtgaaaaggacggagtaagaaatgaagtataagagggccaaacatagaagagaaatttagtgaagaaaaaataatttttttcatgtacaacttatataaaaaaaaattatcagatatatctaaagttaatatattgtcaaacaaatataagaagaattaatattttcttctaataaattaatctttatgtttattaaattttgcttagttagaagactttagtggggcgttctgagttatgatcctcttcatttatgactttatcaatttttttcattactagaccaaaaaaaaacactcacactcccacaaaattttgaaaaaaataaaaaataattaatgatggtggacccatttagtgataggacctatattccattttttatggcggagcacttgagggacataacattagtcactccgaaacgtcaatgaacacttcgtacatataacacacaacaataaaaaatactaaatcttttttcttttttagctttcgcaccggtttccgacccaccaaaggtgggc

SEQ ID NO: 4335 - DNA, 1316 bp, Medicago truncatula
  Intron number 3 from transcript AC235567_72.1 (locus AC235 567_72) derived from phytozome v7.0 (chr-ID AC235567; pos 264129 to 265444)
atcattgtcgggttagaactttaactatttattttagcatatgaattttaatctaccttgttgagccttatagttaatgacatgattaactatgtttctttgatttaattgctaatgtctcaaagtccaaaaagaaaagattggaaaagttagagcgcacagatgtttacaataccctttattgtaggttttgcctttattttattttattttttggtaaggatttatgacttggttttctcgcgtacgaagttgtttctttgtaaagccgggtataatcgcatagaatcacgagtttgacaacgattgaataagtctacgagaaatgataaggctcgttagtgcacaaaatattaacatcacagttgtagcactcaactctttaaatgaatctagcatgtcaacatgatcccatctgcaagggaggtgagcgatactgtattgagactcaaccatgtagctttcaatatgaagtcatcacaaaccaaaacacttgaacaaacccgtcattacaagttttttgtaaatcgaataggcttacaaagtgaatgaactcaactcccaatgagctaaaacctatgtctactaagctgaatccaacttcgacataggaaatcaagccagatcatccttcagtatttattaattttgaacgtggtgatttgtcaatttaatcattgattttaaccctgttttctctttttgtgggctaacttgtgcacctattttgtgatttttgcgtttatatatcaatgtcagatgacgtgatatgaggtatagtctggtctactgtgcatatagtatttgactgtgttcagactttagaactataatagatgttttaaacatttttgtattgagtaaagttttaagcgttatttttttgttgagtaaacttttatgagtgtactggttgagccaatggtgattccacaaatataagttgactgagtcgcaagtttgatgaccatacatgtgttacaaaaataataatgcatatcttcttttggttaagatttgaatgattgatttcagcttcaaatattgattgcttgattgtgtcgtctagagtgtcaaaaagagcgtgtttctggcattaattcaagattagcaattgatattcatgggtttgtgtaacaatagataattttaaaacataagtatacattggaatatcctattacactgtatgttcttcgtgtggtctcttacgctttaggcactttagcataattcttatactttgtttctcacatccactaataagatctatttttccagtattttgtgtatcagctgttacgagggctcaaata

SEQ ID NO: 4336 - DNA, 6412 bp, Medicago truncatula
  Intron number 2 from transcript Medtr5g072060.1 (locus Med tr5g072060) derived from phytozome v7.0 (chr-ID MtChr5; po s 25602522 to 25608933)
ctttgcaaaagggtaaagcttcagtcgtattggtggtttaagtcgaaatatgttttattcgactttgactatcaactgtggaggctaaatcctatcttctgttaattaactgcagttgcctagcttgttttgtttgctcttcttttctttcagatattgtgtagtactttgtatctttgtcaagcttttttcggtacaacttgttccaagattgcttgatttagttttttaatatatcaatttcttttggccttttcaaagaaatgacactaaatttttttatttaattcttttttgaaggattttatttaattttgttgattttatttgaatgcgacctaataataattttgatttgaatatatgcacatgaaagactttctctaatttgtcttcctcccctccctcgtgacaaaccaacatatatatttagatatctaaatcaatttagtttaataactctttttaaaaattaaatcactatatacaaaattataaggcgagctagttcgtaactttgtgagagtattattccgttagtataaaaaaaattatagccatattctacttattgttttaggggaatagccatacttacttggacgaaataataaaataaaaaatattaaaatggtgtgttttgatgtaggacatgatttggcattagagttgttatcggaataaataaattaactttacacttattagcgaagaaatttaacatatattttcctcataaatctttcaaaccaacttatcacttatagtttgtttactatatattatcttaatttttttttttaaataactatatattaacttaaattacactatgattgtatgataattgttcttgttatgccaatatctatccaattagaaaatagaaatactggttggatgatgaattgtaatttgtagttgaaagtttagcatatagtttaactaatcattctctcgtttatatacaaccacttatttaatcaacaacagggtagagggctagattccagcaacaatccattaataaagctaaaaaaacaagcagcagaatttgctccctccaacaccagcaacaattcatataatttagatactacattaatccaattacatcgatgccaattaagctgtaaccaataacacacatcattaattaatcaacaccttataaagtttcaaatatttttacacctatgtaatatttttacatagacacacgacacatgtttctatgtggggaccaaatattagatcgatgtccataggtagagagtagacacgtctatggattgaagttccattattgagtatctctatggcaaataatgcattacagaaccatatgctttgtagcatgctagctactaacttcattattaaagcaaactatagtacttgactaataattatactagaacacaagttgttgtttggtttacaagaatattttatcataggaaatcggaggcttttgtgaagatccaaatcagatgtattcatgattttaaattgcagttgccgtcgtggttataattacgctgcaaacttttatattgcgataaaatgcaaaaatattatggtcgatgtggtcgaaattgcatgctagtatattctatgtcagtaaatgttccatattgaataaaattaaagtaaatgttaaacaacatataagagaagagatcttctttacaaaaaaaaaaaaaaaaaaaaaagcgaagagatttatatacaaaatgtcttaaggtttttgatgaagatgttatgtttgaatcattttgctcgtaattctaatgtaattattcacaaatttccctcaacaatggtgagttggcccaatacttgtgcaatatccaatttactacttgtgagtttggattggtgtcgtattaggacaaaatggcgttgaaaaccacggcaatgcagaagcttgatatactagcttctgaattttcacggcaaccgtgcattgggacgcggtattagattggcaaacgcttatccaaacaccggctacattgatttcttacaaaccacacttctttagaattatccatcctagtggaatcatggttggtctcctaatactatccaaatgacaaccatacccaaaaggttagggttacaaaccagacctctttttaatgaaaggcctttttcttcattatattgaggggttacaatgtgtattttaatcaacaatcacacactaaaggtccacttattttcattttgccagttctaatttcaggtgtacgtgctttaaaacaaaaaagacccaaccgaaagccttacaaaaatcatgaatgattgatacatacatgagtgcatattgtccaatttaggcatgataaaaagtgtagagagggttcagtcatatgtattatagggtttgcctactttctaccaataattgggtccttctaagagtttggcttagtttatttcagtttaagacaccaatgatgaaacctgaatctaatggtaacctacctttacacgtatgaaattgaagggtcagggttccaaaggctttgaaaaaaagaagcatgttatataatttggtgcccccattaagaatccttgtgacttcttttagtggattccaactcctctttcaaccatttataagattcaccaattagtggatttccctttcacaaacctaaccatttgaaaaaaatactaaccattaacttagaagttatagatctcttgtatagtattaaaaaatttactatttctagataccactttgatgatattttttaatttttttatcgagtttggctctgtcaaatcaaatcagggtgcccaatggtttaggacaatatcactttgtaagcacataattaaagactctttatataggttcaatatcctaattaaaagagatgtggcttttaatttttttaattgttaattgtagggatgttaggaattaggaatcaagatcaacctaagtgcttcttttaattaattagttactttatcgtaccaaatctcaattgatctttattaggatctgccttaaatctaaaatgattttaataatattaatatattcattagatttaggctctacatgttagtcctattaaatcatatattaaaattaatccttgtgcccattacttttcccatctttgtccgacaaaagggtgaatatagatgcccctgtatacaggttgggaggtaaaggaccaaggatatttatgtactttgaaattggaactataataattgtagtgtatatgatctctgtttttactaccctatgtttggtaatagtgtgaccatcatatttaaggatcaatcttgaccatagtccttaaggtataagggttgttggctttaatggaaatgattttaaggactttatgattcaatagtgacagtgggacagttacataatagtgtagggacatcatttttttaataaaaaataaattaggtgacttaagtcccaaaattgtataaggatttgagaaagtatttttagaaatcgtggttaggtctaacataaccccacaaaaccggtttgtgagatgaggattgcccccatttataaacatgttgtcatatcatttcctattcgatgtgggactcttaatacaccccctcacgactagcattattggacttggttcgtggacataaatgatgggtggcccgatggtgaaaacctgatagcaggtggcccaacaaatcttggagtaggctctgataccaccttagaaatcgtggttgggcctaacataatcccacaaaaccaacttgtgagatgaggattgtcgccacttataaaaaacattgtcagaccatctcatatccaatatgagactcttaacaagtatagtaacaaattcctccgatcgaccacataatttgaatcatggtctttattagatctgaattgaatctttattaactatttcgacttacatcgccatgaatatcatctttttgtcattagaagaagtaataaacattacacaaaaatgacacacattttacatttatatagtcttgatttcgaatctagatgaatgtgttcaacccaacaatattgatgttgtcaattgtgctagaccttacggacgagacgaacatcatatcttaatttcgagtatttggtgttttcaatttcataggttgttatattagtaatgtaattttgttaaaaactaacagtaatagtgtgtaattaaaatgaataatccgcgtaaggaaaatgtgaccaactaacaaaagagatgaataattgattagaaggagcaatcaaaggtttccaaccacttggtagaatatgtatgctcccacctaaagtttgaatttatacctttggaacaattattccatagattaattgagaaagacgtaaggcaaagcatgatcattgattgttaaaaaactttctatataaacacaacgtgcatttgtctcaaatgaattttgtggctgttacaacacatgatgatggtgacaaacttgtgacttatttgtcatttttctcacaagaaatccacccaaccatgatagtcataacaaactataagaacaaaatgtgaatgaacaaatagatggatactcaattcatgattccgtttagaatctattgattgaaacatgagtaaataagtctcacatttaatgtcttatgatttttagtgaagatatatgatttccaaaccacttgtggagttgttcttatagtccaatatgacgattcttggatttattatggtcctcttcatatttagctgagttattagagccaaatgtgagtcaactataggtaagtaaagaagcttccatagagtcaaatgaccgtacaagtgtttatgaatagaaaaatttctaaggacgaagattctagatgaattaatgattgactcaaactttgagaaaatcattgttggtgtcaaatgtaagtaaagaagacttgtattgaatgaaaatgtgaatatcaaacgatgtataattacatgaaacaagcatgtaattaatgtcttttagatgaaaaatccacaatatcttaatccctcgatgttttagactcccctcccttttcaaatagtttgaacaatcgttatacatggagattcgataatcttttatcatgttatgaattattaaattcagagtaaattttcactaaactaatatttgaatctcaacagagaaaaaaaaaggtattcaaaatctatatggaaaaatacatatactaaaatgatcataaaatatagtatcaaaattattgggccaatcatagacagccattccatattaaagttgtaatgttgagagacccaccttgaatgatatgaccaaaatcatttattctcgtattgataaaacaaatactaattttaaaaagaaagaagtttcactcatgaaaaaaccatgcacaaaaatttagtgtttccaactcaattaggccactcaaataatttgtatgagtgtgctaggaaatggtatgtcctcttaaaaagacaaagttgccaattattaaagcaccttaccatatttctttttgggataattccaaatgtgaacacacgcgtgcacttctaaaccagtgagttccattttaaccaacatgacatgagagaaagagtatcttgacaactgtcaatatatacagctgttcctacttcttctatgaaatatttatctggccctaattgtggttattaggttaaagacaccaagttcaagatttcatacatttggttgatttacatattaaaatagtaattataaataaactttccgtcttgctaactagtatccttagagtactggttaatgaatccttcaataaaaatattgtttccaaagtgtaactttttatttttgataaagtaataattacattatatttacaaaaatttatctgatttgattgcttaaccaatacctctggagcgagcattggttaacattcttcatcatgttttttttttgctaattaactttaattttaaatattgatgtattcaccgttgtctaaaaattaagatattgacttgagagttattatttttataggagaatgttaaccggtgctcccaagacattggttaaacagccaaaattagttagtcaaaagtaaccggttatatttccaagacagtttttctacttttggattccttaaccagtatcccgagggcactggttaacaagacccatatttatatggtataaattatagagtatataattggaattttttgttgttgatattaatgaaaatatatagtgatacttattttgagataaaatttcattttacagctattattagcattccttgtgcttttggtagtgtttattttgtgaatgtaactcttgttaaattcttaaaaaagaatggagtaatatatttatcagtatatattggaga

SEQ ID NO: 4337 - DNA, 1884 bp, Medicago truncatula
  Intron number 1 from transcript Medtr2g092170.1 (locus Med tr2g092170) derived from phytozome v7.0 (chr-ID MtChr2; po s 20974351 to 20976234 reverse strand)
cagtaaagtttattggctcttcattaccatatatggtaagtttttttctcttttttattttttatatgcattaagaagagtataattaagggatactcgatctaacttaattttttttaacagaaaaattaattttattaatataagagtacaatgggtcatattttgcttctttttttttttttttttttttttttttttaaagttgagatgtaaaagaaacgaatcatttcttgaataattaacattgtcattatctaaatagaaaggacataattgaacaatttttttatgcaattatttaacaaaccagtttgtggaaaatatatccatatactttgtatagtttttttgaattttttaataattatatactttgtatagttgagtgtttactggttgaattttctgcaacaagtgaaaaatcataaatctcatcaagacacagtacacctcattttaagccataaaatattactggatttacataaacttctctaactgcatctacatttgatttcatatcaaaccctaatttatagacttcaaaaccctaaattgtaatatacttgttataaatgttggagtattatataccttgtatcgtttctttttcttctcttcttacaatgaacatacagtactggagatactacctggtaatatgatctttcattagttttatttttgtcgattccaaatgcaagatgacaatattaccattttttttaaggaagatgacaatattaccatgtttcctatattttctaattattcattttcagatcttatgatatattatattttgcttatatatttacaagttggcttttccacacaatcttacttgttttcttttgttaaaaataaaaaaaacttactccttttagtataaacgggctatgttaatgtggcttccataaacaatgtttctacaatgatataaaagttaagcattttaaattattcataagtagattttcttgggaacattgtatggccaaaagggcactcaaaattttggggatctaatatagtcctatggtagatctcatagactaacctgctacaagtttcaatttgttgttacccatttgcaataaatatatgttttttacagttgtaaataattatagtaacattgagtaaaaaaattatacatcgattttttttaactgaaaaatttactaatgatcaagtctctgcacaagctgaacaataaacataaattacataactaaggcgccgaattaattaacttatatgcattttttgatcggaaagtagataaaatatgtactttatttacgactttaacaattttaaaagagattcatatttatagcatcttcaaaatctatgaatttagattctcttccatgaatcttataagctggtgtcatcttctagaatccaaaatctcattgttttcttaaaatattgtcttattctaaccaatttaatttttttatatcccattgttttcatataatatgaatgtcctttttgttgttggtatatatatctgagtctgacctccgtacatgaaacacagtctttccaaccacctaacactgcaaggcatatctgaccatactattactatgtgtgttcttgcattttcacaatcaatatttatatcaacaataaaatggaaagttttgaaattaaagttttgaccatggtctttaatttgtattgtactacaatccttactcaccatgtgcaacaatttatttatttttttaccttagcaattcattacacttcttttaccttagcaattcatatattatttttgtagtgcacatttttttaattttggattatcctttgttattgatcacaggtttctaaagtatttcaaagtcctgaatctaaatt

SEQ ID NO: 4338 - DNA, 751 bp, Medicago truncatula
  Intron number 1 from transcript Medtr7g121340.1 (locus Med tr7g121340) derived from phytozome v7.0 (chr-ID MtChr7; po s 28547519 to 28548269)
tttggcgtcatccacgttgcagatccagagacgttattccggagatttaaatatagtcatatgtgtagacaattgtactttgccgttttatgctattaacatggatgttgtgagcatgttcacatattcatccttttttttagcgaatttgcattatatcgatgtactctatcaatttggatgaatgaatatcttttattttgtaaaaaaaaaaaaaaaaaaaaaaatttagtgtatgtggtggtggatagggaaaaaacatttagtgtctttgagtttgacgaatagtctatttaaatgaacaaaactaaaaagaataaattataactaaaattaaaaataaatcaatttctaccaaaaaaaaaaattaatagactaaacataaacaaaattaaaattatctaaaacatgaaacttccttcctattcccgtagtgagacgcagtggaggtggcagattgtgattagtgcatgatttgcatcaagcaagtcgtggcaagttctgattagtggctagttttacacgtggcaataatcgagaaagagtatcgtaaaataaattccacgtgtgatataatcattggtagaaactacgtgtgatgacatgtcaacgtggaaagctacaacgtttttattttcccctttccaaatgtttcaatttttaagaatcaaataacagtgtcttcttcttcttcctacgcgaatgtgttaacatcaaaatatagaatttcgaatcattgaggaaaatctca

SEQ ID NO: 4339 - DNA, 400 bp, Medicago truncatula
  Intron number 4 from transcript Medtr4g144320.1 (locus Med tr4g144320) derived from phytozome v7.0 (chr-ID MtChr4; po s 36311923 to 36312322)
ctataaacctctatcttcgatgtaagtaattatttgatttgttttattgcgcgtatatttgacggaaaagtaaatgtgtgcttttaattctatctaaatttaagaaaatgatctataaaatgtagcagattatgtcaagaaaaatggtatacctaccaataaagaataaatttgtaatccaagggaacacaattgatcaaattttcttgtctggcacactggaagaaatagtcaattgtgctcttctatagcaaagtttaaagaggttagattggataaaccattaaacctctcagaatataaagtgatcactctctgaaactgatttagctgaacctgatataaaaatgtgactattgaaacagacaaaccttcagttgaggacctccatcagttttta

SEQ ID NO: 4340 - DNA, 1101 bp, Medicago truncatula
  Intron number 1 from transcript AC225507_24.1 (locus AC225 507_24) derived from phytozome v7.0 (chr-ID AC225507; pos 105692 to 106792 reverse strand)
acaccaaagcttccggtgaagaggtttcaagcgctgtaagtattcttaagaattgaatttaaaaaataaaatgataatataatagaaaagtgaaaaataaacgttttgatttttttttttcttttctaaatgtgttgcattttatttatttttggtagatagacgaaatgacaaagtcattataaacctacgcacacaagtgaagttgtcggggttcgaaccccgatcatgacgttcgacctaacaatttcggcattttgcgacttgtggattgtgttgcacttaatttaaatgaaaagcatgttgacagcgatatattttttttaaatgaagaaatttaattaactacactttgtgttggtgttgatgcatatcgaacactggacacactcttcatatgaagtgttatttttatttttgacaaatcgtatgaagttttaatgctacataatttagaacgtagaattggatgtattagggatgtatgtttggaattttagtataagaaatataaggcttatgctggaagttagcttctatttgaagacaagggatcttgtctataatttgattagatgtgcgaaaagcatgattcttggagaacttttaaagatatggatggccacataagtactaatgtgaagagcatcagggatgaaagtctggatttcctaccaatttaagtcaataattcatttcactaatcatatatgttttttacatttttcttccatgtttaaaaatagaacttggtttgcttgcatctgaatgcaatctgagcatcattctgagattggttaatgattgcatttttgggaaaaaaagtattataaatttgccactaaactaggcaatcaccaaatcttattagtttttataaaaggaaaggaaagcgatctaaacttgccaataaaaatatattgatcacttcatctgtccatttatacggccctcttcaaaaagactgttttatctcttactctatgattgaattttgcttcacagtaagaactcttactctactaatttgcatttgttgtgtttgaatgcatttgttttccttcagaaacgagtctcctagccctagatcacagtctcaaa

SEQ ID NO: 4341 - DNA, 1763 bp, Medicago truncatula
  Intron number 5 from transcript Medtr6g083630.1 (locus Med tr6g083630) derived from phytozome v7.0 (chr-ID MtChr6; po s 17094895 to 17096657 reverse strand)
aaattgcaagatttggtcctattggactgtctcatgtaatgccttagtgttatggtgttaattagacaattgtctttcatattctattattggaaactttccattctttgattgatgagctatagcttccgaatatattgttgttctgtgaaccctattttctctgatcaaattttttctttaggtaaattgttaaattcaattttctgtcagctgcgtaactttgattttagcttgatcttcaattttattttgatgcgggtgcatcattattttcatatagcaacaaagggatttagtttcatggcatatgtgtttttctaatgatatgttctatctcctaaaacacataaaaacgcagtagtcttgaacacaaagaggggttaaatctgttatgatgttctaaaggggattgttttgagtagtttagtattttgacatccataacagaacccttgaacttaatatctggagctaccttttaagaatgaagccaagaaatcataatattgtgctcttgtataagctatttgaatgtactcctgattgaagtcaatagtgttaataggaaccacttcatagaatataaacttttaaagaatctggtttacaaatttgaagtaaaagcctatatagtacaaattaggaacttttagctacatggttaaatagccattagtttaaatgtactccttgtagtttgattttagtttgacttatgagtgtgtatattattcacacttcattatgagtttcatttattgcaccaatgcacccttgattttagcaatcatttaaaaaaattggaaaatagttaaaatataaaaattggaaaaatagttaaaagttattaaaaatctaaaaattttaaaataatttaaaaaaattagttaggggtaaaaatgaaaatttataggtcactggtgaattagtgaattgcccctcctagggccaaaattgaaaattcaatggacatgtatttttatattagtatatacatttatctttcgtataattttatttaaatcttgtccagtaagtgaagctcaattggttgctactagagacattatgtgaagtgaccgaggttcgaactctgaatttttaacttttaaatacttaaagtgtgtgaacctagtcagagatctagcttaccaaataaaattcttaatatatacaagggacaatgcattaaatatatgcaaggtccaagtccaaactcggccgaccacaaaaaaaaatcttaatcaaaaaaatcagttaattatatatagtagtgctagtaatattctcttttcaacactttgtttaacacacactttcttatttgttcaaattatggtgaatctcacactttgaaagtttcatttaaagtggtggatcatgtattgatttcatccaattaaaaaatgagtgttgaaaagttaatgtctttaacattcctctttattataatgatttttgtatattccaaaaaaaataaaaaatgagcaaattgtcactttagtacttgactctgcacctcgttgtcacaaaggtcatgactcataattaaacaaaatagtatctgactctgcacttccttcatcactttagtttctagcgttaaataattatgttaagtgatgatgtcacacattttacgatgacatgacatataaggtgtcacatgaaataaagttaaagtagaaacatagatttttgtagttgtaattgtacattgtcaaggaccttactgacaataagtgtctactgtcagagac

SEQ ID NO: 4342 - DNA, 3049 bp, Medicago truncatula
  Intron number 1 from transcript Medtr7g138510.1 (locus Med tr7g138510) derived from phytozome v7.0 (chr-ID MtChr7; po s 32889364 to 32892412)
caaacacttaaacctgggctgttgtcttcatcaaggtcaagttctttacatattttgtttccattacatgcaacaacaacaatacaaatatgaaattggatgtgattttgttttatttctagagatgtaaatttttttttgtagatgaatcttttttagttccgatgctactgataaaaaagtctgttttttcaatgaatctttgatagaacagatttttttattttttttacagatgaataaaaattttatttgcaaatcaaaagaattttttttttcactttcaatattcactttctgttattacttgttatgatttaacaaaaatttcacttagattttcttgtaatatgactcaaataatattcatttctttctaaaaaaaaattcactttatgctattacttcacttgttgtggtttaactaaaaacatagtttttttatatttacaaatgaatatattttgtatatttgcttttttgttgttgatataattataaaattgtgttaggactgtttttgttaaatatacatgatatgaaggtcaacaacaaatgaaataattaatgatattaggaaaatgaattcttatacctgccgtgttcttcttgttgtcaaagagagaagaggaaaaggaaaatgagagaggagagacagttgagagaatgagagagagatttttttttttgaaagagagtgaatgagagagtattaaattatgaaagagtagtgaatgacaatataggagtatttgaaatttgaaattgaaaatttgccaccaattgattgtagatctgacattagattatactccctccgtcccaaattgtatgacgttttaggcatttcacacatattaagaaatgtaattaatattgtgtgggaaaaagatattatgaattgttttacaaaattgttctcaataaatgatatggaaaagataaatgaaggaattgaaagaagagagagtaataaatagttaaggatataatagaaaaagtaacattaatttttcattggtattgtaaagcgacatacaatttgggacaaatattttttctaaagtgacatacaatttgggacggagggagtatcttttttgtacaaaagaaaacttttttcgttttccgtgtcaaccaaaatcggatttatttagttggcatcaaatggaaatgactttatgaagagcaaatgaactaaactattagttatttgtagttacatgacatcatcttagttaattgtggtaatttgtttgaataaagtaagttaaagacagattttaccctttggtgatttgtcaattaaccaggttggggcattaataggatttccacaacatcttctcttatattaagagagattatcttgtacattgactatacatatgaattaaaaagctttacaataccaatacattacaatcaaccatttgtgtgaccttaaacgtggttatgataacccaagagctcttagatgagatgacgcgggtctcttctagcttaagcaagatcctgggttcgaatccagtcttgggcatacaacatcgttaaaactcgtagggagagcttgccgcctatttgggtcacacaatgctcgagagattagtcttggcagtttcgcgcgcggaagatacccgatttacaaaaaaaaaacgtgattatgataaaattcaaacagttttaatgaccaattagttatatttgattcatacgataaacatcctttgcatttgacaatgcacttatatgaattaaatgtttgctttttaatgtttttgtccaaatggagaactctatattagccttcactgactaatatcattctcacacatgtagctttcgtgaaaagcctatttaattatgtatcaatcgaaagacagggtgacacaacacttaggggtggaaataggctaggctgagctgagctttgtaaggcctaagcctgacctacttcaaaaattatacggctgagcctggcctattacctgtcataggcttattttcgaggtctgacctggcctttttaaaggtctgatgaagtctgaaagcctatttagaagcctattttacactaaggcctaacaacacatgtaagcctaatactaaataggccaaaacttatgaaggtctaaagcacacaaatatgtttgctactaattattgagaaggtctaatcacactaatataccttgctactaaataaccaatcataagtttatgaggaagaaacttcaacaatatcaataatggaagatatattatatataaaaatcttaataggccgccctgacgggcttaataggcttttgtgtaagccttagcctagcctatttaactaaacaggcctaataaaaagcttgagtctgaccttgttaataaactagctgggccgagctagactttaaatagactagacagtaggcccctgtcggacggcctggcctgttcccacccctaacaacactcaagggaatggttacgtccctcggagataggagcatgtcaaatcacttacaccttttaaattttaactaaataattgagtttaggaaaatgttacatagacaccatttattcccatacacccttgtacaccccatacattaggaagagatgtgcttgtgcggggtccatgtggccacgtgtcagatttttgtgtgggtgttaaagggtgtgttgccacctaaggatgtctatgtatcataactcgtcattaaagtggttaataaactgcaaattttttaggaatctgaagttgatttcttagtgaaataacaattcttcccataaataccaagagttaatataaaaaagaaactgtatgaaaagacacatcatccttcactaattcactaaagacaaaaatgaacacctctagacattttactagcaattttcaacactttttttgtttgaggatcagtaattcttcaaaatataaaaataaaaatttaaaaccctaaaaacagcagataagcagctgtgtcaatataaaagaaaagaaatcgcaggcgctgctgtttggccctgtatctgaaacaagctg

SEQ ID NO: 4343 - DNA, 2368 bp, Medicago truncatula
  Intron number 3 from transcript Medtr7g124470.1 (locus Med tr7g124470) derived from phytozome v7.0 (chr-ID MtChr7; po s 29231680 to 29234047)
tgaattcgcttgaacaggtcaagattcaaaccaatgtaagtttattatctttactgatctagtttatgctcttggaaattatcattctttttcgttgctgcgatgagtatctagttagttaatagtaggttgttagttgttaccagactttccaattatctgttgagtttatagataggaagcatcagatcctgttttcttaagaatctatggatttgggagtgtcacgatacctatatttagtaatacttagctacagcttatgccttcttacgttgtgattatgaagcatatatctgatatctttgtttggtaatcctttttccctgtgagtcacccctaatatctaaaactaaaatgaaaacagtcatgtatttctagtgattttggatgtgaggaagaggacagttgttgatctaatccttccaacctgtagctaggaatcccaacctgtagggacaatgcctataatgcaggccgatgctttatccttccgaataatacacaggtttatgctactaactgcaggatctattttttgacaaaactatgcaaattatacattgataaaacttaaatggaagtcaaattgtgaaggtttttttaggagagtagttaagcggaaattaagacaagatacccacattacagaaaattaatctggtttaatgctgggatggtcaaccatggaagctgtatattttctttgaagatttatacgataaaaaaataattacaagcataaacttggaagatacatataccgatatacgaagtcacctagacgtgctgcggggccccataaaataaagaagtttggatgtatatattcgaataataaaaaatatgtatgaagggttacaactaatgtaaaagcacaaggtggaaatatagatttcactattactataggtgtgcatcaaaagtcagttttgaatgtttttgttctagatgtgtttatcgagcagacacaagagatggtgccatgatacatgttttttaacaaacggtatacttttaaattagaaatctggagaatcgagaaattcatggaaaaataattaaattagaaacttaaagaatagaaacaggacttctgcccaagttggagtaaatagagcatgtaagtttagtaagaaacactcaaatacaggtgaaaaccagagaataatacactataacgcaaggtaaacattatcactcaagatgctaaatagagggggttgtcaattataggatataatttgtgattgaacagtatcactcaagcttaaaggaaaaaaaaaattgccaaaaaaaaaaactattctaccaaaaaaaaagggaaaaatttcggtacaattttaatatctgaaatattgtatgaaattgaatgttggactagtaaaagctaacaataaattacatattagtgttgttgagatgagaatgttaccatgaattttttatcatacatgacaagacaaagattataaatcatatcactcgagaaacaatagaggtagctcttatgtattgtagaaagatggtaaaatcttggcttaggtagtttggacatgtgtgcagcagacccaaagaagcactgatgaaggttgtagaatggaggataatctctatttagaggtaaaagcctaaaagatgggcatggaaaacgataggtcaattaagagatatttagagatatttatagttaatgatatatctttaaatatgaataatgacaggacatcggagcgtcatttgatccatgtacctaaccccacttggtgtgggaaaaggatttggttgttgttattgttgtagtgatggaactagctcagaatatagaaagaatgttgatgtggcttgataggaaatctctatcactgaatccgtgtcaatgtaatataagatcagacatgcggaatctgtagatgcaataaaccccctgttctaggcatttgaggcacctggttctttccattccaatttccttttcacatgtctctaccgaccttaactaacgcttcatctctccttttatgtattatccatgtgactggtaacaaacttgggtcctaataacaaatagttgcaatactgaaaagagttgaactcaatagtagtattctataatgacagtatgacatcccaatacatgtccgctgacaattgaaatgacgtgtaatcacactagtcaaattgtcacaggtaattgactgtgctctattgtacagttggtcccctatgagtgtgctgaagtttttctgttgtattactcctatgcttaaccttttttagcagtgttttagtttttgttctgatggtggagtttgtatctgcttgtgttttaactattttatggcctattgatatgatcagctgaaag

SEQ ID NO: 4344 - DNA, 1550 bp, Medicago truncatula; identical to SEQ ID NO: 4258
  Intron number 6 from transcript Medtr2g013660.2 (locus Med tr2g013660) derived from phytozome v7.0 (chr-ID MtChr2; po s 3120000 to 3121549)

SEQ ID NO: 4345 - DNA, 631 bp, Medicago truncatula
  Intron number 5 from transcript Medtr2g118190.1 (locus Med tr2g118190) derived from phytozome v7.0 (chr-ID MtChr2; po s 27999932 to 28000562 reverse strand)
ttactcgcggtaagcacatttacattctcaagtttatggtcatgaaaaacatgtcgagatttgttttcttttgttcgtagtttgagaagcttcattctaagatcgtaatattatttttcgacaatatttatgattcatgacataactgtatgaagtagtttggtccatttagaagaaggttttgagcatgattcggtgaaatggaaactgatttagcgtttccatgtttttctcatatccattttaaactttttctgaacatttttgaagtgtaagagatgtttgggaagcttctgaaacttatagaatattctggaatacacacaaaaatacaacatcacatcagaactaaaaattagtatgtatccattacaaggcccgacacagaaagaaagcgcaaaaaaaattagatacttcctatattgcatgatgtagaaggctgaactttgaaaaccaatgaagtgttaatctaagaaaatttgagcagccattatgtgcacattggcctccaattgtgtttatcatctgtctttttatgtgattgattcttggtagtttctcgtacaagtttagtcatatttaagagtgtgttttttttcaagaataggagcaactcaacgtcttcgtcaaa

SEQ ID NO: 4346 - DNA, 1004 bp, Medicago truncatula
  Intron number 8 from transcript Medtr8g118890.1 (locus Med tr8g118890) derived from phytozome v7.0 (chr-ID MtChr8; po s 26828616 to 26829619 reverse strand)
cggaaagacttaaaaccagtgaaaaagaactccaggtttgtgtcttatatatatttctgatttacatttgaagctgcaaatcacgtcctgtgactttgtataatgtttaaatttcacaatgtggcttaggatattttttcttttacaatttcacattattttgtgaacgttgttgaaaaatctctctgcagttttgtggcaagttctccatttattattaattttactttacaaattgttgtgattccttgaattatggtgacaatatagaatcattatatagtgcagttgtatgcaggacttgtattcttaagattctttttatatagcttcacttcgtttatcccttttccaaaaagttatattttccatggaaatatctctgaaattaaatagtatatttctcttttgtatgtttttctctttaaagtgttagcacgggtatttgtattttgaggccaatgacatgcaattgattttcaaagaataaattttatttgagagagttagataagcatgaatatagatgataagaaatcctatgaatgattagaaaatcaagaccacattattttaagcaatgtttccattaattaagctccataaaggggtctaaaataaaaccatcttatgccatagattatggtggcgaaaaattggagaaatttaaatacttatgtgcgaagctgtaatgtaatggagatgcaaaagtagctattaggaagtgaattccttgttatcaaggaaatggctgatatagttctcccctgagatttgaatgatctctgatggttgttcatcattattgatttgaccttgtgaatatggtcttggtttggtgttgtcttataaatttagtgagtttagttgctcttataatccagcttatttcttgtttttcttcattgttatgtatttcattaacttgtgctggtagcatatgctgagttaatttttgttggtttgcaggctctagttgaatcaatattgctcgagagtgacgg

SEQ ID NO: 4347 - DNA, 858 bp, Medicago truncatula
  Intron number 5 from transcript Medtr6g093410.1 (locus Med tr6g093410) derived from phytozome v7.0 (chr-ID MtChr6; po s 20024223 to 20025080)
cagctctaccaattttggataaactgctagaagacgtaagcgtgtttttttctgtttattatctgtttggattgactgatttgagcttatctcctagcataaacacttttgtgagaacttatgaaaacaacctatgacatgtatgaaaaaatttgactttatgccctcttttgttttagaaatagcttacagataagcacatgttaataaaagcttaattgtaaagtttgtccaaacatggcctagtagcaaatcactggttttaatccctaaaagttgttgagaatacaatttgttctttggatttaacgaacctccaaactgattaaccgagggttttcaatttgtgttagtttagttctagtagatcttctgttaagttaattagttagacctgtttagctttttggacaagttagtcggtgtttcagttataaccaacttcataactactctgtgataggagtagtatattagccgatgtatccttgtaaaactagagacatatcattgaattattgatcaagagaaaaaatagaacgttcaagtgagcgggctgtgattttctctctaaaaagtcttgtaacattagcactacaacattcaacatgatcgtagttgatgagatcgacctcaacgaggatgtaggattcaaagttgatccaaatatcgataaatcttgtgtcttttagaatcttttattctgcgcgtgtttaagtttcaattcggttctcaagaatcttattattgtgtccaatttcgacctacgtaacattaaaaatcattttaaattcagctaatttcataaactaaattggtaactaatttcattctgaatgttattgatgcagcctacaa

SEQ ID NO: 4348 - DNA, 702 bp, Medicago truncatula
  Intron number 13 from transcript Medtr7g087880.1 (locus Me dtr7g087880) derived from phytozome v7.0 (chr-ID MtChr7; p os 18953987 to 18954688)
cttctttttacagtatttgaagcagatatatccaggtacttaatttggaaacattaatagtttcagacttttgagtttaatatgtgagtttcaacccatgcttatatgccactacaggcaacatttctgccaaatattataaggagaatctttagttcttactgtataatttatcaaactcttggcatatgataagtgttggtaggctgctcttaaagatggacagttataaaatgaactcgtcatcatgggaaaccgggttccctcctaacttgatatggcttaaaatgggggcattttgggaaaatattaggagaaattcttctccataaaaacgtttagtttaaggggcagagaggcctgccttaggtggtgacataaagccaactatttggacaaaagggtcgtgagtttcagcaaacagtttgaagaataaagagaagacaaagtagttggtttacacagaatagtttattggtttgttagaggggattcgtcaaataaatgaatagggagaagtaaggagtacgggattctaaaacacggtattactttgatgctaaggcaatttggtagttggctatagtttcttgtgattttcctttgattgagcatgagtgtaaaaatttcttgatacaaaacatagctgccaattggtttttcttttgattggttattttcatgccaactattccaggccaa

SEQ ID NO: 4349 - DNA, 1858 bp, Medicago truncatula
  Intron number 1 from transcript Medtr3g025870.1 (locus Med tr3g025870) derived from phytozome v7.0 (chr-ID MtChr3; po s 6861306 to 6863163 reverse strand)
gattcaggtaataacattcttggccacaattttctttctctttatccttcaagaaattcatggctatagaatatgctgcattaaaatcagacatgaaaaaatattagaaatttcaaattgttcgtatggatcacttattttaatagagattaaaaggcatgtactggtagtgtaaagaatatggctaaagaatatgctgcattaaaatcagacagaaaaaaatattagagattagaaggcttgactcattgttactcaacttcaacgattcaaatccatataagaatcccaaaacaggaaaattcctagtaaaattgcacaaaatcgtgaaattcatatgggattttaaaggattctgtctatttttatgatacgggtcaattttaatttggttcttcaattggcttggtctatacatgtgacccggttctgtaaatacataaatgaccaagttttttttatactttcacgccacacaatctcttcaccttaagagattgatgaagacgaatttgttgaagtgatggaggataatcaatataattgacgatttattattgcatctagactttgcctttatgtattttgttaggcatctagtctcttactttgaaatttaatagtcacttaatcacttatgatcaagtgttttgtcagacatctaggattcgcctttgagtattttgtctaggttgtttagcattattatgattactaaataatatttggcatctaggttttgagtcatatatgtataaatgttttgtgcactttaaacttcgaatcatttatgactatagacaatttataacatatagttagctttatttttgttttggtagaatccatcgattttgattgcgattttatgattttactattccctttcgacctgaagcaaaatcccaattttgacaaccttttacaacttgtcaagacaacaaacaattgcataacctcttcttgagttttttgtgaaaaaaataataatatgatgtggcgaattgaagagttgtaattggatgccagattaaagtaactttacactgaaagggcatatccttcaatctcttaactaaaagattattcaatagtagttaaaaatttgagttcaccaaaaacctaaacaaaaattcaaagctaacatagggagaagtgtgaaaaatatatcagaaaatagtaaaccaaagtcatcactaaaacacaaaactaagcttggtcatcatactttggagattattttatgatatatacttgaattgtcaaatgaaaaagtgataccatagatacagtttcttcaatcatagacgtcaatactatatctgaacaaatctataacaaataatcacactgcatgatactgataagttgatcaattacctaaggagagatatcccagcattaaaaatgtttatccttttctattcatttttcatgaacatttaatatatctcttcaacaaactttcattttatagtcattacattagagtcaaatagacttcaaataggcggttaattacatttagtagatggttaatgaacgtacaagatgtcaaaactcatgaaccacgtccaagttcggggttaatgaagttaccttggaaattaatgagttttgacaccttgtaattaaccacctatttgaattgtactaaccaattaaaaatttgtcgcaaaagttgtctaaagttagttgcacaaaaatcatttatcttgtctaatagggagattatatatagatgctttaagtggaatgagcatcttttgtttttgcttcatccatatcaatcttacttatgcaactcagctgttatgcactaggttcgccatatcactggctgagggaattgagatat

SEQ ID NO: 4350 - DNA, 2370 bp, Medicago truncatula
  Intron number 1 from transcript Medtr2g046700.1 (locus Med tr2g046700) derived from phytozome v7.0 (chr-ID MtChr2; po s 13106684 to 13109053)
gacttgcaatctaagcttgcggataaggtttgtttcttttattctgattcttattgtaattgttgttgactatgttttacgcactatgaagcacaaacacttctctgattagatgtgtcccagtgttgccgagacaacactgacactatgttgagttgaaatatttgatctatgttgagttgaaatatttgatcgtagttgaaataagaattttattagtatgctccgttggtgtacgctggcatccaattatgatgtgttgtgacgtgaattaatgaatatgaaatatgtagttaatttctagaaataattgataattataaagttacataaatttatttgttatgagaaaatagaagatgcactgtcaatgtaaaatagtttgaaattataaaattattttgaaattggtgatcattttgttttctcccaaatcacaaagatattttgaaattagttgtgtgacatggtacattcatgggttcttattggatgatagtgtaaaactattttacaccttaagtgcatgaccattaaactcaattttaattcctgtttaaatttttttcaattaagcttaaataagctagcaaattcgtaattgataaatatgaaatgtcataaaacaatttttaattactaacttttttttttcttttccaattaagctcgaaatgttatttaaagtagtatataaggaaaaaaaaaaaaactataagctagtgaaaaatgatataatctcatgagagagtaaccgtgacctttttttttggagagggagtgactgttaccaaacagccctattttgtttgtgtttttgggttgaaaatgtaaagaataaggctatggacttactttgggttttggctttttcttttaggttatttgcttttagttaatgattgaattatcttatttacaagatgttgatttagaagtgtttgaaatttatttgtatgagcaattgcattatgctctgtcaatttaaaatgttgtttcatttctttagggtatgtagaatttagatcgtatttacaagatgttgatttagaagtgtttgaaatttatttgtatgagcaattgcattatgctctgtcaatttaaaatgttgtttcatttctttagggtatgtagaatttagatcgtatttacaagatgttgatttagaagtgtttgaaatttatttgtatgagcaattgcattatgctctgtcaatttaaaatgttgtttcatttctttagggcatgtagaatttagatatttgaattatgtggatgaatttgtaggctacttctagggacggaactagaaaaaattatcgaagggccggggtgacaactgtagagtaatttctattgtgacaaggatggttatggcgtatgaaaatgacgccacaatctcatgatatgcggcaacatacatgatgcttttatttacaataatgagttctataagatgagttgttttttctttataagcaaaaattattattaatgagactacaaggaatactccaaccctgtacaatcaaatattgggagatttaagaattcaatggattacttaactaagcgaaaaattgaaaacctgaactctttcgctccctcataatataccatccgcaagagagcacctttttaggagatatcacaccattccctagcaattgctccttgaaggacataggagttgtcatttaaatttgaggatttgttttcttcttctagttatattttatttaacatagtttattataattataatcatcttttttacatttttctaaaagttgctgccagttaaattgttaaggatggaatggcgtgttagaaaggttagggcgagtgaaaaacattactcctaaacaaaattagcaattgtgtgcaggttctataaagaaagtgggactagtacgttttttagggggtgaaatgtgttttttatagatatgtctcaagtattacttgatactctggggcgacgaccaccccaaatcatgtataccttgttctgtccatggctctttctatgaataaaaatgatgtgatctgtgttgtgcaacccgtgttatggcatacacgtctttattttcaagcacaaattgtcgttttggtaatattacttataatttgaaagccttgttaactttcatgcacagatgcaccattttttttttcaagcaatgaactgtcgttttgttaatattgcttgtagttttgaaagcattattaactttcacgcacagcactggttttcatgtttcggatataagaatattgattattgaatttgtctatgttgtgtgtgtgttcattctcttgagaatttatcgttaatcgctcttgcagttgccacctatctgtgttggag

SEQ ID NO: 4351 - DNA, 4598 bp, Medicago truncatula
  Intron number 3 from transcript Medtr5g044950.1 (locus Med tr5g044950) derived from phytozome v7.0 (chr-ID MtChr5; po s 18704728 to 18709325 reverse strand)
attacacggctgtgaccaggaaaggtaaatcctcatattatatgaatttttaaaatagtatatgacttgttcgatgttctcttttttacttgaaacattgtgtatgttttgttttataccttttctattatatagagaaactagactataaatatagtggtggagtaagccatgaatggattgctggttgccctttacccagaatctaagcaataatgttggcttttcatcattgaaatggtagatgctataaaacagccattagggtagtttgagaaatttagaaagaaaaaaagagcacttgagtttgttgattctgggaagttgatttacagtttagttcagcgagtttatatggaagcagaaggaatttttcaaagattaagttgcttctagttgattaggttttgtaagttgtaccatatagggttgattgctttatgtaacagaatataaactaactgctcttctgttaataggagattatatatagggtattgaagctttaatctccaagcacatggaatattgatagagatgttttttcgataaaacattttctacatctactttttgtcttcagtgataattacaaggcgtaaataatattttcatccttgtaatatacaccttctccagttttagtccttaaccttttttatgggttttgatcccttaaacatttgaatagcttctttagtccttgttttgatatcactacatcggtgcccgtaatattggtctttctttaaattagtccttgtaatatttgaaccatatttattttggtccctagagtaggggctggttcctacattgaccaaatcagctgcgggtctttataaagacatagggaggccaggacctcctccaaaatatctcattcttaataggtatatctgtatatataaattttttctcttttttttttttggttaaaggtatatataaatagggaaatgttaacttgtgccctgagggcacaagttaatgattcaaatatagaaaaaacttatttgaatgtgtgcattgcatttaatattaaactttttaatcatttaaatgcacaaaattttagaaaatgtttattcttttaggtttcttttagggcacatgttaacactacccatataaatattatagcattatcttatattatacatattatattgtgcacatatattaccgtgtacaaagcagtgcaaaggtaaagtgaattatcacaagtagcataatccgggttctaatccagtagagtagagactttctttttctcccatttcttctgtatttttaaacaaaatgctataacgcataaatctagattcgaactctgttcagagatcaatagtcactaggactagccaccaataacacattctcaatcgtgataggaaagtatatatgcacacacgttaagcaaattgacccccctcacacaaacctttcaagctccgccacttgaccaaataccaatattacaaagagcacacataaattaagaaggacctaaagcaatttttcttgtgtttcgagtattgaaaacaacaagaaattttgctttagggattcttgcttaggactaaaactggagaaagtgtatattataaaatgtgaattaatcctaattacagaaatgctccatttttgttttattttttccttcttattttgaaagatttgtggtaagagtcccacatcagataggagatggccttgcaatgtgtttataagtggggggtaatcgtcacctcacaagccggttttgtggggttgtgttaggcccaaccacgaattctaagatggtatcagagcctcttcaagatccatcgggccacctgctatcaggttttcgctatcgggccacccaccatttatgtccacgaaccaagcccattagtgctggtcgtgaggggtgtgttaagaatcccacatcggataggagatggtctgacaatgtgtttataagtgggggtaatcctcacctcacaagccggttttgtggggttgtgttaggcccaaccacaaattctaagaatttgtatagagaacaatgaaatgctttatgatttcattttatgtttttactaataattaaaaaaaaaaagtacttttactttgtttcttgttttccgaagatttgtatgtaagctaaaagattaatctttaaagcataacatccaattcaacatatgttcataatacaaatctacatcataagttcaatatcaattcgtctagaagctataattctagatatctaggacattagccaccccctatttaggaaggcatcctccatgtgatcttcattcttatcaatggagtctctatctacattaggaacctccaaactatttgcaagtgcaccatccttgccaccattaccgcttgattcttcaatttgaaccaattcattttcaattttagcatccaaattcaaatttgaactttcttcatgctccaaaatctaaccattattaggagagaggtagttaatgttatattagatagctatcctaacttgcttcttgttcattcttgaattagccatcacaaatgtgaaatgccacatcattcatgatctttttctttaaatgggttacttatctcgacgtggaccttaataattataaaatcaattgaatcataatatattgggtaattctagataaataaccattttcttcataagtttgggtgcttatcatctgaacgacattctaattatagtacaaacttaaccagtctcttcaagaatgattatgtcacttcttatttgacttcgggatgcttgaataataaaaaggagcactataagaatgttcacatccttgcaatgaaaatctaatcagtttgcaaagtctaaagacgaggtgtttgttgaaaatcaaaatgcaaacaagggtttttggaggaatattgtacaatgcttgagggttgcttgtcccttaatttaagtgtcgcattttggattcaaatgtaaagctagccacgaggttcatttaaaaagagatgggtcgactaaagaaaagatacataatgtcttcaatagggttagcggccgagagttacttatcttccacttgttttattatgaagttaagtggggactatatgattgcttagaaatgatagtgagagaccttgacaaaataagattgatggccgtgttcacaatgtcaaaagttaagcttttggtagggtaagaggtaggtacacatgcacttcaaaccaaaactcgaacgatagtgagaatcttatagtgattgatatccagttttagaaagatttctatttgggtagcttgacatatagttcatccggctcttagcgtaattgaaatgtttttgtgagggcaagcttcccaatctatgtaacaaattgtatttaattctttaaattacctaatatattattatttaattgattttttaattatttagatccacaccaagaaattaactgtttaaaccaagaccgttaatgatgtggtatttgtgatggcttattcaagaatgatcgtgaagttaggaaaacaattgactataatattaaggatctttctttggatgaatatggatcatcgcagtctagatttgtatgctcgaattagggatcacttggttcaagttcgaaaagatagtggtattgatgatgcgcttgcaaacgatttgggagtttctaatgctgatgaaaatggagatgccatttttttttttgtggtggccggggcttgaaccccggaccttgcatattttatgcattgtccataccaagtgagctaagctcacaaggacaaatggagatgccatttgattagaaggaagattttatgattatgtagggtgactattttaaagttgggaatgaatatccaatatatctagaattgtagttcctagaggtagattgattatgaacttatgttgtgtgattgtgttatcaacttattgttgagttgtgtgttatgttttagatatgattatcatgagttacgaatttatgattataaatatttagtctaacttggtgttattaaaggtttttcctaacatgttgcttatgtgcctatgtatgagtataattttgtagtttcggttgcatttcaatatttcagcacctcccgattctatgtaggctgtaaagtttgacaacatcggtttttgatcattttgtttggacagatagagcttactttaacgaggtagtgggatgaactagtatctctttgagtctacaggcttttactaggatgacatcccactgattgataaatctagcatcatagtacagtatttggtcatgatttcttcttatttaatgattttcctttccttgttatatcattggttttttacatcgtcatttatctgttactgcatggctttgtctgtcaaaggctattattggttgatggttttagttaaactgtcctgatgctaatatcacactaaagctgttgtactcaactttgtttggtagtatattctttcaatatgaacttgtagattattacttctgcatactgaactgttttcttctcatttgtacttttgatagattttcatccttctttaggccggatatcttttaca

SEQ ID NO: 4352 - DNA, 1781 bp, Medicago truncatula
  Intron number 3 from transcript Medtr1g093690.1 (locus Med tr1g093690) derived from phytozome v7.0 (chr-ID MtChr1; po s 19148737 to 19150517 reverse strand)
taacaggtacatccaaactgatgaaagtaagagatattgggtcttcttcctttaaagagttcatatgctgttttctccaacataggtctgatatagatcctattttgaatataacatgaagtattgactgcttctgcccaaaaatgtttagctaagttgttttcatggatcatggttctggccatttcttgtaaggttctgttctttctctctacaaccccattttgttgtggagttctaggagaagaaaactcatggagaatcccatgtttttcacaaaaaagttcaaatggctcattttcaaattctccaccatgatcacttctgactttcaaaattttcaattctttttcagattgtatttgagtgcagaagctgctaaacacttcacatgcatagtctttacttttaatgaattttacccaagtccatctgctgtaatcatcaacaatgactaatccatatttacttccatataaggatgcagtgttaactggaccaaaaagatcaatatggagtaattctaagggtctggaggttgatacaatgtctttagatttgaaagaacttttcacaattttccctttctgacatgcaccacaaagtgcatctgaatgataatcaatgttaggcaatcctttgaccagttgtaacttgctaattttagaaattaatctccaattagcatgtcccaaccttttatgccatacccactttttatcattcaatgacagaaggcaaactaccttctgatcagccagatcagagaaattaattttatagacattctcaattctctttcccttgaatgtaatggatttgtcatccttgttgactagtgtgcagttggtcttactgaacattacatcatacccattgtcacaaaattgacttatgctcaataggttatgcttcagaccatctactagccacacattattaattgagatggaggaattaccaatagtacctgtaccaatgatctttccagtttggttgccaccaaacttcacttctcctccatctttcattgtaagggtaaggaacaaagctttctctccagtcatgtgcctcgaacatccgctgtctaggtaccatgacctttgtttctctcttgcccttaagcacacctgcatttttggccaattcagatttaggtacccatatcttcatgggtccttttgggttagttttggaggttttacttttcctcccttgtaccttagggtgaatgctgagtggcttctgatcattcaatactttaagtttgacaccttttggtattgttttctcagaagcagtagctgctttgttcttctgatccttttgttttggaattttagattctggtttaatcagattctgatgaacaggttctgatcttttcagaattttaatcttttgactcttaggatcagattttgtcattaccttgatcttaagattctctggctttgatgtgatcttagcctgtgaacctgaagcttcaggttttgactgaacagcagttttagcatttgtaccttcaggcacaaaggtggatttcaatccatccttgatacaatcacagtagctcttgagactgtattctttggatttctcctcagaatatccaacccctttgcctttgttcttgtatgtgctgtagatcatagaagcaactttgcttctgtctattccagccataataaaatcatccaaggcaatctcatgtttattgcctgaacctttatcacatttttcttgtagcttctgacaaagactcttgagtctatcttcat

SEQ ID NO: 4353 - DNA, 1993 bp, Medicago truncatula
  Intron number 2 from transcript Medtr3g106230.1 (locus Med tr3g106230) derived from phytozome v7.0 (chr-ID MtChr3; po s 26712316 to 26714308 reverse strand)
gtaatcagagaaagatcggacacacgtatgtgtatggacaatggttaaactgactgtttctatgtaatttggaatcttgtggacaagtggcttacgttgctaatttgattttagtgttcatagacattttttgagaagaggcttacaaattttagtaatagtaattatttgtgacaatttgttttagaattaaaacaattgatatctatctaccaaaaaaaaaaaacatttgatatccatcattattgtttctaaaacagtttcactcaacaaaattctgtaatttgtaaggtttttttttttttgagggtcgtcgcagaaaatccgcttagaatgctgatgttttaagataactcaaaagtgggtcatttgaaaattagtcatttttattaaccgtatttgatcgtaatatgaacttaggttgatgcatatggataatttagcacgattgtagattagagttgttaaaatgaaagttggcgcgaatgtctttttcatgggcaaaagttttgccaacaacccagaaactaaaaagcatactcacaatgattaaatccacaaaatctgcaaggagaatgaagtgaatctgaatatgaaagtttgaaatctcttcgcgttttcaatgtatcgtccctttaaaatcgcttcttctcataatcgattcctcttcacaacaactgaacaagaatgagaaagtgagaaaagttgaggtcgatttgggtagttgagaacgatttagagttgagattgattagggttcatcaatttagggttgagatcaatttagggttcatcaatttgggaatatattcatcgattagggttcatttggtttcattttcatttggtttcaatttgagaactgctatgaaaaataagaggtattatggttatggttcggttcggttcggtttggataactgtggttattaatggttcggttcggttaattaactgctatcaaaataatggttcagttcataaacttgtgaaatggttcagttaattttgatatggttcggttcagttactggttaattttgcccacccctgcaaataagcataagaaatgctcacaataggcacaatttaatacacaaacttgcagcaacaaacagatcacaccaatatacttgattgtatcacagaatacagatgcacaatcatcatattgtcacattcatcattctgttaaaaagtacgagtatatgatatacaacaatgctttatcttaccaagactcttcacatgaaacgcccaaagtgtgacttcaagcgcagttagatgcctctgtaaatatataaaattgaaatgatcaaaagtatttcaatcaccttctcaaaattacctctaaattagaaaaaaaaaatcctccctagtaaccgtaatctttgacgactcctcatcacttgtacaaattgctatcggcatcaccttcgcctccactcacattacttttgttgattatattactggtaatacctttggagtttgttgttgccagtatcatctcacctttctaatagtcgttgcaaccatcacaaacacttcttctacaacctagtacaatacatggatgacctcgtcatgcattttaaagtagcaccgcattacaagataaccgtgtctttgcaaatgcaatgttagaaaaagaaaataaaaactaaaagtaagtagcaatcaaaaccaatggtctcttttgtggcatacactggtttcccttgttcacagtatgagtggatggtggaaccatattttctacatgcccaaaccacataggtctagtttctaacatattttctactatatgtgttactcaaactctctctaatatcgtcattttttaaatttatttttcatcgtaatagaaaccaacgatgatcttcattcaaaacaatggactgaacttttggcttataataaagaggaattgtgtgttcattagggtccggtgtatgtgaattgggattcttctttccttcccttttgcaga

SEQ ID NO: 4354 - DNA, 2751 bp, Medicago truncatula
  Intron number 2 from transcript Medtr5g071770.1 (locus Med tr5g071770) derived from phytozome v7.0 (chr-ID MtChr5; po s 25490025 to 25492775)
aaagaaacctgttcgatctaagccccaaactggtcgtctctccaaaatttacagcaaccttaataatcccccaatttcatcttcatcttcctcttaggttcgtaacttctctctttctcatttttcattttattattgcgaattgaatcaaattgtagaaagattaaatgttttgagttgatagtttctgtagtctaatgtgttactgtttggtagtttatctcgtttgggcttgatattggtatgatagaaaagatagattgttgtcaaaatgcctactaaatcgtgacatccatacaaaatcgcaggattttaaagggttttgaaggattttgtccactttaatctgagtcatttatgactatatacaatttataacatatatttagcattattattgttttggtaaaatgcatcgtttaattgtgattttacgatttcttatatcgatgttacacaagtagttgagtaaaatcctacgattttgattgtgattttcgattttgctcttcccttttggcctgaagcaaaatcccgattttgacaaccttatcataggaaggaatagtttgagatacactatcctatattaactcgaatttacggaatcaatatgacaaaattttttatccttgtagtttatcttgtttattagtgcaaattctatccttagggaggccgttgtgttaggaaaagagtatagtaatacgacagaatgtttttcccttctaaacacacttcattgaccgtcgtttttggcttcgtaaataacatctagcatgcacgctcaacaaatccatctagattatggctaacattgtttagttaaacacatttggaagtggttcttgtaattctaactcgttgaacccagcaatgctatcggatcatcctcattctcggctaagtacttctttgactgtgttcttcaccatcaaatgcacaaaaaacatagcttccaaatccattgagcagtggtcttttttctttttgggagagacaactttgtttatacaatcaatcaccaaccaacgttgttcacaaaatatgaccaaatcaaaggactctacattcctcaatcatgataaggaattgatccgtctttgtctcaaagactgatcccgtcaccatagcttcacatttttgcacccttatatatccactaacatacaaattgtcatacaacttaatgcacaccttcacaatagtcttttctttggcaacacgaagcaaatgatgcatacagctgctcaaaagacactaagtaaggttgcgtgctgcatcatcttcagtcatatacaaaagatatttttagcacatgtttcttatattttgttcaatagaaagaaatgtctcatatctattgtgcctctgacttcatatcaatactgttcacaacagtatggtaatccttaaagcacaaatccatgagtggacttgaagatcatactgacagtccaaagaacatacacactttacatcctctattgttccccgtgtcaggctcctcaattccaatctaaatgaacttcttgcaaagttgtacctcaataccaatttttgttgtgcagtggttgacttacgtcatcatggcctcattgcatcttagaccatcgacaatggcaacaaggatgacaatgatgtcaagttccagttcagtactttgtctcctatctctctcttttttctaccaatgccaatgctaacaagagcaccagggcaatgcctccatccaaatttcaattatgaggcctatcaatctcatttctctacaacaattctcaccacagccattccttatgccttgattttaaatttccctgaccaatgaaaacttgttctgtgttaatgagtttggttttttaaggtataagttacttggtatacactatgtagtaaataccggcatagcaacactacacagaatcaaattgtattgcaattttgagtagcggctgtaatacgaccaatagttgccaaattgctgctgtagcatctactgcattgaaacttaagtataattcttacgatttgaaactttttggtcatttcaccgtaaaatagatatttttagccctcaacttaatgattttcccctttctttttttttaaaaaattgaatgacaatgaaatggccccctcctgtcttgtcatttcttctccgaaacagctttaccttcactttttgtggctttctggaagtcaccctcattttggagatagtgatttgcgtttactttaaatacatactttaaaccttggaggctaaaatttattttctttctgtgactttctgtcagtcatcctcactttggatatattgatattagttatgtatatatgtctctaatctcgcgtattcttctatatttttatcttttcggtgtttaaaatcagtttcttgtatcgtttccctaaactttgacgttccatactgctactgcccactagcgctatagcgttttaggggtcagtcactatgctccagtatactccactgatatataatactttctggttattatatagtgtagtaaatattgtatatgataaaagataggagattataaggttgatatgatatcatgtcttgtttatatctaaaactcatctcctatgtatttatcttaaattgacaccaaataggtcattcattgtttcttgccttgccattatagatgagatcattaaattgatttaagatatagaatcaatcatgagtattaacggttgcttcttgtcaatgcagat

SEQ ID NO: 4355 - DNA, 983 bp, Medicago truncatula
  Intron number 1 from transcript Medtr3g113780.1 (locus Med tr3g113780) derived from phytozome v7.0 (chr-ID MtChr3; po s 28654055 to 28655037 reverse strand)
attctcctctccaaaggttagttctttaatatccaatgttttttttttttttttttttctgtatcgatgtccaatgttaactattattagtcaattgaagttgtatttgtatttgtatttgaatttaggttagtttgagtagcataagtaattatgtgactgtgtatacgctatttctatgttaaactgtttagataagttataagttattttcataagctattccaaccgagttatagaaataaggcgtaaaatgtttatggacattccataaggtctctcaaaatgtctactgtatgtttggttccactcttagaattgattttgccattttggttgttgttgaggataattgattctacatgaagctaggatttgtagcttttaattatagaattgattttcatacagttcaactcactttttacatgaatgtatccaaacacataccacttttagtccggaactaaaatcaattctacaaaatcaattctatcaaaattaattctccacaccgcacggccaaacatacgcttaatgtatgtttggtttcacttctggagggaccaaaattggattctagagatgtagaactgtttctcacatgtttgatggctctcgagtagaattgattttgcctcaagaattgattctacttggagctagaaattcgagcttttgattctagaattgattttaacactcaaatattattgttcaactcacttttatatccaaacataaagcactttatcttcaactcacttttagttagaatcaatccactcaaaatcaattttgtggatgtgaaccatacatacacttattgttcaattcactcactagtgcttatattagataaattcaaataattcaaattaaacaagctacaattttagtcaaaataaaacatgtttctatgtatattgatgagttttgaaatttgtttttgtgtagtgtaaaaagttgtgctgttggaagag

SEQ ID NO: 4356 - DNA, 981 bp, Medicago truncatula
  Intron number 3 from transcript Medtr4g079440.1 (locus Med tr4g079440) derived from phytozome v7.0 (chr-ID MtChr4; po s 15976098 to 15977078)
gtacaattgtaaaaatactgaagtgcatttgtaaggtatccatatcttcagatgatccttatttactctcactcactctctctggattttgatttttcctttattatcatcaacacaatgattttcttgttttacgtcttttctatcaaatttatttataacttctgtctacttacataacatgtatatatggatgacactatttctgtatgtttagtattaggagtcagtcttttgaagaactgttaagtttcctgctgtaagaactctaactcaaagcaccattagacctctggtttggtggtcactcacttggtgataaggggaaaattttccttgttcgaggtttgagattgaatctccatttgcatcaggaaaagagctcaaatttataagaatgttgatattgctatcttggttccaatttcagctttgtatagtttatgcttttttttggtctgttgctttcatcaacttagtgggatccaaatatagtaaatgagttggttccaaatatgggttatgatagaacattataacgtaatttaatccatgtagccaaccccatttagtgggataaggcttggtagttgtttgctttcatcaacttacaaaaaaaaaccgtgtgactaaacatgagtgttattttctctgaaaaatttagtgtttatagacatatattatgcagtacttagacaaaaggaaaaaaaaaaaggttataattcattcaaagtttgttgcaatgcataaaaatccatttacgtatatttcatactcattactagtggaaattctattttgcccatggattttttatttttcatgctacttgtgtaatacaaaattatgtatacatgcttcataggtttcagtatgtcgttgtcttaaatttgggtttctcagtaccctgcttgaactatatgacaatgtttgatgttttatccagaattgtgctcgtattctccttgataaagatcacat

SEQ ID NO: 4357 - DNA, 1819 bp, Medicago truncatula
  Intron number 1 from transcript Medtr3g123430.1 (locus Med tr3g123430) derived from phytozome v7.0 (chr-ID MtChr3; po s 30972153 to 30973971)
gctgtgtttggtaacacaaaaaagctagcttatagcttgttggattagcttataagctcgttagaagaaaacgtgacgtgtttggtaacaagcttttttcatgagcttatagcgttttttgaaaagctatttcaagtagctttttagcttatagctggtagctttttatattttcttccaactttaaccttattaatttaattaattattttttaattaaacaagtacccatgttcatctttataaccgccccattttttccttaaataaaatgccgttttttttaaggagcactttatatatatatatatatatatatatatatatatatatatatatatatatatatatatataatattttttttatggaaatgctttatattttgttataactaacatgtcgtacaccacacaaaaaataactagcctattttttttttaaaggaaaaaataactagtctattgtacgttgtaaaattttatatattctacctcacattttgtttccacatttctcttatttttgggactcattaagcagagatcaaaattgttagtgaatttttttttaggattaaaggtcgaagaatttttttatggagactaagaccaaaagtttgaatatttatagggaccaaaaacatatttaactataattaaaaatattaaaaaataaatacattacaaaaaaaagtgtgtgtctatatatatattaaaaaaaaacatgtccttttatgtcattttatatttatcagcaactttaacagctaattttaccaaacacattatttttaataagcaagcttttcagctataagctatcagctatcagctaccagctatcagctagcttatcagctatcagctagcttatagcttctttttaccaaacagagccaatgtataaatatatgcaaggtcgcaggttcgaaccccggacaccaacaaaaaaataataaatttaaagtttggtacaatattttgccaaacaacttttaacttaaaaataactttagaactagaaaaaataaagaaaccaaacaactttaacttttttcttatagaactttattttaactttgttttaaagtagcttttagaccgaaaaaaaacatagccaaacggtacctaaatcctcgtcggtttaactcagtttgtaagaacaatacataatatatgcaaggtccgaggttcgaaccccaaacaccacaacaaaaaaatacaactacataaaatgaatattttgttacaaaatcatctcaatcttttaacaattactttctcttccttcaaaatatgattatttgtttaaaaaaacacaaaatgattaaaatatttcgaggtgtcaaataattaagatagaaataatttgcattttcgttgaacattaaccagagaatttataattataattagagaaagataagcaattgtaaaaataaataaatataaagcctttaaaaataaccgttcctgggacttccagagacaattccgaaagcacccttttctaactataacaattccaacttatattgccttttataaaaacaatattcaaaggttagtgggccatagtccaccaaagatcacagccatcaattcattgtcatacatatctaatggttgacatttattttgcaaaagaataaaaaaaaaaagttcaagtcacttaccgtaggagatctaaagaggtctcccaccctaacctttgtcgtagtttctgaaccatcataaatgaacatgtatgcttagctcaaaacttggctagaatatccacataggagttgctttttctttgaatgtggtgaacagag

SEQ ID NO: 4358 - DNA, 3806 bp, Medicago truncatula
  Intron number 1 from transcript Medtr4g064750.1 (locus Med tr4g064750) derived from phytozome v7.0 (chr-ID MtChr4; po s 12507150 to 12510955)
ggtactttccaatttcacgtttttttatgattattattgttttgttttgttttatttgaaattagccctatctggtaagaatttgtaatgggattgtttgttttgtttgattaaatgatggattatattattttattttatttgagaattttatgttttaagggttagacatgtatgagtgaagtcctattttagttatgaggaaaaactgccacaccctattttatatgtgacgaaaaataaaagctaatatgaagcacagacactcctcggattaggcgtgtccttgtgtctgacacagacacataattacactgaattatgcgattttctcaaattattaggagtgttggtatgtccgcgtcagtgtctttgtcgtgtccggtgacactgtccgtatctgtacttcatagaagctaacttatagctgacaagcttatagtggatgacttataagctagttataactgatagcggataaactagttgattgtagtgtttggtaaaattagtggttgaagtaacttataaatatgaaatgacatgcaggggtaaaattgagataaaaagtgataggttataagctttaagctataggctacttgagttagcttattaataaccgctataagctcaagaaaatacgctataagctcgtgttaaaatggcagttaccaaacaagtattttttaatcatacgggcttttaagatatatgccataaaactcaaatttatgtcttacttaccagagtcttaggagaaaaataaactacgacaatctagtcctctaccttctttaaagaggcgagtattaagtttttgaggcaaggactaatttgtccatggttatttttctagaagattaaaacttcaaaagtggctttgattttattttattttagactaagttgagtcttgcaattttacttatagactaaaataggtatgcgctctgtttttttttttggtcaaactcagtatgtttttcgtctctattgttatgtcaaattttgtgtacctatttttcagttccttcgaataataaaaacatatttaccctttctgcaatgattatagttaaaagggaaatttctttgaaggactaattagcttgacagtgtttggtttgttgatcaaatgcatttttgttattatccattataaagaaaatgccgtatgtgattgtgatcaacacagaagatgaattgaaaagattgtgttttgtgcattgctagttaatgtttatttcctttgatatgagttctatataaggtagctatggacctttttattgaatgctatttggtgttatacactcctctgacttttatgacatcggataaacaatgattcacttgattggtatctgatctagcagttaacatcaaatgactcaatatttcgtggtttgtttcgaattttcatgttcgtgggttattgttttggctgggaatggtggagtgtgtctcggagtggggttgtgattgtgtgaatgtttgacttaagcaggtatcactgaaataacagtcatcattatcagctcagcaatcgccgcaagcatataattgattgcttgaaatttttatgcttgagatgagcaatatctttgcttatgcctattccataaacttttctgatcttgtgtgatcatgcagtggatgttttatggttattggctatgtatatagcaatcttcaaaccttttaataactctttggttgagggggtgtttgatgcaaaagttggctaaaggggagggaatacaaggggcaaaattggatggatttggaatgtaggaaaaaataatttagaatttgttgacttaactatcctggttttttcccaaactgcaattatatttctcattcctgacagtccgtcttaacattgccgcctttagcgtctttactttcatattgtgcaagtctcaatattaaagtttcttcacgtcagtctaagtcatagcagttaatgtttttgcaacttattttcatctaccttgttgaatatcaattctattgtttgttgctgatttagatatgatttgattgattgatcccaaccaaaagattatgaagttttgaatttttttagtaccttgctatatagtttggtttcccattttagctatctatttatttatttattttacaataatgattttaaatttataaatctgcataatgtattgatggggactatggtgatctagtgatttttgatatagctcatattattgactagcttgattggcatttctctgttttcttggcataaatactgaaaacaacaagaactatttcccactaggtgagttgcattgatggtatgaacagaatcattgtgtttttgtcaaaattaagttatagaaaaggcccatccagatctaggatttttgaatggttcctcagagttttccttggtcttcatcaacctttatttcctgggcttcttcaatttgataaattcttcttcttgcgactttcagtcatatggctaaaccattttaagtaagctctatcatttctaatctcatttttcttgtccattccactaccgaattttcatcctggatacaggttaggttctgattggcattttatccctcaccattcattactgtaaaccattgttattgttgattatagctgtttggtaatttttgttttatgaaatgtgaagacacctttcgatcactgataatacacacgaagcattttctgcaatgtatccacctagtttgagttcgatgatttacatctctccatttctccatcaccaattatgattgataatccaactttctactgaatcaagcattacttttattttctttcatttcatttaaaaatatttgaaatattcgaatttattacatgtaatatgccagctgtcttgtttggataatgctaatagatttgaattttgttttcatagtttttgcttactgggtttcaaaccttccattgcttgctttagacagggtagaattttgatttgtgttttcttttcacattgcatgactttccctgctacttctatactagttcctaaaggtggtttatcttgccaagattccttgatgtagcttttttccctgttttagctgttgcttatgaagcccagacgcttcaaaaaatggagaagtataaatgtccgacacatccaatgctgtgtctgatactttcccattacgtatccaaatattttttttctttctatttctttatagaaatattttcaccgatatacatcttcaatccacctcacgtgataaagacagctgtcttctggatactgtacatcttcaatatgtcttactaacttaagacacgactgtatgtttttgtgatgcattcagtacaaatacgtgggggaaatatatgtaactacgcatacattatgatcaaatactttcttgtaactgctcatcatcatatatcgactactactgatatgttttatgttgttagcgaaatgaccttaagctttgtggattatatatatgaatacatttttgtaatgtatcatagacgtgtcatagtatcttgattcttaaaaatttcacatatgacacgtattgcattcttagacatgtcgtagtatgttgatttttaaaaatttcatttatgtgtcgtattgcatctgtattatactatgtatccgggcttagtttatgtcagttggatgtttctttgtcttaacttttttatcaatttttttcatccttatagatgttttggtccttgaatttgatttttcacttataataaaatgtgcaggttttgtgctgttcctctctcta

SEQ ID NO: 4359 - DNA, 649 bp, Medicago truncatula
  Intron number 10 from transcript Medtr1g009190.1 (locus Me dtr1g009190) derived from phytozome v7.0 (chr-ID MtChr1; p os 1126527 to 1127175)
ccctcatcaagtgagaaatagaaaggtaaataaggacaccagttttatattaaaaataaaatcagagtgaaactactttacaaatcttttacttatataaaacattttagcgcaatcaacaaaaatttagaatttgatctctaaaattcaacaatgaatctttgaaccacagcacctaatagaagaggtaaaacttatttcgtatacataaacgtcattaaaataggttttcaagacagcctaaaagaatctcggaatcatatatcttaactggctaagcacagtcccatttccaccctgatgagatcatttttcttttaatttatttttattatttttatatatttttgttatatagtttggcagtgttaggataagagaattagttcagttacttatttgtttaggtaggattattttgtataaatagggtgtagtgaaattagaatgggggtatcattgaatactttatcttttgtgagtagaagtgactctattcttgtgaaggggaaacccctggaggagagatttttctcctattctcttttattattgctcaatctttcaataaaattgttcgtagttttcaatcaaattctcgggttcctaacacatggttatgttatttcagccttgcatcaaagtggct

SEQ ID NO: 4360 - DNA, 530 bp, Medicago truncatula
  Intron number 3 from transcript Medtr2g007930.2 (locus Med tr2g007930) derived from phytozome v7.0 (chr-ID MtChr2; po s 1322868 to 1323397)
ctgctaaaaggagactttcatctgctgttgttaaggtattttctttttccacttaattttgatattcaagtttagtttttagtttttagttttgaaaattcaaatgcagtgtgcaatgttttatgatttaagggttgtttgttacagattaaatttggttaatttgtttttagtagattctcttgaaaagttcttgattgacgattttatgaaaagaagtgaatttctttatagtaaataaatacaaaatttctttgtagtgtgcaattgtctaataatttaagggaccagctgttatagcttaaattggatagaagatttttatttttcattatggtaaacaaacacagaatagttatggttttattagaaatgtctacaaaacaatatcaaaattattagaaatctctaaatcataactagtagtgtcgtgcccctactcatgtgccttcctgacccctaaaccacaaaggggaaaacagaattgtgtctttttaactgtatatcttgtttggaaatgaaggttggtg

SEQ ID NO: 4361 - DNA, 8853 bp, Medicago truncatula
  Intron number 3 from transcript Medtr3g039180.1 (locus Med tr3g039180) derived from phytozome v7.0 (chr-ID MtChr3; po s 10226469 to 10235321 reverse strand)
tgttagtttgagcaagagttgtaaaagtctaagtggttaatgtaacgcccactttcgtttaatcgttatttaatcgagtttaggcaattatattctaattatataatatatacatgattttgatatattttgatgatttgattgatgacgtgttaagttatgagttttggagaatttgataagattagagaatatattttattgttaagtaaaataaagatttgaaaataatataaaatatttagttgagggttgttttgatattttagatagttttgggggagaaagtgagataaaataagtaattagaaaaagatataaataggagaagacctaatattttagaaacttattgtacgtgaaaactattggaaaagggagaaaaagcttagagaggagcaagagaccaagagggctgcgattttcttcataaccaggtaagggtgggactaataactcagtagcattaacctctgtaattctgatgattagttgacaaagttaggattgatttagaaaagttttggaattaggttaaaaccctaaaaattgatgatcaaacggtaaaacttgtttagattgatgtagaaaccgtcctttaaccttagaatatgtttaggatgaattctggaatcaaaattaggctttgaaccatgttgtgtgatggatttttgagaaaaaccctagtctgcccgtgcttctgttcatcgctcgccacagcgagtgatgaacctcgcctcgcgagtgatggacttcatcgctcgccacgcgagcccctttccttcgcctcgcgagttgtttggtccaactcgccatggcgagcaaccctttctcgcctcgcgagctcaggcagagtgcatgtcatattttgtatttttgactttttagttggaccttgagtgtctttaagtgcctagacatacctagagatgattaggaatgattttaggacaggattgaacccagaacaacttcagtttgggagattagtgttactcgccatggcgagtaagtactctcgcctcgcgagtacaaccagaatgtagttgcttgagtggttgtgcgatctgtgtcgcatgtgttgatcaagagtgaacccctaagtggtgttgagacctagtggagacgtttaatgcagcctgtagagttgtttaagttatgttgatattaaatggacatgaactaaggtattgtacattcatgcaagatatgaaaacttgataatgatgtaatttatgtgctattgatataatgatatcattttgtttatgtgatctgtttatgctgcttccgttgtttaactaagtgcataagtatatgatgaagtttagctccaaattattggatgcatgttgataagtcgattacgttgttttgttcatatgtgtccatgcatagcataacattgagctttgtcctcaccacgaaaattaggagctttgtcctccgcacgttttataggagctttgtcctccgcacgattaaagtatattaatacttatgatgacgattggtaccacatgcatatatggagtctaggagcattgtcacattgtcatgattaagatgccttgttgataatgattgaatatgtgattacgtgatacgtgcttattgattatgttatgttatccctaattaatggatacatggttacgtgttaaaagtttagcaattatgcaaagttaattaatgaaatgaccatgttgttaacttatgattcttaattgcattgtttaatgttaatctgttatgaaatctcaccccttctgtttgaatgttacctcgaccgtgggtaacgtgcaggtgaccgagcttagtgtgctgtttccgtcgtgagtggccttgccttcactgtgtcttctaggtcgctctgatacgtaacgggatgggctttatgaattatgcatgcttcattctattacgtgacttttatgctatttatgattatgaactgatttcttttaagaattatgatgaggcctgcgtgccaaaaccggattatggattacgaactaaattccgctgcaatgttaaggatattatgttaaatcattatttaaccgtcttggattatgttatatgtgatatcccgttgtttatgatgctactctgataaatgctatgtttttttaaagaaattttgatgttgggaaaacggggtgttacaattggtatcagagcaggttgatccgtccggtcaattagagagtcgtgtcgagtcttagtaatatttatattactatcttatgttgttgttgctacttttggtagaatatcagaatggctggaaggaatgatgctgcattagctgctgctctacaagctgttgcccaagctgtgggacaacaacctaacgcaaatgctggtgcgaacgcggaagctaggatgttggagacgttcatgaagaagaaccctccgaccttcaaaggacgttatgaccctgatggagcccagacgtggcttaaggagcttgagaggattttccgagttatgcagtgcactaaagatcagaaggtgcggtttggtactcatcagctagccgaggaagctgatgactggtgggttgctcttctgcctacccttgggcaggagggagctgttgtgacttgggctgttttcaggagagagttcctgagaagatactttccggaggatgttcgcgggaagaaagagatcgaattccttgagctgaagcaaggaaacatgtccgtgacagagtatgctgccaagttcgtggagctgtctaagttctatccgcactatactgcagagaatgctgagttctcgagatgcatcaagttcgagaacggtttgaggcccgacatcaagagggcgattgggtaccaacagctgagagtttttcaggacttagttaatagctgcaggatctatgaagaggatacgaaggctcactacaaggtagtgaatgagaggaagggtaagggacagcagagtcgtcctaagccgtacagtgcccctgctgataaagggaaacagaagatggtcgatgttaggcggcctaagaagaaggatgctgcagagattgtgtgtttcaattgtggtgagaaaggccacaaaagcaacgtctgccctgaggaaatcaagaagtgtgtccggtgtggcaagaaaggtcatgttgtagctgattgcaatcgtacagacattgtttgctttaattgcaacggagagggtcacattagttcacagtgtactcagcctaagagggcgccgactactggtagggtctttgctttgactgggactcagacagagaatgaggatcgtttgatcagaggtacttgctatattaataatactcctttagttgctattattgatactggtgctacgcattgttttattgctttcgattgtgtttctgctttgggtcttgatttgtctgatatgaatggagagatggttgtcgaaactccagctaagggttcggtgactacttctctcgtatgtttgaaatgtcctttgtctatgtttggtcgcgatttcgaaatggatttagtttgtctacctttgagcggtatggatgtgattttgggtatgaactggttagagtacaaccacgttcttattaattgttttagcaagtcagtgcatttctcttccgtcgaagaggaaagtggtgcagagtttttatctactaagcaactgaagcaactggaacgcgacggtatcttgatgttttcgttaatggctactttatctattgagaatcaagcagtgattggtaggttaccggtggtgtgtgaatttcctgaagtttttccagatgagattcctgatgtgcctccagagagagaagttgagttttctattgatcttgttcctggaacgaagccggtctcgatggcaccttatcgtatgtctgcttctgagttatctgagttgaagaaacggttggaagacttgcttgagaagaagtttgttagaccaagtgtttcaccttggggagcgccggttttgttagtaaagaagaaagatggtagtatgcggttgtgtattgattatcgacagttgaacaaggtaactatcaagaataggtatccacttccgagaattgatgatttgatggatcagctagtgggtgcacgagttttcagcaagattgatttgagatcaggttatcaccagattaaagtaaaggatgaagatatgcagaagacggctttcagaacgcgttatggtcactatgaatataaagttatgccttttggagttaccaatgcacctggagtgtttatggagtatatgaatcgcatcttccatgcatttttggatcggttcgtagttgtgttcatcgacgatattttgatttactccaagactgaagaagaacattctgagcatctgaagattgttttgcaagtgttgaaagagaagaagctttatgctaaattgtctaagtgtgaattctggttgaaagaagtgagttttctaggccatgttatttctggtgacggtattgcagtggatccgtctaaagttgaagcggtatcacagtgggagactccaaagtccgttacagagattagaagtttcttgggtttagctggttactatagaaggtttattgaaggattttctaagttagcccttccgctaacgcagttgacttgtaaaggtaaaacttttgtgtgggacgtccattgtgagaaaagtttcagtgaattgaagaagcgtttgacaactgctccagtgttaattttgccgaagtcagatgaaccttttgtggtttattgtgatgcgtccaagttgggtttaggaggtgtacttatgcaagaaggtaaagtggtagcttatgcttcaagacagttgagagttcatgagaagaattatcctacgcatgatctcgagttggcagctgtagtctttgtattgaagatatggagacattatttgtatggttcgaggtttgaggtgtttagtgatcacaagagtttaaggtatttgttcgatcagaaggaattgaatatgagacagcgaagatggctcgaattgttgaaggattatgacttcggtttgaattatcatccaggtaaagctaatgttgttgcagatgccttgagtaggaagacattgcatatgtccgccatgatggtcagagagttcgaattgcttgaacagtttagagatatgagtttggtttgcgaatggtcacctcagagtgtgaaactgggtatgctgaagattgatagtgaatttctgaaaagtatcaaggaagcacagaaagttgatgtaaagtttgtggacttgttggttgctagagatcagactgaagacagtgattttaaaatcgatgatcaaggtgtgttgagattccgaggaagaatttgtatcccagacgatgaagagattaagaagatgattcttgaagagagtcatagaagtagcttgagtattcatccgggagctacgaagatgtatcatgatttaaagaagattttctggtggtctggtttgaaacgagatgtggcacagtttgtgtattcctgtttagtttgtcagaagtcgaaagttgagcatcagaaacctgctggaatgatggtacctttagacgcgccagaatggaaatgggatagtatatcgatggattttgtgacgagtttgccgaatactccgagagggagcgacgcaatttgggttattgttgataggttgacgaagtcagctcatttcctacctattaatattagtttccctgttgcccagttggcagagatttacatcaaagagattgtgaagttgcatggtgttccttcgagcattgtatcagatagagatccaagatttacttctagattttggaaaagtttacaagaggctttgggttcgaagttgagattgagttcggcgtatcatccacagacagatggtcagtcggagaggacaattcagtcgctagaggatttgttgagaatttgtgttcttgaacaaggaggaacttgggatagtcatcttccgttgatcgagttcacttataataatagttatcattctagtattggaatggcaccgttcgaggctttgtatggtcggagatgcagaactccgttgtgttggtttgaatcaggagaaagagtggtcttaggaccagagattgttcagcaaactactgagaaagttcagatgatccaagagaaaatgaaggcgtcgcagagtcgacaaaagagttatcatgataagcgtagaaaagatcttgaatttcaggaaggagaccacgtgtttttgagagtcactcctatgactggtgtaggacgtgctttgaagtcaaagaagttgaccccgaagttcattggtccgtatcagatattggaaagagttggaacggtggcttaccgagtgggtttaccaccgcatcttgcgaatttgcacaacgttttccatgtgtcgcaacttcgaaagtatgttccggatccatctcatgtaatccaaagcgacgatgtgcaagttagagacaaccttacggtagaaactttaccgttgaggattgacgatcgtaaagtgaaaacgttgagaggcaaggagatacctctcgtgagagtcgtttggtcgggagcgactggtgaaagcttgacgtgggaacttgagagtaagatgctggagtcttatccagagttgtttgcttgaggtaaattttcgaggacgaaaatcttttaagtgggggagagttgtaacgcccactttcgtttaatcgttatttaatcgagtttaggcaattatattataattatataatatatacatgattttgatatattttgatgatttgattgatgacgtgttaagttatgagttttggagaatttgataagattagagaatatattttattgttaagtaaaataaagatttgaaaataatataaaatatttagttgagggttgttttgatattttagatagttttgggggagaaagtgagataaaataagtaattagaaaaagatataaataggagaagacctaatattttagaaacttattgtacgtgaaaactattggaaaagggagaaaaagcttagagaggagcaagagaccaagagggctgcgattttcttcataaccaggtaagggtgggactaataactcagtagcattaacctctgtaattctgatgattagttgacaaagttaggattgatttagaaaagttttggaattaggttaaaaccctaaaaattgatgatcaaacggtaaaacttgtttagattgatgtagaaaccgtcctttaaccttagaatatgtttaggatgaattctggaatcaaaattaggctttgaaccatgttgtgtgatggatttttgagaaaaaccctagtctgcccgtgcttctgttcatcgctcgccacagcgagtgatgaacctcgcctcgcgagtgatggacttcatcgctcgccacgcgagcccctttccttcgcctcgcgagttgtttggtccaactcgccatggcgagcaaccctttctcgcctcgcgagctcaggcagagtgcatgtcatattttgtatttttgactttttagttggaccttgagtgcctttaagtgcctagacatacctagagatgattaggaatgattttaggacaggattgaacccagaacaacttcagtttgggagattagtgttactcgccatggcgagtaagtactctcgcctcgcgagtacaaccagaatgtagttgcttgagtggttgtgcgatctgtgtcgcatgtgttgatcaagagtgaacccctaagtggtgttgagacctagtggagacgtttaatgcagcctgtagagttgtttaagttatgttgatattaaatggacatgaactaaggtattgtacattcatgcaagatatgaaaacttgataatgatgtaatttatgtgctattgatataatgatatcattttgtttatgtgatctgtttatgctgcttccgttgtttaactaagtgcataagtatatgatgaagtttagctccaaattattggatgcatgttgataagtcgattacgttgttttgttcatatgtgtccatgcatagcataacattgagctttgtcctcaccacgaaaattaggagctttgtcctccgcacgttttataggagctttgtcctccgcacgattaaagtatattaatacttatgatgacgattggtaccacatgcatatatggagtctaggagcattgtcacattatcatgattaagatgccttgttgataatgattgaatatgtgattacgtgatacgtgcttattgattatgttatgttatccctaattaatggatacatggttacgtgttaaaagtttagcaattatgcaaagttaattaatgaaatgaccatgttgttaacttatgattcttaattgcattgtttaatgttaatctgttatgaaatctcaccccttctgtttgaatgttacctcgaccgtgggtaacgtgcaggtgaccgagcttagtgtgctgtttccgtcgtgagtggccttgccttcactgtgtcttctaggtcgctctgatacgtaacgggatgggctttatgaattatgcatgcttcattctattacgtgacttttatgctatttatgattatgaactgatttcttttaagaattatgatgaggcctgcgtgccaaaaccggattatggattacgaactaaattccgctgcaatgttaaggatattatgttaaatcattatttaaccgtcttggattatgttatatgtgatatcccgttgtttatgatgctactctgataaatgctatgtttttttaaagaaattttgatgttgggaaaacggggtgttacagttaacttagcaacaaggtgcaagcctgctgaggct

SEQ ID NO: 4362 - DNA, 1499 bp, Medicago truncatula
  Intron number 1 from transcript Medtr1g043800.2 (locus Med tr1g043800) derived from phytozome v7.0 (chr-ID MtChr1; po s 10370708 to 10372206)
aggttctccatttccaacacttcttagatccgcaggtacatccttcatcttcaatttcacatcctctcattcttttttcatcttattcttaacccatttatccttatcttaatttacgctaattcttttacttttaagcttaagctcaaatctatgttataattttaatttagttttcattcaatttttggtataaacacattcaagcttgcaattcacgtgcatttcaatcttacccacaatttatttcttcctagatttgtagatacagattacccccaacgctttttgttcttgttagggtttcagtaatcttcccaaaatccattttttgtatttatttattgatttagtttacatctgattgaattgggttgggattgaatgtgtggggcttgatggaggttgttttgttggattttttgtttaatatggcatgttatgaatcaaaaagttgttgagtgttttaagtttatgcttttgatttttcaattgggtctctgaactctgattatgggtaatttgatccatgtagccgacctcatttagtgggataagactctgttgttgtctgaactctggttatgggtgtgtttggattgacttatttgagcttatttactgtcataaaaacttgcgagattgtttcaagaggttatggaaacagcctatcacatgtccataagctctttgagatagcttatgaaaacaacttatggttttgttttagcttttgttgtagaagtagtgtatgcataagcacttatacgataagtgttgctataaacacttaagtaagttatttatccaattatggcctataactaattggtaatttggaagtttgtcttttgaggtctgaattttgattcatgtgctttgattttattggatagccgtaaagttaatagtcaattttaatttattgtcctcttaaaaaaaataaatttgaactgtaatgttttatttgactatctttagctttggacaatttggtttgaattgattaacccaaattgtttttttttttctttttttttcggtctgaactctgataacgaccaagggcctaattggatcgacttatttgagcttatctactaacataagttttgtaagactgtttgggggaaacttatgacattgttcacaagttgtttttagcttattttcacaagttctccaagatagcttataaaaccagcttatacgaaaacaatttaactttattttacctttttactttagaaatagcttatacataagcgcttatcataataagtgcttgtgatataaactgtttatccaaacagggcctaagtgggtaaacttgttttttgactcacgtgctctgatcttattgtttagcccaaaagttgatagccaatttttgtagcattgttttatttgactatttttagctctggacaatttggtttgcattgattaacttaaatgttttgtttggaaacttgaaattattttcaggttggataacc

SEQ ID NO: 4363 - DNA, 992 bp, Medicago truncatula
  Intron number 1 from transcript Medtr5g036470.1 (locus Med tr5g036470) derived from phytozome v7.0 (chr-ID MtChr5; po s 15194270 to 15195261)
gcttccatctttgaatctggttggcaggttctctctctcttccttctattttattcaactttcgaccacccattaacgcaaattaacgccagtttttatttttatttttattttgctcttttcatcagaaatttattatcttttttcaaaccccatgatttttttgtatgttttagatttcagggtttattgtcagatttaatttaagtatttattgttaggttttttttcttcattttttggtaaacttgatgagaatataaatggacatttgaattaggaatgagaaataggatttgttgtgatttggactatagattttgtttattctatgagtgttttgatgctactgtcaacaatgttgggttgctgctctatttgtaatgatatcaactagattcttttttgtagatcagtgttattactatagtttttgaaatcatgggatttttattttttaatttttgttgttccattcattcatgtattgtgaaatttgtgaaaattggaagttgatggttggatctttgatataataagttgtttgaattgacagtgagtttgatagaagcatgatgtgccactgattttcggcaaaaactaaactttataactttaacaaaatcatgatgctaatgtgattccgccaaactaatcgtcaatccaaacatgcacatagttttgagctaatatggattttaagatgcttataggataacagttattgaaatatttgacattgggaatgcgcgaaaagtgaaaaacaagggcttcagtgatttcatttatcatgttttggacatgatttcttgtgctttgatgtgattttggttttcagattcttgtgagattgcatgcttacacaattgtacaatatttacaaagacagaattgatggctgttccttttattgaaattctctgattttatttttccttttacttttttgtgctgcagtacttaatcacacattttagtgattttcaattggc

SEQ ID NO: 4364 - DNA, 1498 bp, Medicago truncatula
  Intron number 1 from transcript Medtr2g019120.1 (locus Med tr2g019120) derived from phytozome v7.0 (chr-ID MtChr2; po s 5170707 to 5172204 reverse strand)
gatctcccttcagtaagaccagtgcccgaaaccaggtaaatctatattctaaatgttatcagtagttttttctttaaaaatgggggagatttgcatttttagtctaatgaaaatgtttatcaattttttgaattttacaagaaaaactgtattgtgtgatgatgctcgataaagcaaatataggtgattggcctttttcataaaccatctggttgccaaactttgaaagagatatttgaatcaaatatatcctttctgtccatgccatatactagtgtttcattatgttcatatgtaaaatattgttattttgattttagtcatgatggaattagttcttttttttccgtatattatccatattttaactactaaaatcattatggtttttcccttaaaaaaacaatatggtttgtgtattacacggacccaaggatgaagcggaccaaacccttgctttagatctccaataaaacatatattttttcaaggaaaaaggccctcaaataaaataattgttaatagtcttttttgaaggatataattgttatagtcttagttagtttaactgttagagaataatattataaaagcggccaccggcatgccgcaataatgtcatattttttatttgtgataagaaaatactaaattaaatcctagctcacatgataaaaacattaaaattgttaatttaaacattgtaataagagttcaaacctcgattcttccatttgtatgtgtgagatttctgtgactctcatcaatttgtatatcaaccaaaacaatattacttccgttcctttgaaaaggtgacaattagcgaaaattgttttcaaagatcaaattattttcaaaagaccaactaaagaaatagtcatatcatatcatattcatatatacatacaaggtcttatttacaagtttattgtggcatgtataaaggtttcagctaaaagtttgcattaagcctacaaatgtgttagattggcctgcatggactaaactattattataaagactaaaactaaaataacaatcaccaatatcaaacaaactaatataatattttagaaggtaaaataaaaattcaagtgtttggattcaaatgattgattaattttagtttggttaaatccatcaagcaaatagacaaaaaaaattatatttgtagcatccgattggatgtccatgagacatcaatttagtggtaagaatttaacttaggtaacatagtttaaacactttaatttcacacaacaacatactatacacacacacaatttcagattttgcttatttatttcaattaaaatgtatttaacttaagcaatgaggttatgtcacataacatgtcgtgcgagttgtgtggtgaatattgtcctgcacaatagcgcttctcttttttaaaaaattggcatagcgtcgttgtatgatatgttgataattatcgatctgtgcaggtcttaagtgaggtaagaaggttggtggagaaata

SEQ ID NO: 4365 - DNA, 5079 bp, Medicago truncatula
  Intron number 2 from transcript Medtr3g100500.1 (locus Med tr3g100500) derived from phytozome v7.0 (chr-ID MtChr3; po s 24061920 to 24066998 reverse strand)
ccaagatcttgaaaactcgagagcatttattaaaggtttgttcttaccttcatccttttttttttttggtcaggtcttaccttcatcctttattgacgcacatgtagttttatttacattattatttccaacgacaagaatctttgggttttaaatccttggactatatagcttgccaaacaaaagttatttctatacaatacttgtactatactattcctttaatcccacgataagtgacaaatgatacataaaaattaagaagcataatttataatttacagtgattaaaataatgatcaatttgtgaaagagaaattattaatatttaaaaatattaagtaataaataatagataaaacaaaattattatttcattcattttgtataatgagattttttttacaatcacataaaatatatattgaatttttaatcaataagtttatacaacatccttcattcaatataaatccttgttgattaaatcacgattttttttaaaaaatgatacaagtaggatattagatttgttaaaaacaatactatttttacaaatttattatttagacgagaaagttcttttaggaaaggagtagttttcatagttttagttcagcaaacaggagtttgattgtaaaatccttgttctttacatttcattgatggttgaccaattaaaagtttcagcttttctgacccatctttggtccatccattcttaaagaacttcacgtatcttatctgtccaaacattctgccacttaatagggacagatccttcatgtgaggcggcatttcagccaaaagatcaagttacttcctcagatcctttgcctataacaatttcatctgtgaacagttaagatatttaatctcttttgtaaaaaaaaaaaaaaaagatatttaacctctattacttactataagacaagctacaaaggtatcactttcaagaatatttgtaggatgagtactagtttatttatacaagtgtttgatctaatttataaagagtaatgctaattatagcaaattccttttgtggactttcaaaacaagagaatagttacaattcacggtttagttggaagaaaaaaaagtggccaacgggtgataattagccgatcaattcacatatgcatttgacggtgagagtatatgtaatattgttcgttgcgggtaattttgtgggtttgttgaagaatttggaataattaatataccataaattagactcaattaaaaaattgcaacaccaatttaaaatttcaaataagcatgtattttgtcaacttagcaaaacacatatgcatttttccactgtgaagttctaccaaagaccaaaagtaaaagaatttgaaataagggaggttgaataaaaaaaatagcatgaagacgaatgatttccaataactaaaattaaaaatacaaaaattaaataaatgagatctaaaagataacaaaacaattcatcttaattttgggacttctaagggatcctaccttgagctttatcgccacattagactaagagacgatacacaagtgaaattgatatcctttcatctcgcttatatgttgtccaaaacctacccttccatccaatataaatttttaactcacatttgactcatttatacctcctattcaaatttgcaactctctgtgtccctaattatgtgatatagtcaaataagatcaaaggaagatgcaatatgtttaaaaaagttcgtttgtgatggtttcattgcaagaggtttatgttcctttcttacattagaagggggaaaggaaattagaaggattagaaggaaaagcatggataccaaaaaagaatttggatatgagagaagctaaaggaaaaaaaataagtattgtgtgttttgtttgtgagagtattggaaatagtgtgagttgttgataaatctacgagtttgtcgaagattagaaggaaaagcatggataccaaaaaagaatttggatatgagagaagctaaaggaaaaaaaataagtattgtgtgttttgtttgtgagagtattggaaatagtgtgagttgttgataaatctacgagtttgttgaagaagttggagatttttggataattattttaccaaaaaaattagattcaattaaaaaacgccacataattttaaatatgtaataaacatgtatttatcaatccagcataaaatatcttcaatttttcattaccatttgtcaccattaaccaaaagaaaatggcatccaaaaatcacaagaaagagaatagcatccaaaaactaaaatttaaaattgaaaaattaaagacttaattgcagttttagtcccctattttcagtaactcttgaaattggtctgttcgtttttaaatcattcaattttggtctctttgtcctattttaagactaaaaaacagtgatggacatattttaaatgacatgacatacaatccaatgatgtaaaatgatcaataccaatgtaattatttgaaaactctccataagtttcaattttaacatgacatatcaccatctttaagtttaaaaatctaaaagagggaccaaaactaggtgattatgaaatggagggacaaattatctcagtgagtgaaaatgggatgaccaaagctacaattaagccaaaattaaacaaataacttccaaaaactaaaaaaaacagtacatcttaatgttgtgagttttgggggatcctatattgagtttgatcatcacgttagattaaaagaaaccacacaagtgagtttgacaccacatcttcaccataaaccttaagtcattaatatatgggttatatcacttatatgttgttcaacatctattattgcatccaatgtggaactttaaatcacacttgacacgttaacatctttctctcaagtatgagactctctgcatctctataatctaccacaaagaactactattgtttcccccacaaagttgaaccgggctatggtattgtcgttggaccgtacaggagagacaacactggtgtggattgactcattaaacacaaagcgaccatacaaatgtgcatgatgccacatcttcacccaatatattaaatttggcgaaagtctaacccgtgcttggcacgagtttccatactagttactataagacaaactacaaaggtatcactttcaagaatatttgtaggatgagtaatagtttatttatacaagtgtttgatttaatttataaagagtaatgctaattatagcaaattccttttgtggacttccaaaacaagagaatggttacaattcacggtttagtgggaaaaaaaaatgtgggcaaagggtgataattagccgatcaattcacaatgcattcgtgatagaaagtctggctatattagaattttttttatataaaaggattcttatacgatttgatccgttaaatatttatcttcatatactccatatgtaagtttatatataaaattaaataatttttttgacaaaatatagactggtttacatagtttactcatattttctttgattttgattttgatttttaataaaaagttattactactacttgataaacatttaccgaataaatactttaaattatttatctaattactcccctttggagagccatcgagttgtactttttctgaactttcatttttagggtcttttcaatgatagtactgtttcacaaatttagctaatttttttttgtactttttcccttctctaaaaacatgaaacgtcaattttggtgtttagtcaattcattaccaaatatttgtactttttgaacccctcgttagaccacatggcaattgtgtcgtatcagaaataattaaggttttatgatgacgtatacattttctcttaaaaaactcaatatcctgaagtaaatcttatattaaacctatatttggtatacaattgtggtgatccatcttaattttataaaaactacattttatgacttcttcaaaattatgatggataactgtcaatgtgacatatcgatttagatcatgatatcaaacacacgctaaaactcttttcaaaaaggaaattaactcttcattttttggaaccagaatactcttttccctctaataataactcaaactatttttttttttttcttttgacgaaaataactgaaactgtttgaagagctactgtagtggtatgttgtacatctactcaattattctcacatcacatggatgaataccgacatgacgtcagatctaattaaaagctttgttcagttgattgtttggttggttatatccaattactcgggaaaaacttgttctgaccgagccaatgttcagtgcacaaacaagaattaaacaagatattagttcattaagatttgatttttataatttaaatgaaatatttttaattttagtgcacaaacaagaacacttgttacttatccaagaacatttggatgtgatataatagatttctctcaatttaactaaagattttaggtttgaattcaactctgaaaatgtagctgtgttaaatttcttgagggaaagttttgccattcattactgttttactaggtttaagatattagattctgctgttgcacgtagatattaaataaaaaacacttggtactcttaccatgaatgattaaagagaatatgcacaatgaatggaaaccagacatgctttccgctcagaacttttcaataaaaattgactgtcgttagcaaaattgcagcaaaaaccattgaaaatatagtttcattaagacgccgatttttttaaaatatttttgcttgtagaacttgaaagaactgcttctttttgtgagtttctctttctcgtggcaagctacttgtaaattttagaaaccgtgtttttaaaatggtaattgcaactcctgcaaattatgcctgctccactatgcaatattggatgaaaaaagaaattgtgtcactaaactaaacttcatacttcatagcatatcccttacaacccatgcctttaactcagcatttttgttctgtcatcacagggtactgtaattctgttattccagccagcagaaga

SEQ ID NO: 4366 - DNA, 969 bp, Medicago truncatula; identical to SEQ ID NO: 4075
  Intron number 2 from transcript Medtr5g041320.1 (locus Med tr5g041320) derived from phytozome v7.0 (chr-ID MtChr5; po s 17673819 to 17674787)

SEQ ID NO: 4367 - DNA, 4018 bp, Medicago truncatula
  Intron number 6 from transcript Medtr5g028980.1 (locus Med tr5g028980) derived from phytozome v7.0 (chr-ID MtChr5; po s 12013962 to 12017979)
cagatttacttactattggtggcatagataattgaggttaggaaattcttttgctaatgagactctaattaagtaattgttgatcatacttcagttattttgtatacactcactattgggcggcctaagttaatgatttgatttttgagtaaacttctctctaatgggaaaaataatttgaggaatccaactgatttgtatatattgactttgttgatttttttgatcaaggaaatgtacatgtattgctattgctattcatattatgctcaattagctatgtttttttagctatgtatttttataactctgcaatctagttaatatggttaagccatgctaaagctttgtttggtcttcactcaataggggacagtgattaaaaaagtatgaacatcaacataggaatagctgtcaaccagtgttatcaatccggcatagcggtcagccccaaaaatgctatagtgagatagaggctagcgagatgactgctattttgaattttatacagttcatttaattttgattacatacatgaaaactcaacaactggctgtgactgaccaatgagacggtgaaatatgtcaccataagtgagagagaagcctacacgctgttttgatatttttcaataaaaaggctgtactgtaacatttaattttgggttaatagtgttttaccaccctgtaatataggtcatttctggttttaccccttgtaaaatatttttttttaatttcattcttgtaatttgaagattttttggttttggaccttcatagaaaatttcaccccttgtaatttgagcaaatttagctttacccccttgtaatttgagaaaatttcggtttaccccctgttaatttgagaaaattttggtttgtccccctgccatatcttcgattttgtacagtcaaaattcatgaaggtccaaaacaaaaaatcttcaaattacaaggacgaaatcccaaaaaaaaaatttacagggggtaaaaccggaaatgacctatattacagggggtaaaacactattaaccctttaatttttatcggatgttttggaattttcaatttcactatacggtgtggtgctttagtggccgcggcaggcattatagctgccactacactaaacggctctgctactgcatatcttgtaacggccagggaccgctcttctacacccctatagtggtgctatagctttcctgtgatgttctattctatagttcgaaaaattctgtcaaatataaatggagctatttagacattgcttcttcgttagacttacagtttagaaacctggtcgtatcaaactgtattcaaatcatggttgagggagctttatgaaatagtatattagaatgcgcagaagggtccacgatcaacctattcatgatgattttatagaatgtctttcttcatgagaatattgatatttttgatttgattcgtgaatctttaactctctgacttagacgaaggaatgctcaatggtagttaaatttgccagttaaagttctgctacttctgaacaagtgtgtagcttaataaaagcttcttttttatcattctctcattcatgttgtactagtgatatatatgtcctgctttagaatctatagaaaaatttatccagaaaatttcttagaatatcataaatctatcttttcatatctcagataatttcttatgagttgttttcatatgtcatactttgttttcttatttaatccaaattgattgcctattattggtaggagtaagggttaatacacgtatcacttcactatattatacatacatgacattacaattgggaacctctatgttctctaatcctacaacatgtaaaattaaagaaggcttagctgacctgaaaaattattttttatgtatgatctgtttatttttaataagagcttcttagtttcacttaactcacaccagcttaacatgaagcacttctttatgaccattgtacaatgatttcaagttctttgttcatactaacactcgtatgccacccaaacccgcataccagatctaactggtatcaggccacaaatacggtctcatacggttgtgattaggcgggttcaggctagtaagagcttccgtctgtatcccaacccaaccgtatgtaaagaagaaccgccttgggcctgtcaaatgcagccatgagatatggcagaaccaccgagagctattatgcacgaattaaagagaaataaaatttacgacttgtctttagatcagaaacgactgttctctattttggacccttgatatgaaatgacatggatccttgatgtggatggttgagatttatgtattgtgtttctttaatgagatatgtgtagctaaacacgagtaaagagaaataaaatttatgacttgtctttagatcttaaacgttgagatttaagtattttgtgtttcttttatgagatatgtgtagctaaactgtagagtaatttatttctccacctggaaaccaagagttaaaacattaaaaccataaaacctgatctttgactataatccaaaccaatgtttatatctttgagaaggagaaagagaggggcaaagaggagggtagaagacttaaggagaagcaactctctattagaggcaccagcattattgatactgtcacacattatcatggctgcaatcttctaaatatccattattttgtacttttattgctatctgttttggtttggtagatttttttaagatagaatttttgtatttattttgctacttcttgtagaaggcagatggctcatttcatggttgttttggtttttattttttgttgcttccctttcttttcttttctatttggttggtctgatttgggtttgatgttatcgaaacgttttgattgctccatgataatggagatgcaaagatacataaccaccgaatcagaccgcccaaaactaactgtcatccggaaaaaccgtcactcgaaaagactaaaggcatgaacggacagaaaaggatctagatgtggcaatgcggttttgatcggattggcactttccacctgtcaccgaccgaaaccgaccccttatccacccctgatttatataatgtattttaattgatacctctttccaacttgaagcacaaaaacttgagtctgatgctctgacctacttcaactgcatccctcccacttgatggtgtggttaggattaaacacaggcagcctcttaggtaaggatttgtttgagagtttaggaggggaaagctttgaaaaaaagaaaggattaagtggaaagaatgaagggccttgggaggtctatttttcttcataatacaaaatctccctaatttaaggaactaaaaaattgtattggaggaggattttggcgggtttagataaattctccaaattcaatctatcttgctatattgctctcaaagattaaaaatatattaatcataagtattcatttatcattatctacaaaaacacaaactttggaaaatttctttatttttttccaatactttcatccctccaaagccctaatcccacttcctttccaaactctcaaactaaatgaagagttatgttttagcataagtagatattttcatgttttaccgctctttcactatagtttgttgaacagtaaagacggcaagggcagccattatagccgccgcaacactaaacagctttgctactacatatcttgtaggggctaggggccactctgctacacccctatggtggcgctatagcacactatttacaacactactgtgaatctgtgatggatgtactcttgtggaaaatttgacaactaatcctattttagttctgtgaagttctaaataaaaacgtgctcaccaaaaatagaacatggttctataatctactttcctgtgatgttttattttatagttcaaagagttctgccaaatatatagatggacctatttggtcattactttgaggttttctaataattcttttgccttatcagtcagtgag

SEQ ID NO: 4368 - DNA, 1122 bp, Medicago truncatula
  Intron number 3 from transcript Medtr7g040990.1 (locus Med tr7g040990) derived from phytozome v7.0 (chr-ID MtChr7; po s 10386714 to 10387835)
accttcaagagagctgcgatttcgattttgctaaggtaagggtgagactagcattcaatcttattaagtctgtacttctgatgattaatttaacaagtgtatgattaatttaaagaagttggagaattaggttaaagtgaggaattgatgattaattgatgaaaagttgatagattgatgtagatactgtttttagaccttagataatccatagggtgattaccggaatcaaatttaaggtttaaaccatgtgattaagtgaattttcataaaacctgcacttctgcccgagccaacattcattgctcgcctcccgagtgatgatcctcgccatagcgagggatgatcttcatcgctcgcctcgcgagccatgccctccagctcgccatagcgagcagttcgctcgcctagtgagtgtgaccagagagtcaacatgattttgtagttttgacccttaaattgataattggatgattctgagtgcctgaacatgtatattaatggataggcaagtttttagattaaaattgaatctgagaaagtttaaagatggaattttgagtgaagaatgtcaaactcccgagagcaccctgtttcagttcgccatggcgagttgtgagttcgccatagcgagtgcccattttttcggaactcgccatagcgagtataggctctcgcctcgcgagtccttgtgagacaggatgccttgttaggttaaatgtgacctttgtcgcacgagttgatgtgagttgatcttataggtaataaactaagttgtttatcctgctgttattgtttcagtaagactgatttatatgagttgatgttaattataatgtgatataattgtatatatattacttgagttatatgtgaatattgagatgttgatgacttgcatttgatattgttatatcttgagatgtttaagtgttgcctatgttgatgttgttggttatgtgaaatgttcatatgccttatgtagaaaatgtatgatgtttaagttgttgatgcttttcattaatattgttatgttgtgaatttcttgtactgtttctgttgctgttgcacattgatcaagttgcaggtgttggtctaagttgtaaagttgtaagttgtctt

SEQ ID NO: 4369 - DNA, 2687 bp, Medicago truncatula
  Intron number 2 from transcript Medtr4g066890.1 (locus Med tr4g066890) derived from phytozome v7.0 (chr-ID MtChr4; po s 12793143 to 12795829)
ccaacttaaatttgattcaactgtgtctccttaaggtgcaaattcttcctgtctcttttttttctggcttactgaattaatgatgatcaagattggatttagtctgcacaataagatatgtttcaggataataagtttgttagcgtttctttttgttagtgatgtagttagtatcccataagctctccaagttatagaaagttgtactcatttctctcgaactttaagctcacaagcttcctttttccctgccttcctctcatcctataacttccaccaaaattagatgtaccttgtatttttacatggatgtcactgtcactgtcactgtgaccatatttaacacaatttgtagcagaactatgtaattccataccctcaagtatccactttttatttgatcttgttagtttctcattgtaatgcctaattgggattggccctatgtactaaaaggagcttctcatttagcaatgcttgttataggatttcaagctttcagaaagttgagatccgcaagatttattaggttgaagaaaatgatgaccttttgcctactaaaattgaaggaaaaacttgtgaattttgtggcacttattgcaacttagtgatgtgtaatcttgttattattgctaccaattatcaaatctttgtttattttagtcattggtgttccctttgatgaatttacatcaccttttacaatggacaacttgttataatctggttttgatttttgtatttaagaaattgattgatcttctagaaagcctaaaatcagagaaaacattttcaacttttgcaaatattgaagaaacaagccactttttatgttcacgagttttcctttttttgcactagttatagctattgtgtgattatactattatagaaggttcaacaatattttattctaattctattttacatattatgatattttcgaagcatattttgtttttccttaaaagagaagtataaattaatttaatttgtgtttgttaggatttttcaagaatattttccctcttgatatacacagagatgcttagaatgtagatcttgttgaaatttcttggtttatcctgttgatagaaagatcaaaatttatattccccccctccctccttttgtcaaatgctttgaaggtatccatgaacagttgttatcaatggcttaatattgcacttcaatgtatactaatgtttaatgttttttattgctttgaatgtccttgtctatattcaattaatgttgatgttaaccaattcttgctaattttgcgtacaaagtttatacaagtatatgatgcatttcatttcaaagtcgtttgtgttagatggtcgtagcttttgttgcagatttggctacttgaaaatattatttatggaacaagaaaaaaactttttttcttgcagcgaaggcgtgcttttagttcattgatatggcagttgtatctgttgtattttttttactgagatcatgtctatgtaccttataagttgacctagcatgcatgcctaaactcaattttgtaagaagcaatactttcttgtgtgaaaataattttgaaaggggtggccaaagcaaaaacagataaactagtctgtttttgttggttgagagcagttcttatgattccacctgatctcttcatttcgtttgctacttttatacgactagctgcgggaaagaaaactaaggccagtttgaaactaatttggcatgtagtcttgtggtggatatggagggggtagaaacgatcagatttttaataatttcttttcgaccgttgatgaagtggtgaataatattaaggagctgtcttagcgttggtttctaggaagagtggcatcaaatccatgtatgttttacgaatggttctgggatccgttgagcaggatggctgggcgactcagtttgtcctatgctgatcagatgctttgtggtcgattcagttttggctgtggttttggtttgcttcggttgcaggttcaggtttgtttcgagcctcattttgcggcggtctgtgttggtttttggtgagctattgcggctgggggattttgttttgatagtacgagtatagtgcttttttgattgggtctggttggcttgaatgcttgtgtttcatggccttgtgtctggttctggtgaagatttttccacggtttgaatgattacgagggatggtgccactatggctagtttatttgctgcgcaaagtttatgttgtggctatgttatgttttgttctatcttggatttatgttgagattctctttgttgggggctggtgtattgctatgtgcctgttattttttagttactttcaccctgctagtgcagcggtcttgtacaataattggcacaattccagatacatcttgtgtttggtttggtgttttatcaatatatttgggtgacaaaaataaatctgttttatgttgctgtcgagctcgacttgagttgtctcaaattattgtaaaaggttatgttatgatttgtaaaacttgattatgtctatgtattgaactgatctgactcactattggtagatttttgtatcgcattatcgcagcagggttttggcatttgcagattctttaccttttagtcttgttcgtagtaattttttgttctttgaataactttttctgctaaatgtttggcagtttgcacttgga

SEQ ID NO: 4370 - DNA, 941 bp, Medicago truncatula
  Intron number 3 from transcript Medtr2g029710.1 (locus Med tr2g029710) derived from phytozome v7.0 (chr-ID MtChr2; po s 7981430 to 7982370 reverse strand)
aggagggcgatttcttcaaccttctatcagttcatgtatgttttgattccactattgattatgctatttgtaaactcaattatgagtagctaaatctcttagagattaggtctgagatgattctttgtaacccttattgaaccatgatgttgtgaaactctatttattatgaatgacaatctagtttttattcaattcaattgttcttaatgctttttatatcctgatcaaatataaacatgatttagtgagaatgaatgactactgaccatagatttctacttagacagaattgaattgttctaataatcatggttagtctaggaatggataatcctttattagtgatattaggttaacgttcttaaaaccttcaaagattattagaccacctaagtaattaggggttgtagtttgagaagagggtcctaactcaagggattgattaggactattttgttgactatcgtggaactagaaaatcattcataagaataggtgcagtataccaattaggggaacatagatgattcgaaagacctgatctcatctctctcttattctttccaaaactatctttacattctgtttatttaattttatgcaaaccaaaactactgcctcaggcactaaaataatttacacatcctaaatattaaccttattgctgaattgagattaacacagtactcgtgggaacgatatttttactacttcgatagtatttggtacacttgccaaaaaaattctatcaagtttttggcgccgctgccggggactgttgagtcatttcaatttggtaattttatttttatttaggatttctgtcatttatatttttgtttctatataaaaaaaattataaaaaaaatatgatttatgctcttctttttcttctcattgtactgtgctactaaaaagtttattcaagtgttgcagct

SEQ ID NO: 4371 - DNA, 1329 bp, Medicago truncatula
  Intron number 2 from transcript Medtr1g126830.1 (locus Med tr1g126830) derived from phytozome v7.0 (chr-ID MtChr1; po s 28358480 to 28359808)
ccaagtaccttcttcttcttgacccaaattggttggtatcactattagcttttatcttgtccgaatttggtttcctccttgggattgttgaattattatcatcattagggtttctacactttagtcctctaggttattgaatttaattagcctgtttgaaatcctgaatacatttacaaccatattatattctatgcattcccttcttcggttctgttccgtgttccgattcccgacagttagaagaaaagacactcactcctgtcaaactttcatttcatttcaaaatttaataactaattaactaacagttattattattatctgattgaaaattgagatgagtctgagctactgcagtagttacgctcttcaatctagcagaatcacaaaatgtactctcgatcgtaattatacccatcatggcaaggatgtgaaactgcatcttcataataatagatttcaaattatttaaatttccttgttttattttactttatattaattttttgtagatggtttcgtttttaatgacatggaaggttgctttgtgtttttattgtttattgtttattggaacaatgttgttgccattcatttcttgaatgtttctatatatttggacaaacaacttaatttaacatattttgattaaatgtttatcagttaagtgtttatgtataattttctttataaaatgaaatagagtgtgtagttcaacttttctcatataggttgtaagctattttgttttcataaattttcttgaaaatttatttaaatacactggaaaatcataagctatacaaacacttacacaagcttttaaaccttacgataaactcaactaaattgtaaataagttcttccaatgcaatttcaaagttcttatctttgaaggttttcatatttttttacttgttgattataggcaggcatattgttcccaccaatgtgctcaaaaaacctattgaacatgaaacctattatagaatttttgttcacacacactctgagtagtgaggaattgtgggtttaaatccacgctcgagcaaattaaatgtctctgtagtcttttaccatctgaactgtaacttgtagttaccggacttggtttatgcttgaaatagttgatgtatggattaaccgagtcttgtaagtacaactaagatgataaaaaaccgtagaaacatttgatatactggggcgcgaattcatagttctcgacttctcagtgtgtgtaatttcgccgtttagactctttaaggtgaattatttgttaagtagattttagattaataatggtgaataattttgctttttgttcag

SEQ ID NO: 4372 - DNA, 695 bp, Medicago truncatula
  Intron number 10 from transcript Medtr1g068870.3 (locus Me dtr1g068870) derived from phytozome v7.0 (chr-ID MtChr1; p os 13895071 to 13895765 reverse strand)
atcctttgcattcacaacaactggttcaggtgttttttcttgttttgtttattgagctgtgtcgttttgacacaaaatggaacaataaaattcgactacaattcagatggttaataaattcaaatacatggttaattacatttagtagatgattaatgaatataacaaggtgttacaactcattaaccgcccacataacacaatcaaccacaattctcaggtgtatatttgaacaaaagttgtggttaatacatttcatgtatatttgaaaacctcagaatcatgtatatttgaacatgatttgaatggttataattaatatcatgtagattttaacacctgaaagtcatggttaaggacattcaaagttgtggttaattatgttcaatggatgattactgagttgtgacaccttgttatattcgttaaccatccactaaacgtaatttaccacatatttgaacggtgttaaccatccaaattgttgtcagtttagctgtcaaattcgtgtcaaaatgttatttctcctcacaattgtatcagtcacagagatacttttttatttttgcatttgctaaataaaagaatatttaagctagaagtttccatttgtgtgattttcttacacattatatatgactgtttacatgcatattatagaataaccgaaaaaggaaagggcctacatcttcagg

SEQ ID NO: 4373 - DNA, 5989 bp, Medicago truncatula
  Intron number 4 from transcript Medtr5g024520.1 (locus Med tr5g024520) derived from phytozome v7.0 (chr-ID MtChr5; po s 9734087 to 9740075 reverse strand)
cactgacacatagacaccgaacaagacactgacacgtcgacaccaataataatttgagaatatgaattaattgaatgtaatcacttgtgtcagtgccatgtcggacactagacatgtcttctataagaagtatatggtgctacatagattttgttatatatcttgtttgttgggaagaggctgctgcacttgaaacctgaaatgtttaatgatcatgcatgtaaaactcaaagtgtatggggttgccacactaacctttaggttcgattcgcccccaccaataaatgtatattggatgcaataggaatgaccggcgaatccccttcaggatactatgagttccttgacgtgtattgcacaaccacaccaagcgtatctcctaacagtattttacagatttatggttccagcaattcactcatgcattagagaattgatggatgatttagaataatagaatggtgaagaattatgttgttaatgtaacaaaattctgtccaaattgtgtgtagttgtgtggtttttgtatattcaactaatgcccaaatgtcaagcatttatagtgcattatatgactcttcacatgagagaaagcacctatttaacttgaatcaatgccatgattcattaagcacccttttgccaaaggttataaccatatatacttgaatcaatgtcatggttcattattaataataaataataatgttccaatgtatatgaatggttcccatgaagagttacaacttttggttctaaagtgattccattattttggaaatcaccaacaatcccccaccattttcaaaatactaaatcacataaatccggaaattcatgcctttagataatggtatctcgcgatttgaaccattacttagtaagttaagttttcgttcattcccaaatagtatggtaggcaagctttgaaccaactatccattagaacaagtgtgcataacttacacatagaatctcggtaccattgataaagagacttgtaagatgacacattaagaaggccttgtgtcatatatcccttttcatgagaatttaagagtcaagcccttgaactccgtgaagcggccaaacttcattctcacataggtagactatatcgggaatgccccataagtatgcattccagcaaatatatgctatatgtccattaagaggaaaacctcatcctaccttttttcttcttatggtccaagtacttttacctttgggatgtatctattgtcaagtactacaattactctaatagtgtactttcaccattgaacccaagacttgatgctactcaagtgtgggttgagtttccactattggtaatcaattagatatgggcttgagtcccatccccaatgatgtcttcaacaccatatcctttgtcagacctttcgtcaaaggatctgcaagattcttctctgttcttacgaacatgatggaaattattccattagaaatcaagtctcttacatagctatgtcttaaaccaatatgccttgatttcccattataaacttggctataagcttttgatagtgtggattgactatcacaatgtatggatactggcgccattggcttttgccaaactggtatgtcatacaataaatttcttagccattctgcctctttactccctgcagccaatgcaataaattctgcagccatggtggagtcggcaatgcatgtttgtttctttgaaccccaagaaactgcacctccaccaaggttgaagatccatccacttgtggaagcatgatcttcaacatacgttacccaactagcatctgtgtatccttccaaaacagaagggtctccactatatgttaaacaataattcattgttccctttaagtattttaatactcttttcacaacgtgccagtgttctttacttggattgctagtatactgacttaaccttccaacaacatatgctatgtcaggtctagtacaagtcatagcatacatcaagcatccgattactttagaatattcaagttgtgccacaggacaacctttgtttggttgcaaactgatagtttggtcaaatggggtagagatcgatttacaatctaaatgattgaatttctgaagcaccttttctatgtaatgagattgggataaaccaatatggttaccatctcttatgattttaattcctaaaatcacatcagcttctcctaaatctttcatatcaaaattgttggataagaaagcttttgtttcttcaacctcatttatacttgtaccaaagatcaacatgtcatctacatataagcaaatcatgacaccttttccattttggaatttactgtaaatacacttgtcagattcatttatgatgtatccgttggctaacacaacttggtcaaacttttggtgccattgtttgggtgcttgtttcaacccatataaagacttaattaatttacacactttatcttcttgacctttgatcacaaacccttccggttgtttcatatatacctcttcatccaactctccatttaggaaagcagttttaacatccatttgatggattacaaacttatggatggatgtcagtgcaattagcattctgatttatgcaattcttgcaacaggtgcatatgtatcaaaataatcaatgccttctttttgcgtaaaccctttagcaactagtctagccttgaatttatcaatggtaccatccactttcattttccttttaaatatccatttacagcctatcggtttggatccgggtgggagatctaccactttccaagttttattacccataattgaatccatttcttcttgaatagcttctttccaaaaagctgaatcttgagattttatagcctcttcatatgttaccggatcactctcaaggttaaagcaaattggtccataactatttatggatttacttgttccttctacaagaaacatgaagaaatcagatccaaaatctttctctttccggatcctcttacttcttctaagttctgaaccatccaatgtatctatatcagattcattgttttctaaattttgaacattagaatgaacaatatccttgggataagaaattgagttaaatctatcttcttgaaaaattgcatctcttgactcaattactgtattaacagaatatgagtcattcgattcaatagtcaagaatctgtatgctttgctattttctgcatagcctaaaaatacacattcaattcctctttcacccaatttctttctttttggttcaggcactttcacaattgctctacaaccccaaactttcaaataattaagagtaagctttctttgtttccaaagttcatatggggttgttttgttccttttgtttggaaccctattgaggatgtaacatgctgttagcattgcttcaccccaatatcctttagataatccagaataggacaacatggcattaaccatttctaccaaagttctattcttcctttctgctattccattttgttgtggggtgtatggtgcagttacttgttgcacaataccagtggattcaaaataactcggatgatagaactctcctcctctatcacttctaaagcatttaatgaaagtttcatgttgaagttctacttgtgctttaaatattttgaatttatctaaaacttcatcttttgaatgcattaaataaacataacaaaatcgagtgcaatcatcaatgaaagtaacaaaatattttttaccaccaatggtgggccaaccatgtaaatcacatacatctgaatgaattaaatctagcaccctagaacttcttttaacacttttaaaaggttgtcttgtaattttagtcaacatgcaagtagtacatgaatcaaaaattttatcaaaattaggaattagatttgatttcatcatatcctccaattttctaaaattaacatgtcccaatcgcatatgccataaatcacaagactcaacaatataagcagaaatcatattattattattattattaatatttgcaacattacatttgaacatattcccacacaaatatccctttcctacaaacacacccccctttgagaggataaatttatctccctcaaatacagatttgaacccattcttattaagtaatggtacataaatcaagttcttcctaacttcaggaacataaaatacatctttaagagtaagtgtttttccagaagtgaattcaatctctatggtcccttttccttggacttgcacagttgaatcatttcccatgtacaaaacactcacatctttattgatggtcttgaacattttcttgtttttgcacacatggcgagtagcaccagagtctatccaccatgaatcaacatcttcaatcatgttgatttcagaaatgaccgcaacaaaatcatcatttgttgcccttgaattcttttctttgttcttctttttaaagaacctgcattcattcttgaagtgtccttctttcccacaaaagtaacattcacctttccttttctttttgttgttattaccattgtggttatgatgagacttatcattttcatgatttctctttttggaagatttgcttgaatttccttcttccataacatgaaccttctcttgagtaacatgattcttaataccttcttgttttcggtattcttcttctaaacgaaggtgattgccaagttgctcaagagaaatgtcttccttcttatgtttcatggttcgtttgaaatctttccaagaaggaggaagtttgtcaattatggatgatacaataattgtttcatccatattcatgttatgttgtttgtagttgttaagaatacgttcaatctcatataattgttccataacagacttattatctaccattttgtaattattaaaatgagagacaaggaatttcttacttgttgcatcttcacgcatgtatctggtttccaatttgtcccataagtcttttgcagaagggctactctggtagatatcgaacaaagagtcagacataccattcaggatgtgtcctaagcagatgtaatcatcgttgtcccatttctgtctgtctcttgtctcagcaacggtttcatcatccttctcctcaggccttgccatattcagaacgtatgccactttcaatgttgtaagaagaaacttcatcttcttttgccaccggatgaaatttcccccatcaaacttttccaacttaacaaagtcagaagtcatttctttcaatgaagcagccatagaaatcgaacctaaagattgttatatatcttgtttgttgggaagaggctgctgcacttgaaacctgaaatgtttaatgatcatgcatgtaaaactcaaagtgtatggggttgccacactaacctttaggttcgattcgcccccaccaataaatgtatattggatgcaataggaatgaccggcgaatccccttcaggatactatgagttccttgacgtgtattgcacaaccacaccaagcgtatctcctaacagtattttacagatttatggttccagcaattcactcatgcattagagaattgatggatgatttagaataatagaattgtgaagaattatgttgttaatgtaacaaaattctgtccaaattgtgtgtagttgtgtggtttttgtatattcaactaatgcccaaatgtcaagcatttatagtgcattatatgactcttcacatgagagaaagcacctatttaacttgaatcaatgccatgattcattaagcacccttttgccaaaggttataaccatatatacttgaatcaatgtcatggttcattattaataataaataataatgttccaatgtatatgaatggttcccatgaagagttacaacttttggttctaaagtgattccattattttggaaatcaccaacagattttgcttatacatagcatgcagtgtatcttattgtattgtcttgtgataatatttcgattgtagcttggtggtattttctt

SEQ ID NO: 4374 - DNA, 1123 bp, Medicago truncatula
  Intron number 7 from transcript Medtr2g116710.1 (locus Med tr2g116710) derived from phytozome v7.0 (chr-ID MtChr2; po s 27281965 to 27283087 reverse strand)
ttcgagcatccagaaaagggtaccatatcaaagaggtgcggtttcttagttcgtgatggttattatcctttttatttacctggttgttatgttgacaccatagctcgtgagttagatgtgtagttaggattgatcatcactatatgtgtttaccatttatacacatcttgttatatctagcataattttcttttgtttatatataatttgcacattttattcataaaacttgtaaattggatcatgaaactttatttttaatactgtaggaattataattggctacagctaacatatgcttgctggtggattctataaatgtttcaccaatgcatatacacccaaatcttgtgactttggttgaccgtgaaattgcctaattcggttataattggacgatatgtatgtgctttgtctgtgaggcaatcatcatgtattattcatgcaaacattgtattcttttgaatcaattttatgccatatgttgaatctaagctgtagttatgacatttctatctcaccatttttttcaaattacccactcggataggcttttgcatgttggtcttttgtagttcactgatgaattgagttttgtatgacataatgaatctgtaagatgcattggatattaatattgccaatttgaatgacagtcctattcatactgtctggtgctttgcaaactgtctgaaaatataatttgctaaacatgaaaattattccaggattgcccggttcctttcgattgttctatctttatcattttgaaaaaatattttatctgctcatctgtgagtacatatgactgttgggtacagagaagttttgaagcatttgatgattagataaaatataattctctaaattcatcttcatatttaactctatttatgcatataattaatgagatgatttgaatacttgttggtgtagcctttctttttctttttattgtgtttgatacatcttcatttccttctcaaatacttgtagaggagatggcttaaagttcttaatgtaagtaccttgttcaagcttatcaccctgttcattattcacttcctagcttaccttagtttcatatgtctacaggttccaatcacgtttgttgatagagtat

SEQ ID NO: 4375 - DNA, 4320 bp, Medicago truncatula
  Intron number 7 from transcript AC225519_18.1 (locus AC225 519_18) derived from phytozome v7.0 (chr-ID AC225519; pos 78770 to 83089)
aggaacgctgcattgcttgcaaactttgtgaagctgtaaggatttagctgtttatccaatattttaagtttaacaattgtattagagagcatgcatgctaccaaatggcacagcattttcctgctgcttcaatgttttttagatactgattgcatgtagatgttcatgttaacaaatgtagcctgtagttggttaatgtagaatcaaatgcacaggtgttttttatagaacaagacataaagctttggtaggtttatgaatctgtgaattagaaatctgtctaattaagatattccaaataaggttgtcaaaaactctcattctcaaaggttgtaattggtatattttttcctgtacagttataatcgtggtaaccaaaatcaagattttacacataattggtaaagggaaagtaaaatcgtaaatcgtataatcataacattaattaaaagattatgcaagattcataaatctaaaaaatatgcatacaaaatagcataagtaggagaaagaagatggaaaaacagatgaaaatggaagtacgaatgtcacaggaaaatatgggagcaggagaaaggatcacaggaaattacggaagtaggggaaagaaaaacagtcaagacaggtgtagtggagaagttacttgtctctgccactcttagagcgaaatggaagtggaggggaaagaaacggtgagttgagagttctttggaaataggtgtgtcactgttacctactgcatagttaatgaacgctgcacgtggccacttaaaaaatccaattcccagtgaaacgggccatcttctaacccgagtccccaaaactcatcttttaacctgcgcctatgaaacgggtcttctttgacccacgattgaaacaaatccccaaccctagagggcaacgtcgcaagttccactgttgcaaccagaatcgattggacaaacatagatgttacgattttacgattaacatgtgtgattatacacgattgcaaagaaataagattctgggtgcgctcataatcgttgagtggtttcttaatcgtaaaatcatacgtttttacgactcaacatgattctgactaccatggttataatagcagtctgttttgatatggactttgaaatcttttctttataactggcaccattgcattgttatccctctggtgtagcaaagtaggacaaacaagcagatctagtaaagataatgatattaggtgtctcgataaaaattcagtctcaaaatataggctgtgagtgagcctatgtatctgtcctgaaatattgaaatctagttaggctgtgtttggtaacacaaaaaagctagcttatagcttgttggactagcttataagcttgttggatgaaaacgtgacgtgcttggtaacaagcttttctcacgagcttataactttttttgagaagctatttcaagtagctttttagcttatagctgatagctttttacattttcttccaataataaccttattattttatttttattacttttttacccttatgtaaacaaagcaaccgtcccactcactcaccactcactcacgttttaccaacccttaggtcacaattaatttaatgaaacatctcataccactcactcacggtacagcttgaattgtatatatacatatatagctggtaaatgagagggtgagtgttgaataattgaggttacatgccataacaaaagtgtgtataccaatgttttaaggatatttaaatgatattttatgtgttatgctgaacatgaactaattgtcactttaatccttgtatagagttgcaggttgaaatgaataaatcttaatcttaagtatataataaaacagtagactagtgtgttttcacattagttctttaaatctttgtcattaacatagtttttcaaacattgaagtgctccatgttagtggtgtagcttttggtctgcggttcctgcagtactgctggttgctatagcaggtgcagctgctgtgctgcataccggcggctcatggtgttatttaggagtttttggctgccttttagtgcttgtaatttctgctgtgtttttgtttttgtttctttttagacaaaaaaatgtgtttttgtctagaagtttacatccaatgggcataaaaaatccaggtgtttttaaggaagtaaatttctgaaatgaatgtgggttacaaaaaacaaaccatcaattttttccttttaaatcaatctcttgaagatacacaaactctagtatagttctttagatttgtgaaatgataatttagtcacttaaattaacttatatgatcgaatttattccttttcaaatttagcattatagtatgttcattttgatgtatgaagaagggagtaaagacgatacgtgactttcataggttttgatcaatatttattttccaaggttatattttttttttacataatttttattttttttaaaattaaattgtcatgtacttttaggtcattttatatttataacagctagttttaccaaacacattatttttaataagcgagcttttcagctatcagctagcttatagctgctttttaccaaacagagccttaatgcaagtgaatgccaattttatattgaaactctatttagcagcattttcatgttgctatattgttttgtatatagtaaatgtatgtagatgttaacaaatgtagcttatatttccttcaaaaaaaaaaaatgtagcttgtattatgttaatgtagaaacaaacatacaggtgtttttaaaatacaatctgtcctgaaatattgaaatctagttaatgcaagtgaataccaattttatattcaaactctctatttagattgcttcattgttttgtatatagtgaatgtatgtagatgttaacaaatgtagcttgtattatgttaatgtagaaacaagcatacaggtgttttgaaaatacaagataaatctttagtagatttatgaaactgtgacatatctttagttgacccagatgttggaaaatgtgcttgcaatccctaaaaattagaaactgtctaatttatatatccctaataaggttgtaaaactctcaattttggaggttgtaattggtatactttcctgtacaactataatagcagtttgttttaatatgaactttgattctttataactggaactgccgcagcattatacctctagtgtagccacgtaggaaaaacaatcggatctagtaaagagtagggttaaacaaagctattaggtatgcgtctttgtataactatccagtctcaaaatataggttgtgcgcccaggtatctgtcctgaaatatcgaaatctagttgatacaagtgatagcctatttatattcaaactcacaatataccagcattttcctgttgcttcaatgttttgtatatactgattgtatgtagatgttaacatatgtagcttgtagttgattaatgtagattcaaatgtacatgtgtttttaaagtacaagatataaagctttggtaggtttatgaatctgtgacatatctttagttgaaccagacgcaggaaattgtgcttgcaatccttaagaattaaaaacttgtctaatttagatatcccaaataaggttgtcaaactctctcatctttgaaggttgtaattggtgtatttgtatacaactataatgagttggttttgatatggactttgaaatcttttctttataactggtactactgatcttttctttaaaattataactggtactactgcaacactatccatttggtgtagccacataggacaaacaagcagatagtaaagagtagtgataaacaaaggtattaggtgtgtgtctctagataacaattcagtctcaaaacataggctgtggtgtagccgcacaggacaaacaagctgaacttgtaaagaagagtaaggatgaacatagatattaggcatgtgtcactggataacaattctgtctcaaaatataggctgtgagctcatgtatctttcctgaaatattgaaatgtagttgctgtgagctcatgtatctttcctgaaatattgaaatgtagttaatacaggtgatgccaattttatatccgaactctcaatttaccagaaattaaaccattaataaatacccttaccaataactatgacaaatgaccaaatatattatacatatccattattccaatatttcctttccatgttttattttcacttctccataattgtgttatttctcaccctccttgcagtagaaccacctgcggtatcattattgattagtccaaataattttttcgtgttcagat

SEQ ID NO: 4376 - DNA, 3273 bp, Medicago truncatula
  Intron number 3 from transcript Medtr4g012250.2 (locus Med tr4g012250) derived from phytozome v7.0 (chr-ID MtChr4; po s 2040095 to 2043367)
atacaagcaggcttcctccgggtaagggtttctttccaatttccatggtctacttgctgccagtgataatcagcattgtgattgaaataagatatttcttaatacaatcctatctctatttcaacctatatttgaagtggatttattatatattgatgaaaaccgatgttgtgcaataaattatgaaaaagtaaggagcattgttgaagagtaacttgagctgtttgagttctttcattagaatagtaactgaaaaatttaaactttacaagggtgcacgtgtaatacatctttagttaggcattgacaactaactgaaactaaccttctaactaccctgttattttcccttaaacctacctaggaaccatgtagttaactggtcatgtgattagaagcactagataccaaaacctatgatccaaccagtaaagaatgagcgatgcaatttgtaagattggcctgcagtagaaagtgatgatgctgcatgaactgccttggactgtcagtgacagatccaaataatatttttatggaaatttttgatcagctttaagattatgtgacattcgggatttagatttttatttcgcttgttttttatttcacattgattaagtgacttatttattttattttattttttaaattttttctcaagctaagttaattcataatattatcaagcaaattcttagtacatataggaaaatatgaaagccactacaaagagcataatatataatgccaatgttaaaggacgagcaccaccaaattttttaattgaaccaaatcttttagtgttttattatatttattattttatgtgcttttagagtaaacaatgttacactctgagtatttatataaaaaaatatatcaatatataactgataaagtacatttaaacatctacaaattatattttagaatgttgtatgattttttcaattttgacaccattaaatattcttgtctaaaagaaaacaccatcaaatatatgcgatcgaataatcattcaataatgtatctcttatactctatttgattcttcacaaataaaattattcaataactttttttgcggggtcaacacttcatttttaatggagataaacctaaagttattaaataattattagaaaaataatatgctagtggggtagggcagttaccgccaataccagatatgtagatttgtgcctgtggactgtagacactatacacctcaatatcagacaaagggcccgtctgttttaaatttttagaagtccttttttttcaatgttttaattatatttgtgtgagcttttctcaaaaatcattttgttggaaaatgattttgtaaatgaaatcgctattttgattttgatttttaagagaagagagattaatcatagtttatggtttttatgctttttaaatgatattaatgaaaaaacattttagcatgcatagttttcaacttgaatgctttgtcaaccatggtttatgcttttcccaaaagtctctaaagaaaatctcttatatcaaaaagattttataaaaaatctaaaacaaacaggcccagtatattgtgattgattgcttcgtgatcatatttgcttcattattctacaaccctgattgacttgcattaatagaattattagttgaatcgtgcaaaaaatggtatgtatcccgagtatgaccttaacaaaaaatggtatgtattctgattatgaccataacagttgtaatgagaccattgaggatgattaccatttcaatatcctctactgctcccatggctgcaatttccatggttagtcaaattggagacaaatgtcgaggaatctggtaaggacaacattcatttcagaagagcgacctctttacggctgttaatgagattgtttacattagggtcgtcacggtttacctctatgattttcatgaagatcaatgtagtcagtatcgagatcctacgtaggatcggttggccgttgaaagaacttaaacacgaggaacgtaacccggttcgtaagtaggatcggtaggttgttgatagagttgagagaaatagatagagaaaatagagggaaaacagaggaaccaagcataaaaacagagataatagaggaaaaacagaggaaccaagcaacaaaatagagaaaaacagaggaaacagaggaaaaacggcaaaaaacagaggaaacagaggaaaactggcaaaaaacagaggaaacagagcaaaaccgagccagagttaagtcgaagcacggtcgagaccaagtggtagtcctcactctatcattactttttgcctcagatggagtacaagaaaaaggcaatttaatcgccccctttttggaattgttattggtttgaatggtatagcagaattggaagacatgggagtatatgcagcaaaagaatgcaacaggtctatctgggccgtggtcactgatacaaggtttggtgaaattgtaccagaaaggcagtcacagaaaattggttgtagggtggtgcagacttcacatgcactagaagcttcacacgtgagatggggcatgcattggatttggacgacaagatctcttggaacaggatggttggcactgtctgatgtgattcaaattttcacacgagtgtgggtcatgactcatgagaattgatgttgcattgcagggaaatttcgaagtggcggttggccagaatagtcaccacaacctgacatattaaggcactaaatagcaagttaactgatttggttagcttgaaacttgaaagaatccgtcttttgacacaatcttgtagacatgttagggctctaaatagcaagttgacttatttaggtttgatcagctgaggactagctagctgattctctgattaaggctttttcagcccaggggttctatgaaatgtatgacgaagtcacggtatttgattatttttctatgcttcagccatttcgagtttgatgatgaatattggagtattagcactttgtctctgtttttgaactttgaagtctctctgccatgcattgatttcgttgatactgaggccgctagcggttgatcggttggtagtcactgttaacaaatgggttttatttataaaaatcgagattgatagctgttaaagtttacttcagtcatgtttgagattctgggaatacattttgtcacaaattactattgttgtacatgtggggaaaaaacttatgtattattttattcttttcaaacagggtggttagattgccctccatcaggccaggagatt

SEQ ID NO: 4377 - DNA, 1406 bp, Medicago truncatula
  Intron number 3 from transcript Medtr3g071350.1 (locus Med tr3g071350) derived from phytozome v7.0 (chr-ID MtChr3; po s 16768248 to 16769653 reverse strand)
ggcactccgctgcaaaatagtgttgaagagctgtattataaacattttctttattcatgacttgtcaaaagctgctttgcattttttctgagggattgtcagtttttttttattatattctgctcaagtaaataattgctaattacttttaggaaaattaccatttgctttgctgtaaatacaccttttcattctgaaactcaacaagtcacagtttgtacccgagtgttgcaagttagaacttttcctgcatcggggaagatgacttcacatattatctgtatgctaatatactgtatacatatactgatcaccaatttgatagaaatattttttataaccttaaacatagagcatccgagtttggacagaagtggggttacttagttccgaacaacctcaacaaaacctatggttctgaaacttatatctttagtataatatgtctttcttattatctgttctatacacataataaatgcatataaacctcatcttgttgacaacaaatatataatatattactccaaaatgattgtgatattatactaggtgtcagtgtccctgtgtcaaagttgacttaatgaacatgattgcttattattttagtccaaaattgattaatctaaagtttacaaagttattatcattcataaaatggaactcgaattttaggttctgaaagattatggttacaccagtttgagttttgaaagatagttgaaccaattttgttgttaagtttatgttagaaattggtaccaaaatacattttaataatatgaactgtcttttattgacggcagaaacgcttacaacaaacaattacacacattatagataatatagaattcacacataaactacggatagaaatattatacacaattattattcaagaaattcgagagtcttggtctctctctccaagaattcgagagcttggtctttccctccaagaattagagagcttggtctctcccaagtcccacccataataaccattcagaaatatcccataatcactttctccttttctatctatatttattctaaacagaaacacacataacccataactgctaaacataactgacacataaaagcaaaactgcccataaccgccatcataagaagtctaacagtttattcacatactcccttcggtcttgattataagaaaaaaaatgcgatgttcggtagttcaaaatataactagtttgtttgatttgaaactttttcagagacatcgcatggaaaattagtttaatgatcaagaagtattacgttgatataaacctatggttaatctgatttgcattgtatttcttctatatagtttaacacctttgctgccgccaaccttttcagggctttgctacacttccttgattctgataagttca

SEQ ID NO: 4378 - DNA, 1333 bp, Medicago truncatula
  Intron number 1 from transcript Medtr2g120710.1 (locus Med tr2g120710) derived from phytozome v7.0 (chr-ID MtChr2; po s 28459323 to 28460655)
ggtatgtacacttcctttaccattattttcaaatttgtagattgtttgagttaattatataattgattttttttaagctcttgtgtctttaatttttgtttggtataaaggaaagagaaaaacgagaaaggaatacacatagatatttgtagaaatatagaaaatcttgcacatcaaagagaaagaacaaatattgaaattgaatagcgtcagaaatttagagatgaaaaaagataaagttcatctataattttatcgataagtatttgatacgctaaatttggtggtcaattttatctcttatgtctctaattttcttcattatctcaaaattgtgctacgaagattttacataacacgtgattttcgcgaaaaaatgaggcaaagtattattaattattgttgaaaagatgtagtttttgtaaatagaataaatgatatagtactagggcctcttttgttacagaataaaataaaagtgattttgacataaaagaatttagagattatatttttgagattttatgaaaaatcagaatctattttgcgtttgtttatcgtaataaaaatcactttttttaaacaaaaaatctagtttgtttgcatacaactatataaaagggattttttgttacaaaattagttcaatcttttaaatcatattttctctatcctctaaaaaaaaatctattttttgagaagctgctcttgacagcttctcatttgaagctgtttttagattatttttagattctgagttttttaaaaagctgtaacaatggatgcaaaactcttaaaagtgattattttcttaaaaaaaactataacaaacgggctctaagtactgtaaaggaatttgtagactaaaaacaagaatgtgtacgtgaactattgtaaagaacgtaaaatcgttatatcattctttcacgaatatcacgtgtcgtgtcagtgtaaaaatggttatcaaatttttaataataacattttcttgaacccatttgggttagcatggtagtattgacttgaaactttggagtgtcctcatcttcaaattttcaggtttgattatccccactatcaatttaggtgggttaaaataacttcttaagaaaaaacattttcttaaatgaaaatgcacatatttctttaagtttttaaattatgtcttgaaatttgataaatgaaatacacaatttccactacaattttttttctttttatattaatatttcttttttcttgctttctgttctaccaaacaataattctctttatcaaaatcaatgtttcccttaattattgtattatttcacaggttgatttagtagagacg

SEQ ID NO: 4379 - DNA, 1419 bp, Medicago truncatula
  Intron number 5 from transcript Medtr2g041730.1 (locus Med tr2g041730) derived from phytozome v7.0 (chr-ID MtChr2; po s 11556178 to 11557596 reverse strand)
tcgtgtaatccaaaaggtatataatttaaaatgactcatgtaggtttactatattagtgtagacttattttaccagcatgcttgataggtcatgactattgcaatctgttcacaattaagatgttttgttcatgtctttaactctgtatgactttgtttttgttattgaatcaaagccttcagatcatttgaaattcagttttgttgatgctctgttcatattcacaatctagttgggaactgacttctgattttttcaaatgacaatctgaaaatgagttgtctgactctgacccaatttgccttttattacaacatccagcacctctggcgaagagtttataaaatctgatttaaatttattttaatgttgcttatcttgtaaagttgtaaatttacttttatagtcaagttgtaggtattaacaagaccaatttgttcagagttgagttgtagacactgctattgcattgttcatgaaattatatgttagtcaaatatgatgaagcattttttgcaagtaaattatggatttattgagggctttgttatggaaagaaaccaagaaaagctgaaatgtagacttagtcaagttaaataaaatgctcactagctgtagtttagtttcataaataaaataaaaaatcacaaattcaaagaatcttgacactgataaacctgtatgtttatgggattcgttgggttcacctgcacccagcccaagcttcagatggtgggctgatttggttctgcaggtagggttgagcctgaaataacccaacacacctacttgtcagattactttccccttgcttatgattataatgcttaactgttattaacaaatgttgttctgctgtggaactatgttgttctgtttacatactttctatcatataataagtgaaatgatgtcatcccaaaatctcactttcgaaaaacaaaaataaggccaacttggaacaatattgtttaaattatggaaaacacaacatattggcgctggagagtacatcgttttccacttcaatatcttgacaaaaatcactaacccaacccctgcctgtgtaggttgggttgaggtttttttgcctcagcccatgtatacagttttgttagatgaatttttttccttcctgataccatgaggcgtagattcattgcactttgtactcaagttatgctgttaaataataaacacctgtgaaatttataattctgttgaagaatgcatagttgcgtaattcagagttggtggaccactttcctgttttttgttttctattaaatcaagattgtttggtagtaataaagttgaaaatagagcagtcttggctataaaacaagtattctattgaaagtagagatgatgtttttatatttgttttatgtctatgcaggcactcgaggttattgagc

SEQ ID NO: 4380 - DNA, 3245 bp, Medicago truncatula
  Intron number 1 from transcript Medtr4g018930.1 (locus Med tr4g018930) derived from phytozome v7.0 (chr-ID MtChr4; po s 3745845 to 3749089 reverse strand)
acttcttttggtttctctacctacaccgctttctggtaaaaacaaaattaatttttttttccctattttaagtcaaaaattaaattttttgcatttttttttgactcaataatttgaatgtttttgtatttattttgttatgttgattttgaaattagggtttttttaggttatggtgttggatcattgtttgtttgttaaaagtggttagagttgtgtttattgcatggctttattttgggtatgtttggatttggatagaagagtttgaaggacaggtagtgttgattaagtagttaatgtttaagatgtttgtttctgaaaatgaataatgggttttatgaaaaggatgtggctgataatgcattaatgttaatttctaaagttaggagaatgattagttaaaatggaaattgttttccttattaaaaatgaacatacccttaaaatatggaaatgagtttgtgatggtcatgtaatttgggaataagttggtgggtggttggggattttccaagtaggacaataatgggcttatcagaagtaccaaagtttgatctctgtctggaacaatttttggtcggactttacttatcttctgacgaaactttggattaccagggttccttttccttgggaattggagggttaagagaaaaaaataaagtaagacaatgttgttttattcattccaaaacttctactttgtactttttctacataaataaccgaaaaggtccttggtggggactagagttattggatagacttagcattaggatcttcttcctggttgaaaatgtcatgattttgttactgctggtagtttgggaacatggaaatgtctgattattttcagacagaataatgcattgtagtttgcacatattttatgggtgaactttgccttacatcaagcagagttgacatatacgaactatgcgtgagaaaaaaatgtagatcatccgtaagtgacatacacagactggttgtggactccaatgtttatcagtatgtatttttttttagttttataacactatttcacatgcgtgttgactctttaattcatgttttagggattttaacgattacaatttttgctgtttacccctatgtgatccgagaaactttaatttacttttttgatgtgtattgtgacacggattaggattttcaatgattgctggataatatttagctcttgctatttaatactttgttatggaagatggtgatgcttttctctttttgtgttcgtcgtaagcattctgtgtacgtgccttagttgttgattcactattctaaggtagccttttttacatgttaaagcgtgtcaaaaaatatgcaaagtatctaataaattaataatccttccctatgtgtaatttgtagtattttagattttcattgctgattgaggttgataaatctggagcaccattgtaataatcccattatttcggttatccttttcttcgcactggtttccagtttcctttacactccaaagttctccctttttgagttgtcattttttttcctgctacttccacaaccccttccaaaatccttagcagttcaccccctgctcaccatgatctccaacaactttttcggtgacttatctcacctgagttatacagtgataaatatagcatcccattgggaattatatcaatggtgatttctcctatgttagtcatgactcatgagtcacgtggcagtgatggaaacgagccttagcatcaagacgagggatgcttttcttgatgagtttgagcttgtttctaaattccctatagcattagcattttggtcatttgctaaattgtccttctagcaatgcttttctccaaaatctttagcatccctgagctgttgcctttctggttgtattctgtggagcccatgctctattattcttttattaatagggttcatttgtaacaactaacaaggtcaaaggttagttactttaagcatgaggaagagtgttagaatatatgaaaaatgtctcacgatatttttttcaagtcttaaagtaatttagagcataactgtcagtgcactgtaccacagatgtgtgatagttgagtagactgtataggcccatggcggtatttcttctttgttgcatcatgttttttggtcgcggtcattacgttggctgctatttctggcagagataatggaaatacgctccttcgcagacaacaaaaaccctcttttacctctactagttgcttgttttagatcgattttttgggctataattcattttgtgccttccctgttttccaacaggccaaatcctcgtccattcttcatatacaagtgttttttcgttgctgattcctttttattctctcaaatattctaccatctctatatattttggagtgttaaaactccttattgctgatctgacgtgctccagtttgagtttctaactctactgcctcttttttctggtagaggcttatagcttattaaagtttagttactttgagattgtggcttagaggattaaacttattttttcacttcacttttgttattttcagcttatgtgttaagcttaaggcatatgactttattattattaattataaaattatgaatgtcttgtattttttgaggagtttttagcatttatatatgtatagtataaattgatctacaacaagcctttgatttgtattttcaagacagtatttctttttatggattccttaaacaatgcccttaaggcgtttgttagcattactgattatttaatttgtaactaaagttgaagtataacagccgtcccgtttgcccatcctgctacaacactttggaataggccgttactcattgctctatatgggtttgataactatgattttgagtactttaaatgatttcttaagatagtaattcaatatattttttgtatatttcatctttttccatatttattgggattatgagtctagtatatacccataaataaggattaagcctctatgtttcgcgacaacccttcacattgaagcaatatcagttcaagtacatttagtatctattcattcttttctgattctctacaactggaataatatgctcaaatgtatacaacataatgttttggtttcctatggaagatgtttcctttttttattgcttaaattgattgtcatgttttcttgcaaagctaactctcggatacttgtctccatttcagctatttgactgcatca

SEQ ID NO: 4381 - DNA, 1457 bp, Medicago truncatula
  Intron number 1 from transcript Medtr5g025100.1 (locus Med tr5g025100) derived from phytozome v7.0 (chr-ID MtChr5; po s 10033139 to 10034595)
agaagtttgacaagaagagaaagattgtctctaaggtgatattcataattattatggtgctcaatttttgaatgttatgttatctatactaattatactacttagtttgagacgtgtaatctgctatttagactagtccacatgcctgcatagcttattgttttgattgtttgatgtatatttttatgcatgtgcatgatcaattttatgttgatttggtattgttcctaggattctgccaaagaagaactatgtgctagttgcactttgatttcaattgtgatcttgctgattttcagtactcgtttctatttagattgagtgctttaattaggttgtgtctgcataccttgtataaaagttgagactgatttgtgaagataggatgaggatctcaattgcatgaagaaaaccaaactctaataatttagtaattagtataaagaactttgttttaaagttgttttttgtagtaattcatagtttttgatttgcgtttgtagtgatttggtaattagattttgttaacttaatgtgtactttagggtctttgcacttgtattgtcttaagtgcaaagaagcaaagtatctcacttactcataacttaaaactaaatgtaattaaaactgattaaaaaccattacaatctcaaatctaaataagcctaaaattattccaacctagattaaaataaaacgaagttcatcttaagttatcaaaacttggattctcatcatgctcttgaggcccgcatcaagatacatacttgtaaaacttgggttctgatcatgctcttgaggcccgcatcaagatacatacttgttcgagtgatcaatatgagtttgttaagtttgttgagatcagtgagctccttgcatattctgatctttacttcaatagagactgattttccgggtttactctactattttattgaacaatcggtattagcacacccttgatatttatcatgcaattaagtattttttagctgtaagtggatttgatggcagctttggttaactcctgggaattccagttattaatttaatttgtttgattttatttcaaatttagacattcagttagatgagtggatgggttgatttttcgtggaataacggatgacttttggtttttgctattccatatgttccctgtttgtttctgattgtgtcttttttggtgtattccaatttagaccttcagccgagtgtacttagatgagtggatgagtttttttttttgtggaataatggatgacttttggtttatgcaattccatatgttccctgctttctgattgtgtttcttttttgctgtattgagtattttgttttcgttaattgacaatcttattaccatttatttattgtctgaagctaacattacttttcgttgtgttcctatcactctttcaggaggaagcttctgccatcaaggctgcagggaaagc

SEQ ID NO: 4382 - DNA, 1965 bp, Medicago truncatula
  Intron number 2 from transcript Medtr6g005140.2 (locus Med tr6g005140) derived from phytozome v7.0 (chr-ID MtChr6; po s 154914 to 156878 reverse strand)
ttattgctttgaagaagatcaatatctttgagaaggtattcttatgctatttcttgatttaattcacaatttccatttgaatttcacgtggtataacttattaaatatagatgtaagacttgtagattatgtagtaagggaagtagatcagatgtccttgtgagcttagctcagttggtatcgacaatgcataatatatgcaaggtccggggttcgaaccccggccactaccaaaaaaaaaaaggaaagtagatcagatggaggtagttaaatgccacgtggcgtccattgagtggccacttgggttttgaccctgtcaaaatcagagggggtctatgagttgcaaaagggggtgaagttagggggctagaaagtgattttttttaatagggggccaaaattgctaccatggcaaacatagggggccaaaagtgcatttaagcctaagagaaactattaggaaaactttcgagattaatgaattggaccgaaatatggtttatgacagaacattgtggtgcaatttgatccatgtaggtgacctcacttagtgggataaagtttggttgttgtataactatagatgtttattgtatttatagggtagttatgtagggtagttatcagggtccaacatagttagcaagttagcatagccatagggtagttatcagggttttaaatagtggttgtggtaagccggtaacggtcgtatcactatctttgataccgcaggaaattactgtcaaatgtggctgaaattggctcaactgtggttgcgttgcggtttcggcaacataaaaatctgttattatagcagcccactttgcaatttcgaacctttatttaactccctggtagttattgataactaccttttccgcaccttagtttctcaccagattctgtctgtttacatgtggtattttcttgatgctgtgtgatacctctttagtcttgatgttatgttttcagtaatggcactaatagcataaagtgtgttaagtagcggctataatggcactatagtactgtctatagcatagcaaaatttgaaccaaccactattttcttgaagttatggagttgcaagacactttggttttgtgactctattggtgatatgtgattaatgtctgcttctaagggataaaagaaagaactataaataatccccttgtattgtattcctagtttctgttggaatgtataagaaatgtctcttagctttcttcaatcccaattctctctcaattctgttaatataaatgtctgttttttcttgttgttgcttattgctctgtcgtaaacttattcatgatcggcgttaaggcagcagtagtgtgcaatagacatgttatcttatctggttgtttatatgtggtattttcttgatgttgtatgatacctcaagtcttgatgttatgttttgaacaatgctgtcaaatagtggctatagcgattataatggtgctatagcgtagaaaaatttgaataaacccgtattttaagcactccatgattgacaacaccggttttgaagttatggagttgctagacactttaatttgttgaatctgttggtgatatgattaatatcttcttttaagggataaaagaaacccatttgggtttggcctagtggctgacttgggatcttggagtttgctcctccagaggtctcaggttcgattccctctggtgccaatttcggtgggctaagtccatacagagcttgctctggctttaaacggggctcccgcaagtgggcggtgggattggtcccctcggattagtcgattattggatcggataccgagtttttaaaaaaaaagggataaaagaacatgtaaataatctcaaacatttaagaagaccaaatcataatagtttcatggtgtcttatggtcttattttttgtggcaattaggagaaaaggcagcagctccttactgagataaggac

SEQ ID NO: 4383 - DNA, 2599 bp, Medicago truncatula
  Intron number 1 from transcript Medtr4g158590.1 (locus Med tr4g158590) derived from phytozome v7.0 (chr-ID MtChr4; po s 39871712 to 39874310 reverse strand)
ccattgccttcatcttcttcatctatctatctcaggtacttcattgcatttctttcttcaattgttagattcttcgcttttatatcaagcaattctcaattccatttttacatgcctttcattcctcttttgtctataatttgttctaagaattagctttatgtgaaaataaaattctgtttctatgttttttcacaattttttggcattttatgaatcatgtggtgatataatgtagttcgtatagattttcgtttccagataagagtattgaatgcaattgcataatcgatggttttgatatatgtttgccgagaaaattagaaaagaataaaaggaaaagttgagatggtggttggttactttggagtaaaggaaaataaatcatgtgcttcaaatgaaaataatataacaaatactaaaactattttttaaccctctttctcacatgaagacgaagtagatcctgcattgtttttcatgttatttaaaaaaaaattgattaattaaaattctgaaaagtgataacgcatttcccctcagaaaaagctagtagagataaaaactgtaagcaagcattcctcgttgaggtagatgcgtttttaagtcaatgcattctcatatgctttaatcgaggttgcgcattccgatacagccgatgcaatcacaattctagcagcaaattgtgttgttggttgatgagttttttttctggtccctcctttctatatttaaacgttatattagtactattaattaaaaataaattgttagtataattttaattaatttcgagtttttctatttacaccccatgtttttctggttacacccaaattttcttaaaatttttttataatatcaaaattgctcttttatataaattttcttaaaaccctaattttattcattgtcggtgagtttcaccctctttcaccccacaaagcgatcgatcaaacaatttgatgtttaatatcaatctccatgaaaattaaagagtgaatcaaaatatttttcatacatactcaattggatataagtaagtgaatttcttcttatatttgctagtttcaatttttttccttcaactgcaatgatgcactgtacgattacggttttagtttacattggcaaggttaacttaaattcagtttaagtaggttcatgtaaactaagtttacatgaacctacttaaactcagtttacatgaacctacttaaattgagttaacatgaacctacttaaactgagtttacatgaacctacttaaactgagtttacaaaatcgcagaactgtgaaaacacaaaatcagaactgagaacccacaacaagaaaaacacaatcgattgaagaacaacacttgctaacctgatttgcttcgaattttctttgaaatcatgaatggacgtgagaaagtatggttttgaaaatcttcgcagaacacaatcatcaattggagaattatggttttggaagaagggttttggggtgtaaccaaaaaagaaggaataggctttttgaaaatcaaattttatgaaagggtaatcttgtcattttgaggtgcaaccatgattaactagggtgcaagtagaaaaactcattaatttctaatgaaaaattaatttaacatatctctcaatattattttttgtataatgagtttttctatcacgtataaatttgcataaattaaaatgtcaaaaataataaatttatctttaaacttgcataaattaagtgcaaaagtaacggatgttaaaggatccatcatcaatgaccctcgagctttgagcgccaagggtgaaaacactttgaaagattgagcggacaaacattaaagcgggcctaataattttcaatggtaaatgagaccttggtttttttcttttctttttttgcatataacctttttgcttgtaaaattcaatgatatatattttttttgttggtaggtttaaagttaagattttagtacttacccttggtcggccctaccaaccaatttgatgttgaaaatattgtttatataatgtttttaaaatgacattaactggacgattgatgagccatgaacattgacattaactcgacgattgatgagccatcataatatgttgacaaatttgaataattcatcaaaaagagattatcacttgatttaatcataaaagaatgtatttggtgtgatccattgtggaaaataaataagagcttataatcttatttatttatggtttttaaaattttgtgcatgtgcaaaattattatcgttttgttaatagtaaatgtaactgtaaacttactgatatagaaatatataaaataaatattagtactacacagtattggaagaatctttcaaaaaagtattggaagaaaatttcttttttatcaaaagtaacgacaatcaaattgaaacgctggaagtatgtttcccgattgcaaaaccttcataagagaatatatgttgatttttatatgagaaaaagctaagactacaaagatgataaacaataaaacatctattattcttcggtcacatgaatatgattacttatttatacggctttgctaacagtaaacaatctcccatgacag

SEQ ID NO: 4384 - DNA, 1267 bp, Medicago truncatula
  Intron number 1 from transcript Medtr3g013140.1 (locus Med tr3g013140) derived from phytozome v7.0 (chr-ID MtChr3; po s 2398742 to 2400008)
agataggtaccctcttcttattcatcaattttcttactcatccatagtttgtcattatcacattccatgtattattgaagtactaatcttaagtcaagcaagacctttttgtgcatttctaatttgtttgtgatatttatacaatttttaagttgagaactataggaaatatatgtacatttgacaacctttctcttaatataaattattgtctcaaggttagttttatttataagcaaaaagaaagcttttatgggagttgattaaaattagtgtgttttttggcaataagctttacatgcataactttgttagaaagaaattttgtaaagtaacattcttctaatttgtaacttagctatagttagtgacaaaattcagattccaagcttaaggactttttgtcttggcaaatttaactcatattttttaacttattgttttttggcttaaaagtgtcttttgaggacaagctgtcatttttgtccaattccaactacaaagctaccaatcaatagggtaaacaactaccacacctaagtcataattaatctgaagtaaaatctaacaatgactatgactttctcttttgtgcttcaataaatgactgtgttttatatgtttggttggtgcacatgaccaaaaggttagacaaatctctttcatgagcattcttatagtaaaaggtgcattaaataggacattgtagggtctgtagtttaattaaaccaatcaacaacaaaaaaacaaaaaacaatttaatatttaatacataaatctgtgttacgtaatatatttaatattgaataattcatcaagctacattttagaactttactttaaaaaatgttttaaggtttttcaggctttctaaaaataattttagcatttacttagaaaaatgtgtaagattttcatcaggctttaataattgttgatgttcagaccctagtttctttttactcactgaattttttttaaaggaaatgttaacgagtgtctccgaaacactttttaagatctttaaatggtaatcttttatgacaatttgtgtaactattgtattgaaaattaaaatatttgactttttaatgaaataattttttaatttggaatttttaaagagtatcacacgttaccaatacttttttttaactagccaaagtaccttgctatgaattatgcatcatatactattatttgaaattgatttctgtttctcattaatgcagctgaactgcttggacttcccttaattcctgcatac

SEQ ID NO: 4385 - DNA, 2901 bp, Medicago truncatula
  Intron number 2 from transcript Medtr4g081270.1 (locus Med tr4g081270) derived from phytozome v7.0 (chr-ID MtChr4; po s 16938270 to 16941170 reverse strand)
tttgtgagttcaacttgtaagtatatatctatttttgtttttgtttttacatttataatttacttaaaattttgatttatatttatgcggcctttcactttctaatgtaagatatcacaaacaacaacatcaatacataataataattataataataatctctcaaaaaaaaaaattatattattaatattaatattattattgatattaataataataagctactttaataaataaatgtaatatatgattatgtagattaattatttagtctgtttttacaaataatatctattaaaaaaaaatcatttgtaagagctaaacttaaaattttccgccataagttcttacaaaataatttatcatactcattataaagcgtatacctttgttgggagaactgaacctcttaaacgggtcttagctatcttgaaggattaaagtttggagttcaaagaataccttgctttaataaaaaaaattaaacgtaagattaaacttattatgtgtatttatatttttaacatagtcataatatgtaaaagtcaaggcaataatgtttcttttgtcatcatttaaatcttagtagataatgttttcaaaattacgatattgacaagttatgattctctacatttattaaaagagatagggagtccaatctgtacgattttatttatttttggtcaagtggctaaacttacctaattgcgagagaaattcaccttaaaaatgaataagtggggtgtccggagttcgaacctcggcccctgcacatattgtgcattatcccttaccaaatgaattaaactcattgagacaatctgtaagattttaaattgtataaatgatataatctcatacattttcaaaaatagaagatatttttttaaaaaaaataaaataaattagcccacttaaattggcactagggagaatcgaacctgagacctcgagaaatcgagagagagactttctctatctcaaaaatattttttggtcacacactccaaccatcatacttgaatattgtttggcttcatggaagaaaaccattaaatgagattctgtaaaactcactcaaaatcagtatggcacaattctttgttgactctggttttaaagttctctaacaaaggaacaacacccactaatcccaacaccacgatagttttcaattagagtgtccattaatttttttggaatgaattatacattcatatgatcaatatgatggaattttaacggtatagccaaattatagatacaagttaaggcatgtctaatgggaaaaatatctttaatggtactttaagttagatgtttataacaagttctttaacaagtcggtcatttatgttttttttgttaaatttttttcctttaaggaatataatatttacagcgttactaattgtttcaaccaagttgataaaaagttcttatggtcagtgttgaggtggtaaattcaaaagggcttgtgacatcaaccttgattacttacgcaaatttttttcttcttggttttgaattcaagactaattttaaagataaatatttcatcaacaatattatatcaagtaatcgaacaatttcgcttttaaatcaagactgaatgatacacctatcaaccttagttttgagaggaataaatttggacatactgacttaaaattaagtttccacacaaacgctttttgattgagtttgataaaagtaagatcaaaatattttctaacttaaatgaccaatttataacaaaaatacttaaaggatgaaactattataaatatctaacttaagaaattacataagatatttggcctatctaatgcattaaagataccatttaaaatttgagagaggaggtttgagagacaaactacccccgttagtgtctagggttttaagtaaggataatcgtttaatggacaacaattaaattagaggatagtgacctcatattgggcttactagaatggtcaaatctgtcacaatttttttagaaacaaaatccaacacatattcatcaattaatcaatttttgataataatatactataaattaatcataatttattataatttataattttcaagacataaacgtttattaattaaatagttaatctaaaagtctcatatttggatgacaataattaattacaaatgaatatgaattttaatactaacactttaaacatggtcaaaacacttgtctatgaaaatagaacttatattcaacattgcataaatttgtattcgatagggaaaacaattcataaaagttaaggacttacaatttatataacgaatgatgaatttctagtaacatatataagtgtagagaaatattttatcaaacaatgatcaaaacatgtaaaaatgttataaaaaattcccacatcaaaagaattgttcgaatcaatttgaattacaatacttttatatataagtttgtggttagtagttcttcctatgggttttcaatttcttaaaggttacataatatccaaataggtccaacaatagaaattacaaatagacacatcatatcacaagattaagttcatttaatcatagataccttcttaccccaatataataatactcggtaagagtatttgtgttatatttatacttgaatatttattaattcacataatttaaaatgttggtgaaacatcaacagattgtaattgcatgcttattaattatattgcattatctaacaaatctaagcattcaattatgatgcttatctaaattgaaataattttgatatatatgatacttagtttattatatgattttatgtctttatttttcttgataaataagttttattgtgtgattgtaatgttattttactactttttgtttgattttgatttacaggag

SEQ ID NO: 4386 - DNA, 555 bp, Medicago truncatula
  Intron number 1 from transcript Medtr2g030170.1 (locus Med tr2g030170) derived from phytozome v7.0 (chr-ID MtChr2; po s 8300123 to 8300677 reverse strand)
gatcaggtggtggttctcttagtagaagaagaaatgtcagtaattctttctcttttttaatattctgtttgtttgttttatatattatatcaccttcaatcaaagggtctatttttttttataaaattacaactataatatttcagtgtcataatcaaagttttaaggatctttaatattaaggagaattggactgtccgattttattagtagttttttagttttaatttggttttgcagttacaaaaattgactttcaatgaatttattctgttaaattggtgaattgttgttaaggtgaattaagtgtgaagcgatagagttaaattgattttagttaaagatagatgaaaattgatgatgaattgattctgtaaaattgatattagacaatcttcatcatatttataacaaataaagcaaaaaaaaaatatgggtgatgactatcattgtgatcatattctactgtagttttagatgttacacaacaagaaggtttggattttatttggtaatttggaaattgattaaggatgttaattgtttttcagactc

SEQ ID NO: 4387 - DNA, 2226 bp, Medicago truncatula
  Intron number 3 from transcript Medtr3g127640.1 (locus Med tr3g127640) derived from phytozome v7.0 (chr-ID MtChr3; po s 32426594 to 32428819)
attttgtgatggagtgtatggcccacctttaaatgggggaatttgattggttggcgtaaccgtcatatctttttgtcttctctttttcatatgatgtgattaatttttaatcatcatcccttttcaagatcataatccatgagatactgatatacacaaaatccattccaactcagaactagtgtatgtttggtttcatttttagaggagttaaaattgattctaaaagtgtataattaattatgtcatgtttggttgttttgttttaaaattacaaattaaagcttttgatgttatagttgattttaactcaagctcattgtccaacttacttttaaattaaatgtatacatcttttattggcaaaatcattttatagaatcatttcatacacatatatcctagacttcttgacatgggagattttatgttttttttgcctcatttaatgatttgcaattttagttatattgaggattttggttgtggtttttaatgtagtggatgtgtgtggggctaaatattaaggagcggatcgttagggatggggctaacatgagagagtacaatgatgaatgaatgattacattctacgtggcaacttgatgcttttttccccatctctgatttgaaaataccttaccttaaaaacttagaatcaaaatgaaaataccttagatcgtgctttgcaatatctatggttgaaggagcggggaaattcgggtactttttttgtgagaaataagatttctaaaagtatgttatagtaagtgaatgtattgcatgaaattgagttgtacgactttccaacttaagaggtaaacctaatccaaatggttataacatcgtattttacttctgtttcgttgtgctgattcaaatttgtgatgaattctagattataaaatagttaaattctagtactatagatgataaagtcattccacatttatttttcatggagtgacctatctcggtttgtttagtagatatttttgttgtctacctcaaagtctctatttacaagcatctttagatagatatgaatggggtttaaagtcgaggttgtaggctgttgataaatacaaaggccaactgattgtaagattgaaagcgtttcatggtccgtctcaatcagcaagcttagcttcctctgtttgacaacaaattttcagctactttgtgcaaaataaataagagagaggggaaatttaattaaggtagtttgcatcaaaacaggatcttaagtagagagcacagttgtggagcccaataagtgtcccagttgtctaatccatcactatctaggcctttgtgattcttggcagaccttgtgttcttttggttttacttagctagctaccacataaacaacaacaacaacaacaccggtcaagacacgattgagtgggggcatgcttattattatgtcacttagccttagtctattatttgaagaggaaatctgagattagtttttcactttttattttgaaatgaaatcagaaagattataaaaactatgttgattcttctcatttcatccaagtaaacgggcattacatgaattatgcataatcattatctgatacattgatatgtgaatctgtgcttatgataaactgataatattcttcttcataaaagacttggggttgtggaggatttcacgtgatactgtagggggggaccgttgttaactctgtctgtacaacacccgatagagattgcttatcattgccttctcaattcttcctttttcctatggggaatttgtgcccacgtttcacctttcaattaaactaaataattgatcaatatttatgcatttacaacccggctagaatagatatcagttggcctgtctacaaaatatatttaatgctaatgtcacatatgttttttatgaagaagaataatgtcacattttttattaggggaataatctaaaaatgaaaaatagattaagctttaacaatttcttaccatcaagtcacatgaacatttactattaaaccaaaattcagcataacttttttgctgctataattattctcattgctttattcgtttcaaagaaaggtttaaaataatattgtatttttatttgatattttaaaatatgaattaaacattaatagttttcttttatctttataattatatattgatccaacttactaacacactgtatttcactcacttcattaatagtgtctattgtga

SEQ ID NO: 4388 - DNA, 675 bp, Medicago truncatula; identical to SEQ ID NO: 4159
  Intron number 3 from transcript Medtr4g133410.1 (locus Med tr4g133410) derived from phytozome v7.0 (chr-ID MtChr4; po s 31954286 to 31954960)

SEQ ID NO: 4389 - DNA, 3357 bp, Medicago truncatula
  Intron number 1 from transcript Medtr5g072630.1 (locus Med tr5g072630) derived from phytozome v7.0 (chr-ID MtChr5; po s 25901841 to 25905197)
aagcaaagaagattaattggtgtgatttttgaatgaatgaatgagagtgaagaagctttcttccaagactgtgatgattcttcaagaatcacattgtttcagccttaggagagaatctcaaatactatttggtaaacggaataaaaagggggaagttatcggagaagatggatatgctatttcgtaataacatacaacctgttgagagcgatttttcatgattctggtatcatggttcaagattcttaaagaattacattgttacagtcttagtggagaatctctaatgcttcaggtatttttgagctgcataatatttaattatttacatagtatttttgttgagtaaatatcactgttcaagttgtttatacatagttaaaaagtttctccaaattaaatgagtattgtccccgcaactacctgattgctatatatctgtccatgttttggatttgctatcaatgtgtagaaatctatccgattgcctagtttgctttgagatgaaaccaaaaccaactgcttagtctgaacttttttgaaagaaatctatctgattcttattgagacgtttcattttattctcttcgcagtatctgtttaatacattaagagctacctgtcttaccttgtgggcatagcatacattttgagtgtcttatagagagagatggaaaaacatcataggtaaagccatttatgtgtttcttatgggtgattgagatgttatatggatcctatcatttaacacacaatactgatcttagtgttgtatacgtgttgcgatatttggtatcccagagaatcactgtcaaaaggtgctgatgcagcctgtattacgattgtgaagacatcaaaagtctagatgttgcaatacaaattgtcgttgtagacctattatttatttaggagaaaatagagtcgcactgttttgatatgagacaaataagatgctattcctaaggaaaagcaaaattgaacggtcaagcatgtcatttggtttcttatagtttgattgaaggtcgagatatccagtattctgctccgagattattattttatctaatgtgaacacaaatagtatagttcaggcgtcaacagtatgaatcttgcatgtatgccactcaatagttagctcagtgcatcgactgcagcacaactctttgttgctattgaacatacatcatttgcgaacattagatataaaaccatcaacggttcatgctcctccttgtaatagtttttggatgcttgccatctcattcttctaaataaagctgaatggttagtaggtctatgcattgtctatgcttaaagcctaatggaatcttgtgtgaggggtgtgtaagagatgaaaaaccattcctatgagaaagtagtttgttgacaggtttagtatatgtgtcataggttaaaacggtcccttgactgttaaaatctttagtgacaaacatgcaagttcttttgcctaaaccaagagcttaaaataggagaggtagttgtccaaaagaaaattgaggagggattacaaagtaaagccaccaggttgggaatagactgcaatgatttcagaggatgagaactcctttcttaagaaagagggaaaattaattaatcaattttgttgacattgctattttaaccatattccactggcttaggcaaattgcaacattacatattctcatcatgtatctgattcctgttcttagaagttagaatgatcttcttgttataaaatttcaaactttatatgtcgattgatgtgcttcctatatgcactcttaccctataattgctagcgaatagcgatttgttgaatgtgcaaaatggttttgtaggatgatgcactgatctgttaaatctaattctaagattttaggaagctactgtttgttatgtaatcttgtctgtattgctttgtgtcatatgggatgagacaagctccaatgttagggaatcagaccttatttatcatatgatgggttctgaacaatagtgtattgggactaatggttctgggtttaatttgctttcaagatgatagttgttgtagtatattggatataaataaaaactaggctgtaccgaatatgatattgtagaagagggacatgtgtttttgggcaattaaacaatggagaagcttcagggtatcttttggacaagtattagttatttaaattgccatatttttataataaaatgtgtttgcttgtttttatagtaacctcttattatgatttgattttacaaactttcactaccctcctttgaccatagtgcaattaaattcgagtttcggaggacataaaaacaacaccgtggaaatggttgaaagaggagtgtggtggatactctctttttaacactctctaaaattcactttcttattggatgaaattcatgtgggcaccgcactttggaaagagtctcacataaagtggtgagacccacgtaaatttcacccaataggagagtgagtgttagaaaaagagtgtttctagcatttctcatggttgaaaacaaaatcaaaagattttaactatcaaattactcaatggtgtaagaatcctattgcatgccttggcttgagaaatctgtgaggaatgaatgattagtgtggtcagggagggcaaggtttccggtgctgttgggacttgggatgctaaaatggtatatttggccgtctatcacagtagtacagtcgcttcttgtcagtagcaaacccgaaaaaggaaattggaattgttatataatttctcaattgtggctgagttgttctcagaaatgatccaaatagttcaattcgagaggggggtgtttcacttgtagttaggattagacatggatgaatttatgcttacttgtatatatgtctgcatactgtaactattatgcaatgataccattctttactacctttgcttgggtttgtggtgattcactcgtgatgggtaataaaatatgcatgtcccgtgcttgggtttttgatgggtagtaaaatttgcattgctttttcaaaataattagaattgcttaattccttttttagacttaacactttttatactctaattatgcaattctttaagaagttgaaataggtccaagaagtaatttgactgtttgcttacacaaaaaaaaaaaaattctgactgtttgcttatatctttatactttacgtaagcatattacattttatttttcagaattagttttttttttttttttttttttttttttttttttatcacaaaggttttaatagtgataatgcaatattctctaagaatcagttttgaagtttaagaaccttctcacgatttattatctcaatatcgtaggatcgcttgg

SEQ ID NO: 4390 - DNA, 2748 bp, Medicago truncatula
  Intron number 3 from transcript Medtr4g134060.1 (locus Med tr4g134060) derived from phytozome v7.0 (chr-ID MtChr4; po s 32258961 to 32261708 reverse strand)
gtactgccgaaatcacttccaaggatccaagtaagttgatacaaattcttacttcttttttattacatttggatttgatgtcacaatttcagtcatttatgcagtgaacacatcggtgaccattggattaagattggacgcactaaattttaagcttggtattttaggggagcccctaatatggacctcaatttaaagggaccattggcgaacctttgttacttacttactatagccggtcactatcttttatgttttgttttgaggcttaattactggatttaatttcatcttctctctttacatctcttctctctggttcatgtcaaagtctagtctatgctggtgaacaaacctcaaacctcaactatccaccttcaatctgtccattgtcgattcgtttcctaattactcggattaccctttgtgattatgaacaccgtcctattttgcccattcctttatacacgtcactcttagtgaatgggtcaatcctcttcatttgtgtgagtgtttctaattagatttgtctctaggagagtactagtaatctgttgggctattttgtcatcaacaacaacaaacaaccacaatgtcacatttgtccctttaactcccttcacccaaaagcttcaaatttcaaccacaactacaaaaactacaatcacctcagatatcccctctgattcaatttttgtttggaggctttaaaaaggcaaacaacatcaaataataatactaaactttgtggtttgtaaagatgaaaatgaaatatgaaagaagagagaggattgggggaagggaatggagtggtggagccaaaaatgacgttggtgaagaaacaattgaagcatataagaggggatagagaagagtaagagagttaatttgattacagtaaaaaaaaatgaccggctataataagtcactttgtgaggttcaccaatggtccctttaaattgaggtccatattagggtctcccgtattttagactttaaaaattatctacttgctgtctgcaccatccgattttgatccaacaatcactaatgtgctgcctatctgaatgcgtgacctcaacaaatccaaatcccgtgttatttctttagatagtcacatatatgtaactgcgtccgttttagattgaacatgccatcggctaactatccaaaaagcttacgctgttgggtgaaaacactgcctcatggagcactgtttgggcttgaagtgtaggcaatgctcaagcccacccaatcttgtactaaaatttaacatttttactgataatgggggcaatgataattgaactctagaatatatgattatagcgacactgatgccatctcatggaccacttcgttgaattataatgaccctatttcaagtataggtgctgttttgtttactagtattagctttactcgtttaggatattcaaatacatggaaggtacttccctcatttttccattcattatattatataataaacatttatagctgaatctagtttcatggattgataattttgaaccggagttataatatcagtgtgtcactcttcaatgatctattaacttgtctggaagaaattgcccagatcctagctggttgcgtcagtattagtattaatgttgtttggatgcgtctcatgctttcttgctgattctataggtctatctccccgtaaatctgtattagagtatgtttggatggaggattttgaaaggaaggggacggcaggacttattttcttttctaagtcaaggaagctgtaaaatgcttctaaaaataaattaagctgtaaaatgcttctaaaataaacgcttcttttcttttctcactgtacggctcagtattcagtccagtttcacgaggcatttttttagatttgggaatgttgtagtatttttgcgatcctgatgcgcatggcctaggcatgaaacttattgaaacttcacataactatgctattagaaatttcttcttatggcatcctggaactgattgcattattctgaaactattggtggggggtgaattctgtcttattaaaatttcatgactttattaagttaaaactgtgtctatttctcttttcaaagacattgaataatttgcaaatatttttgaagagagacatgaaatttatcatgacaagataactgggttctacagttgacgactttgataaatggtctatggtggattagctcataaaataccattgaaggctaatgtttccctttgtaagtagaagctcacggtcattcttattctaatgactaatgagtgagattgtgacctgatgagtgctggttcgacaaacacaagggtaaacaaatgagttgaattttgatacactcacgtttattttcccttattttttttcaaactagtacttatcaggtcaccatcttactcattatgatgtggaagaccttgtgcttttacatgagtcgtctttggagtttcaagtgattttcaagtatttacccactgtggaccacctttgttgacatgacaagatatactctaaaaatttgtcataaaaagattcactccaatggtagccgactttttcaacaatgtatcttataaatttgtgcgaacaagtaaatgatattttaagtctctatgttccattcaaagtttataatcactttttttttaggacaagtttataattacttaaatgtttccttgcgagcatttaaccatttaatactgcgtaatttgtttcaggtt

SEQ ID NO: 4391 - DNA, 8651 bp, Medicago truncatula
  Intron number 2 from transcript Medtr5g036210.1 (locus Med tr5g036210) derived from phytozome v7.0 (chr-ID MtChr5; po s 15082226 to 15090876)
cctgcttttaccttcatacttgctataatttcaaggtatgttatttttattttatggttgaaattacaaggtttgttgttttttggattaaaatgcaattaattgcatcataaagtcagcaacaaagaatactcctattttatacaatttttttggattattattattgattaatggcggtatccagattaattaaatttaaggagaaaaagttatagtggctttatgcctatctcttttatattagttcctctaattttttctcttgatataaattaaaatacaataaaattatcgataggctactctctcggtgggtagcatgtcttttctcgattggtactgagtagagttgtattgtactcttctattaatttctagttaattttcttggttgtgggacatctttttttaaagttgaattaattaacctttgcactactttctagtttctttggctgtggcctgtgggacatctcttcttcaattcggcaagaaatattttcccaccttagttgacttttactaatgagctttataatatttgacacaatagagtgaacaaatattattttaaaaaaatattatcttttctttccctctctttgttggagatgaatatagtttctactagaaataatcaaattgattgaaagaggaatgagtattgaaataagatttggtattgatttgattattcacaatggaaattacttgcttatctagtaatggctttgtctaacaaactaaagctgaaatctatgaaagttacatagcatacataactaactaaacaaagctatttacactatatacacctacgttaatattactaatcttaacatgccttcttaatgcaaattttcaaaagctacaactcctagttcctttctaagctctaaaaactgaactatttgattggcttggtcaggatatcaatagttttatgcattaaaattaaagccttacatcaaatcacacaccaattctatggatcatctccatcatatcaacaccttaatcttcatcaatctcgtcatcatcatcactacttcatcacttcgattttcacctttattgtctctttcttattggacgaaatagagcttttaggaagacgacgacaaatgatggtaacaaaatggaaacgattgaaaccaagcaaagtgcatcaaaatcgtgtgaaaacttgtgattttgtagcggtttcatttgttgcgatcttacaacgatttttcatgtttttcgattatgctatggatttggatcgaagaggatgagaaaaattgcaaaatcctacgattttgataacaatggccgcatcataatttttagatggataaatgtcacaaagaactaaaattgtaaggacataatctaaaaacaatatattgcactaaaatcatatttaactcatattataggaccaaaaatgttcttaaccctagttttttttgaaaaacaatggttaataaaggtcagaaattaagaactcgtctccattctcttttttcttatatatagagatatagtaagtttgcatgatgaattaaaagtataacaggtgaatcggtgaagaaaggctaaaatttctctatatggaaaaacattttcaaaatttcattactattatttaatccttgcaaatacaagaaaaaataaactaacatgaatactgtgatgtgcattttcaggatggaagttctaaatatgaaaaagcatagcagccaggcaaaagttattggcacagtggtctctattgcaggggcattagttgtgacattttataaagggatgccattgataaatgatgcaattcaacatatagaaattggagcaagtggaatttacctattagggaaatcagattggatacttggtgcttttcttcttgcagttgcatgtttttgtctctctcttttgtttattgtccaggtaaacaaactattaatatttgtgattgtcatgtgaagagaaccataagaaaatgtggccgatgcagatttaattatggttgtaaacacataaaaaatattgatttcgtagtctaatataaaggttttagatgtctctgcaaggacatcacaaccataatagctgttgcatttgtttgaatgttgccacaatacaatggttcacaacataatcacaatgagctataatataatatattcaaattttaattctacctatatatgcagacttggattgtcaaggattatccagaagagctagtgataacaaccatttgttgctgttttgtggtaatcatatctaccattgtagctctcattgcagagggaaattcaaaagcttggagactcagacctgataaagagttgctatctgtgtgttactcagtaagtttaagctttattataattataattaggcttaattgcacttttggccacctatctttctaaaagttgtgattttggccccctaactaattaaaatacaaaacaacccctatgtattggatctttgacagttttggccccaaggccacttttgattagtcttcgctgacgtgtcactcacaatggtcgacacgtggcaccttacttaagggatataggtgtcatgtcagcgaagactaagtcaaaagtggccttgggggccaaaactgccaaagatccaatacataagggactgttttgtattttaattagttagggggtcaaaatcgcaacttttagaaagttaggggtcaaaagtgcaattaagcctataattattattattattattattaggcttaaaaaattattatgaaattttaaaacatattaaaaaagtttgcatcataatttttttacatgaaatgtattgtaacgtaaaaatatgttttttttgttaagtagtttattgactgagaatttacttttataagatgaataaatggggtttcgagggttcgaacttcatcccctacatatattatgtgttgttgtccatatcaaccaaacaaagctcacgaggactgtgtttttataattatcatttagctaacgtggatatttaaatatgttcttttagtttcagaattataaattgtagctgtctaaattttggtcttgtgattattcatttaataaattataggcagcatttgtggtatcattaaggaatgttgtaaacacatgggcatgtcgtaagaaaggaccaatatatgtagctaccttcaaccctttaagagtggtcattgcacttggcatgcggggtaatatttttgggagacaatctttatcttggaaggtatatataaagaccaaaaatttgtgaaatataatttcaagattgactaattttttgtaattaaaaactggtttaacctattggtgcagcgtgattggtgctgctatcatagttattggattttatgctgtgatatgggcaaaggctcaagaggaacagacaacaagtgaaaataactttttgtcatcttcttcaacccctctattgtcaaacaaaagcatcgatatctaggatgatgtagactctacttttttaaggtggtaggttatactaaacattatgtttgataaacgtaactattgtgagagaaatgtgtattgcacgagaattgaagcaatgtaatcattcatgaacaaactcttacaaatggttatttctattcactaaagggcagattttctataaataaatatattttggaagtagaaaataagtccgaaaaagaaggtagaacattacatttttgtgagtataaattctaccgaaaataatactaaatcattgtatcttttctttagtgaacaagagaaattaacatgactttattctctaaactatcattctatcttttcttttctttagtgcacaagagatttgccattataccattttgcatccagtcggcataactggtggggacgaatcgaacctcaaagttagtgtgtcccacacacgctttgaaatttatgggcactcttcatcattgatgacagagcatcatatgatattttgactatgtttttagtattttttatttgcatttaaatacaaataagatgagttaaaggagttgtcagtggtttgaggaacatattgtattgttttcactcgagtcgttgtaattcagttttctcctagatcatgcaattccataggtgttttgagtgttttgcagtgaggaataatgtaaatcatcaaatcaaaacatcttgtgaagattaagaattgaagattaagggttcttattagataggaaaattgttgctcaatgctttgataggaaaattgtagtggctaccattaattaatcatgtcattttagattgtaaggaacttattagaaatctagatgtagttaaagttgagtatattagcagattgttaaatgctaaagctcataaccttgatggaattgctagagatgttggatcaaagacatgagtggggaatgcccctccacatggtcaaattagttgtaaccttgtttctgttttctgttaaatgaacaagtggaatttcaaaaaaaataaataaataaattagaagtgaggacaaacgaattggaaagccagatattattaaagtgagaacaaatttggtttgatttgggacgcacctttaacggtttgggtaatattttccaaattgtaataacagtcaacttggtttgattattttcctaaaccaaactataaatagtcttggttttctggactaaaataaatataaaaaaaaagttttggttcttcttttttaaggaaaaatataaaaaaaaatattattcatcaaaaaagttatagttatcggatattttattaaagaaagtgttaacgagtgtttcaaagactatttccatattattttaataggaaatgttagcgagtactttaaggacactctttaaaagctttaaataataattttttatgaaaatttgtgcattcaatgaatcgaaaattgaagtattggactttttaatgaaaagtttcttaagacatttattgacaatacctatttttttttttcaattcttttaaatagataaaatgataaacaattattgaagttcgcaaatataagtagatgggtcggaattctaaccttgttgcatcgtccgatctatcaattttaacgtttctatcattgaggctagaattgaggacaaagaaagcccgatatttttttttatcttaaacgaagtgtcgaatctggatcacaacatctgactttgcaatttcggcatttaccagttgagctaggactaagcccgatattattaaagtaagaagtgagaacaaacaaaaaaatcagatagagacagaaaaaacattgtgaccaaaggagcaagtgtaacaaacaacaactagtgtgagactgccgtgcacggattaactttcataaactaaatacattttaaatgatgtaaaatatacagacaaacaatataaaattaaaattcacgaaaatttatgataacattaaatcattacggttcttaaaaaaaaaaaaaaaaataatcagtaaattcaatggaaatggtttgatcacggtgtccctaaatcacaatggttgtctctttgacacaccaactactttaatcgagcttttccgactctctgtcctagtttttttaccatagcattatttcaaccaaatcatattctatactatatggttacctaatattggaagattttattgctacaaatagaatcatgttacaaaaatatatttttctaatctttttttagagaatattttcctcatccttgtggagcacttgttgagatgcctattctaaagtgaagatattttatattcttcttttgatattttatgaaagtaattgattatcatcgtaattaatattaattaattagatgagccgggattttggacttgataagacaagcaaattattggaggaaattaaagcaatatattttttattcttgtaagttgtgtttgtttctagttatattcatagatttttgaaattaaatgatagaaatataagctaaattatttcacaggtcttttaagttttatgtttataatagattgatcctttaagttattttgaacacacaaaaatcctttaagtttaaggtttgtaatagaaaaaatgttattggaaatagaaaaaattccagaaaaaaaagtgggaataaagttctcacgaagataagaataaattcattcccaaaaagaataatcatgtgtaactatatattataacctctatttttaagattcttgagaatatataatcttaaccaaacattttatttttattttttttaaatacgttgaaataaaattcacaatcttagaaatatatttagtaaacttgaaacaaacacatcatagatagatgaaatgataaataaccattgaacatcacgcatataagtaaatgagctaggatattaatcctaatcacattgtccgacctaacaattttgacatttttattagtcaaactaaagttaaacttgaggacaagaaaagcagatattataaaagtaagacgtgagaacaagcaaattagagaaaaaatggcgagtggaggagcaagtgtaacaacaacaatgattgcagctcaaatcgttgaagtgggtggtgaaactctaatgaaatcagccactaaagatggaatgagtatttttattttcattttttattcaaaccttttggctctatgttttcttctaccatccactctcttccaccatagaaaaagagctcctcctccaatttcaacatcaattttctgtagattacttcttcttggttgcctcaagtaagaacaaaatagtatatatattattattattataaggatttgaatttggtaaaatagagtgatatggagctacttgtgcagaactgcaactcagacgttaatgacttctggaattaaattcagttctcctgcgttggcttcagctattgttaatcttgtccctgcttttaccttcatacttgctataatttcaaggtatgttgtttttattttatggtttaaattacaaggtttgttctttttttggattagaatgcatttacttgcatcataaagtcagcaacataaaatatactctttttgtctttaaaaaacaaaaactgttttattcaactttttttttatagatagatgaaatgtaaagtcattatgaagtcacacacataagtagaggtattaagtttcgaaccccgattatgacatccagcctaataatttttgcattttgctagttgagctaggacttatagattgttttattcacatttatttacaactttttcttttttcagatttattaaataaactatgcatctagatgatattaaattttaaattattaattatttaatgaatcaaaaaaacaaaaattacttatttatttggtgggtagcttgtcttttctcgattgctactgagttgtatcgtagtgtttcgtttcttgttaattttcttggttgtgggacatgcatctctttttagttagttgacttctactagtgaattttataatatctgacatgatcggttgaataaattaaataaatagataatatgtttcatataatagggtgaacaaatattattatttaaaaaaaatatataatatgatccactcttttcatctctatgttggggatgaaaatagtttctatttgagagaataagattgattgaaacttccttccttcaaaaaaagattgattgagagaaaaatgaatattgaaataagatttggtattgattattcacaatggtgattggtgatgtatttatacacgtagaatgatgctacttgctcagcaagtaatggctttgtctaacaaactaaagttgaaatccatgaaacactacaagagaatctaagatttgctaccataactgtgctaggaaatatattggtagtgaatattaaaacaattagctaccatttgattgaattttgttttattttgattttataatatataaaaataaataaattactgtaaaggtcatttttgtttaaaatagaaaaaaaaatcatttagaaaccagcaccacattattgcaaatcgcgatctcaattttgtccccctcactcgcacaacctccgccgtggtaccgatcataaggtctaacgataaatcagaaggtcaaaataacctcattatgttaatttttttattttgctaatacaaaactgttaactttctttgccgcatcatcatcattttttgatagataaatgtcacaaagaactaaaaattgtaaaaacatagtctaaaaacaatatattgcactaaaatcagatttaacacatattgtaggaccaaaaatgttattaaacaaaaacaagggtttataaagatcacaaagaactcatatatatatcaattgtaacatctcagaaggtgtttggtactagagaccaaggtgattttcaaaaatatctgaactgataaagcttgaatatttttgggacgtttaatactacaattacatatttttcaaaatatacagcaagaatttacattctagtatatgactctgactgtgatccggtaacaaaatggccactttcaaaatttcattactattatttaatccttgcaaatacgagaaaaaataaactaacatgaatactgtgatgtgcattttcagg

SEQ ID NO: 4392 - DNA, 6013 bp, Medicago truncatula
  Intron number 1 from transcript Medtr4g129000.1 (locus Med tr4g129000) derived from phytozome v7.0 (chr-ID MtChr4; po s 30572432 to 30578444 reverse strand)
acctttaggtaagcagtaagctgatggaggtggattaaaaaattattctctttttttttttcttccttttatttgttttaaggccttttggttttgagtttatgaaatttttgcaaatcgctcatctcatttatcaaattgttgttttcttcaactacagttggcttagcggcaattaactacaactgagggtatgtttttgagcaattttaaaagtgatatgaacattttttttttagttgggcttagtaaattgaaaattgatgtttctacttcagaaaatgttatgacacacccgaaaattataatttaccccaactacaaccaaaaatcgtagcgaattgaattaaattgtcgttggatcaactgtagttaactgcagttggctcagctgcacttaagtgtaaatcctacttacttcaattgctattgtgcgacgcatcactttgtgatatccaattgttttcttattttagttttatgatttctctggtactttctgtgctggtttattaagatacatagcatgattctgatgatgcagaattcctttcattaaactattttcttatttttggcacttttgtgatcctacctacatgtattgcgttgagtttgttgcagatccagttgtcacaagaattcttaaacataaaacaccagtgtagtgttctgcctttgtagcatgtcggtaacctaacaattatgttgataaaacacatgaacaattctaagcagtaaacaggaattgcacttaagtattttcagttaagtaaagtgtttattgaacaatcatccatcatcgtttaagagtgtgattgtttttctttttttcgaaagagacaataatgtccaaatgcaaataggaatcactcaaataagaatcgttaaatggaaggtggtccctgtctgtttgtggtgaaaagtcaccaccaccgttttatatgcggcgaatcgattctacttttttttttctttcttccttccatcatatgccaccgtcacgccacaaccctccaattccacccacgtttctttcctattttgttttgtcctttatgtttcttttctgtcaagccacaaataattatcgagatttattacaaaactttcttagcaagaattgagataaagtttccacaaaattgtacaaaaacattttctgcatacagtagtttttttgttgctgttactttcaaattgtccattgataactacgtgtgattatgtaatgtgtaataatgctttaaaagaataaaaataaataaattaaagaagctatttttcctaatttcttttaagatgctaataatcaattaaaatgtttttattttacttggttattttataaatagcacaacaaaaatatatagctataaaaatctgatgaaagtaaataaaatttatgaaaaccaatgtatattatatttcaaaatttaaaaatataatataactttaattttgtatccttaaaaatggtcttaacatgaatacatgattggtattttaaattacatttgtaaagaaagaaaatttcactttcttatccaaaaacttacttgtccctagcaattaatattctcggggtcaattaaaaaaataagtactttcataaaaagaaaatactatactaccattctaccaaatttggttttgtgtcaactcaaccagacaatatggtgactagatatttgaagtgtgtttagagtatttgaaagtgacgacctgatagcatatagttcaactaatcttggataaacttatataaaatattaaaaattttgattgggcaaaattcactcttataaaaccgatttacttgtataacgatggttgcaccgatctgaaaactcatattcatgtcttatctaaccgtacatgtaggactatttgaccgtaaagaatgacaattcttatcaaaaataaaatttaataaagacaatgaaaatctaaaaggcacatatgtatgcataaaaaatgtaccacaagcaaatatatgacgcttattgataagtttgtgcagaagcgcatgcatattgcacttgattttactgttgtattgtatttgaatacttttgttgtataatttataaaggttgaatttgtcgaaaagcaaccaagataaagatggtgagtctgaaatactcttctcatggaagccatactattaaaaattcttgaactggaaagtgaccctttttttgctctctctcagtgcaccatgttagtgagattcacaaacttatcattacactgttggttatgcgcatgaagtaacatatcaaatgcaaaattcattcatcataattataagctacattttcctttgattcaatatcctaaatttcacctacgaaaatgcacgctttattcattaaactaattaagatcccttaatgacttttttttactaaatttgatgcataatatatatgaaatcttatgagtaaatagcaatttagttcgttatattcaaaaatattaatcaattgcataaaatctttttctaaattttgtaccacaattttaaacagattaggtttgttttgatgcaacaaagaactatttaagtcgatatgtacgtcttcattggttcttatggatgtttactaattaaagaaatatttaaatggagggactaaatcgattgatatatatttttcaattaatgaactaaattgttttcacaaatttgagaggcaaaattgttcgacttttacaatttgaaaaatatatatatatatatatatataatgtctatttattcaaaggatgaatttgctacatggctcggttccttgacatcacatttacttacaattcaatattaaaaaaagatttacagatattaaaaccgaaaaatgtgaaatctctaattctaagtgatcggaaagttaaaattgaagactaatttcattgtattggtttgtctctaatttaaaaaatttaagcagtgaaaaaaaatctttggggaattttgtgtctgtctataattcactattaaaattgtacctttttcatcataaggagatcgaggttctcttttaagagttgaatttattttttgtggtgtgattaacatgttagacaaggggaacaaaaggaaagaggtaaatagtagtgtatataaaaactaattatgaatcatgatgtaatgtttttgtgacagaagagaataagtggatttcttgcaaaggccaagcaagagaaacaataataattaatgtcacaaacaaaacaattcctaaaagaagacaaggacacaaaaccctaaaagccaaaaacagcctctcacaaaagtagtagtgaaaaaaactgttagatatgtactataaaccattattctaaaagattccatcttgcaaaaaaaaaataacaggccgttgttattattatcacatggattggggacaaatagatgctttcatgaagaggaggagggaatggctgacacaaaagccattaacccatgaatgtgagcttgtcatcacgtgaaagatgctcttgttttttttgtggttggatgctaggaatttttctaaaggactttgtatataaggtatcttttgttctctagatcttgaatgtgaaaggaaattgacctaatagtgtaaacttgaagttgaccttcaatagattgatacctgtctcacactcattactgccaatattgtaaaatgattaatgtatacccttttgaatggatggggtggggtagtatttgttgttaaaaaacttactatttcgatgttaatctcaaaattaatcagttgattagtgattttatgacatcaaattttcttttttaacttctaacaaaaattttaacttatataattaagcatattgttgattgatggcatgagaaaaccaagtttaacaaaggtaaaacacataacccagtttagtgctcgtctactcgagaaaaaaaaaatttagtcccttacaaaaaaaagtcagaatatattagtctttgtgtcaatatttttttacacaactgatttttttagacattgttgaattgtaacaaaaatgacgtcattttccatttttcatatggttgaccacgtgtattctaaacgaacataagagatatttaaatacatagatttttagtatgaaacttgtaacctattaaggttgacctgatgtgcttctcatcaaaattttatgtttgattttactcggtactaatttaagtttattaatttatcttcttaaaaaaaaattatgaaattctttcaagattccatttcttggattccggtaatttttagagtataaatctcatagaattagatagtgatgctttactttaataggccatcaaattttggaggatttgttggcaattataagctacctctcacccaccaccacaatctctttgtcgttgttactacgaatcaaaattccttaccccccacttttgatcttatcccatgaattgacctaatcaaatattttgttcttagttgaaaattttgaaagatctttgcaattcatgatccacgagaccacgaccccgttgttttcaattccatgttattattactttcattgtataagaaggattccgtttgactactttagggaataatataattaacatatacatagttataaccaagcaatagaagaaataccaatgtcggcttcactattctaccaaatttattaatctttatttttgttgacagttcattactgctaacgtattttatgggctgaattaaagaaagtccaatttttgtacatctgacgtggaaaatcatttgtttttcttcatactatttttactcaaatttttacattcaccacatgtttcatgtaccccatccatgaaatgagattaatttacatgcaccgatgatatatatttatatttattttacacatgcacctgtaacctgtttacaattattttagtgtcaaaatcttatgatcttttgctcaaaaaaaaaaatcttatgatcttggatgagttaagagataatttatgcatcctttcattttttcataatgagaattttttttgttagggatgtcaattgtcataatgagagttttgaaaggaaaatagaagaaaataacgccaagacaaggaaaaataagctgcattgtagtaaatggtaagaaaatagtttgacttgaaatttaaaattattgtgcaagtataaaagccgcaaaaacaaagttaatgaaaaataaagatttttgaagataggtgcttgaaaaataaagactcaaaaataaattgttggaaattaaagcatactgaaggtaaatgcttgaaaaataaactgacttaggaataaattcttgaatcttataagaaaataaaataaatggaagttatacttgattagactctgatgttttaaatttgttttcagttttagagtatgcttcaaaatgtaagtatttaagtgataggccacgttatgatttttgagcgcctaagtgcaaaacaccgacaagttgtcggtgttattcttgtcggtcaatcaccttcgtttgttttgtctgattcttaaatatgtcatgtctatattatttttttgtcgactatggttttattttacttttctatgcataaactttttttccaatttctcttaaaccttttgttatcaagtaattttgagccttatagctttgctctttcttttaattttgagtgtgtgcatttttttaacttcttaacctaattcttcttttactaattgctgcttattgctatgatcttgtagacattatttttttgtcgactatggttttatttaacttacatcagggcttgcatgatgatatgtaaaccgctttttactcgtatatgtatcaactttttttccaatttctcttcaaccttttgttatgaagtcattttttagccttatgactttggtctttcttttaattttgagtgtgtagatttttctaagaatttcttaacctttttcttctttatttgatagaagcttattgctacaatcttttccttgccgacttt

SEQ ID NO: 4393 - DNA, 2165 bp, Medicago truncatula
  Intron number 1 from transcript Medtr3g149720.1 (locus Med tr3g149720) derived from phytozome v7.0 (chr-ID MtChr3; po s 39259664 to 39261828)
tcacacatcagaaggtaaattaatcttcatcactttcaactattattatgccaattgttcttcttattttcaattttagttttgttcatgtaataattcataactatactttagttcaacttaacacctattttgcatgtatgtatacggatataataaatcaaatttcagttataatcaagaaaattatggtctattaaatgttgtttatagactgaaaactaggaaatgaatatattcaaattcaaaaaagtacccgcgagtagtaatcaataggtatcgggtacatgtattgtaacgggtacgcgtaagacatggattttggatttggagcacaagtgtttcaaatcttgacatatgcgttgttatttattagattgttgttgggatcatggtagttaaaattccgatttgaatcataaaatcttatgattctgcgactatacttgccctctgtgtgattaagtgattgagagtacacgtgtaatcttattttcgaagaatcggtggaatctcgatttgaatcgtaaaatcttatgattttgcgattatgattgcccttagcgattaatagtacacacatcactctttttgtgtcttagcgattatgctttgtgtctgtttcaaaaaaattcttcttctcccttgtccttttcttgtttcatttccaaatgacttcaaactctcttgctaatgaatttaaatttacataattatttcaactgtgatttaaggtttaatttgtcttatgcaatttgatatgcatgtatatgaatttatatgcatataattgagtttatgagttttgtataatctttcgattagcgtaaaatctcgattttaacttccttcgttaggacttcatagcatagtaaaatataatgcttataagcgcggtgattatctattttattcataaacaaagacggtgtaacaatgggactgttgtggtgtaaaggttgtaatgtcaaatgcagtaatcatctgcttgacacgtgagttgcttgcctatttttaaactgattattcttaaactcaaaaggaaagataggtaagacatgagtagcaactatgaaccagaaaagagttttgatgttttgtagagttgtaaggtttccgtctctctgcattgaaaatatcacttttataggcagacacacgtgcaagcactaaacacacacatacacacacatgtacaaagtgtcctgcttgtattttagacattattacttcagtcgacgtgtccatgtccatatcatatctggtgtttgtgtctatctatgtacgtgcttcgtagctttctactttaattgtcttgcttggtagtatagggattatggatctcattgtcatcaatggctgtttggatgataactacttgaagaagttgacgtaaaagctctatggattttggtggaagctgtacacataatagatttgggttttggaaaaaagaaatattgatgtttggcaaggcttacgaacgatatgaataggtgaatagctcaggctttacatctttcgcatcacacttatactcgattgcgtccgtcaaacaagaatatcgtaactaccctaatttctctgcatagttcataaactgtaatttacaaaaacataggtgtactattatgtatattaagtttccatcacaaattctttaaggatttaaagtaacctacttttacagaactaatataattgtaagcttatttagagcccatgatcaaaatcaaaatagttagcaaacctctgatattaaaaattaagcgacattttgtaagttattagcaaatcttgggaaccttgacacaacggtcaaagttgttgtatgacttggaagtcacagattgaagtcatggaatcagacctcttgcaattgcaaggtaaggttgcttacaatatatctaaaatgcgtgggtccaactaatcacagttttccattgtaaattgtttttctgatcactaatcacagattaattgaatggaagaaatatttgtagcatgtggaacaaaattacactgaagtcctgtatttaaatttgtcatttacttcttgacccggcaaaaggacaatgattgaaggttttgctattggggaatgcttgctgataagattttacattgcaggtgcaagctgttttgctgtttttgggaggaagtgg

SEQ ID NO: 4394 - DNA, 2367 bp, Medicago truncatula
  Intron number 3 from transcript Medtr5g080730.1 (locus Med tr5g080730) derived from phytozome v7.0 (chr-ID MtChr5; po s 30217476 to 30219842 reverse strand)
ctaagctgaccaaagaacaactttctaatttccaggtacttctacttttgctctctacttattttttggagtcagttcttttaacgcattcatatgtttacctaccatatatcaagtgattgtgtatggaattgtaggaaatgattttccttattcacaccttaatattgaaatgacaaacttttaatcttgcatttttatacgtattcccaaatcctctgttatatagtttacatatgctacactatttaatggatgcatatcaactgcaaaacctggctattataatgattaaaaagtagaatgccattgcaaacatgaaataagatcatggaggcatttagtgctaagcctttatttcatcttcacatgctatattgctaacatacttctctctatttggtttacatttctgggttatttgcttttgctattattttaattgtactgtgtactatgaatctatgataaagtgaggaatgtgagaaactaatgagagaaaatgagatctgaatctgtacagggtgggtacaacacatatacttggaatttatagatctgctagttatataacagtacaggctacgctctttttttttatatgacttatacagcacatgtgcatagactctaacatgctattatctgtaaagatgggtgtcccaatgtgtatttagacttccattgaactctgaaatgaggtgttttgaaaccagttaaaataataaaataaatatgttattaaagcttgataggagcctgtatttcgtttggaaatagaggaaattctcttgaccacaaaactagaacactgcaagtttttgcattaattatgtagaatgggaatggaatttgaagatttaaatatttgaaattattgaataaaggcgattcatttgcataataggtgattaatttttatggaagtcattattgtggtggctagggagtatggtctattctaattctaatgtttacattataaaatcatggaagatataactaatcataataagatgggaggcatattattaagagagtcataataagacgaggagcatattattttacgagggaaaacttcactctgttattactaatcatggaattattaactttctttttttaggaatatggtgaggatagaacattagcaattaccaatagcttttcattacttgctctgttcttgggccaccattattaatctagtacttgagcattttctcagaactgtatctgtcatacttcagcaataatgtcacttgtcacatatcatacatataatagtgatattttagctattggtcttaggcttatattaaattggtgattaatgtttattgaagtcattattttggtggccattgtctattctaattctaaagtttacagtataaaataattgaatgtataactaagattaataatagtatagaaaaaacccaactcgttagatgaatatggtagttgctaattaggagagtcataataaagatgagagacccattatttacgaggagaaacttcactcctgttattactaatcattgaattggtaacttctgattttaggatgtggtgagggtagaatattagccattaccaataatttttctttacttgctttgtgcttgggccactcttattaatctagtacttgagcaatttctcaactttatgtcatacttcagaaataatctccctggtcacatatcatacggaaataatgtcacttgtcacatatcgtacatattagagtaatattttagttcttggtcttgggtctatgattaattggttaatttttcatgttatttttttatgtcccaaacatttttaaaggaagaatagctgcaaaccgggtcacatgtatttgactattgttttaagcctatataacgttgataacatttcttataaaattttgaagtaaatgagacgtatttcttgcttaaaatcttaaacaacacagtatatgtatctaatgttaaggtttttggaagtgttgatgtgatattagatgttaggtggaatgaatgtcaataataacatgattggaaacaactgtgttcattaccttatattgttgtagaccgtctatcacaataattctgatggtcaattcatttttatatataattggtagaagtgtgaaggcaaataacatcattctattgtagatcaattaatgaagtcatgtgagacgagcaattttaatttacttgaccatttctgtaaaacctgtccttctttgtagttgtatagtgcgtccatttgtttctgacttatttgaataaatttaaatttgtttattataactgtcttgtaggctgttgtttttaccgaagtcagtcttgagaaagc

SEQ ID NO: 4395 - DNA, 2332 bp, Medicago truncatula
  Intron number 1 from transcript AC145328_14.1 (locus AC145 328_14) derived from phytozome v7.0 (chr-ID AC145328; pos 89212 to 91543)
gaagatcgtggtttgtcgtcctataccaaggttttgtatgtttccgaggatgacaaaatgctgatggaattttatgagttgggaagtagcaaattgaaattggttgtttatgattcaaaaaatggtactttgaagattcctgtgattcaaaacatcaatcgtcggatggacccaaaagtctacattgagagtttgatatcaccttgttcttaacgttaggatgtagatggtaccgtgtcacttgagaaatgagattcaagtgaacatatacatggttaatttctatttatgttatttattttgtacttattttgattactactgacttcgtgggtcattattaattaaggtctatgaaatccggaagttgaaaattcgccgatattttgaactgtttgttagtttgagttgttgcttctctcatcatgcattgtattttaaatggttcagaatcatgctttgcattagatgaattttaatttgattttctatgatttgtacgatttagatattatacaagcattattaactgaattgaatatgttatacaagcattattaaagttgtgatgattcagaaaaacttatcctcacagtggatcttttatctgtttttcttaaatgtgtgtttcagcaagcgctatattgatgaaaatagtgaatccgttatcgcccctttgtttagcattccgaaaatagataatacctagcattccctctcttgaccctttagtttgtttgaatctaatagtgcatgttaattcttaattactttcttgaataatcttaaacagtgtatgtacttcttatttagtatcttgtaattcattcttaaacattttggctttgaatgatttattcatacttccatagccgaataaaaggttgtgttcaactgtctccatttttgttactacacttctgattatacactatgacaagaacagtccctcccagagtctccacttttgttcataaccttgcctcaactgatctaatgccaatatcactagtttatgcaacattgttttgaatagcttcaatgatagcattgcggcctctgagattttctttcaaacgaatggctttgaacaatgttttgagtagccgcaatgaacattccatttattcatgcttaatgttcgacaaactaacaaagcagatgacctcttaagttttgatttacccaacatatgcagatcatgacctcatgttcataccgatgctaaacctcatatgaacaatctgaagcaatgacgagcaatcatgttttattatatgaacagtataaacttcatacagatttcaactatgctacctctattttatttgggggaatgaagtataatgtcacaagagtttagtagtgagcatcatatttagatttagaagggctcacttttcatttactagatttgtttttccttttctatatttttcacatgctttaatctcattcagtgcagatgatgtttgcagagactggaaactaaaaatatacagcagtatggagttgctagttttacatataaatgtagcgcgagtgaactgaaggaggtgtgagatgatgtaaaacgtacaattagaccgatcgatgtaatttctagagcataggctgtcgaaaattatgcagtaataccactgcttttacacacatatatggtcactgaaatttaaatgtgcagccaaggttggtgctaatttttaatagtgtttgatttgcgtctgttatgcaggtgaacgaatatagaggaaatatatattgatagtggatatcgcaatggagtagcaacataacattaaaaatgcagaattggtatagtttacaatttgttacaatactgattgctactaagaatttgtaatatgatttttattatgtaaatttctaacctacgcaagttcacatgaaagaccaatcacacaaaccctacagtacaatattgaataatttcccaataacaaaatagtcacattgtatattgtctaatatgctccatgacctgctcctgcaaaacacatccttgattgcaactcacaagaaaatctcacaagatgataatgattcaagttgctatatgtcatcgaaagtcgaaacgtcagctgaccccaaaaacatgtattgggaagaggttttgttgaatctagtcaaccaaaatttgatgttttttccttcttttcgtttcttctactaatgccgcatgaaccaaacctacaatagacagaaatagtcatgcccctaatttctgtagatatgctattaccatttcagttttggttactttctagcaaattgaacaatgacattgttataaggtgttgcaaggatatcg

SEQ ID NO: 4396 - DNA, 2809 bp, Medicago truncatula
  Intron number 1 from transcript Medtr3g036980.1 (locus Med tr3g036980) derived from phytozome v7.0 (chr-ID MtChr3; po s 9905932 to 9908740 reverse strand)
gtcactggttttcttctccctcttctgggtttgcagttccatctttcactgattcttcttataccatctttcatccccttttgacaattttcatctaatttcttctaattacctgatttctttttaggatttagggattggattttcttttctatttcaatttcaatatgcaatcaatctgtcctgcgtttctatttcatctgccacaatctcgattttgattttcatggttctgttgcaagtagacaataaccctatgaccattttctttcaaaaaaataaaataataaccctatcaccatttgaaggaagaaagacataaagaaagaaattaacaatttaaaacgtttgaaggaaggaataaataataataaccatatcaaaaacaaattaataattattgcatgttatcaatgtttgggggaaggaagaacaaacgtgaagcggtactgtggaaggaaaaagaaacgtcgaagcagatgaaataacgatggaaaagagggagagaattgatcacatgtttggcacatgagtcacttaagtgttgttttaatctcacccattgcttttaatctgacgggtgtaatttattctcaccattctcacataagatacccattctcatgtgatatgccctatatatatatatatatatatatatatatatatatatatatatatataaaccaacacaaaatcctctattttctttacatgtagtatagataggttttcaaaaaaactttggtcttccactctttttgtcttaattctattgttaatttttgtattattatattggatcccaaatcacaattttacgtttgtgtctcattggatcattttcttagtcatgaataaatatattatgaattgttttacaatatgaactaatataagtgagatattacatatacaattgaagctagagcttcatttatgacatatacaaatgaagctagggctatacttatttttttattttgttattcaagagagaaaatgttgtgatgtctattgtgtgcactataaaatactaaatactgacatatgacatatactcttaaagttatgattttgcttattttattttatttttgttagaagacacaatttttcctcatttctttatcgaggtggagatagttttatcttgaggtggaaggaacctgaataacaagttactccatattattgtatgttattttcaatgttgttcaatctttaagtataatgagccccgcgttggaagacattgaagagaagtaaggtgttctttattgcctaactcacatagcgggatatgagcccaacatcatgatgagaatagaacgatatgagcccaacgttggaagacattgaagagaagtaaggtgttctttattgcctaactcacatagcgggatatgagcccaacatcatgagaatagaacgattggtgaaaaggatcgctaccgcctaccttgcattgtgaacaaatttctctaaaacttagagaaatgagcgcctataaatactaaagtcccaggtcaatggaaaaacacctattgaagagaagacaaaggcaaaaatgtaatttcaaaaggacttgagcgactagagctatttgagagacaaagaatcatcaattggtgatccttttttgtcatgatttcttattcatatctaattgtatatgcttagaagctattagtagctaattcataactttaaatgattctatgaatttcactcgattgctttgttattttattgagttaatattgttcttaatgttttttatgcatttacgaatgtccacaaattgatttaagctatggtgaatgttaaccctaactttgttggcttgatctattttaacagtagtataaaagaatattgtattcgtgcagattaattaacaagtatcaaactaaataagatatttagacgattaagtaattgagtggtttcggtaactagataaaaaataatgaggaacaaggataaaaacacgaagatgtaactcaatagagagaggtctagggtcgcggtttcacttgcaagatttgattcccttagatctagttctacttaaattcctttgtttttatttaatcattaatccctttactaaaactctaacttgtttggtcattggtgatattattctttttcccaagttaacattttgtttggccattcaaagagttgaaatttaagaaaagtataaagtgcgaaaatgttgaatgattggaagagtaaaactaaggtttgatcatgcaataattcttctctcaattttcctatgaatccaccaactaattgcagtatgatcgctgatcaattaagttgattattgacatgcaatgtttgattatgtctaatcacgtgataaaatcaatagaacaaactaaattgaaatagtcctatgaatccaccaactaatttcagtatgatcgctgatcaattaagttgattattgacatgcaaggtttgataatttctaatcatgtgataaaatcaatagaacaaactaaattgaaataaaaactgaaatttaaattagaaattagaacataaaaagactcctaacttgcaagatccacctaaaccctagaaaaatatttagctatccataatcaagaagaagaacactgagactaagaccatgggcggatccacttaggtgctatgtggagctagctccacatattttttcctttttttgttgttgttataattgataaaacagaaaagaagtgactcattaaataactctctctttttcccttccctcttagtcccgcaaagtcatttgcagcttttg

SEQ ID NO: 4397 - DNA, 2677 bp, Medicago truncatula
  Intron number 2 from transcript Medtr3g130500.1 (locus Med tr3g130500) derived from phytozome v7.0 (chr-ID MtChr3; po s 33145381 to 33148057 reverse strand)
ctttgcagtgccaaccctggtgtttgattcatttccacagatactactttttatcaccttttctatctgtaagcatattgcaacttttcatcattcattctcatgtttttctgcattttatttttagtttattttggtagtcttagctatatttctgcgattaggttaattaaatctacattgaagttatcacggagctgagtgttgtttattggtgattaatagggtaatcaaaatagggatcaatttttcatacaccgtctgtgtaactccacaattcataactactcatatgtgtgactttagaatatggccaacacggctccatacacatatatggtgggcccatatctcttctggtatgccagagttttggctctccgccctcgacaacactgatcgccagtgtataaatcacttttcctgaaagtgtatttaatcctaacaaaatgacactttgagctcattgtcatcttgtgcagttaatttattagtaacttagagtttgatgcagtatacatttttgtaaggttacagtttaggtcaggggtgggtgggtggtctgtgggctgttgtaatccacgatttagtctgttagtcaaaagagagtaaatatggagttcccctgtgtgtgtgaattactggcatcaatgaaatttgtgttgagaagacaattttttagctttaaaattgtcaggacccaaatgagaaggcgagttcaaagggacagtaaatacatcagttgcccgaacccatagtgtggagattttatgttattagaaatagaggtcataatgccaatatccacatggctgagagtgagaggatagaaacgatatgggcattgtgtaagggaaattctgttataaatatgctggtggagagagaaaagcatctaggcgaatcctacagtttgtcaggtggagagagctgtggacaataggatcttcatcctattgcaaaaataatacactctttaatttctattaatgctctgttttcttccattttttgtttatgtaacttgggtttgcataagaaattgtaatggtttcttctgtgtcgtatagatccttctaattctgtaatttttggcgtaaaaagttctaacaatatgattgaagaataatcctaaatcctaatgaattagtgctctgtgtttattattttgaatgtctgtcattttttaaggccttgcataggaaatagggaagacttgatttgataaagaattttaccattttttttcttctgaactacaagaactctattataaaactttaaaattataaaaacgtaatttgaagttcaataaatctagaagaacttaaatattaaattcaacgtatcttgattatatgtgatcttcataacaacaacaacaaagagatctaattgagagtatgtttttagataaatattgctagacctttaagtagataaaggttatgttttgttatattttatatttatatttttacctaaatattgagaatttagaatacaaatgtcaagcaagggtttggtgaagcttcaaaagaattgaaatagattgtgaaacgtagagtggaaaagcagagtaatgttaaggattttctgtaagtgtttttaaggaaaggaaacatacatatttctcctatttattatttagacagccttagtagacaatccctaaagcttttttttaggggcacaatccctaaagttttgaataatttgattagatattacaaaatttgaattacgttaatttgatgaatggttagtttaaccaacgattacttttaccaacgactaatttcacaaacatcattacaatacataatttcatactttaactaattaagttacattacataagatttttttttttttatacagaagtctgatatttttctgatgaaaaaaatactgaaatgatgaaaatagatgcaatagaccacttgtggagcgtaataactactgttttttagacatctacagatatcattgcatttaaagtttccttaatatgtaagagttgtaaatcattatgtatgagttgtctgtataataggataaagatatgtaaaagttgtataaactttaatcaatgtttgtttttttatggtgggcactaaagaatcactctaatcagtttactttgtgtattattatggtgcttatttagacttgttatacacgacatttgatgcagaaaagaattgattcaataactttttgttttttcaatctatgtggataggggaagtagtgatctacttttcatattttaaaccctaagtatatatattagtgcacacattacctatccattctttgtatgttcttctagatgatgatttctatgttttgctttgtaattcaattgtttcatctaagtggttaagcaaatatgtggtttcaattcaattttctactaaaaaccaaaagacagaacactgctttttatatattccagctcaattcactacgacttcatgcttggtggtaaatgtttttgctttcaatacattcaatctttttacatgttcatttgaaataccatgttgtcactatatataatcattgtcacgatttcactttgtagtcagtcttgttgcgccatgtattattgtctatgttaaccatgtcatgtgctttgtttaatatttatctttttaaaatttcctcagaa

SEQ ID NO: 4398 - DNA, 3151 bp, Medicago truncatula
  Intron number 1 from transcript Medtr5g099270.1 (locus Med tr5g099270) derived from phytozome v7.0 (chr-ID MtChr5; po s 39675464 to 39678614 reverse strand)
atcaaaagaaggtagactccaaattccataatgatacgtcgcattcttctagctggcatggcatagtatagtatgttcatagtcaactttgaatctatctatctatgatccataatctcatatgcttttgcaattatgcatgcatttacgtgcatatgaatagactctcatatactatatttttattttttttatttacctctattttcattttttttttaaattttgttacttctattttaaaattctgctttttgatccatttattttaattttttctaacttttgattcaccgccccgttacaaaaaacttgaattttagtgacagtaaattttcaacggtaaaaggatttttattattagaaatttactatcactaaaaatcacgtttttaggttggggctattcctaccgtcaaaagacttttacctacaacaatttattgtcattaaagcaaagttttttgtagtagagctagggatcaaaagtcttaaaaaattgaaataaagggattgaaaaagctgaattttaaaatagtatggtaccaaaactttttttttaaaagagaaccagaacttttaaaataaaaataaaaataggggtgtaccaaaagttcatttaagcttttcttaattgaacttgtgtccttcaattgtaacatttattattattttattattttggtttcaaaccatatttttggcataaaatgaaatttttggtgccaaaagtgatgatttattgtcccaattttaaatctcaagagaaagtggtacttttgatatcaaaattcatattcttgaatttcgccaaaaatctctattcggcaaatatcccacttgagaccaaaattacaataaatatattaatatgagttgaaaatttgaaatatcaacaaccatcaatgttgcctcttaaaaattagaagttcacattcatccttattcgcacgagtgacacaacaatgtaactagtttgaatttgatagagataaagaaaaataaatgtggggcgtttttctcgaacttgagctaatcatctcaccatcccatttgttaagacaatgaagatcatctctttttttttcctgtattttttcgaacttgtactaatcaactcaacattttaatgatttttaagtgcctgttcaattagatgttgaaattaagagaataaaaaattgaaatgaaaaagaaaaactacagttaaatatatatattttaatctctaaaaagtagtatttttttattaaagttttattaacttttctctcaaaattatcctttgtcgtttgtttttcattgattgaatagataaaaatctagttcaacacgagggcaccgacatcgtgtaaaaagttcacatgacacttaaattaaataattgtacgttcgtttgtgtacgattctaatttattagagacaaaacttgttttttttgaaggaagtgacaaaacttgtttaaatccttaattctgaaggaaaaaaaaatagatatacttctctttaaataaacataaaagaaggggaatgaactatatactagccaataaattaaattgtagccatatctaatgtgcgaatgaacaattaatataaattagacattacttttctcattttataagtttcacgcgcgctctttttcattctaaaatccgagatatttcaatgtgctttgaaggtttttataggatatttatatcttttaaattctaaaatctatattgcataggacgtgcaaaaaactgataagatgaaaaaaggaacggtcatataaatttgtaattttggagagtaaggaagggtccatcttgcagtggtctattttctgccccatacacatactgcatgcatctaccactttgcatgtctggactttgtttaatgtgtccccacacgctagtccaactccttttatttctccactaaaactaaattaacaagacagcaacaatgttaatttctaaattctatgaaaaaaggtcgtaatttctaaatctaaattattgctatttataaagtagctcttgagagttatacatgcatgcatatctttatcaagaattagctagataatggggaaataaggaattgaaaaataaagaaatcgagaatattcataccgaacttttttcttgtaggatggcgcgaaggataattggtcttgggattgaaaacttgatcaaaaaaggatagcggcgtgtatcgcttgttagtaaaacggcgcgcggtatttatgataacatttctgaccctagttggaataaagcaggtctgttgaaggtttatgcgtttatttgtcaaatgttacgcaatcgtctttcaattaaagataatttgattcgtctaacgggctctttcgactaattccaataaatgcacctgatggatgttgcctagaagaaaattggaatcacctttttatgttttgttataactacaggaatatttggttttaagtttttttaatggtttagaatctcttcgatctacttgcccgaataatctttgtgaccatttcactcaaattgcatgactaggaggtcactctaaaaacatttggttttctcttcaactgatttggttgcttgtgtatgagtaatttggaaggagagaaatcttgtatcttccaatataatgatgaagtaaagcttctttccttttagtgtttgaaagtaaaaaattgcactttagcttttagttttcatttttggtggcaaaattctctccatagcatgagttttgttacttaactttcaattgttttcattctcgttgttggctctttatttttgtactatcacatgttaggccttgaatctatttgtgcacatcttgtgctaaacaagatttttactgatattaatatattttattttaacttgaaatcataaaagtgatcaaggaggaacatgagtactttgcgtgtggggggcaagtgtccaactgtattttttttattgagttatatgatattatggttcatttgatgacgaggataagaagataagataagataagtttatcatatcctacctaaatcttgcatttgatgcactaatgagataagaaaatttgtttatgatttttcccttgcctctcttccatcgcagctttggtctctctacttcaattgcatcacacgaca

SEQ ID NO: 4399 - DNA, 1208 bp, Medicago truncatula
  Intron number 1 from transcript Medtr7g049900.1 (locus Med tr7g049900) derived from phytozome v7.0 (chr-ID MtChr7; po s 12349447 to 12350654 reverse strand)
gaaatctttgtaagttttgaattattctccctttcaagtcatcgacttagaggtcagttacatgctatactgcttttgtgttgagaaactataagtgtatgctgaaatcggttggtgtgattctatgatttttattttgataatgacttaaccgagtgaggctttggatgtctttcaggcttcagcttacaggctaattttgaatgggtcaaaatgaatcataatttttcgttctttttaagtgaatgttttgtttaaaccaatgtcatcctggacttgaataattttgaagtacattatattaaatttaagaagccatgggatgaactgtttagagtattagaaattgaactatatgcttagtactctttttattattaagaacgtgatgtctgtctcctagtagttggaatagtagcataataaattattggttgtcttgtgcgataaaattaaaatgatattgatgtcagtagagtttatcagttgccactctaaactacaaagaaatttgtaacttttgcatagagtttggaatagtgatcaaaatatagacggtagataaaattggtttggtttgtcaaaatgaaagtatataatcattgtgtttgacaagatggaaattttatcaagaattttgcttaatgtttttgtgtatgttctgtttgtgtaaggtatttgtggaaatgaagattcaaatactcatatatttcgtgtaataagattttatagtattaaatgagttttgtagtgtactcatgatatattgacatgatagagcaatgctcttaataagtagatttgttgatgtcacaatttgcatgatctattgaatgaatttgtagtataaataattttgtgattgtttttaacttatgaaactagtgttgtacccgtgcgttcgcatgggttgcgccgttggcgcatttttttctctcatgattataatttaattcgggagatttataacaaatgtttattttttataaatgtaaattatttggcagttgtttattttgtattgactaaatagacgaaggataaaataatatacatctaattattggagtttagaaaatgagaaaactacacagcgttaattgtttaaagttgatgtttatgatacataatagttgaatgcaaaaaacatagttgattgggatgcattcacaggtcaaaatacacaaaagatctaaagataggaggaa

SEQ ID NO: 4400 - DNA, 3179 bp, Medicago truncatula
  Intron number 2 from transcript Medtr3g013050.1 (locus Med tr3g013050) derived from phytozome v7.0 (chr-ID MtChr3; po s 2343851 to 2347029 reverse strand)
aatattcaaacaacaagtatgttcttttttatttttattattcattctgttatgcaattgttagttaatcattacattacattacattaattgttcgtcatcttgggtagatctattgaaattttgggcccgtgaactaggacagtgcccttgatatatataaagaaaaaaaatatgatacaactcaatgttgtatatttcgtgattggaatcaatcacttcagtttgcaagagtttttactgactatattgactccagttaaaaagtacaagaactctttttttcccttcaattatttacctttttttttacaaatatttacttaaagatggtattaaataattttaaaaaaaaaaaaaaaaaaaaagttgctttatattatgcctttctttaatccttttttgttgatgacagaatctactttaatttcataaccctaaaaccatcatgagtaaatttcaagaacttaagcttacatagtctataaaccttgttgcccattcctttttgtacccaaaaacaaaaaccatgttaagcataatgatgaattaagtgtatgtttggacaattttggaggtgtgtacctaaaattgtgtctagaggtaattttgacatgtttgaatgtttttttagtaaaattgattttacctctaaaattaattctttaactttgaaactaagactcgtagatctttaactttaaaggtaatttttactttcaatttatgattcaactaacttttacgtatatgtgctcacatataaaccatttcatattcaatttactttcaacaaaaatcaattttatatgataaattaatccaaaatcgattttctcaccacagaaccaaacacaccttaaaaatcacgtcaaatttaatgttaggctcaaatgcactttttgtccctttattttaaattaatcgaaattttagtcaattcatttcaaaaaccattatttcagtccccttattatacatttcttgggttttttttagtccccttttagttttagtgatttgtcaatcttgtgttggctttcttacttttcatgtcattgatagtactttaaaaatgattcatatcaattttggtgatctaacctagtgagtaacacgtcataacatattttgtcaacaaaaaaaaaaaaaccataatattcttaaaaattataaagaataaaaaacaattataaacaagagtagtttagtgtggcaatgatataatgatgaagttgacctacaacaagtgagtgatatgttgtaacaaaaaattcatatcatgtaacaagaatagcatatataagtgttttgttttgtccatgcaagtacatacatatcaatcaaaacttgtctttttgccatccaatttcggctattcaattctgtttcatgttacgtaaacatgttgtaccatagtttgggttatatatgatacctttttcttttacaaagatttgcataaaaagggtgaaacattggacttagtataggatttccattccctttgtttaaaactttcagtactacacgctacacaatagtgaatagtgaagaagagtacattcaagttcaacagttaataatttcgttatagatcacatatatatatatatacttatatatttcaaaagtacactaagattattctatgtctcatcgtattcatcatatatatatggacatgttatggagtgaatttaataactttttttcatagtactattgtacttaatctatatgccataaagctattgtttctctttgtaccaaaaaaaaagctattggttctcacttgtctcagtctcaccctatatatagtttcaaaatcaattagtactattttacctttagtttttaagttttttggttccattatggtatcttaaaaatgtttggtattttcgtttttaagttacaaacgttagaaactttggtccatactatgttatgttactttctatcatttgtaacttaaggaatcataattagaacaacctaaaggaaatctaaaaggtaactttagggccaaaatataatttaacaattttagaactaattaatgagattttattatatataataaccatgattgagtacaatgttgtgcagcaacattgtaagagatacatccgttccaacaatttgcactaaaatggaaccatgcagtctctacaattttttccttttaggtgataagaaatatgagaatctgtgcatatatatatatagagagtaagagagagagaagaaaaaaagtgaaggaaaaagtcttagcttaggtattaaaatttgtgatcttgaatccgatttgcttgatcagagaaaatctcttaccttttcaaagttgatgtactttcatcactttatatattatattgtctgcattttgaccagtctcagctgaaattatcagcttaagttgttccttccttgtacatggaataaacaaaataaaaagtcagtttcctactttcatgtgtacagaatcttgcaacactgttagatgcttgcttgcatgcattcaaatatattagaaacagtcagaaaaattaaaacctaaggtcctgatttgtaattactaaaaagatcaattttcaagaaatgcattgtatatataatttttttcattgtaattacgtacttgttttactagtataaaaagttactgaaaaaaaatatttaatcttttttaggttttttaattaaaccttggaatgagatcagagttaagaggaaaaaaagtcttaatttggttttctacaaaagaaaattatttgtggtagctaaactgttttatctttgaatggatactatgaatgcatgcaaaaatccaatattatccttataatttttgtaagttaattgtggcaaaaggaacatatatagaattaaggtggcaaagatttcttacacaaaattagtttttatttaatttcttccatatatacagtgaaagtagaagagatgaacttaactgctgagactaatatataaagtgatgaaagtacatgaacttttaaaaagagaagagatttttgtcggaagaagacaaaaatgaaataaatagcagtgactaagtgtgtaagatagattgaagaaaatgataaatatttctaaatgattcttatgtgttgcttgtagcataaggtcaacaattgataggtacaaaaaagctt

SEQ ID NO: 4401 - DNA, 2016 bp, Medicago truncatula
  Intron number 5 from transcript Medtr8g112640.1 (locus Med tr8g112640) derived from phytozome v7.0 (chr-ID MtChr8; po s 25397760 to 25399775 reverse strand)
ttgctgcgattctcacttctatccaggtatcatttagtatagtgtatcaataatatcataattttatcaaattgtaaattagaaatgaaacttatagttgtgaatcataaacaataaaagtagcaagaaataaattgtacaatacaagttatgtatagtgttttcaatgtgataattttaaattataagttgacaaaacaaattaatcatatgtaccataagttataagtcagaacgaaaccagagcatataaatgactctgcgatgaaggctttgtgttagattaatgaaaactaaatggaaatgccaaataggggtgaatggggtgagtaagtgactttgtgaagcccctttttgaaatgagtcccttttttcttcaaccccctctttgcactgaacagtttatgtctatacgaccttccaatttctttgatgagaattggtgaacaaaatcaagaaagaagtaatactttttgttgaactgtgcaattcatattggtgagattgaattgcagtattcatgcatgtatagtatgaatgagtcatagctatttgttgatttatagtattatatgaattattggattgccgaatgacttcaaatcatgctacattttttttcatcttcaaatcatcgctatttgtggatttgtagatttatagtattattttgatcattcaattttaacaaacatgccacatttcttttcatttgtattttgtaatagaagaaaacaagcacatatatttacataattagccttgctttagaagtttggcacgaaaacactgaggcgatcatacaatgtccagtgcctctgcataaatatttgtctttttgttcatttaatttttatatgttttaaggcatcatctcataataacttgttattttctgtttgcacatctcttgattcatttgtaatgttaacttggcttttatccttttcatcgttgtttttactttttagtcaaaaagtatagactctggagcatacaattctgaacttgattttttaaagcttatatcatggtctgctctttgcaaaactcaagacactatactgtttaatgttactagctctcaatatttaatgattcttactttaataacctcaagccttggattttgataatgccctttgtttagcatacttatttccgtagtttctttgttcgtggctgctaaggcatttaagagtttcttaagtctgatatgcaaatggattgcacttctgttttcatctgatgtacttttccccccttctttcacttgtattgctttgtgtagctttaagaggatttcagtcctcctgttttgtagatttctctttctgaatagattcttttgcttgcaacctacaaatcaaacatataaggaagtgtcttgttatgtttgttttccacaagtttactgtcttttttctggttctccgacttttgtttacaagggaattaagactgctgttgaggggttttgaaaggtcaactagctgaaaggtatagaacctctttgaaaactgagaattaaacctgttatgaggtgcttcccaaaggactgtgtgctgataggctacaaggccatcatcggcagatatatcagttgatttacttgcctatatgaagtatcaaatgatatgcaccaggctttaatgttttcctgtgtcgggtcatggttccaatgtggccttgatgcaagagtgtgatatgcaagcattcaacgtggatgagataatattgaacattattttgtgccatttttcaataacctgcaattactcaacttctacactgatgtggatgtcctaatccccgtcttcctgactctactctttaacatcccattattgtatttggaagtttacggggaacttttatccccataccaaatagaatcaaacttttaaaattgatttgcctgttatgtaatgatcaacatgttgtgattattttctgagaagttattattcctttttgacagtcattgctttgtgatcccaacccaaattctcctgc

SEQ ID NO: 4402 - DNA, 914 bp, Medicago truncatula
  Intron number 1 from transcript Medtr1g028360.1 (locus Med tr1g028360) derived from phytozome v7.0 (chr-ID MtChr1; po s 6877373 to 6878286)
agctgctggatcagcttagaactaaatgtgtgtcatctcactctgctatgctgaaaaagcttttggatgatatgcatgaagcagctaaggagaaagagctgaattttgtgcctctgctggacatcactcctttctatccagaagaagagtacatcactagggctgctagaattcaggctggatataaacgaagaatgagggaaaaggatgagctacttcagaagaaggatgatcagatcaagtatctcttagaacagttgtataagcaagcccaaccttagttgcacacccaactctagcttgttttttacttttgttcttcgtagctgtgtccttgtatcttaatcttctttatatatattatcattgtttctggatcttgtgctttttcaccttcaatatgttttacaagctttaactctgatgatatttactgtttaatgctgcttgctctgatactctttcttttgtttctattctttttgttgatgacaaaagggggagtaaatgtatagtatttattaaggcactgagccctactataaccacttctaaatttcttttaaatacttctgatttgattttataagtattttattgaaatttaattaataagaatagaacttagggggagcttacaaacctcaccttaaagaactattagactcagggggagcttacaaacctctgtcccagtagtcaacttattaattagatcaacaacaattgaacattttaaatactattgtttgtcatcatcaaaaagggggagattgttggaacaaaatgtgtttcacaatgaaccttattaagttttgatgataacaaggtattaaaaattgtcaattggttattactaataattgttcaagtgtacaggaccaaaggctactcaagttatttcaataggtctt

SEQ ID NO: 4403 - DNA, 5139 bp, Medicago truncatula
  Intron number 1 from transcript Medtr4g121260.1 (locus Med tr4g121260) derived from phytozome v7.0 (chr-ID MtChr4; po s 28370153 to 28375291)
catcttcttttagcccgacatcaggtaattccaattttcagattcaagctgattcatgatagcagaaacacttgctaccaaaataacttatattcattcgacaacgagataatctcgattttgttgttacattgagaacaagaatgtcacctttcttaagcctgaaaatatgtttatcatatcaaattatgtggggagaatgtacatttatatgggtaggagtctcctagttaatccctaattaataaggaagattaatcaatacaataaatagtgaagttaaaactaaatagtcacaacttttcaatatctcaacactccccctcaaggtggtgcgtatacatcatatgcatccatcttgtcacatatgtaagttatccgaggactccgtagaaatttagtaaagatatcagcaagttgatccttggaattgacaaatgaggttctgatgattccggtgataattttctctctaagaaagtgacagtcaacttcaatatgcctctcgtgaaaaactggattggaggagaggtgtaaagctgattgattatcacatacaagttccatttgaccaacctcacaaaattgtaattcctgcagtaaatgtttcaaccacacaagctcacatgtagtatgagccatagctcgatactcggcttctgtacttgaccaggcgacaacattctgctttttgctcttccatgaaatcagatttccgcccacaaaaatgcaataaccagaagtagactgtctatcacttgcatctcttgcccaatcggcatctgaatacccaacgatatttgcgtggcctctatcagtgaaaacaagtccttttccgggtgctcttttgatatacttaagaattcgaacaactgcattccaatgattgacacaaggagagttaagaaactgacttacgacgctaactggaaaagatatgtccggtctggtcaaggtgagataattcaatttttccactagtcttcggtatctgcctggatcataatagggctcccctgggaagaagcttcacattaggatccataggagtatcaactggtttacaatctataagacctgtttcgtccaaaatatcaagggcatacttcctctgagagatagcaattccagagtttgattgagccacttcaatcccgagaaagtaacgaagaggacctaagtccttagtctgaaagttttgaaatagatgttgttttaatgccttgataccttcataatcatcatcggtaattacaatgtcatcaacataatgatctgattcgcaacgggtcatcccaaaactgttgtagaactttgcttaatcgaccaaaccatgctcgaggcgattgtttcaatccatacaaggactttttcaatttgcataccaaacttttcccccttgagcaacaaacccaggaggttgctccatataaatctcttcttccaagtcaccatgcaggaaatcattcttgatatccaactgaaacgggccaacgtctcatggcagccatagctataaagaggcgaacagatgtcatcttcgcaactggtgagaaggtatcactataatcctgaccatagacttgagtataactttttgccactaaccgagcctttaatcgatcaacctgtccatcaagtcccactttgacattaaacacccacctgcaaccaacaatagattttccaagaggtggtggaacaagcccccaagtttggtttgattctaacacaatcatctcattaatcatggcctgtttccaccctggatgagataatgtttcatgaagtgtcttaggaattgagacagttgaaagagcagaaacaaaagccaagtaggaaggagacaatcggtggtagctcaaaaaattataaataggatgaggattagcggtagaccttttatctttacgaagagcaataggtaagtcaataggacgctcaagtggaaccgcagcaggagaagagactggaacaatacctgaatcactagaattagtagcaggggtcttaggagttgaatcattggaatcaataggagctgtttctggagcttcaacatgtcgacgctcataagtaataccataccgacggaactttgggttaccttgtgactggaggattttgagtagagacaaatgactcaaatagaggaatgggcatcacctgggaagtagtaacatcagttgtagaaccagatgtagtgggtgaagcaaagaatggtctatcctcaaagaaagtaacatatgctgaaacataaaaacgatgtgcagatggaaaataacaacgataccccttttgggttttagaatatcccaaaaacacacatttgacagctcgcgcagacaatttatcacacgaagagacaaacacacgaagagacaatttatcacggccaggagagagatcatgtgcaaaacacgtagatccaaacacacgaagagggacaacgtacagtggatccttaggaaacaaaagtgagtatggaatttcattacccaataccgatgatggcatgcggtttatcaaataacaatcagtgagaatggcatcaccccaaaatctaaaaggtgcatgagcattcatcaataaagttcgagctgtgtcaaccaaatgacgatgttttctttcagcgacaccattttgttgcggtgtgtgaggacagctggactgatgtataataccatgagaagccataaaggagttgaacgatgtagaaaaatattctttggcattgtcactctgtaaaattcgaattgttttaccaaatttggtctttatctctgaacaaaacgtttgaaagacaccaaataattctaaacgatccttcaataaggtgatccaggtgcatctagagaaatcatcaatgaaagtgatataatatttgtatcccgtcctagacgaaacgcgactaggacccaaacatcagaatggatgatatcaaagggagacattgatcttttattggcacgacttggaaaagatactctgacatgtttgccaagctgacatgattcacaatccaatgactttaaatgtgaaaggtgaggaactaatacctttaacttatccaaacttcgatgacccaaacgacgatgaatgatatctggagatgcagaaacaccacaaatggtggatggatgagaatggagatgatagagaccctgtgattcaaatcctgttccaattgtctttcccgtatttcggtcttgtataaggaaagagtcgaaagaaaatgttatagaacaattgagagattgagtaagtttagtgattgagatcaaattaaaaggacttctaggtatgaataacacataattcaatgatagagatggcagaggagaagcttgaccaataccagtaacttgtgccttagaatcattagcaacaataatgttgtgaggtatcttaggaggtgacaaattagagataagagagggatcaccaacaacatgatcagaagcaccagaatctaaaacccatgatccagtagagtgagataggcacactgtagaattgtttaaatgagccaatgtggctgaagaggaaactggttggatcgccattaaacaacacgaaacaaaaactaggacggttccttttggacaccaaacgactgaattgagaagaaaaaaaaaaatatagggatagccttgacagcgactgaacccaaagacaaaactaggatttcagaaccatgctctggataccatcttaagactgaaaatatgtttatcatatcaaattatgtggggaaaatgtacatttatatgggtgggagtctcctagttaatccctaattaataaggaagattaatcaatacaatcaatacaataaatattgaagttaaaactaaatagtcacaacttttcaatatctcaacaaccttaaagagagattatattactcggtaaagtttataattattatttgtcagatatagctttttgggatgtttttcttagctgccaatgttttcagaaaaaagtatttgcatgcccttcaacttgaccgggatatatgtattcaattgaatgaccttaatagtactttccgtataactatgttatgatcctatcagtcttcatcatgctggaagctgtattaagctcttataacttgatgaaaaaggaaacccaaattagttcaagtattatttaggaaaaagtattttttttaaattttaaaaatgtgtaaaaaatctcaatgtaatcaattagattggtagcttttgaagaaaagcgaaaagccatgtaaactgaaatgcttttctataaattagacaaatggcttctgaggagagattatatcatgaaagcatttcttaaaaatcttatgtattgcactcttagatgacatggtagatgacttgggcagctacacttctcttgaataacaataattggggttgtccatggtagatggcttttaggttagatgtattttgtgttactccttagtccttactcattagtgttcctcaatatcatttccagacacgtcaaagctatctttgaccttctaagtagttgcttctgctcaaccttctccctaatgggccaccctaggtctcatagaacccaataaatacccaactcccttgccagtgtcaaagactttaagccaaccacttaattggtagtaaacaaaaatagtgagaaattcaaatcagaacccaaacacaactccagactaaacacaacacaacaaaaaccaaacgttggcaaattatgttttattttcactatattttgtatagtaggccatcccatgtagttactaaagcatttaccaccatgtgctactatctaccattgacaattatgcatcaacgtgtcaaagcaaacacaaacatcagcttcacaacaataaagtacaagaaccaacctagtaccaactgactcatgtcattcgctttgtgtgtacatgtaaccaatcacttgatcctaaaaataatttccacatcactataccatttcatgaacttccttaaattcaggtgtttcaatcaacagatgttttattcattaagttaacaaaaactgtttaccttctactggatcctttgtttaatatcctttctattaaattaagtgggtatgcaattttctgttttggtgaagtacagctggttgaga

SEQ ID NO: 4404 - DNA, 1375 bp, Medicago truncatula
  Intron number 3 from transcript Medtr4g115290.1 (locus Med tr4g115290) derived from phytozome v7.0 (chr-ID MtChr4; po s 26646720 to 26648094)
aagaaattgtcagggtaagtcataatccgaatcatagctaattaaaaagcattgttgagggtagtatctgtgattgattgctttttagtttgataaaagattattatagtttgtaaggtgttttaaggttttgattgttagttaagagttatgaagaattgacacatgcatatacacggcactttatactacatgtcgacattagtaataattaggcctaataattattgaatgtaaccatatagatgtatgataccagacacaccttaaatctgaagtattgacgcttcactggacatgacactgacatgtttatgcaagtaataattattgaatgtaaccacgtatgtcagctaccagacacaccttcaaactgaagtgatggtgctataggttaagaggggcaggaaggaggagaagtgagcggaagagaggatagtctccccaccttgcatggggtttattttcttcatagaaccaaagcccaacaattcggggatgagctttggacagttctccatattgtttcccttgttctaagactttgactgagagttagctggggaagggagggggagaggaaaggaggatagtctctagccttgcattgcggtttatttttcttcataaactaaaattctccaatttgaggaactcaaaaattgaaatagcggagggctttggagtgttttggttgaccttgaaaaattctccaaagcattcccctcattttataatactctcaacataaacagaatattagttataagatttcacgtctcagctagaaacactctccctatcaagttgaaggattctcctttctttccctccacttcaatcccctctgcccaaatcccttcccatcgtgattcccaaacaaagccgaaggagaaacttttgaataaaatttggttgtggaaacgtctttgttaaacaactaaacccagatgcagtgctcattgatgagcatgatagtaaaagctagatacgtgtcttgctattttttagattagattactggccttttctttcaactattgaccttattttttcagaactgtgatatctactaacttgtgacctggttatttgtttgaccaagtttctatcgttttaaagaaaattgtctttccctaaacagtagtacactacatcccagataagaaaaggatcatctttggaattttgttcatatctattgtatactacatgcatatttacaatctccaatctgcaccaaccatcaaaatggtctataaaaaaaaaaagctacacttgcttcatttattttgaagatacttttccttggatgatttttgtttttcttctgattgcagactacaaagcggacagttccattcctgtttgttag

SEQ ID NO: 4405 - DNA, 4759 bp, Medicago truncatula
  Intron number 1 from transcript Medtr6g080860.1 (locus Med tr6g080860) derived from phytozome v7.0 (chr-ID MtChr6; po s 16319047 to 16323805)
aatttttgtatggaccaaaactaacaaatttataactttataagaactaaacatatatatctccaacctattaatatactttcctttttatgatgtgaaatatgtatctctgcagaatacattgcaaaaactaatttcttaatttggatatagccgcaatgagtggcaaagtaaactgagtttattttttatttttttctttttatatccaatgattgtatgttaaaattacacatgtgtggaagggaaacgggcaataaactacgccgctaagtctttttggatgacgaaattaatcttcgtatgtggaagggaaacgggcaataaactacgccgctaagtctttttggatggcgagattaatcttcgtatacaaaaaatacataggcctaggagacataatgtttctatgcatgaccatttgaattctacgttgaaagtcaacaattaatgtttggtaccagaaagccaaaaatgtcaaacgtaaatagtataaaatcatgtcaattgtcaaaacatgttttttcatatatatatatttcacaaatatttcagttcaaaaacaagttcattaggttcaatatctcttataatacatttgatatagggggtgcctatagtgaaatttcagcacttaaaaaatgtcaagttatgggaacatttgatgtgtgcgcgtaggaccgatccaacttattttagaccgtttcttttctgacatcaaatatgtcttggaaacacaagtgaatgactaaaaaacctagcggtagttaacagctgtcggttttctagttataagccagcggttgttaactattgctgggatattttagtattttacttgtgtttttaggaagtttatgatgttaaaaaaacaattgtctatattttaaggtctaaggcagattttaatatgagactcttttaaaacttatattagtacttgaggaaaattgctagagtatgaggtctttaatcaagtaaaatttaaataatattttagtataatatgaggcttttttaagaattaaatttgtatcatcaatagtagaataagaagccaatttatcaagtaatttttttaatactttttgaggtctaagtggttgttctgatggccttactcttatacatcctctaagtgtgtgctggttagaacgcataactattcattagaaatttgtcactaaattcaacgatttcaatgggcattccatctcctcttaatctatatatgcttgaaatgatatccttcaaagcttgtaacaagaatagctcgaaaggatatccttcaaagctcgtaacaagttataaaataacagtgctaaaacaatttcaaaatagagtatggtttttatatgaattaagttgaatcagctttgtgtaatactattttaagtctcattcattttataaattggtaaaacctatttaaaaagtcttcctaaaaaacagttcactaccgctgtggtatttcgatatttttgtagtggctgagagaaaaaatagaagcttaaacagcaattttattttttcttttccttgtgggtttatatacatattatgtgtcagaccactactatatttgctctatatccccactcatattattcatacatccacaccttaacaaaatttctattcgattacatttttttcattttcaaaaaactccatatttgattttttgtacaatttgttttgtgaaaaaaacaagtttttttttttctaattgtaaatcttaaccattgttagaacgtgactaatttttttttgttttttggaagaaaaaataacaggaaaagaacattatttttaatagattagtcacacaaacacacacaaagtgactcattttttcttggaaatttctctttagccttttcaaatttctcataagcttccttgaacggtacttaatgtcgctcgacacttataaagcagtttattcactttttaaatcagtataactggtttaaaaagtctttacaaatgggagttaacattagttgtggtattacgatattttcaagatggctgagagaaaaaattgaagtctaatgagcaattttatttttttttccttttacttctgggttaacagacatattatgtgttaggcaactactaaagctagttaatttctatcctctttttgtttttgctcattcatgtgcctacttgagttaactcatgctgaaaaaaatgttcatcgtgagttaattcacgttaaaaaagtcgagcgtgagttaactcatgtagagataattaagggaatgaacaattttaaaagagagaagagcaatttttctatagctaaggcggtaactatctatgctctaagacacaacatcttttactatataaccccactcatacacccaaattgtaacaaaaattatattctattacttttttttttatttccaaaaactccatatttgattttttaatataaatcattttttgtaattttttgtgtgaaaaactagttttttttttcataatttaaatcttaaccatggttagaacgtgactaattttagagtaataattttagacaatttctttttctacccgccacaccttctttgggttatgaaatccaaaaaaatgtaggtcgttgtaggatgtttttaacatgtttacgcatttcaaattatatagttcgaaatgttgtgaggcgtgtaagaaactagtagggtaggataggaaatcgtcatattttatgcggaagggctcgaagaagtagttgagcaagtaaatacaaaattattcttctcacttctcaaattgctcttttttcaacggttgttggagacttttaagatcgattaaaccgatttaaaatgtgattgaaccactctaaaaaatattcaactgtagttaactgtcgttgaaagtcgaacgacaattaactaccgttagagtatatttttgagcaatttacaaagcgagaagagtaatttcagcatcccatgtaattcacgaggctttcttgatgttaggccttacatagtattatcacaagttgacaataaaaaaatgattgcttcacccacccccttgttgctaaaaataccctccacaaatattttgtttgttattatctctatatttacatcctgatttaattgatttgaatgtatacctacgaacgacattagttcaaatgtagttctagaagccagtttctctgtttcacaataaattaatgatttgaatatttcacatggactaaagaaatgctaagtttactaaattcgtcatttaaatatacaagtacccaacgtttttttatatatattatatcaggcatattatttacgttagttttcagttatcgcagtggaaaagttgttgctttgtctctaggatgtcgtgtgttcaactcttccttcttctctatcttttatatttctgtatatatttacttttttgtcaaaaaagatccatggagggattcaaacacacaccccctgcaccatatacatgtaaattataccactgcaacaattaacatttttgataaatccttcaaacagcttaatatatatttcatataattttggtatccaaaaaaaataactcaagatccaccactgtcgataaatccttcaaacagtttaatatgatgatccttttttattttgatttatgactttttttattttttatttttttttaaagaaggaatttatatatattatatcacatgtgaatttgcaataaatttttcgctcaggctctatataatttctggctccgccactgcaccaatctatcttaatatatatcacatcacaaacgaattcacttatcacattacatatacacatttacaaaggaaggatcatctatggaaggcagataagtgaattgtattgtaatatgtgacatagataaaaaaattaacggtcataatgttaagtcctatatcatatttgtatgctttacttatcaacatctagatccatcttattagtttctctaggacttcatttgtctctactgatttaactattctcatatgatatatttctctcacaacataatctataagtcgtctctctacatgactatctaaaccaagtttttaccatctacctaccgttttctatttatgcgagaaacatgaaagttccgcctctttaaaaatttacacatatgaaggcaaaagaaactcgtttttttgaaattttaaaaacttcctatcatattttctgaagaaaaaaaaaattactaggaaattttgctgggaaacaaatttactcgaaatatcaaattgcccccagaaacttaaagttaaaaagttaaaattcctcaagattttctgagggaattttcatggaaaacaaatgtatttggattgctcgcttgcaatccgaggaatatatccttggaatattttaatctgctcttccatgggctctatatgatgcattgatatccttcaacttatatggcttagtgtgaaaaaaatagtgtaactagggaagggtatagacagattgtgaatgaattggagaagctaaagatggaacgagcagatgaagttaagtaagtgatatacttgcggtggagcaatgcatggttaaggcaggatatgatgaggcaatatagtcatccagaaaaagcatcggcgggcaagactgagcgtataccaattactggagtcccacatcgcttaaatgttatgcatcttcagtgtttatatatcgtcacagagcacaattgcttgtcccttcggggacatccgata

SEQ ID NO: 4406 - DNA, 13326 bp, Medicago truncatula
  Intron number 1 from transcript Medtr3g019700.1 (locus Med tr3g019700) derived from phytozome v7.0 (chr-ID MtChr3; po s 4158288 to 4171613)
acggttttagggaaggaaggtttgatgtaagatttttacatgtattaaaactatttacacgtgagtataataggatcgtttccgcagggagttgcgtatttcataagcattttcacaatatttgtcacattaagtgtttgggtataaattgtttttttgtgtaaaactattttcctaatctacataaaagtaaaacgagaagagatagggctattccgcttgcggtcagagacatcaaccaagcgtaatagctgcaatctctcgatcgattaacggattctagctttttaaaacgatattatcacaatcactcgaaaatatcattcgtgaccaaatgatatcgttatttctaagggatcgtttaaacatcgatttcccaaacatttaaacgatcacaaagtcgattggatagtttaatcgacaatttccaaaccgattaaattacccaaaagcattaagttctagattaaaagtgattattaaatattaacatccatgtctagagtgataacttaagatagattgttattctatttctagattcaaaagtatgtgtccatatcattttgaatctcaataaacaataaaagcaagaataacaacaatattgaataaatagctagaaccatatattaatgatcaaaagattacataatagcttgtttgaatacctcaaaactacaagagtagatgtagctacatatgtctatgatagctttgcaaacgatgaagaaaagatgaagatttcatgacaagatccatgatctctcaacaaatcttggcttgaatctacttcttgaaggtgaaaaacacaagaagggggggggttgaattgtgttttctttttctcttaaaaaaggattcttcttctgataaaacttcagaagcagtttgattgcttctgatgaaatgatcagagtcagattgcagcggaaaagaacagagcagagaaaagaaagacaaagacacaggcagttatcctggttccttccacaacacggaagtagtccagtcccccttgcacttccaaggagatttcactataatcacaagattacaactgctcaatactttcaaagtatgagacttcacaaaacaatgctcaagcacacacgcaagagtcttccaatgctcaagcactaagcaagagacttctaatgctcaagcacgcaggcaagagacttctaatcaaacaaaaatacagagaattgagtttgaattgaacacttgatatacaatcagtggtgttcacaatacaatacagaaaagactctagactttgaatttctaagatgtatcaaatcagtgcagaaattcagtgtgctttttagaatcaaattgacagagttttggcgcttttaaacttatgtatctctctctattatcttcaagtcttcactcctttatatagaggcgtgaaagagacgttgagataatcagcacgtctaaagagtcgtttgaaatcctttgattatccaccagtgatcctttgcctgatttgggtgtagtcctttgaagaataaacttcaaattcattcccatcttgagtgtacaattctgcaggcatggctgttgttttgtcttgtagcgtagacagaaaacagagtagtggaggtagtggttgtacacttgtactttgtcaactctattaacgagagacaagagctcagtgctatccatatatccgttgatacctccctttcaattcttcgttcttctttgataagactgaattgaaaatcagctactttgaatcttcagtttgattaaaggatcaaacgtagcttctggtgaagatattgcttctgatgaaaacttttgcttctgatgaccttctgcttctgatgacgtcatctcttcaggagcagtttagcttcaggagcagttttcttcagatgctcagaatttcttttttctttccattgttcttccaagacctattgaaataacttaagtagcctttggtcctgtacacttgaacaattattagtaataaccaattgacaatttttaataccttgttatcatcaaaactcaataaggttcattgtgaaacacactttgttccaacaatctccccctttttgatgatgacaaacaatagtatttaaaatgttcaattgttgttgatctaattaataagttgactactgggacagaggtttgtaagctccccctgagtctaatagatctttaaggtgaggtttgtaagctccccctaagttctattcttattaattaaatttcaataaaatacttataaaatcaaatcagaagtatttaaaagaaatttagaagtggttatagtagggctcagtgccttaaaaaaatactatacatttactcccccttttgtcatcaacaaaaagaatagaaacaaaagaaagagtatcagagcaagcagcattaaaaacagtaaatatcatcagagttaaagcttgtaaaacatattgaaggtgaaaaagcacaagattcagaaacaatgataatatatataaagaaagattaagatacaaagacacagctactaagaacaaaagtaaaaaacaagctagagttgggtgtgcaactaaggttgggcttgcttatacaactgttctaagagatacttgatctgatcatccttcttctgaagtagctcatccttttccctcattcttcttttatatccagcctgaattctagcagccctagtgatgtactcttcttctggatagaaaggagtgatgtccagcagaggcacaaaattcagctctttctccttagctgcttcatgcatatcatccaaaagcttcttcagcatagcagagtgagatgacacacatttagttctaagctaatccagcagctcatcaaagctcttctgtagatccatccactgatcataatagtgaataggaggtgcaggaactgttctgcgaagaatcagtgcctgaatctcatcactaagtctgatcagttgttcctctatatactcagactccaggatatggtcagggatgggtgaaggttcagtttgagttgtatttgatgtggaaggttggtcagaggttaagtctattatagtgggtgaatctggttgttgttgttctgttgtttggtcagaaggtatatgttggtcagaagttgtttggtcaggagcaacttgttcagaagcagtttgctcctgaacagtttgctcagggatggtttgggtttctgtttgggtttctgtttgggtttccaagacagtcttttcagaaactgtcttagaggccttagtgggtgttggttgcatttcaccacctagatgtttttctaagttgtgaagggttgaggattcttggtgttggggggtttctgaagtagttgcatctgaagctacttcagaggctttttgtggagattggttatttggtgagtttgtttgggtaggttcaggttgttgtatactaacaggttctggagtatctggatatagtggatgagtagtaggcaaattgaatttctcacaaagttttatcctattttttgaaaattctatttgagtactctcatagtcaagtgttccatactctgttagtttggtaggtttggtttttagaagcttgtttatatgttggctaaggggttggtcatctgattctgtggatgatgaagagggtgaagagggtagagatagagactgagtattagttggagctttagatggattacctgaggactgagcttctggatgaattgcttctggagctgttgaaattggatctgatgaagttgctcctgaagcttgcttattcttcaaggcttgagaaagcagagttgctccatactgaactgtttctaactcagacgctaaagcagcaatgtcaggagtaggcacataccctgcagccttgagacgctcatccctttctttctcaaacacttccttcaaccttttcttttctgctatcttggatgcagaaacctctctagcgtactgcctcatttcttcagtcatttcaaaactgggcatgactatgggctcagaagttgcagtcctttttgccttcttggggcttgagtcttcatcccagttctcttccagttctttcaacatttcttcccttcttccttcagctgtcttcagatttcttgttaaattagacctcttcctttggatggtctgaagagcagcttctcttttatttttgggactttaaggcttttcagaagcagcttgatcagaagcagcttgttcagaaccagcttgttcagaagcaggctgttctgctgtttcttgagtactccttgtcctttttctgataagagggacatcatccaaatcctccacttcctcaagaatggtggacatagcagatttttccttcttagctttcttatgcttctgagcacccacctcagtagcatcttcagcaaggtattcttccttggtgatctgcttctttttagattttctgcctttggccacaggcagatcaccaccatacatttcttctgggatatctttcaggctgattttcttgttgtagctcttgtagtagtccaagatgtaggccctctgcacatccaggggatctttcttgcagatagggatgtgatgagtgactagatcagatatgacatcagattcatgcatatctgtatctagtttcttgcaagttgaaatcagcctcatcttgactagagttgccccattgattatttttcctgtgactgctcccagcttctgattatcataaatacccacgtctttcagggcacttaggagtcctccttcttgaaagattatggagagcagccttccatagggaacaaacttcctgttctccatctggctcttcttgagttccttgatcatgtatttaaacatatacttgggaacattcattgttgtttcctgagagatggtgtgatgcagaaagactttgtgaccaagtgaaggttgatcatttcctccacctttgggaaaaatgttttcattttggatcttcagcagcattttcttttccatgcttaaggtgctgtaaggcttagcatcctttgatccgtagatagtgttgtttactatctccttccatgggcttgttctggggttaggaatctcttctccatcgtatgtcccagaagcatcccttctcatggcttgagcaatcacatgctcattgattgttacaggaatccccatgacgtttgatctaatctcagtcccagtgaaggcgagtagacccatttcttctctggtttttccctccaaagtaggatcaaccagaatcatctgagcttcttcctgtttagcagcaactttgtcaaacactgaagctcttacccagaattgtctgacaagcacttcataagtaggaccgttgagaagactgaagtaactcatcagcttctgctttttgtagaatcttaccaagtcgcatccatgatgagttagagaagtgaaatccactggattttccgcttgaatgattagatcccattcctcaatcgacatagttcttcctttgatttcataagcaggagtatctatatccatattcgatgaagaaccaccggcagaacttgaagatgccattgattttaagtagaattagggttctaaggtgttttgagaggttgagagaatgtgcttacttacacagagggttgagaagaaattagaaagtgtttgttgtgaagtgagaagtgtgtgaaatgacttagtgttttttattaaaacgtttgtaattcagaagggacaaacaaacacagcattaatgacaaattgggggcgcgtgtaagtatgttaaaaagcgaataaaacatcattgccctttttgttatactccaatacaaatagaccacgtcagagactcttcagaaaactactttttgggtaatgggacagctgtttacataaagtaactaccaacgttcccactaaccaagctattcagaagcaaagaataacacttctgaagttttagtgctgacgtcatcttcagaagcacattttcctcagaacctcagttaagagcttctgatgaaccaaaatgctcctgaataaacttcagaaccaaacttcttattcagaggcaagcaatttttcaatcagacacaaaatgcatgttcaaatttttcttaataaaatcaaatctttcaacagacaaaggttttgtaaatatatcagcccattgatgttcagtatcaatgaattgtatatctaaaattcctttttgaacatagtctctgataaaatggtgtttgatttcaatatgcttggctcttgaatgtagaattggattctttgacaaacaaatagcagcagtattatcacaataaatgggaatactgttagcattgatctgatagtcttccaactgatgtttcatccaaagtagttgtgtgcaacaacttgcagctgaaatgtactctgcttctgctgtagacatagcaatagttgcttgtcttttgcttgcccaggatatcagattctctcccaggaattgacaatttccactggttgattttctttcaatcctatcaccagcataatcagcatcacagaatccaatcaacttataatctagggatttcctatacaggagtccaagattagttgttcctttcagatacctgaagattctcttaactgcagttaaatgagattctctaggatctgattgaaatcttgcacacaagcatacactgaataaaatatcaggtctagatgcagtgaggtatgacagagaaccaatcatacctctgtatagcttctggtctactactgttccagtatcttctttgcttaaggtgcaggttggatgcattggagtgttcatcactttacaatcttctagcttgaacttcttcagaagctcctttgtatattttgtttgatgaacatatactccttctttactttggttgatttgaattcccagaaagaatttcaattctcccatcatactcatttcaaattcatcctgcattaacttagaaaattctttgcaaagagatgcattagtagaaccaaatattatatcatcaacatatatttgcacaatcaaaatatctttcttaagagtccttctgaagagtgttgtgtcaacttgtcctctttcaaaatcatttttaattaagaaattacttagtctatcataccaagctctgggagcttgtttcaagccatatagtgatttcttaagtttataaacatggtcaggatgcttaagatcctcaaacccaggaggttgtttaacatacacttcttcttcaatgacaccattaagaaaagcacttttgacatccatttgatataatattatgccatgattaattgcgtaggatagaagtaacctgattgcttccaatcttgcaactggagcaaatgtttcagtgtaatcaatgccttcttgttgactgtagccttgagcaacaagtctggctttgtttctggttacttctccttgttcattcagcttgtttctgaatacccattttgttccaataatgttcttctgagaaggtttgggtaccagatcccacacatcattcctttggaattgatttagctcttcttgcatagctaatatccatccatcatctgagagagcttcttcaacagttttaggctcaattattgaaagcagtcctattaaagactcttcttgtctaaaatgtgatcttgttcttctaggactatctttgcttccaatgattaactcctcaggatgtgaagatttgtgcttgaatttaggttgaataacctgctgagtgttatcttgaaagtcctcagaagcactttcattctgtacttttgggctaggttctgcttctgaattagactcagcttctggagtgatttcagcttctggacaagattcaacttctgtatacttttcagaatcagaaggttgatcagattctgatgcatcttcagaatcagttgtacctgcattactttcactttgctctgaagttttacttccaggctctctatcatcaaattttacatgcatagattcttcaacacgttgtgtttctgaattatacactctgtatgcctttgacctttcagagtaacctaaaaagattcctctttgagccttggcatcaaatttcttcagatagtctttagtgtttaagatgtaacaagtacatccaaactgatgaaagtaagagatattgggtcttcttcctttaaagagttcatatgctgttttctccaacataggtctgatatagatcctattttgaatataacatgaagtattgactgcttctgcccaaaaatgtttagctaagttgttttcatggatcatggttctggccatttcttgtaaggttctgttctttctttctacaaccccattttgttgtggagttctaggagaagaaaactcatggagaatcccatgtttttcacaaaaaagttcaaatggctcattttcaaattctccaccatgatcacttctgactttcaaaattttcaattctttttcagattgtatttgagtgcagaagctgctaaacacttcacatgcatagtctttacttttaatgaattttacccaagtccatctgctgtaatcatcaacaatgactaatccgtatttacttccatataaagatgcagtgttaactggaccaaaaagatcaatatggagtaattctaagggtctggaggttgatacaatgtctttagatttgaaagaacttttcacaattttccctttctgacatgcaccacaaagtgcatctgaatgataatcaatgttaggcaatcctttgaccagttgtaacttgctaattttagaaattaatctccaattagcatgtcccaaccttttatgccatacccattttttatcattcattgacagaaggcaaactaccttctgatcagccagatcagagaaatttattttatagacattctcaactctctttcccttgaatgtaatggatttgtcatccttgttgactagtgtgcagttggtcttactgaacgttacatcatacccattgtcacaaaattgactaatgctcaataggttatgcttcagaccatctactagccacacattattaattgagatggaggaattaccaatagtacctgtaccaatgatctttccagtttggttgccaccaaacttcacttctcctccatctttcattgtaagggtaaggaacaaagctttctctccagtcatgtgccttgaacatccgctgtctaggtaccatgacctttgtttctctcttgcccttaagcacacctgcatttttggccaattcagatttaggtacccatatcttcatgggtccttttgggttagttttggaggttttacttttcctcccttgtaccttagggtgaatgctgagtggcttctgatcattcaatactttaggtttgacaccttttggtattgttttctcagaagcagtagctgctttgttcttctgatccttttgttttggaattttagattctggtttaatcagattctgatgaacaggttctgatcttttcagaattttaatcttttgactcttaggatcagattttgtcattaccttgatcttaagattctttggctttgatgtgatcttagcctgtgaacctgaagcttcaggttttgactgaacagcagttatagcatttgtaccttcaggcacaaaggtggatttcaatccatccttgatacaatcacagtagctcttgagactgtattctttggatttctcctcagaatatccaatccctttgcctttgttcttgtatgtgctgtagatcatagaagcaactttgcttctgtctattccagccataataaaatcatccaaggcaatctcatgtttattgcctgaacctttatcacatttttcttgtagcttctgacaaagactcttgagtctatcttcatatgttgttgatatgaggttaaaccctttgagttcttcttcagaagctttcagttccaatagagttgatttttgttgtttcatcaaatcaacatatttttcttttaaatctgtcaactcattggttctgtgttcaaacagtgataaaagttcttttagagaatcaacaagttcttgtctagggattttggaatatacctcattttcatcttctgaatctgattcagcttctgatactgcttctgatgatactgttgccactaacccaacggctgccttagcatcatcatcagcttcttctttatcagaaccagattcactatccaaatcttcccaggtcgccatcaagctctttttgatttgctttctgaatttactggagttgaagcttgatttcttggatttgcctttaaacttctccttctgaagatcagggcaatcagcaatgaaatgaccaggcttcttacaattgaagcatcccttctgatcttctttcttgaagttcttgtagctacctctcttgctcaaaaatttcttctgcttccttgccagatactcaagcttgttggacagcatagccatctttacagattgatcttcatcagaatctccatcaggtgattcttcttcagattcactggctttgtaggctttggaagactttgaggtctttcctttagatggtaaagcaatggatttactcttcttagaggtttcatgctcatttaaactcatttcatgcactttgagtgagctaacaagatcttcaacacttaaagtatttagatccttagcttcctcaatagcagttactttgggtctccatcttgaaggtaagcttctcaaaatcttactaacatgatcagaagcaacatagcttttcttcagtatctgcaatccagaaactaaagtttgaaatcttgagtacatttcttctatactctcatcatccttcattctgaaaagttcatactgatgaactagcatcaaagctttagcctcttttactttcttgctgccttcaaagtttgcacatagagaagcaaacatagccttcgcagtagatttgtcactcattttcatgtattcggtgcgaggtatagaagccacaatgattcctcttatcttgtgatgtttcttataaagcttcttctgagcaggagtatgtattcttctgtctatagcagctccttcttcatccaaatccagatcatcaactccatcttccagtatatcccatagctcttcatccaatcccatgataaagctgtacatattagttttccaccatgaaaactcttctggatctccattaaactttggagcttttccagagtctgttttcttgtcagcagtatcatagtcatgcttgacacttgtgtattttgtagtaactgattcctcatctccagacatgtttttctaatagatcttgaactgtaacacggttaagtgctgtgataacagagcaagctctgataccaattgaaggtgaaaaacacaagaaggggggggggttgaattgtgttttctttttctcttaaaaaaggattcttcttctgataaaacttcagaagcagtttgattgcttctgatgaaatgatcagagtcagattgcagcggaaaagaacagagcagagaaaagaaagacaaagacacaggcagttatcctggttccttccacaacacggaagtagtccagtcccccttgcacttccaaggagatttcactataatcacaagattacaactgctcaatactttcaaagtatgagacttcacaaaacaatgctcaagcacacacgcaagagtcttccaatgctcaagcactaagcaagagacttctaatgctcaagcacgcaggcaagagacttctaatcaaacaaaaatacagagaattgagtttgaattgaacacttgatatacaatcagtggtgttcacaatacaatacagaaaagactctagactttgaatttctaagatgtatcaaatcagtgcagaaattcagtgtgctttttagaatcaaattgacagagttttggcgcttttaaacttatgtatctctctctattatcttcaagtcttcactcctttatatagaggcgtgaaagagacgttgagtaatcagcacgtctaaagagtcgtttgaaatcctttgattatccaccagtgatcctttgcctgatttgggtgtagtcctttgaaaaataacttcaaattcattcccatcttgagtgtacaattctgcaggcatggctgttgttttgtcttgtagcgtagacagaaaacagagtagtggaggtagtggttgtacacttgtactttgtcaactctattaacgagagacaagagctcagtgctatccatatatccgttgatacctccctttcaattcttcgttcttctttgataagactgaattgaaaatcagctactttgaatcttcagtttgattaaaggatcaaacgtagcttctggtgaagatattgcttctgatgaaaacttttgcttctgatgaccttctgcttctgatgacgtcatctcttcaggagcagtttagcttcaggagcagttttcttcagatgctcagaatttcttttttctttccattgttcttccaagacctattgaaataacttaagtagcctttggtcctgtacacttgaacaattattagtaataaccaattgacaatttttaataccttgttatcatcaaaactcaataaggttcattgtgaaacacactttgttccaacacttctaactaccttgctttgtgtttctctctagaaaagccctagtctctctctaaaaaccagaaaaatgtaaaagacaatgtaataatctggaaagaggagaaaaaactatttatatgagctgaaaacgtgtcgttcgcttaagcgaagaagcgttcgcttaagcgaacttccagaaaatcttctattggccattgaggagctgccacgtggtccttatcttctgaagattgatgaacttcgctcaagcgaactgggagcgaacttgtgagcgaacttcctggagctctctggaactggttcgcttaagcgaacttgaggtcgcttaagcgaactggcctttcttcatgagcgaactggaagcgtgctagtaagcgaactaatccggtgctctctgtaacaggttcgcttaagcgaacaggggttcgcttaagcgaactgaccttggttcaagatctcccttcttttggtctttgcttgtcatttcctgcataaattgggtagaatcaggcatgtaaggcataaatggtaaaaatacactcaaatggtaacttttccttagataacttgcaaaacaagtcactaatttgcctaatttaacacatgaaatatgttacttttgagcacttatcaaggttgcagatccaaggtattctccacacgttgattt

SEQ ID NO: 4407 - DNA, 3927 bp, Medicago truncatula
  Intron number 11 from transcript Medtr4g121190.1 (locus Me dtr4g121190) derived from phytozome v7.0 (chr-ID MtChr4; p os 28324233 to 28328159)
tcagagacttgtaaattctttcttcagattttagtgtaagttctcttaaaaaaaggccttatagctttattcgccagctcatctattatttttatacatgcaaagaccagcgttttataaagtgacctgtccaacttatgcatagcctagcataacctttttgcatctctaattttgggatatttttaataacttcatttaagtgtttagcacgcagtttcctaaaaggtatgctctattgaaatggccaaatgtaaagcgagataattgatgggtccaagtgtaaggttgtcaaactcgaaattctaggtaaacctgtggattctacgtagtcgtagactcaaatcgactcgtagaatcgattcataaaactagtaagtttttaccaaatattagaaataatattgaaaaacctatgcgtgacatatatacgtaatataacctcattcaaacaacgatagttcaacattccagctccatcttaaagcataagtatttttaagtggataaatagttatcatgaaattttagcactaaagttatggctggtttaaaaataagtagaaaaaaaacaatattgaaaacgtaagattacattttttttaagacacgcaagattacattttaaggcgcacacacacacacacatattgcacctcataaataattaagcaaatgaacgaatgatataaaatttacattttaggccaaaccaacatagaattgtagaattgtaaaattgctaataaagtcagaagtttaccgaaaaagaggagtttacatggttgacttagggtgggttcaaaacaatggatgtgacatgagctggtttaatgtgaaccagttatttgtccatgcgatgtcagcttacaacttaaaggatggaattcaaatcccctcgaggagagtagtaaactggtcagagtgccactttaattaataataatttctcccttccccaattttaaaagaagttatttgtttcttctctttttttcgatatggattcttttctgtcttagaatttgatgcaaacatgttaacatgcattaagcttctcatattgttcatttagtgcgtgttttgtcctgtaattagatgtttcatgtcatagcattaatttgtgcatggactcatctggttgctcgaacaaaaaccattgaacgggcttattgagaagcacaggaaacaaactttgaaaaggaaacctgagcggaagtaatgaaatgtgtaagaatttaattattaagaacagaaggtatctatagtttgcatggcccgtactttgttacaagtttctggttgaacctccccatcaggtggcctcgtaaaaatatgggttatatacagctattcacattagctaatggtattctatattcctcacttagtcctttccaaatttataaatgtatataaatattaagtttccttgtaacagaaaattaataatataatttttgtttattcaattttaagttgttccaagatggacttgcatgtgaattgttttcttttttgagttgataactagtttgagtttggggacattactttaaggagatgtccttgatagaacatgatgtaggaatgaattactttttttatgcaagtctctacttcgtatgatttgcatatggagaataccttctgcattttcctaattgaactgtagtagtagttaagagctttttgtttccctaagaattccacaacacactcagaaagaaataataaagaggagaatctgagttgtcattatctttttcaattacagaaatcgatacaaacatataggctctatcaaatctattgtaattaaagagttacatgaaaataaatttagataattatgattgtaacaatcaactcttacgtacaacaattataatagcacatatgttacaaaactaataatggtttcttttttgttaattgccttattacactctcaaaccgatgaatgaatatttatcatttttagcttacaattgagatcatgaaaccactctttgggaaaacgtcgtagttgcaagactgttgttgaactttttcttgatgaaatgtttgtttgtttctatgtgctttgacctatcatgtcgatttggattgcatgataagttagtaacaaatttatcaccatacaatagcctcttgagttcttcgtacctgatttaaggtcaacaggtgtgatctttatccaataagtctcacaggagatagaaaaagaagctctatgaaggcactctgactgaaggtaacctaaaactacaatgaagctaaattggggtttactgcaatgaaggtggctaggaattaggatttctatgtactttgacctatcatgttaatttggtttgcatggtaaattagtaacaaatttatcaccatacaatagcctcttgagttcttcgtacctgatttaaggtcaacaagtgtgatctctatccaataagtctcacaggagatagaaaaagaagttctacgaaggcactccgactgaaggtaacctaaaactacaatgaaggtaaattggggtttaccacaatgaaggtggctaggaattaggattctggtgtggaagttccaaggatatagaatcatgaaataaatagtgtacacaatcaccttctaactacagtaattatggtaacaaatttgttacagcagtaaaggaaaacaaatctacaccttaatttcaaaatttgttgtgcacacatttttctttatcggatgattgttggtgggagtggcgccacacatagttgggatgactttctctatattgatgtgtctgtaaagttattaagatagactcgataggttgcatacaaacctgttaagttttatccttacttaatacaaacctgcctgaaaacatctcattacgtcaatactctatcataaatgttgtatcttagattatctcttagaaattggccaccgtccttatgtataagatttgttttcacatttccttatgtatcatgatttgtttccttatggaagtccagtattagtataagggagtgtttggaagaatttctttacagattatttgaacttacctcatgacatgaggacttgggtaagtggttgggaaaacttatataaattgtataagggagtgtttggaagaatttgtgtggagctaaatttggcttatctcagatatgagtgcttgggtaagtgtttggaaaaacataagaatagtttgtgtctctgtgatatgcccattgtttgttcagtgataggctatccaagatatttttatagaaacagcttgtgtagttgttctcacttcaatttccatttaccccaaattctttggttatagtgagaactattgttgatcatgcaaatagtttttcgatgtttatctgcaaatacaaatagcctacttaacatgagaagttatgacgtaaactgttatataataagtacttattaaataagcatttatttgaacaatttaccccaaatgtattattttttcgaattaggttccatattctgtatatatcatgatttgattccttgttcaattaagattatgagtctggtattagtataaaataaggattgtaacatcaaacataattcacattttcccatataatttattattctatcatctcccttttcccagtataatgaaagaccaaaatcatattacttttggcgaaaccttttagtaaagaaagcaaagattcgtttataagcaacagaagttttccttccggttgttgttgagtgctatggttgtctatctgttctgtatctttctgtttttgtttaagtggaattgtcatgaagtgtctccacttttcctattagtttattttataaagacttcaagttgcactctttattaatgtatatggtttataattgttgctgttttctgttggttccaggtttcgagga

SEQ ID NO: 4408 - DNA, 1788 bp, Medicago truncatula
  Intron number 1 from transcript Medtr7g133220.1 (locus Med tr7g133220) derived from phytozome v7.0 (chr-ID MtChr7; po s 31103193 to 31104980)
ggatacatagcggtaatttaaataagggggagtgagagatcagtggcggcaacggcggccagtggtggtggccgtgagtgagaggcagagtgagagagaatgaagggagatgagatcgggtgagtgagagagagagaaggaagggagaagaaagggagatctaagagatagaaaagggtaaaattacaaaaataatcatgccacatggagggtgtacattggggtgtacatgtatctttttcctatgtaaattacacttaaagaattcacatcaacataatatagtcacatattcacttagaaagctaaacaatcacatactttaatttagaataataacactacaatgtcactttaaatgcaaaaaatttataacatggtcatttacaacataacatagtcatgtcaaagtcataaaataattatcacagtatcataacaatgttataaaaaatttctcgcaacataacaaagtcattacaaatttatcacatcgaaacatagtcataacataaacagttaacatatattctataggacttgatttaagacatgtcggcattgagtccaatttgatatcattttctcccttttccttgcctttcttggggttcaatttaagtactactacatatttcaatttctaacaaattgttgatatatttcaaacaagttgaaatagattaagtatacaaaaattgaagtataccgaagattgattgacatgagataaacataaaatttgagattccatgccaaatgataatgttcaatattaatagagttttataattgttttatcattcacaagctctcatctatgttgttgtcgtcattgtgattaatgtttgactcttttgtatgttatgtgaataaaatacctcctctaattcaatctgatacaatgatatttgaagggttgttcgatattgaacatgagttgtcatatctcttaagttagtttcatggcgtggttaattactttgtgaaatattagtcttttgttagacctgaccaattgtgggtatttcactctatgatgtacttgttgacttgttgtcgtatattattaaactacgaaaatagagcgaattatcaagatggaaattaatttaaaccgttttcaagcttcttaaaataacataattatgattcattaaacagtctttttccttagtttgtcatacatttttattttaagttatatagaaaattatgtccatgacacaaaaacttgtaaaacaaagattaaacattatgttcatgataggagaaaaaaaaacttgttaaaggtattattaagttatctaaaatagaaacaaaaaattacaataaaaaggttgaactgcattttaaacaaattaaaaaaagacagcaaatcgtgaattaatttgtgttaccaaacacgaccaaatattgacactgacacataacaccggtttcatgcactaaacttgttgtaataaaacatttcttataaaacaagacactaatttcttaaaatctctccatatattcaatcccaataattactctctcgtattcataactaatattatatcaccaatttatttatttcacgcgttaattatttcagagtgattcttgggatttttacaataatttgtattgatttgtttttccttttttagaccgtcatttatttttctgcaaaagaacgtgtgaaattttactatatataccccatcatagagtaaggattttcacttcccttcactttcctctgctatttcttactctgttttttttcttctgatgtcaaagttg

SEQ ID NO: 4409 - DNA, 2503 bp, Medicago truncatula
  Intron number 1 from transcript Medtr4g104070.1 (locus Med tr4g104070) derived from phytozome v7.0 (chr-ID MtChr4; po s 22594849 to 22597351)
tgttggtatattgtccattggactaaaatttacaggtctgtattgcattatattttgaatatttcttttacttttcatgatatgtttaagaatgctaactagagcatgcatcattgtcaacagattataataatattcaaataatgtaagcatcaacatatttgtttgcatatgtctctattgttaaagcctaatgatttgcttaattatatgtatatgcactctcttttttatgaacatatctctaccctactctatacatatttttacaagtattgttatatgtgtgttttataattattttgaatatgtgtgttataaactattttatgttgaaaaaattaattaatttttacttaaaaaatagttatttattaattaacttttagtatatatacattttttaaaggttgtgtagtggcgaagctaatctatttttttttctgatggagctaaatatatattttaaggatgcatccctcacatctaagtggaccgttaccatattctgtatatttactataaaaacaaaaattagcgatggaaatttagtgaggaaaaacataaaatctctatctaattctgtcactaaattttgaaaccaaagaatttgtgagagattttattttttccgtcaataatttccctccctagttttgtttttcctagtagtaaaatcatgtttttgtttatcaagaataataaatttgatattaataaaaaaataaacaataaatataatattttcttaaaattttctattaatagtttagtccacatttggacagggtcgaaaagtgaattaaaccaagtaagttaataaaaatataaaatatttaggaaaatgatgtcatcatattgatgttttgttattattgtattgtatcaattctttgtcatttttttttgtatttattcgtattatatattgtatatattacttatatgatcatcatatatattttagtcctataaaattacaacttttgagtttagtctttacataaatttgtccaattttatttctattttgaaccttttttaaaaaaaaaaaaaaactacataaatttgtccaattttatttctattttgatctcttttttttttttaaaaaaacgagtgttagttttgtatttattcttttaaatagaaaataaaatgtaacaaaatttatgtatgggtatatcatatttctaggtagccatacacctacctcataagtgtgaggcctcaccttagggatgtgtaacttcaataaaataaggtccaaatcattatgtctacctttcaagggacacaataaattgtcaattatgagagttcacattataatattttacggtgtaagtgaaatcttcaaaactaaaaatatatcttgattgcaattccatttttgtcaaccgacattttgctcaagggaatgcaaatttccgtagaggtttgttatatgaactatttgcgggacaattgaccaaacgatcaaagacatacaaagaaaagtatgtattgtcgtcgtatcgatacaaaatcaaactaataaaaagaacataatataagtttgagatagaaaatagttacaaaatgatagaatcaagtgttattagaaatggaatcttatttgtcatttgtgtatctacatttttttactttgacacaattgtgtttatatccgagtagatagaatcacaaatattatcatcgtgaacttagctcaatttgttccattgatagggataatgtgtaatatatataaggtctggggttcaaacatcgaccggataaaaatcacaaatattaaaaaataactattttcttcaaatttgaagtccagttcactttggaaaattcttttatattgtaatttaatttaatgacttacaattctgaatttgtaggttacttgtattataggttaggacgatgaaaaagtataaattaagattgaggttcaatgtccaacaaactaaccatcaacctctcaagcaagtgtatttataaagagtaatgatacatagacacccttaggtggcaatacaccatttgacatccacacaaaaatctaacacgtagtcacgtggaccccacacaagcacactttctctttcctctcctcttctctcttcctagtgcatggggtgtacaagagtgtatgggaataaagggtgtctatgtaacattttcctttataaaaaggttaagtacttgtagtggtacaagtatgatactttttttggtacgatctacttttttagttctttcgttgtgagtgaagtttgtggatttttgatgtattaatatgatattatttgtgtgtgtatttttttttgtggtggccgaggtttgaaccctggaccttacatatttattttaaaccatgtatcttattttccacattgttaccttattcgtacatgtgcatcataaaccctaaaattttgacgtttgcaacaactcacttagttcgttattatttacgcagttgtgcaatccgtaggagtttgct

SEQ ID NO: 4410 - DNA, 726 bp, Medicago truncatula
  Intron number 7 from transcript Medtr4g137150.1 (locus Med tr4g137150) derived from phytozome v7.0 (chr-ID MtChr4; po s 33703547 to 33704272 reverse strand)
gtggaaagatacttttaaacttccttggtatgttccctaggccgatcatctcctcatagaatttcttttattgaattcaaagcagtaaagttttcatgtataccttgaagagataaaatgaaacaacccttttctttaaataatggtaagatggttgtggttcccattgtgagctcaaattacaaagaatagtaaattcgaaaaattcagggaaaagaatcgctccaaatgtgttagtttactatgtctatctcatgctatcctcttaggtgttagacacatattgaagctcagcagtatacatataataactactaacaaatttagtttaagcacatgacagtatttggtatatgtattctctcgattgtatcatagagcacacctttcttctcatcccttgtcatgtatgttacgtggctggccattttaagtggatttgatcaatccttgttgcaacttgcaaagatgattgatgtaaccaagcttttccctggctttaaatgggggcccctgctagttaacggtgggattggccccctcagagtagtcggtccttgagccggataccaatttttttaaaaaataaaaaacaaaaagagaaaagatgattgatataattgtatacttgttaatgaactttttctagatgttgtttaaactgccacttctgatatttcaatacgtgcaggaaataaataagacggccatcagagcaagcagtag

SEQ ID NO: 4411 - DNA, 444 bp, Medicago truncatula
  Intron number 3 from transcript Medtr1g125200.2 (locus Med tr1g125200) derived from phytozome v7.0 (chr-ID MtChr1; po s 27543054 to 27543497 reverse strand)
gctgacataccacctcttcctttgcctcagtcctggtaagctttactttgttgatacctgatacactatttgatttgatcatcttgtgttgtgatttatttgatctattctacaacatgagttatcacatttcgtcaatccatgcaattcatctttctcttttaactttctttgatttttaattctgcggaactgcatatggctctatttgttttaggcaacgttaaaagtccaatatttcttattgtctatgccatatgaaaatgaaaagtttctatcctactttgcgtgttggttcaattttttgctatgctggcataagtagttacttattttgagcattcaactttctagccctcatacatatgaatttaacaaatttttagatctggtttgttggtctctgaactcttcattgtgttcctgcagccttgcttgttgaaa

SEQ ID NO: 4412 - DNA, 2179 bp, Medicago truncatula
  Intron number 1 from transcript Medtr5g072080.1 (locus Med tr5g072080) derived from phytozome v7.0 (chr-ID MtChr5; po s 25615129 to 25617307)
ttgttaaactagcttctggaataagaaaagaccacgtatgttaaccaactataataatttatattgtcgtgaacttcatttgtgtgaattgccagccacatatataatttatatttcctatgaacatgtatatgttggcatatatcttatttaatatagtttgatatatatatatatatataatttagacttttgggtatccttgtctttgagctagtattttagagtaaaactcaaactcattaaatatgatattagagtcggactaaggatgacaacgagggaatcagagtcataacacatcgtaggcatcatagtggataatcgagttgttttttggacttacattgtcgtgttccgaattgttcggtgtatatatgattttggacacattcatcttacgacctaacttttgaaagtgtggtccaaaactattaaaaaacattgaggttttaaaaacaaatccaagatatgagatgggagttggtgtcgagtattcttaaatagatgaaaaaattagacgttaaacaatatatgtgagaagaatcatatatctaatatcttagtctaatgttaatgttttgagtgcaatatggtcgatgattcactcagcgttttcgactctccaaaagtctcaacaatgagttgtaacaacaaattcagctgcatcaagtgcacttattttattgacaaacatgttaaccagttttaagatatgctagttctaataatttgaactcctgacccacaaaatagctcttctagtgtcctttagctcacgaccaagttatatgcttataacccatctcttgcatttgattactgcttctcacattttcaaaaatcgtaatgtgatatctcacggtattacttagtgtgtgtgagttttaccgttaaatttttagacaaaaaaatggtagtattattgtgactgctgccgcaattcaatgtaaagcttcttcgttaccagatcacagtctaggtcatagattaggagttattttatgttgtacgacttgattgcttttttggaaatggtgtattaaaagtctaaaaatgattcatgttttatccaaatcatagttttatttttatttttctaatttatattggtctttaataccgcacatcttcgtagatgttacaattggtatcagagcaacttcgatttaaaatatttacaatatttttgagagagaactatgaacctggctataatgtgaacataaatcaacatccaattgcacagttaattgattgatagaccaacaacgtaagctcagattatagtagcttgattttaaatattttacttttgtttttagcatagagtttgttacataaaatactgaaaagacatcaaatagaaacttcgtttagaattttctattatttaaaggaacataccacaattatcatgcttaacatacatttatggcatttatttattgtcacttttcctttccatttctctcccaaagccgttctaaacttttaccaagatttaaaaaattccaaattgtttcgaacctggatttgttttaaggtagctgaattcataattacaaaagtattatttttcgtacgttttgaaatataggtactaagaaacagaatcttaataaccacgagctatatacattgaccaattcatctctagccccttgtatattagattcattgaaacaaaaacaagcagcataacttgtatatttaaagcttcaaaaccaggggcagaaattattattacttttgcttcttttgtttgttttctttcactcatatatttatgctaatatttttaattgattcttctagttcaatgcactccactcttcatttttgtttgtaaatccaaaatttagttgttatttacttcacaagaacaataaaactttctattaagtgccagagatgtataatcccaccagatttaattttaaacaaataaattatcaacatacttccctaaaaaaaaattatcaacattctagatttgttaggatatatcattgttagttaaaagctagttatttgaggttacttgttttacaagtaaatgatgacaaatcatcttacattattcttagcaagttttttagtcaattttagtagattttacatccataatagagaagtattaaagtgattgtttatgatttcaggacatttgtaatag

SEQ ID NO: 4413 - DNA, 6079 bp, Medicago truncatula
  Intron number 4 from transcript Medtr6g071310.1 (locus Med tr6g071310) derived from phytozome v7.0 (chr-ID MtChr6; po s 13709510 to 13715588)
tcgaagatccgttgacaaggttgtgtagctaaacttttatgtgattcacttataattttggttttagcatatgctttcttattattaaaagtttgttatatcataaaatgtatcttttttatcaggtataaggtggttgttcaagttgtatatgagggtgataagtcggagtttgtgttctgggataaggaatgtgttcagattcttggtgtcactgcagatactcttagaaaaaccatacaggaggtaaatttgattgtaaaatttagttttggttctactttaattatttactaattttattttttggaaatctgacttttatagttatgtttgttcatgaaggttgatgaggatgatcccatgatatatcccacgcatttagataaattgcttggacttgagttggcattacgtgtgaaataccaggcgtattatcatcaatcatctgtgcaaggtttttcctctgatgctgctgttattgagagaattaagcgtcatcttcgtcctgatggaatgcagtcagatgtgcaagaagttgatgaggttttgttgcgtttgtttgttgattcattttatttacaattaatttgtttatttatttaattttgacttatgtttggttattctcatcattactatagactgttgtcaacaatgatccaactcagttatttgaacttcgaagtacaagttcttctgttgaatgctcaaaagtcattccaactcatgtggtaggtttacactatttcttcaaatgatttatatcaatgtataggatagtggagaaaactatttatagtgataacttgagtcttaatttttttcctgatcattgttttaagggttaataggtctttacccccctgtaatataggacacttttggttttgccccctgtaaaaaaaaaaatttagattccgtccttgtaaaatgaagattcttcaagattgccccctgagccctgtgactcagcagaatctatgatgtgacatttttttttatttttcaatttttttttggaagccaagtgtaaaaaataatttacatgtcatttataattaaaaaaaataaaaaaatctattttttttaaaaaacgaaaaatattttaaaaattagaaaaaaaattcagatatttttaaaaaaatttagaaatgcagattttttttaaaaaattaagttccggatttttgttaaaatcagaaaaaacattcagatttttttaatttaatttttaaaataaaaaaaatattttatatttcaaaatctttattccagaaattttataaattcttttttgaaattaaataattagaaaaaaattcaaatagtttttacagattaaaaaaaaatagataattcttttttttcgaattttataattttaatttaattcggattttttttgaaatttagtataatttttttggaaaatttggaaatatattaagttcgagaatggaaatggtataccataaaagcattttttatttaaaaaaataaaaataaaataatttttttttctgaaattaggaagtattttaaaaaaaaaaactggattttatcaaaaatttcaaaaacaaatcagaatttttttctaaatttaaaattttcaaaaatatctgaagttaagattttaaaaatttaaataaaatcaattttttttttcagattaaatagttggaatttaaaaacatttatatccaaatttttaaaaattaaaatattttccagagttttcattctttgtagaaaaaattaaaaaaacttttttatttcgaaaaaaatctgaatgttttttaatttcgaaaaagataagacaattttctatttcggaaaaaatctaaatgttttttaatttttggaaaaaaaatctaattttttttcgatttaaaaaaatagtttgaattttttcagattttttaaaatatgattttcgtttttttaaattttattttatattttaatttttttaaataaaaatgacgtgtaaactattttttacacgtggcaagctaaaaaaaataaaaaagaaaaagaaaaagccatgtaggtgccacatcatagattctgctgagtcacagggctcagggggcaatcttgaagaatcttcattttacaaggacagaatctaaaaataaatttttacagggggcaaaaccaaaagtgccctatattacagaggggtaaagacctattaacccttgttttaattttgattgtgttgcggtagaacattgtcggcaataatccaacacaatcagtgaaagttgagcagaagacctcttatggtaaaggcttgaaatcagttccagtttctatggtatgtctgtctgtactttcatattctgatcatctaatccattatgttatttgcctattatttgaaaatatggttaatctgtttttgaatccttaactataccttaaagggttgacattgatatcaaaccattttggtgttttgatcattatgaaatatcatagaaagaggaattgagatgtaattctcattttatacaaagttataaaactattgaagtattgtaactcatgtaaaactaataactagggaagaactaacagacttctctactataaatgagataaattagcatctttattaggtaataagagttaaaaaatggagtaataacggtgacttaggttggatttttacctcttggaagataccgacaaattaacaactaatattttgttattattcaataattaaagtaattgatgaggctatgacatgttcctttagtagactaattttagatcactaacttcattcatgcatggtttaatttctgcatgttttttatcatatattttgttctaaatactgtttctttttctatgttcttgcgataaagcattgtttctgatgatccaactctgtccgtgaaagttgaggacatgacctcttctgctgagggcgtgaaatcaattcccatttctatggtatgtcaacgttattctctcaaatgatttttatctgtctataaaaaagtagaggtatgtatgtgtgcaatatctaagtaaaaataaaatgaggtctgttaatgagagtaatattatgataagtattgaaataaagattcattgttgatttggttgacaatgaattttttaatgttttttatacaaactaattagctctttttaacttttgtatcagcaaaagtctgtttctgtgtgcaatcaaggtggtttaaatcaaattgggaactgcactccttcaaagcgttcgtttgatgaaaaatgtaaaggcggagttgtatctgatggctgtgatccaacatcattatcttccattaagcaggctaaatgtattaggaagaagtaatcagttccatctttgtttagctttttgaggaaatgccgttctaatgtgcgaagttatttgatctatgctctataatagtggttttaagctacgtggaatggctttggattatgcaacatatgtggcttattttggttaattgtaatatattaagtctaacaatgtaacttgccacaattaactttatgtaattaaataagttgcatgtaattaacataatatgtttctacattttgctatgcctataaccaagtaactatatctaatattgaactctttagatatcaggctaaaactattgaggttttgcaaatataaaatacaagatttgggttcttaatttttcttgcgagaaagttaggtagggtgaaggatatgttaaaaaaatttggtcaaaaaatggttttaaactgttgttaaactaagataaatggtaaatggttttctctatcaaaaaattaattattgataaatgcttttaaactgttgctaaactaagactgagcacagtaccatctcttgactgcataagttctctttgtgcaagatagagtgtacactacattttatattgtaacttctcacccttgtgttcctttgagtccattttccttctactttttttgcctacattcaaaaaatttggaagcaatgcaaacaatatcagtggtgtttaacatctcttaattaattatgtcgttttaacatctcttcttttgaatttgaagattttgttacaataattattatccattcttttacaatttaaaaggttatcagttatagttcatacacaagacttttactgatgtagtttctggttagcagtttcttcttgtgcttgatgtaattcatgctaatgagattgcctaagcaaagatttacaacctttgaagtttaagttctaaaaatgtttattttgtatgatatcactaaagtaacttctatccttcattctacatggtgtaaatatagatatcaccacctttatagtaaccacgtaacagtatcactcccttttacaattttagttcgcatgcaatcgtaatttgcacatcattggttcctttattcgttcatgtttttaatttcctaaatattaagttactttaccatagtatggagtaattatatatttaccatgaacccttcattgtgatgtgttaatcacaaatcatgcttatttaagttcatatattaagatcttacgatgaaccatgatattccgtcgttttaacatttatcctatcaatgtaatattttatcaaacgtgttattgaacccgtgcaaagcacaggtttgtaactagtaataatatgaattgtgatgtttaagttttgctgaatgagaataagaatgtgaattttgaactaatttcaagttttttttgttggtttatttgtggatgatttatctaccgattcttcactgagcatttgcgttcactttccgtatctctcgcgatccaggtttgttcactttgccgtgtttattaagtatcccatgttgctgcattttaatttgattggttaccataaaattgttgttgaatattttaatttgattgaatccgttcacgtgtatcgattgtggtactgaactacggaatatatatctctgatcttagtatagctcttcattagtttaaaccaaaaattcactatagaccattttttgtaagttattttttcatgaggaatgacagaagtaaaacatgaccaattccactctaaaggtcataatgcaattgtgctattaacaaacttgtgtccaactggaatagtttcatagtttgaatgcgatctttagttatatgtcttgtgggatgttctgataaatatttgatagagcatagaaattccttttaagtttgatataggctttagattatctcctattacttaggtggctgattctcattttatattttacattatgattaagtatcaagataaaggaaaaaaaaataaaggatcaattgttttcttatggtttatgtttgattgattaatttgttgtgctatctgatatacatatgccctcacctgtgaagagtttttagttttttatgtatccatgacactttattctgaaaaaaggaatttgatgcatgtattgttaaaagctaagaagctgcatgcattcttgtttactagttttccagaagaaaggaaaaggaaagaatattctatttaactaaacatgggtgatataagatgcaaatcttctttactatatacttggtacattcattttatttttaagagaagatggccgaattcgatatataacatcatggtttatgtttcctgttttgtcaataagttgtaataatttgtaatgggggtatgccaaaatggcttggtagattttttgaaaactatcatagccaattttttaatggatgccctccgccatggcggcaccaccactgttgtgctgatatggttttatgctttttttggccatagccaaatttctttttgtcttccaccatagacaacattgattctatgctttttaaatggttttaccttagtagaacagttttaggcatgtcttttgatcaaagaactcatattcatctcctccatagttaatgcacaaagttggcacatcaattcttccatatgttacttgtttctctgatcatagagaagttttgttaaaatcatttgttttcttttaggcgcttaactgttgctcagctgaccgattgcaaca

SEQ ID NO: 4414 - DNA, 3025 bp, Medicago truncatula
  Intron number 2 from transcript Medtr4g041510.1 (locus Med tr4g041510) derived from phytozome v7.0 (chr-ID MtChr4; po s 9842764 to 9845788)
tgccatacttggtagacatcagtttatcgctacctccatatctctacatatcgtcatgactttaccttcgttgttgtgataacgcatcttctggtggatagttgaggtatcagccccaaggcaatgagggtggtctgaccatttatagtgttttatgaggaagatgcattgctaatgatataggaactcatggggcccttcttatcattgcttaacgagtaagttttgtgggctggcaccaatgtttgacagtacaagcaataaaagaatatgtttgacgcttatgagataagacaaggacaactcatatgggaaatgactaaagggtacaacttgtagttgttggccttctactataaaaggacaaccacatggtaatactaggggggccgaaattttagattgtgaattgagtggacaagttccagctacggttagcagcactatagctctcactccatgtcatcttctccatagatgggcatgagtggtagttcttagtgatttagagttaggattatttgggttatgcttcaagctcacctacttccttattgaattgtattctcttgctagctatattttatctactaatttagcttttcatgttttcatctatattacatttcaccttcatctttgtgattaagctcattatgagctaaacctcttcttgtggtttagacatgatgagatgatgatattcttttctcaggatttataaagctgcatctttatgcttctttcaaacaatttgttgtaactcaaaacctttaaaagtgaaacttgatctcttttacttttgatgttatagttctttaagaccaaaagagtatgggaatggcaaatttttgtttgatgtgagttatgtccttatgaatcgaaaggcgacatgaacaagagagattgttttgcacgagtacttgatcttagaagagcctataagcgttgagatctaactaggactcttgtcataggcaaaaggctcaacatgtactgcttcggtggaaaatggtgatgacctaacctaccaatgttgcgtgttaagattatgtgagtgtactctgataggatgactccacgtgcttaacattaagaatgagtgaaacacctcctagtggttatcaggtttccaggaatccatagaaagttatagctttgtagatcgcagcaaagctatgtcattactgattctttgtttaaaccacacttttatctttaagaatttctaagtttttttaattgtttttccaaacctttatctttattttacagttgtcacaaatgaattattttattttcttttaaacaagttttctatttgaaagctaataggaagttatacttcctcaattcccgtgggatcgatatctttttatattataacttggacaatgtatacttgcacttaatctttccacccttgaatactaatagtgttttgggagacaccatatactccataaaatccaaacccacaaagatcggcaagaccctcatcccaaaagataggtcatctgagagacttttgtctacaatatggctccctcgacctatagcttaggttcaggtccgactcgaaccgcaaaagcaagtgacaccatatgatggataaaccctaaatcccactggattatggtccggaccaatagatcttgccctaccaatccggagatcatgctacataccaccccaatcacacctgtcccctcaagaagagttgtccaggtgaaggtttgacagccaaaaccttacttatccattatatatacctatgcttagtcttgggttaggtatgacattttttgcctataatatagccacattctccattgaacctcttattgaattaggcgtctgagcacgacatgtacctcatccctattcgatggagaagaactcacatcaggcaatgtaaagctcaatccatctacgcaatggatctcatccatcaaaccatcttaacaggtccaacgaaatcaccaactatagtattcttcttttttatgattacccctcttctctcatgaaaggttataaaattacataacattagtaaaaataataatgaattatgatggctaagtttttatgtcacatattgactaagtgtgataaagggacaaatgcaacacttctatgtgcttaaaagatatttaataatgattctaattttagtttttttttttttagttaaatatgttattggtccctaaattttatacgattttgagaatagtccctacatttcaataaatgtttttaaaatccctacattttttctctgttagtgtaaatagtccttgctgtcaaatttctaacgggatgtttgtgtggcaaatggcaggggcattttaataatttcatatcaccattattctctatttcatctttctcttttttcttctctctcgacagacctctctattctctcaaatcgtcaaccctccgtcgccccaccaccaccattgtcctccgccctactcactgttgtcttcttcctctaatggcgatctcatcacaatccttctcacctttactcacttccgtaaaacccaaacccgattcgtagtttcttcttgtctcaactcttctaaatccgccgatgaacacgggtcaaacccatttgaaccgggtcaaatcaaaccatttggttcaaacccggttataatttttacaaggaatataaaataaaataaaaatattgtcacggcagcattatgttttcttatgtggcaaatagagacggcatggaccagttgcattaatggagataaaatgtagggattttagaaacatttattaaaatgtaggtattattctcaaaatcgcgtaaaatgtagggaccaaaaacatatttaatatttttttaaatccataagcgctaaaaataattaaggtatgttaggaggagatagactttatattttatttattaatttacgatggctttatatgttattaagtgacaaaaccatagaatattttatagatgcaaaggttagaaaatacgactgaagtagtc

SEQ ID NO: 4415 - DNA, 1884 bp, Medicago truncatula
  Intron number 1 from transcript Medtr7g099660.1 (locus Med tr7g099660) derived from phytozome v7.0 (chr-ID MtChr7; po s 22283301 to 22285184 reverse strand)
aaccctagtttctctcaacccttcctctgcgacaggtaaaattcgtattcaattcaaccctttacgagttttcgtcattcaattatcaccgttccattgttttgttcactcaatttttcaatttatttatttatttgaagttaagtttgcatctttgatttgatttgtttatgggtagttgtagttgtgcaaagatcaaagatttgcatctagggttgtttcattttactgattactgatataacttgctttatgttttgcaatttgacttcaaattttcatgtgttgacttgaaagttggggcatgtgtagcttacttggttgagctaagaaattcaaggagttaaaggtttagcggtcgaatcatggtataagagaaaatagtaaacataacaaataatatagtaacccacttgggttggcctggtgtttgattctacttagtgccaatttaggtgggcttagtttggttttttcaacaaaaaaaatatagtaacgttttctattaaaattcttgtttgaaattgaacacttttactcagtgttgttttttaggagaatgaaatttttttttttttttttttgagaaaaggagaatgaaaattttgaagatgggttttttcttttttggggtgttctgattgaatattaatgttgattgattgagatgggtttagtattttaagtgacataattctcattaagttcctttattttctgcttctatgaagcactgatacgcacatcagacatgaagtgctggtgcaatgcttactgctaattgactttttgtatttttactttggagattgagtaaaagcttgttttctaatgggattgatatttggattttggacaatactatacttttttggctttcaatttttttcctcaacaaatctatttgtttgttgcatgtttttagttaattttatttcctcatgggaaacaaggtagacaggattatgtagtattatactgttattttgtttgtggcaagaaatgatggtgtttattgatccatgtagccaatgcacctggtgggaaaatgcttcaattgttcttgttgttatcattattcatttgtaattataattttttaaccaagttcttgttgttatcattattcatctgtaattatacttttttaaccaattatgaaatcatatttcagatattacaattatattctgtgattgtttaccaagtttaggtagaaaatagatagcattccatttgtatgtataccaaggtgtttgctagtataatactacataatctttcctaatcattcttaatgctatgatttatgccatttataatgtgtaagctttaactaggtattttacatgtcagttgtcatctatcgtctaccaccgaatggtttagaatcttcaacattatagcttataggggactagaggtgattttattcaagaaattatgggttgaaatttgcatttgactccattttgatcttgctttgaaatttctatccatgtccacggtctctttgaaaatagcttttatttcgagttgaggcacttggtactaacttttgttacgcaatgaaaagatattttctattgtgttttttcaagtatttcttgattactagaagagaaaaagttatactgaagtatcttcaattaaggctcaatttgtgcacatgtatgaatattacttaccaaagctaaggggttgtttttcaagaactatagtcctcttgtgaatttataagctatgattttgcctctatttgataaaatgaaaatcataagtcctgtataacaaaaagtatttgcgtaatatatggtttcattattttggttcaattcacatgcatggtttgtttgtaggttattctttctgtctgcttaaaca

SEQ ID NO: 4416 - DNA, 2087 bp, Medicago truncatula
  Intron number 6 from transcript Medtr1g035020.1 (locus Med tr1g035020) derived from phytozome v7.0 (chr-ID MtChr1; po s 8497368 to 8499454 reverse strand)
gtgattataataaggttccactctatcctctactttgatgtgttaattttaccatttttgtacttgtgaaaagaatatgatatgttgtatttgtaaggctcacgccataaaattttcaaattgaagttcttagaatataagaaaatagtatctcattatatatatgtatgtatgtatatgccaaattcaatttgagaatcaacttgaaaatttaaaaaaaattagacatagaattcgtagctatgaaggaatatacaccatgttacaaatcctcaagaaagacattagcttgaaaaaacaaaacaaatgatgatttcctagcataatgtttgcaagaatgacaaagacataaccagtagtaacatggcagtgtctcttttaaactcagaagctagcatctagaatacaatacgagcattagttcagccaaactgtaatgaagaaacacaagtttgtgtgatttttcctctataaacacaaatattgctagactattattcatcaccgaaaaattcaaacctgaatacctgatcacagtgaatcagaaaatataaataaattattagtgagtaaagcataagcaaaaactcaaacgaataaaatatcacatgattgaaattccaaatttaaaattaattagaaacagagaaatagcccacatgagttccacaactacataaggaagtctaatataaaagaaatgaacatttaaaacttcaaaacatataactaaacataaatttgaatacaaagaaaacatgagtcagacgaggcaagtcagcttttttattatttattttccaacacaaattaaatcaaagccaaccatgtttattaaaagtgctataggttttatagaaatcaaaccatgtgcatgtcacatgaaaatttcaatcttgtcgtagcataaattatttccattcccaatggcgctgttcatgctacaaaatggcagtcttgcttgcatcaaacatatcaaaacagtcgtacgatgagaaaactatatccaatgaattcaaatctctagattgcaactttgaaggcacctttttaattttagcgtaatagatggtgactgtgcctaacaaatttcaagctctacctgctcaaatttcactcaataaatgctatcggtcttatacaaataaagtacatgtcctccacattaataataaataacaactatgtaacaccagtagagaattgcaggaatggagaaacctctattgggttctctgaatcaaaacctggaaaagattgagttatcccaagcaatatgtcgcaagtacaaaatcgaagttttagcaaaaccacagttgacccgttttgagaaaaaattggtggctcaataaacatctcagaaccgtctcaaaatatgaaacatggtcctctacggattgactatagaccaatatattgtaaataaatagtaaacttcctcaaatatgtcataagcattcaatagtggcatgaaaagtagatggggcattacatgtaccaaatgttatgtttatcacttcgagggcagtactttcataaaagaaagaagcaattgaacagttcagactgttggtatttcttggcttccatcataagagacaatttctctacatagccaaatatcattacaacctgtatagctatgctttctttgaaatttttgaagttgagtctatatgaaaacctagcatttgtatttcaaatattacacatactacttgtccatgtgaaggaaaataaattataaaacaagacttgttaagagcgtagactatattacacttggcatttgttaatacatatgcactgcacattcgtcctttgactcacataacaaacctatttcagcattcaatgtaatatgtttgtaaaattagattttagaattaagagggtactgtggggcatcaaagaattatcagttgtttggggatgatgatataggttgaagtttgaatagttacttcacttttctccatcgtcttttttgttgagtgtgttttatttattctcccattcaattgctaagatttgttttcatttttgtaataaaaggaggactaactaaattaaaatcttgcagaata

SEQ ID NO: 4417 - DNA, 1894 bp, Medicago truncatula
  Intron number 2 from transcript Medtr4g160620.1 (locus Med tr4g160620) derived from phytozome v7.0 (chr-ID MtChr4; po s 40744914 to 40746807 reverse strand)
ctggccaagcaactattttacactcgcctcgctaggttttattttattcctttccttcttaataaatctagctggatttagtgtttaatacttgctaatatatgtatgtacttgttggccataatttattgattgcaaatgattttattgacattttttttctttgcattttgatgtcggtacgttcctaactgtctacccttccctttattgacaagggagaaagccctggagggcgagatttcaagttttgaacctaatatgttcatcgttcaatcatattagtcgaaacttacccttgaaatacaaagttaattttcaaatactcagtgttattgtgaaacatattacatttgtattagattaacataatattttagtatttgcttgctatgttgtcaatagcgtgctatagcagaatagcgtttctgtggtagggttcggcaccgtgcttttggcccgtgaaccacagtcagcaatagtggtggttgcagcagccaattacagtgaatttgcggccccaaaatgctatcgtgtctgctagtaggattttagggcgaaattcctcaaatcttttttaaactgtttttgttaagagtttaaatgtcaattttaacccttttaagggttctgttctgttcttcattttgttatgttatgcgcacaaacaatcgttatgttcttctacctacttttagtttgtttctttctattatgtttttcttctctttttaagtgtttttgttttgtactttagattctttaattattaagtatgacaatctcaataatttattgtatttttctatttttgaatatttatacttactttgtacactgatttgtagtcatggcaatagcagctatcccactattcgatataccactatagcattttagggggtcggtgcgatgcgatgcaatctgggattaaccacatagtttcgtagttattattatacagtataaaagatgatcgggtgatcatgtggtcgacatgaatcctttcttagcaatgaagtgttagtaatgtagtgtgatgcagcctttaagttagtttagagttcagtgttgtttatgcatagtggaatttgataaattgctactgtttctgcaatacgctatttagtacaaaatactgtgaaatagcaatgaagtgttagtaatgtagtctgatgcagcccttagttagtttagagttcaatgttgttgatgcatagcggaatttgacaaatcacttctgtttccgcaatccactatttaggacaaaatactgtgaaatagtggctatagcggcgctatagcactgttgcatagtggaatttgaacaaactgatattttccgctatctgcaattgacaagacctgagattagtgttggatatcagagctcaggccatgaattagggttcatgggatctgatatatgatcagaattctgatcctatgtaaagcatagcggaatttgacaaatcgctactgtttccgcaatatgctattagtacaaaatactgtgaaatagtggctatggcactgctgcatagtggaatttgaaccaactgctattttccattatccgcagttgacaacacctaagttccgtgttggatatcatagagttcaggccatgaattagggttcatgtgatctgatatatgatcagaattctgatcctatgttgaatcgaaacatcagaagatatattctgaatattgatcagaattcccatgtggcgctatttagcggcatttccttagtttttttttttttttagttaaatgtatagcaaatctattttattctgtgctaattcagttcttgtgctttcatataagttataactcatcgatcttttgcagtattccaaatcgttgcgagtcctttcataaggaac

SEQ ID NO: 4418 - DNA, 1773 bp, Medicago truncatula
  Intron number 3 from transcript Medtr3g043450.1 (locus Med tr3g043450) derived from phytozome v7.0 (chr-ID MtChr3; po s 11789121 to 11790893 reverse strand)
tgtgggtcggattaaggaactcatcaacagaggaggtatggtacttatctattttttggcttattattatacattatattatttcgattttcaaagttcttttgatttttttgacaaaaaaaagttcttttgattttagaaaagattgttttttaacattttattttaatagaaatttttgatttgtagttttggcagattttgaaataaaaataatgaagataatttaaaaaaaattattaatatttcgttgatttggattctctgcgtccataaatcatgtagtccctacatttaatttatttttgggaggatataacagagaaattaatttaactctaatttaaacatactaaggattaatgtgatataattttttcaatgagtctaaattggctgcgggaaaattgttagaaacaaaagtaggtactcatttctttcaaaaaaaaaaaaaagtactcaagtcttattttattattgtttattttgccacctagcatagcacataaaacttcttaattaatatcagcatgttaaataaataattgttataaagactatttattaacggtgccgacgttacttgagctgattgtgtatccaatgtgtcacgattaataataatagattgaaagtgatggtttttcagttttgattttagacacgttgaagaagaagtggggttctaaacaaggaacccactaaacaatcaattgttctatgttttttaaagtttaaataatagaaaattcatctcaagtggaaattcgaagtttgaaaatgtaccttgctatgcctcctattcattttttttatttttttgaaaggacctagctatgcctcctgtggggctttgaataatatattataccagtaaaaacaagattgttgtgtactattgattaaccatgcatatcagaccgaatattggcatgtgttccagaagccgttagcatttgaattttgttactgtgttggcggtcaatatattcgtcaaatttaaaccttaattattcttctacaatgttaactttcatatttttttaatttggttttgcacctctacgctgcttttttgagttacacatgtgataagtgaatttttcttgaatagattattgttggtccatttggtatgatttatcatgatgtattttcgattcggttttacgtctaatatccccatctttgtatcttcttatttttatttaatatattttttcttccttctaaaaaagacaacatatttcatttactttatctcacaaatcaatttgtttctaaaaaatttgtattttacttcgtctgttcacaatttatttattcttcaatttagaaaattcgaagtggatgctgtccacttcgaatttttgtcttaccaatttttcagaagagatgttttaattttaggtcaattaagtttttaattcctgtgacatttttcttaagcattttaagcatcaaaactgttgatgaaaatttttaacaggtactaaaagtgctgatggaaaattttataaggactaaacatacttatggaaaatttatagggattaaaaagtgtgatttctttttgtagagattaaaaacaaaactgtgaatatttatagggattaaaaatttgattaaccatttaatttttgtcttaccaatttttcttcattctaaaggatgtcttaatttttgtcttaccaatttttcttccttccaaaggatgttttaatttttgtcttaccaatttttcaggagagaaaatatcaccaattgaagtcg

SEQ ID NO: 4419 - DNA, 867 bp, Medicago truncatula
  Intron number 2 from transcript Medtr1g092870.1 (locus Med tr1g092870) derived from phytozome v7.0 (chr-ID MtChr1; po s 18720246 to 18721112 reverse strand)
aggtattggaagtggacttctgttccagattcaaggtaataaataataataatcaaagtttaattacgaagagttaatcattgtattttttttttaaataagagttaatcattgatttattcttgtagttgtaggtattggttaatttcagttgtgaaattaacaaaattatgaaatgatttatgaaatttaaaatattagatcatattaatcattttcatgtattcaatcatattaaattatgtaggtatagatcaatttagttttgaaaactttttcatatgcttcacttatgtttggattgacttatttgagtttgtctaccaaaaaaagtactcagaagtatttgtgatatgatgtaggatagcttattaatttttttattttttatttttttaattttttttttatgatatatatgcccataagctgttttcagcttattttcataagttctccataataacttatgaaaacagcttataacttaaacgaaaattgtttgattctattttatatttgctttatatataagcatgtatgtttataatactataaacgtttaattaaggtgtttaggtgtttatctaaacacggcctaaattgatccatgcttattagtacattaagatcaatcaaatttgtaagaaaattgtccttcaagactaatgtgattgatgattttattctagagattacttcttagtcactaaattgaccagtgctatagtttcaataactaaatttggcgatttattctttaatttgttacctatatatttcaaattttcaatggtaattgaacaaaatctaatcgattcaaaaaattcaggttttctgaggtggctgaactcgtaagcgtgtgtt

SEQ ID NO: 4420 - DNA, 1103 bp, Medicago truncatula
  Intron number 1 from transcript Medtr1g121440.1 (locus Med tr1g121440) derived from phytozome v7.0 (chr-ID MtChr1; po s 26461786 to 26462888)
acgaggaaatccaacgttagattgttgcatatcaggtttctcactcactctgtctgaataacaaccaaatctaacgtagttttagtctcctgcttcaacaatttttcaccttcaattctttcgatttgaaagttatgtccctcatttttttcttttcaaagttattgaaatttcccattcttgttgttatttacgtattgatttgttctgaaagaatttgtgtttttcattttgattatgctgcttatgtttttcttcttctttctgacacatgttttagtcatatttattgcagtctttcagagtaaagtttgatcactgtcatattcatatttttttttttctttattcttagcttatccaattcctatgcatttttcatttaatgtgtatcactatcatggttgaaatgaagcatttgaattggacactgtagtagtaactacaaaagataaaagaggtgaattctaaatgttaatatttctgactgctatctatctggcatgactgtttgattctgctaattttgtattgtgtactttgctgattttgtgctgtaaaactgtaaatagtgtttaacaacactcgatgaaaagtagaatagcttagattttgatttacttttgttgctgcaaactgatggaagaaaggcagctagagtgcttgtggttttcacccacttttacagtttgtgatgcttaaacaccgaacaaaaattatcatttgttgataggaagaacatgtttgtgtatatgtatattctcagcattgaagtcttttttaacaattcgatcagaaagatcataatccaaattttaacttctattcttcttgcatatagactctacaaccaattgtgtaagtttaacttattattattggtagttatatatatttttttttacaaacatcacataattgttatagaaatcttttgtttgatactctttgtaaggatgcagatgaaatgctgcagctgtttcttttgagcatgtatttgatgttcaactgttgttgtttcaattttttctaacactaattgtataatgaaattttcttctcatacaggttttgtctctcaccgtacaagtttcgttactgaa

SEQ ID NO: 4421 - DNA, 2503 bp, Medicago truncatula; identical to SEQ ID NO: 4409
  Intron number 1 from transcript Medtr4g103920.1 (locus Med tr4g103920) derived from phytozome v7.0 (chr-ID MtChr4; po s 22521929 to 22524431 reverse strand)

SEQ ID NO: 4422 - DNA, 3538 bp, Medicago truncatula
  Intron number 3 from transcript Medtr7g111170.1 (locus Med tr7g111170) derived from phytozome v7.0 (chr-ID MtChr7; po s 26046617 to 26050154 reverse strand)
agcttttacaagagctggtcccaggctgcgagaaggtccatttttctcttttaatctttaattttacaaccttaaatccttagttacgcagaataatcaatgattaattatgcttcattgatttttgagtgtgattaatctatcattttctgtcaaatttgttcccctaaagtgcaaataaatatcttaagtacgatttaataacggttttgttattggaccttttcaaaccccacaaaaagaaagtaccgtagttgctttcacgtcaagatagagaagtgccaaacttggtatctgtgtaatttcaccttctctttggtttcactttatggggatttccttctggttacaaatctttttcgaaggttagtgttgcccaatttttcaaccattaccttcttttatgacattgaccttctccaccggtctattagatgctcaaattatttattttttcttaaatagtctaatggatgaaaattcatctttaggtgaataaataaaaaatttaaggttcaaacttccattctgcataatgaggggatattttgactccaagagtaagtgtaataacttactccaaatcttgacatttaattgcaattttgattaatagctaggattaattgatatggtatgctttaattccattttctattgtagtcaacacttatcaccgcaaaataacaaaacaatagatatcattcaattgattgatttttttcacgttaaaagaatttttgagggttagtggtaaaataagcatcaaaattttttatttgaccacaattttttttttcttctccctttaatattttttaattgtatatatatttttttttaaagaaaacaatagtaaaatttaaagaattgtatatttattcttctccttttactatttttttatacgacatattttatttggtttcttcaatataatcatgatcttttcttatattgtttgtaaacaaacatttttgtactaatctatcacgaaaacaaaatacgatagaggaagtaatcctggtcttttcttatatccaatttatttacaataattgcataaaaaataaataaattagtgtattttttttatataaataacgacaaatcaaaataatcatctccatcttattagtttttgttgtcattttttgaagagctcacgatcgtaaaaaaggtatatacataggaaaaacatacatctaaaaaaaggattaaaatgcttattttaccattaatcctcaaaaactcttttaatgtgaaaacaaaaaacaaacaatgggagaagaaaaaaaaaatcaatcaattaaatgacatttattgttttgttattttgtagtgataagtgttcactacaatagaaaataaaattaaagtctaccatatcaattactttaaaccatcaatcaaaattgctattaaatgtcaagatttagagtaagttattacacttgttctttcggtccccactcatgcataatataactgaattatatgctcaagggatttaattttactagtataatgtaatattttatttttttattttgtttatttcaattatgtatcttggactttttttagcaagttgggtcactttgggaaataggttctctggaatagtttttattcaacgtttgggtcttccttataccatcactgtacatgatgttagtaaacctcgtttaatggaaaacattttttccccataagtttaatgtgcaacccctttgagttgaccgaatcattgacattttattatgaatcacatggaattttctttcaccaagtgttatcacgaggcataagtccgtccaagtgttacttcgagacattttatatatgtgctaaggagtactccctccgtcccaaattgtatgtcgttttggaaaaaaaatttgtcccaaattatatgtcgctttacaataccaatgaaatattaatgttactttttctattatatccttaactattaattactctctcttctttcaattatttcatttattttttcataccatttattagggataattttgtaaaacaactcataatttctcttccccatgcaatattaattgcatttcttaatacgtgtgaaatgaccaaaacatcgtacaatttgggacggagggagtattaaattttgaccatccatttgtgctgcacatgcaggattattctttttttaatgaacaaaataccttgttatgcgcttcttagtccttgtatgcttgggtgggttgaaaaagaaggaatactgatgttctttttaagaatgaagatacataaaagtggtcacttgtatttcttaaaatgtatgctaatctaatatgcgaaagagattagtgaactaaacttgcttatataagctttcgattgatgagaatggtgtgtgagctgacatcttattgttaaactttttttgttcatgttaatcattgataaacttttagttaaagtcagtagtttaatgaacacacaagataatgccttctagaaggttatatcacgtgatctgtatcttggatcatctgcctcgctgcacatatgttatatcaagaacaacaaaaatatgacatttttttactagcttatttgtgttagattttgttcaaagtaaacgtggaaatactgctgtacagttttcacgaggacagaatttttagcttccaccaaaatgcattggattgcggtgaattaaatctaggccaaacatggtaacattaaacgggaaattaaaaaatactccaatttgatgaattatataattaatttttatttgcttagttgttaagttaaatgtaaaaaaaaatgagcacccctatagaattcacatgagaattggtaatataatgtaaaataaagcgggtaggtttttgtgatgtaaagtttgtttgatttcagggacatgtatccatgttattagttcaatgattaaagtgcagctcctaacaagaagtaaaatgaatgcataaagtttgttacttaatgtctgtaccattgactggtgggggggggctacttaacttctatccattttgcatcaaggttcccctttgtaaatgaatgatttgtccatcttatgatggctgtggtgttgttatggcattatctctatgactatgggttcggtaatagagtccagcagtataacatgacaaaatggggtgagaaaagagtgcatacttttggggtgcttctaccaacaagagagctaactggattagaacatttgtacatgatcgtgttaatgcgtcatctaaacacctaatgtctaatattaagaaccatgatgatggttatagtaggagttgtagtaacagacaacagtaataacaatattacagacgtgttccataaatgatcccttgttattgtttgaagtagaagccttaattgcatggataatatgattttataatgcatttggtcaattgtgttgcattttctcaaaatagctaatctgtctaatatagttgatgcctgacatgacatgatttactacagatatctggaacggcgttggttctgg

SEQ ID NO: 4423 - DNA, 849 bp, Medicago truncatula
  Intron number 10 from transcript Medtr5g045140.1 (locus Me dtr5g045140) derived from phytozome v7.0 (chr-ID MtChr5; p os 18832132 to 18832980)
ccaaagtaggtttaacgtataagtttataaactttacttttctcttcattttatatgataaaatgcatttaattgcgctaaattgtttacttgacttcattatttttgtgccatatataatttttttttcatctgtgtagtttattcttattattaatttgatttaataccaaaaatagggtttgtagattttgaattctattgttagttgtcacgagagatatataaacaattattctttagaagtgatgattgccaagagacttctgaattttgagctgtattctggctaaacccattgtttttcctgctaccccagtctctattctcaggtcctttgctccaaatgttttttccccctaatatttgaatgttttgatgcaaaaaaatgtctagctctatttattttgttccctcaaaatttgagcatgttgatgggtcctaattcccgagacacttattatctttttctttgaatggcaagagaaagctattatctgttgctgctagttcccaaccagggttctattttcagcattgcccactttccttttccaaatttgctatttggccttttgatttgggcaattatttttagcatttatacttttataatattcgtagtcgtttgtttactggccaccatgttactgctatcttcctgattgggcggattgctccgtgctgctaccaagttcataattatggatattattcaatttatgggtatatgccgtcatatatttggtctgctgttcgatattgatattttaatgtttaattcttgagagatttggtgtttctaccgtttaataagtggttttttttgccttgtttcaggtaattttg

SEQ ID NO: 4424 - DNA, 5650 bp, Medicago truncatula
  Intron number 1 from transcript Medtr7g134940.1 (locus Med tr7g134940) derived from phytozome v7.0 (chr-ID MtChr7; po s 31989572 to 31995221)
ggtttgcttgtactcttctttcaaaatgaagaggtttgcttacattcccttttgacaatatttgtccattttgtaataattgctccatgataggatgtttgtttagcgttaataaatgacaacggttaggttggtgattgaaataaagaccgtttccatttatcaaaataaatggataagttcgttcctatagttttgcagtttatagaggatataaaatatattttcaacattggtgatattaattaggtctttaaatgattcaaatttgaattttataagctgtatgaattacattcctttagtgttgttgaattttgattatgatgttttttcgtgaacccgtgatcatgtcgctttgttgttctcctggctggtgatcactcagcgtcctttttttgttcttcttccaaactgatagcttattgttgttctatccatgtctattgaaaccaatacatgtgtaaaataaaatatttgtcaggaacattgaatgattcaaatttgattatgatgatgatggttgtcgtaaacccatgatcatgtcgttttgttgttctcctggccggtgatcacttagcatccttttctttgcaactggataataataacttattgttgttctattcaggtttgttaaaaccaatacatgtgcaatatttgtcaggaatattgaatgattcaaatttgagttttataagttgtaccgttgtattaattgcattccttttttgttattgacttttgattatgatgtttgtcgtgaacccgtgatcatatgtcgtgacgctggtgatcacttagcgtcgttttctctacagactgataacttattgttttgttctattcatgtgtgttgaaaccaatacttgtcaggaatattaagtgattcaaatttgaattttatattgtattaattatatccctattgcgttgttgaattttgatcctgatgtttgtcgtaaacttgggatcatgccattttgttgttcttgtggctggtgatcacttagggtcattgtctttgcaaactgataacatattgttgttctatgcatgccggttgaaacccaatacatgtttaaaaacttgtcaggagtattaatagtttcaaatttgaattttaaaaattgtactaattacattcctttagtggtgttgaattttgattatgatgtatgttgtgaacctgtgatcgcttagtgtcattttctttgcaaattgataacttattgtcgttctattcatgtctgtcaaaaccaatacatgcataatatatacttgtcaggaatgataaatgattaaaatttgaattttataagttgtattaattacactcttttagtgttgtggaattttgattatgatgtttgtcgtgaacccgtgatcgcatcattttgttgttctcctagctggcgatcacttaatgtcctattctttgcaaactgataaactattttttctgttctatgcatgtctgttgaaaccaatgcttgtgtaaaatacatgtctggaatattaaattattcaaatttgaattttataagttgtactaatcacattcctttagtgttgttgaattttgattatgatttctgtcgggttgttgttctcctggcttgtgatcatgtcgtgaactcgtgatcacttggcgtcgctttctttcaaactggtagcttattgatctgttctgtgcttgtctgttgaaaccaatacttgtgtaggatacttgtcagggaaacaagtatgattcatcgcggataattattattccttcataaccaaaaccatcattgaaagtagctgctctgttctcatacttctaaacatgggaaagagagatttttgtttttgtttttgttaccactgatgaacttatatacttgaaacttccgtgtgtgatttgagtatagaggcggtaaattcatttgaaattgttaagaatccatgtaataaattttggtttaactgttttgcttttattcctttagctgtgttgtatttgtttttactcttattagagcgacattctgtttatttgcagttgagaagtatcagtgtcatctttctgatgaataaaagcaatggtttagtgattgctttgttgcttgcaggctttgctagttgtgatggtttcggtaccatggactgcatgttttgcctgtaaactccagcaattgcttatgttagctttgctgagtagaattcccttgtagttgagtaacatcactattgagatctatggatttatcattgtaaatacaattgtgattcactcatggtctaatgattctcaccgtcgttataccaagttgtcaactgctacttcagatttatatcaaattccaccagaaattcaaggttgacatttctgtttgtttcgattttgaaaaaaaaattgttgttaaaaaatgatttgttttggaaatgattttaaagaggtaatgtatcttttttcaaagttttataggttgatatttagaattaattttaattattaaaacaatttttttaatgaaaaataattttgaaaaagtaaaatgacatatgttagtgttaaagtggtaacatccttttaatgacgggaaacattttttttattgagtcaataacgacgggattttgggaactcgattgacaagtcgattaactgtcctgttttgttggcaaaattaactgttttatttttattttcaaaagttaaattagtccactttggaatcgaacttcagactttgaggaggaacatattctcaggtttcaagtaaatatcattaaatcaattcaaatgagtttactctttttgttatttacttatgaaaggttgtattttacgagtgtaatggttgggaacttgggatcatggttattacttgcaaatttataagagatcattctattttagataattaatcatttgcattcaatctcttagttattcaaagtttaattaagttgtatattttataattataatattatgttaattttggaaataattagtgatatatttgagatgatgttattgtcaatttttttaatcaacaaatattagtatggatagtttttatcatggtgaggatgtagatcgaatttttgatccccttgtcccttcagtccttaacaaagtattatcatcatcgtcgtcgttaatttttttaacgaatagggcatggaaagacatcacgaggcggggtaatccaatggttggcaccacattccccatgcaatcatctgtgagatggacttctcaaatacagtttgagtttggatacaaatttcaggattttttgaattttctccttttttttttctcaatgttttgttggtagatgttgtatgtattgtttttcttagaacttttcagctttttgtttggggcttatcccttttactcgtaacaaaaagtacaatcatacgcaacacactaataattttgatgaataatagaaacaggggatacaagaaatcgaaacgacaaaatgcttaactaaatctaacgttagatacatcacatatctgtttttaacgaaattaaaagtagtaaatgataggagaacatccccaccactgacgttgccaggatcctgagtcagggggttcaaacttacgaactttaattaatatatataataatatatatttaaaaatttaaattgtattcaaagtacatttttttgacaaattataaagtttaatatgtatcacttaaaaattagaagatgagtattatcaatattaagtaattagtcttggctaatctatgaatgtatatttcattttcacgttgattcattttttgaagagtctcatttgattcataaatgtattgaaattgcgatttcgtatttaaatgtattttttatttgtcaatttagttcattaaattattaaaaaaataataataaatgttgggccacacaattttgccttctaaaaaatgaaagcttaaaagcaagcattagtaaaataaaagaagtaaaccttaagaacatttaaaagctataataatataaaaagctgatctactaagactataataatataacatgaggtgagaaagacacagactttgggtcgttggtgcatttaggtgcagaacaaatgtgtgagggggattcatgatagaaaaaccataggataataagtgtagttataaaagttgagggggttcacttgaaccccctggttactacctggctccgccagcccaccaccagcagccaacataattaacaatgtggttattagaggagaaatagaaatgaaagaggttgcgaatttatcttatttaagtaaatatatttttttgaggggaatttaagtaaatatagtaaatattttggtagttgcacataacaaacatatttttattttagtaaattgataattttctaacttttttagtttgttgtcaattaatttctttatttatcactacaattttcaccattaagtgtcttcttaacttattttatatgattttaccttttgcagtcagagttttacatgtgagattgtaaaaccatttataattataataatataagaactttaaaaaaaaaatatcacttatcatcctactatattaatctatcttttcatttgagttgtgcatggttattaagtaagtgaataactttgttgatttcaattataaaaatactcttattaattgtcattaataataacaataatactaatactaatatggtacatatgtgagttgagatacaataaataagggcgtattaatgaaaaatatatatttattcactaatattcaaaaatgataattaatttgacacaaacaaatattataacaaagacacttataattccttaaaaaaagacagtcataacgagacttagggagtagcatgaacttttacttgaaattagtgtgtttaaaaattgaataagattgaatccatggattcaattatatgactcaatccctataaaaaaaattgtcttcgtgttgaattttagtagactgaatgatttgatctcttaaacaattctaaaaaatatttataactataaaatgtacaaaaatgccaacctttttcatagtgactatgtaagagaaggaaataaaaaatataaatgaaacaaattcaaagagtcaatttgtcattgtcagccctactcaatctcacaagagtgctaaaattcaaagagtattttctaagagttaattaactgttaatattataaaagaaggcttaatagaattatgtttttatttcttcaaagaaacttatgtttttattatatataaaaaataattatgtttttagaatttattataaaatataaacactttgtttgtaaaatttaagcttttagtttaactcattttacaatttaagttgatacttattttttgacaaaacaatttaagttgatatttaattgttgggttacgggcttatttgtaaattaataacttggatagcaagttagtagtaacccacatacgttcgttcagtgccgcgcagtcactttgaactcaaattggtggccggagttgttcgtcgcccggtgagaaaatcattcttgtttttattttttattttttctgaagttatgcataaacctctattatgtagaataaaaaagttgctgcgttttcagaagagttttg

SEQ ID NO: 4425 - DNA, 1841 bp, Medicago truncatula
  Intron number 4 from transcript Medtr4g141220.1 (locus Med tr4g141220) derived from phytozome v7.0 (chr-ID MtChr4; po s 34823390 to 34825230 reverse strand)
ggcatacacgggcatcctttggagattcaggtgtttgcgatttcctgtcttccttcattagcatgctatttatttaactatttcttattaaggttagaaaaaaactttgctgcttattgacttattcatgacagtgcatttacatagatagattgggttaatgatactgttttctgcgattctgcaccattttggcaagaaaaaggaacaaatttttcctttgctagtttgaggagcagcatttctgttctttattcttagtactgactatgctttgtcttttatttttgttaacggagttggtatttggtatttcttattcatttgaaattgaaagtgacttaactatatctttttatgcatgaaaggcgaaacttcacattaacctttatgccctaggaatttgaatggattaaagatgaggttggagtgccggtgaattcatattagtagacagtagcaacagtcaattctgaaattgattgtattgctgttggataagacttgtggtaaataaactaattgcaatataaggttttataacatattccaaatccggccccatcagtatgatagattttcgaaatttagaatactattgtgtttatacaattacacaactgaattgttgaaactacaaaaaggacacatctctttatatagattctggctggtatggtacattatcaaaagcttctcatggcttttactgttttgaagtgaaggtccctgatgtcacaaggtccccaaatctgtgtaatttcacctttgtaaattccaacagttaatggtaaaaaaaagtgaagactaagacaccaaaactttccaccttcctcatatatgtcttactattccttcccaactgccttggctaagccatataaatactttcatgccaagttttttatattttgttttcactttctgtgaaatggggaatcacactgtaaaattgtgtagaaggtgtgaatgattggatttggattgataacaaattataaaaacctactgtcacgcacatctcagacgttagattcgtttttattttttgaaagcacaaacactgagcacaggatgcactcagcacgcgaaagagcagatacaatggggagagcctcaaaaggactctagccaaccaagacacactacaaaacaagaacaaaaacaactgcccttatcaaagagcaaaaccaacacaaaaggcaacagggaaaaagaaacaaactgccaaaaaaaaacacaagcacacccagccccgtgccgttagattaatttaatgttcatcaaacagccacatccctttctttatattgaagcagcacatttagaaacaacacttctctttactctccccaacaccacataccttcatcaccttcttggctatggaaatatgtcctctcttcatcattttgaggacctccactactaccatctcaacgaaaacttgagtgtgatgcagcctctgcagccccaacccaaattctgtgattttgcagctcatctatcagtgtatcagtaatgaagctgtgattttttagtagttgcagagaatccaaatcctgaatggttctatcttgcctaaaaaaaactttgctaataactaaaaaaattaaaaaatttgtactatgttttgaaattttgcttgcatgtatcacttttgtcaaataaaattattgtttttattgaaaacattgtgattctgagaggcttagaagagttacaattaaagatggaatcagcgatcaaataaacttatctaatgtgtattttcttttgctttttgttttatttttctgtttctaggcactgttttattctgccttacgttgtgcacgtga

SEQ ID NO: 4426 - DNA, 3369 bp, Medicago truncatula
  Intron number 1 from transcript Medtr7g021090.1 (locus Med tr7g021090) derived from phytozome v7.0 (chr-ID MtChr7; po s 5051885 to 5055253)
accgtaaagggtctcaccctttttgtttttgttatgtcactaaaagctcctttttagccctaatcaccttctagttggtcatatctaacccaattaaccaccattgattttctcataattcttcataacaaaaagttacgtcgattttaagaaaacaatggtcaattttcaatttcattctttttatttgacagaagctaaaaaaataattttaaaatcatattttgagatttattaagctaattgaaattaatttttaaagaaaaatatttattttctataaaggaatttattattattattcaatctattttttgtggtgtttattattgctcaatctaatgttatactttgctgtcaacttgtagtggcaattttgcatgtttgtttttgaacttttttttttttgtatatttattcaaagtgatccttattgatggacttcttctgaacattcaactgcatgctttttgaataatgcaacttttcaaaatgttgtcaaaaagtttacttttacagtgactcttattacaagttttggaagaagtaactctaaaggtattagtttttaaagagtggcatggcagcaatataccaaattcaattagcctatatataatattaattaaatatactattattttattttcacattgcccatcatcctttctatgattaattaaatataaatatttatgctaggcagatcatattgtaatgaatctctgatcagtgatcatgcaaaatggcttatacatagttgttgtttaaagaaaagtgcattgaaatactaaaaagttcaaattaaataagaaagaatgaaagagatcaaacaaagtgcatttttttgagttgtttgttgttttgtgtgtgtttttgctacactaggaattggaagaaagacatggagaagaatataactaatttaagtgggagggcatgatgacctacctgtcaagaatatgtaacatagaaatatagaaagacaaataggtatactataataaaaggacattgtcattaaattgattataagaggcaattataaagaaataataaatagaatattatatgactttttttatttggcatgcatgatgatgatggtgtctcacacacgacccaagaatcgaaacactgcgacgtgggcttatattgtaagacattcttgcttaagccatgtgcttcccaccctccttgcatctatttgtacggtatacctctttgtgttatgtttatgggaagtgatcttgaccttaatcagaagagttggtgtggttgatgatggttcatctttagtgcgggatgatgcatttagaaagacattctaatggttaagtcagtgaaatctcaaaatattttgaggtttttcttgaaatgagaatgtatgtttgattggtcaatttaaagattttcatctagccgcatgagggttttgatggttacacccttatgacgcgagggctagatgagtatttaattatttgaatgactcagatcgactttcagtgctcttcgccgatataggtgatcaacaattgcatttaggtgacttattggactttagctttgtgaatggagttcatatttgaggataggaatttgacacaaccttggaacattagcctcaagttgttgtctcgttattcgaggcaaggacttaaggttcacaatgttctaaagtcaacgactcagttcaaaaagttgtttttccaaacccgtgtattgggtgatgatcatgtttgggtgtaacgaggttccacttttgtgtttactcatcctagtggaatgtcctccaagtgaggaggtcgtgaattcctgagacacgtcttttcgtttcaaagaaagctttagattttatgcgtaatgattgtgccaattgatcatgcttcttgggctggccttttatttggtgtgtggggctactcgccttgagagcattaaaaggtgacaagacgtttgagtgggtcactcgttcagttttttaagagataatttagttatttattgtgttgttggctgtgagtctttggatcatgagaaggggatcgttcatgtcgctctctattctaattttccccttgtataaatattacttttcccatttaggtttgtttttgttgtcttcttctctttcaagggtgcttattgctatttatgttgatttttcttgatttggaagtataatttctcaggcttcctgcaatttctttctttgattacttcaaccattctttgattcttaagctaaaagtcttccattttcttttgttttcattgtcttttggtggatgagcttttgacttctagcgacgatagtgctctcagcctttcaaactctaattgggtcttccttggagccctaaaggagtggtcgtcccaaatgtcattgaaggtagtttgagaataaccaaaacaaatgtaggtaagatgaaaaattgcaatataagacaaaagaatgaatagaagagagggtgagagggaaagatataaagaacgtaaaagaataaggaaacgatggtagaacaacaagagaagaataaagagacaaaaatggcttgagagagaaataacgggagaaggaagaagaaacaacttattggaatggaggctaaggtttcaatttgggagaaagaagaagaaactaggctttatgtataatatccattgaggtaacatataataacctcctcaaaatctctctagggtgtgctaataatttattaaattgtgatgattgaaaattttagagttttagttcatgagtttgatttgattatcagctgttgtgagatgaattttgttgcatgcaaaaaaatgtacggtgaagtttagcatgggaaagctactatatgcatgttgatttttaatttattttgatgggtatgagttattttgtaatttcactaattattattgggttgaacttgaagtctttctaagggtatggaatatttacacgtttaaaaaggaaagataggaaattttaaagatgaactagaaatcctgaaaattactaaataaaacagatccaatgtgtgatttttcataatttattggtatgagatatttagacgagacaaattgcatggtgttcatatttaatcaacttcaataaaatttagaaagttttcatatttcatatgagtgtccttttatagtttctattaatcaacttgaatgtacaatttttcctgaattaattagtttaaattttgatatgagaccaattgcattttttttttttgggctgcctatcccaagtaaaatctacataattgtttgacttaatttcatatatcgttcatgactttaattgatagatgttatgcagaaaattctgatttaaaactttttaagactcttcaa

SEQ ID NO: 4427 - DNA, 2745 bp, Medicago truncatula
  Intron number 1 from transcript Medtr5g025470.1 (locus Med tr5g025470) derived from phytozome v7.0 (chr-ID MtChr5; po s 10180075 to 10182819 reverse strand)
atataagactcgtgtccaattgtccagaaaagaaggtatttgtttgattgaacctaaactattttttatggctacatgatgggagttgtggagatctcagtgtcacatatatacatgcttacgcatatttagatcacaactttcttcaataatgggccaactcatacggattgcagcacctgcattgcaatacatgattttcttttctctttttaactgacattaattatattatctaaccactgcattaatattaatattaatcatatgttgtaataaaagatgatatcattatttaacaatgatgatcatattagactaacaactttatgaggactttttgcgatcactaactgactagttgagcttagttattaatgctttattagcatttgcatgttgtgttgtaagaggggagaagacaagtagttggttcaaaagtagacattactgaaaggtgacaaagaagaaaatgcattttggttgttatgatggaagtctttagttgagttgtacttagaattaatgctcaagcttgaaagcttccaagagtaattattactagtaaatagggaagggacaagtggaatacataatttaccatactaaagtcttgtttacttggtgaattgggcagtgcttgggaccatgtaagatttagataccatgcacatagtttagatcatgaattgacaaagggtggtatatacgcatcatagcttgaattttgatttatgagtgatactagtaaattattgggtttttttccttctcacaaatgtccttaggacacttgctaagtatttaaaagaggaaacaattgatgaatattatataaaataaatagttttttaaagttttaatgtgtttaatacacaacttttaagataaaaatttctttttaaatttcttaacaagtgtttttatggtaagggcactttttagtatatctattttttataagtattggcttttaagcttcttttttttactttctattttctctattttggtaagttttcccaaatctagcagttgagttgaacttctttctaacaattttaataaagaaattcaagagcatagaaaggaaatttgtagtgataaaaattaaatttaatcgtttagacccaattcttgcattcacacggcccgttattcatcactattatactttttttttacttcgatatattcaaatcatcaatatttatataaaaatcaaattattcatataatcaacatgcaacgtatattaaatcattgaattttaattcatggttgagaatttttctacggtcactcattcgccaacgtatattaaatctagcaaaatgaactagattttgacgacatgacaaattaatttttgaatgatagctaaaagaggtgtctaagtttaataatgttcaccaatacttttaaatataattactttaattccaagtaagaaataaaattacatataatattagaaagcaaaaagaaacaaaattgtacttggtctttttgtgaatatggtgatatgataatgtgttttgtactacacatgtatagcaatagttatagggcccatgtgttagattccaaatcaggacctgtactgccactgataaatccactcacaagaaagtgggaatgatgtggaatatggtaatcacataaaaagtgcaacaggcaaaatcccaggtgccactgcaagattttcagacaccacaacccacgccttgtttcttccctttttatctataattcatatatttccttttctatgtatataaattatttcactttctgctgagttgtaagtgtgagataatttcaattctaaccccccccaccccaactaactcacatcaaactcaattaggtagaatactatagccataataattgatgaaatgatgtataatattcaaggatcatgttgatgtgatattattgtatatatgtacattatttagatgtcacaatatactagtaataaaaaaaattgaaccaatgtacatcgatctatgatttgtgttgaaagtggagaggaacatgataactagaatgattgcgtggcttgaatatgaatatatgatataatataattggtatatatgaatccactactgcagcctctctaagcaatatgctactagacctagttgatgatttatgcttagatataaagcatgcgtgcatatataattataattatatatatagtacaattttgagggtaatatccctacatcttcagtcattatcacgtaattaagcactgagccgcattcacacattaactaatcttttgtcctgatatcactctcctgtcccaatattcatgcatgaattgaactcacactacagacaaaataactacagcagtcaattttagtaggagctaaaattgttgtaggatatatgtccaatgtatatattcaagagcattttttggagtgatgatgtaactaaatggtttcttgaaggagatagaaacataacatatttcaacaaatatactaaaatgagacatgtatccaacatatataattacaagaattaatcaatgggacagttacttagatgaaatagatgatattggaggtcatgttattctttttttataaatatcttttgcctcatgcaataatagtttcttgttactttttcctcaagcaataaccgggatcctctttcactactttttttggtattgcagcagaagtagtcttaagtagacaactattgttaccc

SEQ ID NO: 4428 - DNA, 1179 bp, Medicago truncatula
  Intron number 1 from transcript Medtr5g016260.1 (locus Med tr5g016260) derived from phytozome v7.0 (chr-ID MtChr5; po s 5666026 to 5667204 reverse strand)
ctttgggctggtgttgtcattactgctttagattggtaaatttcatttactttagatggtttttagtttttttacaaatttcagttttggtaattttcatttaaagtaggtttaaatatgattttagtctctgcaattatagcattatctggttttagtagtttctttttttgtttggatcatgaccctgcaaacttaaaaacctttatttttagtctttgatgtcagcttattgggccacttatgacattattttgaagtatcttctttgattaaggtttaaaatagagataaattatcttattattgttttggaattggattttcttgatattattacagtgggtcatagtgttttttagttgtactatggatgaggatgctgcaataaatagagtacagatgaagaatatgattgcagaattacttcaaagtgtgtgtagagacactaagttttaggttccttatgcccctactaaacttgatgtaagaggagggtaactgtgaatgtcttttgagatttagagtttcttgttatggattgcacatcccctatcaaaacatatggtacagtgatagtttgtactttgtagaatagtactacctaacttcaatttgtgcataagagaagagaagacaagaaatggtttagagtttttactttgacagagtttagataagaaacagatgtgttttgctgaccttttgaatgtagagttgttctatttatagagaaactcatattacttgatgaagggaaataataaccgataaaaagggacattcttttatgaattgattcaattaaaaagatgcattgattaatgaataaatacattcaattttgaaagaacatgccatattgatttgaatttcaaatccatgaagaaacgtaccttttagagtgctttcttagattcattcctttggaaatctctcgcatagatgtcatgtaaacttgttgggattgggaagaaaacatagacaaaaattattatgttgaataccagaaatattgatgaatccatgatcaattgtcttgctttttcgttttggcatttaagaagctattggaagaagcaaatgtacttcttgaacaatgtatattattcaaaattaaacatttaacttttatgtggttgccttgatccagtttcatttttctctttcttgagaact

SEQ ID NO: 4429 - DNA, 2529 bp, Medicago truncatula
  Intron number 1 from transcript Medtr5g044690.1 (locus Med tr5g044690) derived from phytozome v7.0 (chr-ID MtChr5; po s 18576119 to 18578647 reverse strand)
gacgatctggaggatcattagtttccactggtattattttaattttttctttgtttaaatttttcatgaagtttttattttatattttttatattgtttttgtttttattgagaagacgtacttttaacacccgtggcttgtttgaatgattgtttgtcgagtcgttcttttgtctgagttggacacatttttccatttcaattgtacgactttttatgtcaaatcaaatcccaatggaggaatgttatcttggttttggatggattgaaggtacatataaaaacattgtaggatctcgattgttaatttgatataagaattttgtgagaatatgattaatttcacacaattaacatatttaatttgttggttcaaatcaaacactcaggatatgtgacaaagttagtacatatctaatgtaaatccgatagaggatatgtctagattcgatatcgaacacatcctaacaaaaacaacccatcactcaattcctaccacactcgtttaaagggtgagcctcagggcggttggggaagcaccttctctttctgggccattttttttctttattttttatttcgttttttctttatttttgagggttttgatttggctccccctcttgtatacatatatattttttttcctttttttaataatatattatgagtaggcagcataggatggaggtagtccttcacacacaccttgatgtctcacctatctcttgacctataaaaaaaatccaacacatcccattacctattttgttcttacttgtttctactcatcaatttttttcttattagttttcattttaaggttctagttttaaagttatagtgggcattagaaatgtttgctaaatatttaattttaatgttggtactttgtttggaattgaaaaattgaggtattgttgtgcaggggattgttttttatttgacgttgttgaaaatttatcatttgataatatgatttagctaggtagcaagatactaaacggtaaactcatgttgaaggctgaaaacttattaacaaaaataagattgaatttattggttttaggttttgaagtcggcaaacaatgatttgtaaaagagatttttttttagttatttttgactgaaaatctcttacttttgttttttatttaataagaggtctagaaaatctacaaacttttttataactaatattatttttgagtgtttgtaaaatgggtatcttttacaagactaatctctcaaattgggtagtatagtaattgttaaataatatttttttgacccactttagtggtcaatctcgattttacattttcttttggtttcttaactaatattttttgaccacttttattgggatcactcaatgttgattttacattttcttttggcctattacggtggtgaaatttatgagtttttttttagaatactatgaagtctttaattataatttaatataaatttttaaatataaagataatattttaaaatcaaaatattttcataaaattgaaattttttggcgttattagaagaatagcttaccgactttattgataattaatctccgttttgaccatatttaatagcctcatttaatattgattttccaattgatttcggttttttttaccgtggaattttaggatattaaaatacttttcttttatgcgcaaaaaaacaaaattggaatccaaaatttttaattatcaagaatataataaataaaattaatttaaagataaaagtttgaaatagaaaataaaatttaaaatctaaatattttattttcgttttgcttttagtgtctcgggaaagtaaagtctccccacgttactttttgatcggtttttagtttcaaatagtgtatttatttaattcaaagggaaaataaaattctgttgatttgtagttattagttagaaagtatatacacaaaaaactaatgcattaaacagaagattaaaatattttgaaatataaatatgaaataacatatgataatttatgttattaatatttaattctcgtttggattgctatgaaatttttagatcataacaaataaataattaaaaatatgtaaagtatctgtgagtttttgacataaattggtgtgaagtgtcgatatgtttccataccttcaaggaggttaagttttaaaatattaaggttttgtaacaaataaaaaaaaatgattttctcatattatttacttttatatctcattttacatatcttgtaggagttgattattttgcattaacagtaaacataattttatatttacatataattaatcttaatttatcatgcatacatttctaaaaaatgttacaatgcctattatttacacatagtctttttttagaggatttattcatagtcattatgccttgaaactacaaattcatatatacttatataggaaaatacttcatattttaaaatgatattttttaggtatgtaatttatctatttcttatgcttgaaattgaaacttttatttgttacag

SEQ ID NO: 4430 - DNA, 1385 bp, Medicago truncatula
  Intron number 5 from transcript Medtr8g009310.1 (locus Med tr8g009310) derived from phytozome v7.0 (chr-ID MtChr8; po s 1313990 to 1315374)
ttactgatttggttggttttgcaatgactttctacaattatactgcagtatattttttatcttgttatttttatgctgaattttctggagatattatatgaaaaccaccatgtgcctttagctcagcataaactttaaccagagttggttcatgtcttcttgacatagtatcaaagcttctatcattgtgtggtctgtagttcaatccttgccatccccaaccttttaatttaaccaaaagtggaattacggcataagttagactgtgcattatctatgcttcaagccaacgggttgttacgttcgagggggattgttagaggaatgatagaaaagatcattcatttgcatttacctaacaatataagcttttaggagtgatagaaaagatcttttttgtcttgtctaaaaatgtgctatgcattttttatattttaaatgatattttaaaccttattaaagagctaatagtcgagaaagggtagttaaaacttctggttttctatggatggtctacattattttaagagatttcatggaaaacatatgaacctcaatatgcatataagttgtgtgaaacaattgttcagagacaattaacatttttaattgttcgtttctgttttattgggaacaagatgactgaaaagtggaaaggagggcaggagcttaagagctctttcatatagttttgcaaggtctcactcttgtaacatggcttattgatagagatatcagtgcttaagggaaagaaatgggcctgacttttgatcctttgagttatgggccactgtatctggattctggaaaggttattctagcaagaggagcgaatcatgttgaggggggtataagggctggtagttgtgtatattagtggataaagagctttcagagaaggtgcttatcaattacttcctccatccctcttagtataaggccctttgaccaatttcacatatattaagaaaagtttatacgtgtaattgtgtatttaattcgactcttcttattccaagataagttagtagtattaattagggttatgtttggcaaaaaataataaatgcacccaataatttgtataagggcttatatttctggacaagagttttttcttcaaaaggtgcttataattagggacgaaaggagtaagaaagggaaaatttggaaagaatgcttggttgtgggatattttcatttccccccttcttgattgctcagcggtataatttatagtctttgttttttatgttcagtaaaggttacatttattaatagttgtaattttgctccaagtcttgtaataagttttaatatgcctgttttccgatttataagtgttaacttttaattctgcaggaagttcggattccattacaaat

SEQ ID NO: 4431 - DNA, 3919 bp, Medicago truncatula
  Intron number 1 from transcript Medtr1g122000.1 (locus Med tr1g122000) derived from phytozome v7.0 (chr-ID MtChr1; po s 26713273 to 26717191)
tgttcgtctctcggagaatcacatttgttcccttggtttgtgttgcttttcattttgtgctacattctattttatttttgatctaagcattctttatgttggagatcttcaaactagagaaagatttgacctaaaccaaagttaaaattaatttttttcatgaaatttctctatgtcacattttattgtagaaataaatgtttacaataggggcgcaactatgagtatctatggagtagctttgattaaccaaaaaatatttttcgcgaaaattagtagaaataagatagtcaagagattactacttttttaatgatttatttcgtctaacaattttggtatctttagaaactataaataatatttgtgatcgataaaaattataaagacaacactcaaaaataaaatagacattaaaaagttgagtaactcccattggtggtggttctcaagaaagaaaacattattatcccaacagggtgaaaaagatcctttgaaatttgaaattgtatgactcagcttaggtatttttggcaagaggcacgtttgacttttttgacgattaggcttgactagaattgcttaacttcttctatggcactaacagcatgttacacgtcccaaattctttttgcacaatttcaaagtaaaaaaagcacatgttgtaaatcaacacatgacaattatgcatgaaagagatttctttcaattcaaatgtgtctatttgtagaacatcgtccctataataatagtggctactatatctgcatttgaatagtgcggcatgcaaagttgggaacggattctatgtacattaagaatttgcataccatatatatgaagggaacaaaattaactgttacttcatcaggtttttgaattaagtctattactgttaattgtggtaagtgtagaccaaaccggtcattttgaactatatgaatatatatatatatattaaccatgattgaaagctactaattaaggatcatttcccaatattacagtctagtttatgggctgggggagatgaaccagcatatacatgaacgtatatcaaacacattatgtacgttttttattgactttgaattaatgaacagtgcctattctcatgaacaagctattatgctagaactatatagtagtaagtcttatgcatacatatgtcacattaatatggttggatgagtttatatgttttcttaattgactttgaagtattgatgttccacagtttattatcatagccgaagaatcgagagtttcttgaatatttcctttatctaaaacaggactaaagtctagaatcaattaggaaataaatgtcacattggagtgattttatttgattaattatctatttgtgggggcaaattgttttgaaaaattttacatagtaatcaaaagggaaaaaaatgtttggtgcaaatgcatagaagaggggacatattacatctatttgtggacaggtaaattgttgaaaatcaaatgtgtcttataagttcgttcattgcgtatgccttaagctattgtgttcttgtatgcatggctgtttcgtagctagctgttgggaaattgtgaatgtttatggatcacacgcaattacatgtgccattgcatgcattctttgcaaaatattggtaacatatatttgcacatggaatgcatttgaattgtgatgtcacaaaatatggcaaatatagaaatattaggggtaatgctttgaatattgtttttcttaataacaatttaatattgttacttgttattatctataaggagagaatagaaataaggttaacacaatagtgctcatggagtttgattgagtatgtctcatcatccaatcatttaatgatatgtcatattttcacgctaatttattttaaaataaatttaaatatgaaataaatttagtctacgagatactattactcaaacaaactccaagaatttacctaaaaataaaccaataaaaaatgacatatcctttgttaaactttaatttagtttgtggcttggttaggattctcaacagctttgcatagctcttttcagcatcattactatcagtttggagggttgtgtggctcttcgaaaaggtcaattgaatccatgaacattatttgaatgtcagttgtctgggcaatctgaaagagcgtaataacagagtttttcagagaaaagaagagtagattcaagcaaattagcgaaagggtgaagcttcagtccttttggtggttgaaatcgaaatacactactttcgattttgattatcttgattatcaattgtggcggcagagtcttgtagcttgcttaatgtctgtattttagcttgtttcttctgttttttgtttctttttctctgtttttcttcggatggccgttgtggtgattgtacagattgttgaactttgttttgtctaggcccttttgcatcccttgtgtgagagtgtctgactgtgttttctaatatatttttggctttttcaaaaaaaaaaaactttaatttagtttttttttaacaaactaaaatgagatatattataaataaagttaatttagttaaactttaatttagttatctttggtacattgttagactttaatttaatcagactgtatatcactaatgcatattaattcaaacttttgtacttcattttatttcaagaaacaagtacatattttttaaagaattctccttgaataatatctacgaacacaataactattgaactatccgtttaccacttgagatcattgattttgaaagtatacttcaagatcatctttaaaaaaaacattgctatatgtactctacataatattattattttttaatctctcgatctaggtacaaatattataagccagataaaattacaagttcttggtcccctttgctgatgtagtagatgtctctgtctttcattacaaaaaaaaatatgtctgtcttttagcttaatttttccttgttctatccttgccctatgttttggcatctaacttacaagaggaagaagaaagataatttcatcaattcaagttttacacggtttcaatatttcatgattttaaagactttgaggatccagctctttatgtttgttgatcatatatacaagtcatctttttttgtggatagaatccacatgctacttttagagatttgattaacggaaatatgaaaagacaaccaaccaaatacatataatcgaattgtaaaaaaaaagttaaatatctttttcgtctctataaatattctaacattttgtcttagtcattctaaaatttttctttgacttttagtcctttaaaagtttttcggaagtctttttagccactaattttcaatcaactcatgtataattttgaatgattttctgcaggatttttttttttttttttacagatagcaagaatgtttataatattataagaatttcataaaaaattttgaattttttaacaaaacataagttaaatatgaatttcatattttttgcgtttaaaaattcatatttaatttatgtttgtataaaaaaaattattttttagagatattcttctaatattctaaacatttatgcaaaatccctttcaaaaacttaaaaggtacacatgacctgacttaaagtagggaccaaaagtgtgcacaaaaaacatttgaaggactaaaagtaaaaaaaaaaattagagggattcaaacgaaaagttaaaatatttacaaggtccctccataagtcaatggtccatctttatcatgatagcttacacacatggttgaaagacttcaattataatttttgtttgattaatctcattattttttggaagatttggtgctctcgcaacatatataattttaaaaatatcaggcattgaggaaatcggtgctcgagtattctccctt

SEQ ID NO: 4432 - DNA, 2413 bp, Medicago truncatula
  Intron number 2 from transcript Medtr1g074170.1 (locus Med tr1g074170) derived from phytozome v7.0 (chr-ID MtChr1; po s 14965321 to 14967733 reverse strand)
cttgcttgtagctgcggtggttttgacgcgccgtggtattgttatttaactgttattattagagtttaatggtgatgcaatgacagtgtaaaatagttttacactatcatacaactaagaaactgccaatctgctatgttatacaactaattttgaaatagttttgtgatatggtggagtattaaagtttattggatgtcagtgtaaaactattttacaccgttggggcatcttctgttttgatgatttacgggtgaagttatgaaaattagtttagttatggttgggaaattgtggatacttaaggaaagattaggttcatgtctctaaagcatgtgtatttgtaaaatgttgaagtaccgtactgggtacatacttggtaccggtacttattctgtcatgagagaaatttgtcgttttcttatatatatatatattcttaacatttgtgtatttgtgatgttttgttgtgaattgaacaatttacttcttcatgttatatttaattagaaaagatcgtgttttattgacctacctgtccctattgtttcgtactcgtacccatgcatccttggttgatgttattggttgtaactgcgtttagagagagtttaactttcctcttgtgataacctccgagtattctcatgataacctccgagtaaagattttggaaaggttattgtgacattggctccaatgtaactgtggttagagggagtttaactttcctcttgcgattctgtggttatatttttatgattttcaggtgaaattgtggaagttagttaagttagggtttgtggatgaatgaggaaagattctgttgatgtagctgcagttgcgtttagagagagcttaactgtcttacagtgattcgttgtatcgtatgatgatttaagggtgaattatggaatttagttaagtttaagttgcaatgtaattgaagttggatagagctttacattgtgtctgagtactttatagtttacattgtgtctgtcttacagcctcttgggtttgtgaaaactattggttgcttaccattttccatacacactcaaatcaacagttgacatgtgtcttctgtcattctctgcgaatgcttttacaaatgtcaagtgtgttaatggttggtttgaattcagatggtaaattgtgacttcttaggagttgctcttgttcttcaagttagtttcaattgttctcttctcttgtatttgattccaaatgtcatgtgaaatacctcattttattcttgtagttaaggtatttgagttcgaccttcatccatctacttgtagaaacacattccccgcataaagttatctagtgatatactattgtttattacccttagtatgttctaaaataaaaataaataaaaaaggaagtaaaaatccactacatttattgaggaaaattatagtttatagtttattatgatatatttactgattgtatgaactataatcttttgattactattattagatgagcatttctatgattttatttatattagttttttgctaacttggtctcattctacttaaaatccaatatttgttagacttaaacattatcgggtttctgcaggtttataggcagtttcaggtctaaaaaattgacccaataaaaattacgtgcaaggtcagagactagcaaaacctgatctaaaccatctcatggacatccctactttagactgttgagctttatatggataaattgtcatgattgcaccgatttgttgcgataaacttttgttttgagaatttgagttgggcaaccctaaaccttacaaaaccggtttgtaaggcgagtgctccccaagctttataacactacataggccatatctctaggaaatgtgggactaaatcaaccccttcacacccaacacggtgaaggtgttggaggatgcaatgaacccaacccaaaatgccgcaattaggcggaatttccaacacacccgctcacgctcgggtaatgagcctgaagtgttgacaatgcgggaagcccgacaacagatctacgataggctctgatatcatcttaggtttttatattgggcctaactcatccttacaaaattggcttgtaaggtgagcagtgccactctctacaaactataatcaggccttatcttttatcaatgtgggacttggtttcttcccaagaactttcatccaagattttcctgaagtgacattactttgaaacacatttttctttatcctgagaaatgaattaacaaatgcaaattttgtgacttcttggtttacttgtactttatattataaattgtctacctttcatgtctagaaatactgtatgtaatgagaggaaataaataatttgatataattatgcaggataagaagtaaaaagtacctgggcactccatttc

SEQ ID NO: 4433 - DNA, 1189 bp, Medicago truncatula
  Intron number 1 from transcript Medtr1g100430.1 (locus Med tr1g100430) derived from phytozome v7.0 (chr-ID MtChr1; po s 20843648 to 20844836 reverse strand)
caaacacttaaacctgggctgttgtcttcatcaaggtcaagttctttacatattttgtttccattacatgcaacaacaacaatacaaatatgaaattggatgtgattttgttttatttctagagatgtaaatttttttttgtagatgaatcttttttagttccgatgctactgataaaaaagtctgttttttcaatgaatctttgatagaacagatttttttatttttacagatgaataaaaattttatttgcaaatcaaaagaatttttttttttaactttcaatattcactttctgttattacttgttatgatttaacaaaaatttcacttagattttcatgtaatatgactcaaataatattcatttctttctaaaaaaaattcactttatgctattactttacttgttgtggtttaactaaaaacatagttttttttttatttacaaagcccaaattattatgcataaaaaaataaaaccaaactgatactaaaccatattctcaattctctcactctcagaatcagctgctcatccctctatctcttatttgcttttttgtataactaacaaatatattttgtatatttgcttttttgttgttgatataattttaaaattgtgttaggactgtttttgttaaatatacatgatatgaaggtcaacaacaaatgaaataattaatgatattaggaaaatgaattcttatacctgccgtgttcttgttgtcaaagagagaagaggaaaaggaaaatgagagaggagagacagttgagagaatgagagagagattttttttttttttgaaagagagagaatgagagagtattaaattatgaaagagtagtgaatgacaatataagagtatttgaaatttgaaattgaaaatttgcctccaattgattgtagatctgacattagattatatcttttttgtacaaaagaaaacttttttcgttttccgtgtcaaccaaaatcggatttatttagttggcatcaaatggaaatgactttatgaagagcaaatgaactaaactattagttatttgtagttacatgacatcatcttagttaattgtggtaatttggttgaataaagtaagttaaagacagattttacccttactttggtgatttgtcaattaaccaggctggggcattaataggatttccacaacatcttct

SEQ ID NO: 4434 - DNA, 5615 bp, Medicago truncatula
  Intron number 1 from transcript Medtr6g046950.1 (locus Med tr6g046950) derived from phytozome v7.0 (chr-ID MtChr6; po s 10167147 to 10172761 reverse strand)
taagcttgttctctaacaaacaatttgagtttgtatgaatgaatcatccttaacattatccatggcaagatattattttcaactttgttacaacctaacctataatgctttcgtgatatgatttttctatctttgtcaattaaatctaatacttcctttatttggttcgaaagtaagggtatgtttggacggaggcttttggaggagtttatttttcttttctaaattaagaaagctatacaaagtttttagaattgaatttagtgagaccgaatgttacatgatcatgtattatgttattctttcaaaaacaattaaaatctcaatcatataccaaaatatagacttagcccttcaaaaccctttatacaaggatacccaaatctcaaatacttgaatcgagaatgttgcatgaagaagttagaacaatggtttattgaaacaacttgattttaatgaggcaaaggcgaacaaatgaatgtatgcagcagacctaataaggtgcatttcagaaagctgactaatgagtaacacataattcagtcaagtaattcggttctaggcttaatgttacttttaaggaattagtttcctttacatttacatttgttatatatatcctgcatttagaattattttcatttggctaaaatatacttttggtccctgcaaatgtagtgagtttgggttttggtccctgataatatttttttttaaaatcgatcccagcaaaaatttttgttttttaaaaaagtccctggacccactttcttgctgatttggcacatttttgcttaggtggtagctgatgactgtaccaacttgaacatgtggcgcacacatggaatttaatttattttaaacattttataaatccttttaataaaattaaaattagtttttcaaaactaaaaataaatttaattaaaataaatatatagaagaattagaatcaacatattcattatctctacaaaaaagcagtgcaaacttggaaccagaaaagcaatttattcatctttcttcagctgcattcatcattggttcttcactaggttaccccagaatccatcaaatccccacataaatcacctccgatctcgtcattaaccaccatcgctctctatattcctccggccacatttgttttatcactcctcgaaagatgaacgattgagggattgaaatggatggtcgattcaaacgatgaacggcgaagaagaagatgaagaatgatggagggatggagattaatgaagaagaagaagggggaaattggaaaccctaagattttcccctttccaccatctgggttcgggtttcgcttgccggtgtagcttgttccgattctcgtcgcagccgtcttctttgtcgtctatttatacagctttgattcattaacagtccgttgcaaatcgtaatatccggagtttgattcatatctaattttgatgattaatgacagatctgattcatatttgaaacacaacttagccttaccaccatcaccactgtaaatcggtttgatgaatgaaggattggaatagtatggtgaaggtttgggaatccaaagtgatttgtgttttatgagtcaattggtttgttgctttaatttattttatggctttgtcgtgattttggtgatgaagatggatttgaatgaatgatttttgttgagcaattttttcttgggtttgatatgcagctggctggaaatttatgagttttattcaagattacattgctttactcgtacacgtattgttatcatggtttttgggtgccaagccattaattggacttgaaccttttgaccgttgatatctctcttttttcttgggaagggtaaaagaaaaaaacccttgattttccgaattcgggggtcgttttcgctacgggaaggtgttaggcacccggagcgattatggtattccataagaaccgttctcctaagcttatttctacgctttacttttagagactatttgtaaaaaaagaaggtgtgattagtgaagaatgggggtgagaagaagtagaatttgattttatttcggcttggaggggttaaagtcccttgcctacgtaccgttttacgggatcaaaaccggcgtagttcttgctaaaaagacttgttgttttttgttttaattgcttgattttaaattttgaaaatgattttgaagaaagggattgagaggcttcatgagcattagaatatgaaaaagtggcggtttgtttagtgatttcgcaaaaaggtctaaatgattagatttatttgagaattttattaagaaaataaaaggggaaaaattgttggagttttgactccatttttatgaaaaatatttgaagcgaatttgtttgcatattttttggaaaaaaaactggattttctctaagtgtttaaacctaagcattcatctaaccatgcaatcctagccatacatccacacatgcaatcctaggcatacatctagggtgagtgtgtgcgtgccggtgcgccatagtgtccatagtccatattacaaaaattgcctaaatacattctatgacctctttgccaagctacaaactaatgataacaaattacatcatcgaatgaattaaaatttgcaaaaataaatgctaggctaaagaaagtggaggagatagtgaaatgctatgaaatgtatggcacatgaaatgaaatggttagtaatcataaaacacaaaatagtaggaaataaacaaaaagaaattgcataggaatggcaaaaagaaagtaataaagtggtaaaaaacctaaaaaatttgatatgatacctatatgtgcttgtgacccataattctcacatcatggcaattttgaaagagattttgtttcaagccatgacatgaaatcaacagagacacatacaagcaaagtatcacaccaaattcatagagaaatttgacactttattccttaagacaaacacttgttgcttgcaaaacaagaaatttacaaaatcatatccaaaaaacagcaaaaaggacacatgaccagaggcattttcatcacaatattggatatctttcatccatgtcacatatcaaagtgtcaagaacaaaaaaacataaccaaaagaataccaaaaatgtaaaaacacatgggaattaattcatgccattttaccattttttttacatgcaaaacaccataaaaataccagaaatatatcaagaaacacctaggatttttaggaatttttgtaaaaaaaatgtgagcaagaaacaggttcagatagcaagaaaaaaacggtgcaaatagcaagaaaaaacaaaaacgcaggaaaaaataaagaacaaagcccaagcccaaaactacaggatccggatgcacagggagcgttggattgatccagggagggaaaccctagatccaacgctcaggattgaagggattggaccggtcttgaaccggtccggttcagttgcctataaaaacacactagcaccggttttttcatttttcactcccctttctctctctacactcagagcttctctctcttctctcttctctcttctctcacctcgccggattctgtcatggcacgccggagaggatgaagaactggccggaaccttcataggtccgccggaaacttcatcttctccggtgaagatctagggttccgccatgaaacttttcagaaacttatgatttttacatcttttgattcgtcctttaaccctaaacacgaatccagcaaagattttctcaaacacagcttgaaacgacgtagatcggaaaatcttcgtacggttttgaaactaatttttttgatctttttttttgaaagaaaacgtttatatctttaaggatctacatcgtttcgtcgtttatcacttctctggtgcttgttcttgctttcaaaacttggatccttatggatctaggttttggtgtttacggtttggttttagtttttaattctggaaacttttggattctgtttgttcacgtgattttacaggttaaactatgatatcacttttgaaaaggaattctgagttttacctgaagtttttgattggaggttttatgagattcttcagaaatcttgattctgttcttgatgagttttgattcttctgcttgttctttggaccgaaaataaatcggtgattcactggtttaatcccttcatcttctccgattctttctctgtgattatacgcttgaacttgctttccctcttctgatctcctctctgtgatcaacgcttgagcttgcttcaatgcgagctcgcgtttggaattgcagagaaacgatcaattcagtgatgaagattccacagaatctctgagaattgatccaaaaattgttgattctgatgaattttagggtttctggaaacggttagggttttgtgttcttggtgttcttgagaaattctgagaaattttctgttttgattcaattgctgagagagagaaaattggatttgtgtttatgagttggcgtgtggttaatggattgaaatctgactcaatgtatttatagctgacatgtgtacacttgagccaatagaattgtgacatctggactctgattgaaaaaaaaacgcaaatttgacctttgagccttttctgcaaaattgaaaaattaaaggactaaaatgaaaataacaaaaaggactaaaaatgcaaataaaaagaaatctggactgaaatgcaattttggacctcttcgaggaccaaaatgcaaaaaggtaaaaaaaataaaattgaattaaaatttgtaacctgacaaaacgtaaagtgaaacccaaaataaaatcaacaaaaggactaaaacgaaccaatggctgacatgaggtatttcaaaataccttcctgccaaaattttaacaggaaaagaccaaaacgcccctagggactaaaatgacctaaactgactcagatgcaatttgaaatgatatttttaaaacagagattttaacaatgatgttataaaacaatttgaaaagactcagagacagtcacaaggaccaaaatgggttcccctgcagaaaatgaccaaaatatccttttgtatgattctctttgagacagagacagtaaaaagtgcagatgaaacagaatgaacattcagagtaaagcaacaataatttgacatttatcagtagtaaaaaagtttgaacgagtatttttaggtccaaaatcaggatataacacgtattcataagatggatgaagatgattgttttttgaaattttaattaaaaaaataattatttgtatttaattaaaacaaacaaaaaccattttagcatttttatttttttcattaatatttaaatcaacataattgccacatgtaccagtcctacacagtcatcatgtgccatatggacaaaaatgtgccaaatcagcaagaaaatggggccaaggacttttttaaaaaacaaaaaattttacagggattgatttcaattttttttttttaccagggaccaaaacccaaattctttatatttgcagggaccaaaaacatattttagccttttcattttaaggtgcaactcagaagttgttttgatttgaataatatttcaggaacattcttggaagtgtttgtccttctgaag

SEQ ID NO: 4435 - DNA, 596 bp, Medicago truncatula
  Intron number 5 from transcript Medtr5g026360.1 (locus Med tr5g026360) derived from phytozome v7.0 (chr-ID MtChr5; po s 10623596 to 10624191 reverse strand)
ttactcaagagcttaacacaatccgaactcgttagtgaagatcctttctcgctggtgagataaactcatgtatttatgtgcttatttgaatcatacaaactcgctagttgcttatggaattaaaatttgaatttcaggttttcgtactcctagtaattaatgttgaacagaatttacaagtcattatggaaagagaggttttgcatcatgatgtacttttttgaagaaactgcatggtccaacgggaacatgaggcaatgcttagtttactagtttgttattcacttaattctggtagaaacatttgattctgtgcaatagtttttgtagatttgtctgcaacattctagtttgtataagtaaacaatattgtttgtattgctttctaattcaatgaagtgagaatttatatacttctcccatagttatttgaaattgtgttcaacgtagatttgtatgcaacgtattatgttatcaaagcctaaaacaacccaaaatttaacagaaagcaaacatttgaaattgcttctatatatttatagtgagcatataataatcacaagttaatttctaaatctaatatacagaaaaaccat

SEQ ID NO: 4436 - DNA, 2052 bp, Medicago truncatula
  Intron number 5 from transcript Medtr1g126680.1 (locus Med tr1g126680) derived from phytozome v7.0 (chr-ID MtChr1; po s 28284460 to 28286511)
taattatagctgaagaacctccttgttagtttatcaatcgtgtctgtaaaattgacatctcatattccataattatgttagacgatattctaccatattttcctcaatagatgctgttaaaaaataagtagaagctgcaaagcaacaaaataaatcttgtggatctaaatgtgttgggtcaataattaaatgcagagaatactggttgtatagaccaatctggtttatagatcagtctgattacaacatcaacagcacaggtttcctcctggaaaggagtctcttcgttccactaaactaactgaataatttgtaacctctgatagctcctatgcaacacacaccctattaatatcaaacaataacttccacatgtaaaaacataattgtctcatagttctgtctgcctaggtggcactattaaattaagcccgccttttataattattattgttattattattattctgatattttttcagttattattattataaaccttgaccacctccaaacccatcataactggcctatctgggcctctcaccgtcaatgcagaaacaaccatctttgttaaggttgaaatgtggaggcaagcccttgttgatcatcatttgaaccttgttctatcaatttttctccgtgtcctccatcatttcccaaatttaacacccacaattttcttttaggacacctattgagtggccctaaattgttggccacattgaagacatttttcctcatctctcctcacatgtcctaacatactctttgtgaggtatatttatgtcccgctattcctgaactgtgaatttggtgcgttggtagcagcagaacttgtgttagatagtggagttttgaacgaattgagacgggccgggctgtcgatcctctgggtttgtggcacacctaagttaattgggttatgcccagaaacaataattggatagatctcatgctctcgtgcccaaaactaggttttttgagctgttctgaaacttcctcaccagccagaagcagggctctttgatctttttccctgaaagcaaccaacagacatgttttcccctaacgagtcttcttcttccactgaattgacaaaacaagtctacattttctgatagcttctatgtaacagcctgttaatatcaaacagtaactgccacataaaaacataattacctctttcacaaactacaaccgctattttatcaaccttttttaaaaaacataaaccatcattgaccttgggctatccatctctcagcagacccatcataattcaacctataagaagaacagagcaagaactgataacaaatccgacaacttgagattagagtaaggtagatgtttaccattcatatagaatcaatagggaggcccgacatgttaccataggattgaactttgtacttgtagatcctaccgctttattcatgctggactaaacatattcttatttcacaatctgatctattacctcgagaaagctagtcattaggggatgttgtagctggtagccccattataattgttggctgataggctggttcagtggagaagctctttctttggcttatcgacgtcttaggaaattagatagctagctcacctcaagcaactgtgatttcacgttcttccctaggcactttttcattgatcatgtttttcatggtactttggagtttgcacagagagccacatagtcttgacaagtaggcaagcacttaggaaattagatatagagctcacttcaagcaactatgatcatgctctttctcaggcaattttttcataaactatataaaaaattgcctactgggaattcactgcagaatccaactgcacccaaaaactcaaatttttaaatatggggggggtgggggggggggttagaatcctcttttagataaagtagggggaccaaaagtgcatttaatacatgctttagggattgcaatgtttttgcttgaaagaataaaatgggcatctctttaatttcttgctcaatgcttatatactgcaggttcaacacaaaagcctgaagat

SEQ ID NO: 4437 - DNA, 4305 bp, Medicago truncatula
  Intron number 1 from transcript Medtr5g044940.1 (locus Med tr5g044940) derived from phytozome v7.0 (chr-ID MtChr5; po s 18694185 to 18698489)
ttcggttcggttcgatttgtatatttgaaccatcggtacccaactaaaccgaaactattattatatttttcttttatcacactattaattaatggttactcctcccaaatctttatatcagtggccaaaatgacaaattctaccttagccaaagcccaaacttacccacatataaaatgcaatgctacaatgaggcttatcaaaccctagcagccgcacaactctctctagaacaaaaataagatctgttttattctttcttttttccagcctcatatctctctgcaattcttccttcttcttctctccctgttgctcgcaaaataaattgtgtagtttaaattttttttctccaggctgttgcttcacaatccttcacgacaagatatgtttgggggtggtccaaaaacttcaaccctttcaagttctagatcaagttctttacttggctcgtggattttaatgttttttgattctagatcttgagtttatttttgatgaccctttctgttggttaataattaactcatgcagatgcagccgttaagttgttgacttggatcaaaatgctccctttaaaagttttaggatgtcaaaacgttatatttaatcgtcaaaaatgatcattctagcactttaaatgctgtttaataatgctagaaagacatttgttgttgtaaatagttgtctttgtagcactataaatgatcatttgtgaccattaaacgtagcattttggcaccctcgaacttttaaaagacaacattttgatccaatcaactacttaacggctacatcaacatctgttaaatagatatagacagcagtggtaatagtcaactacttaacgttatattaaaaagacttttaaaatttaaaggactaacttaaaaattctgtcaaattaaaagaacctaattgaaactttcaaaacttcctgtaaataaattgtgtcaaacaaattaaagatgaaaagataggatattaacggccaccaacaaccttgccaatcataagagcacaaaatctccacctctcttgttttgtctcatatgatgtttctctctctctctctccctaattcaccattactcataaacattacaaatccttgccgtccatctgtctttaactctggcttagtagatttttttgtcctatcctttcatgttttccatgcaacatttcttaattccttcactattgccaatgatagaaaacttttcactctttttcttttgctgctagtgttacacgtcgaatttaaatgctcaaaatcacaccctcatttgactaatcatccctgtttccttgaatactcaatcctcaattcttcacccacttaccagctgccaagcaacaacgttgaagacagtaacgagcaaattgatggtggatttgtttatatgtcccaattacttcataatacgtcttaaaaaaataaggtatgcttaactttttcttaacaaaaacaaactttgaggatggaaaaatttcctgtaattatttttagtgatactaatgacaactctattggatttgatttgaactctgtctattgaaactaaaaattgatgtgaaactaaaatagtatctagggtttataagacatacttttatatttaaataaggatttttaaataacttattatatttattaacagatacggataccgtagacacatacatcatagacttgacattcatccattaactaacacgtaaatcatagtggattttacccacgaatatccacaagtatggatttttttgccggccatttacttattaaactaaaaaaaaaaaactagaaataatgataattcacctttggtaaattgttttaatttgaaaacgatttaatgtagaatgagacattttttcctaatttttttcctctgtctattgtgcctaaagtaagtactaactttctagaaatagtaaataacaaagacaatttaacatcacttggtcttgactcacaaaggtaatatctcagtacatactcctctccttttccaccaccatgtgcgatgttgctaaaagtgataataacataatcacatcgtattatggccaaagcatgcatcaaaaagataaaagcctcaactccaattggattctttctaagatgacccaatacttttactatagcattcaaattaaagaataatcacgatgcaacgtttcaattgagtgggacttttttttttaatattggaccctcaaaaaacaatgcattcaaattcacggggaggaaaggaataaagccataaacacttgttcacaaagaaagtttaaaccctatttagcctcacttttttttaggtgatttttttttatgacaaattgacaattactctattcagtctcacatgaaaaaaaattctcatatttaatatacaaattactcatatttaattaagggttttatatataaataaatttaactacctttactatcaataatagattgatcaaagtggtaaggagtttgatcgctaactctaacatatagaaaaaaagatctgattggaataaaagaactcatcttgtgtgtccaacaaaaaaagaaaaaaaaaaaaaactggttttaaaatagaaggaccaaaacttattatttttgaaaataaaaagaccaaaagtgtatttaatcaagatgggagagaggaagagaacaatataaatgcataatgattgatcatattcaagatgtatcaaacatttaatgtgaatatgtttctcctattttaattgaaattcaaactttaaactttactttgactattgtgaaagtctaaccccttcggctacacctatccttttagtcaccaaaaatatactatatgtatataaacttgtaccactaaaatctcctatattgtgggagagaattagttaattaaccactctctttgaattgaaaacatgtgaaagacagtaaaatatgcaccttcgtacacccgtgataaaggaatgatttgcttaggacagggtgctaattattggttaacctatgcaaaagattctgtctttaactggatggcttggtactcggtagttaaccaaactaaccggttcctcgtgcggcacgagtcgtgcctaatcaaacaatttaaattaaagacaaaattttgatgcagcttcttactaaggtgcaagttagcaagctaaatcaccgctctttggtagatcaagaagaagaaaaattgcgacacctagaatttaggaaggttatatcctatattatgtccaatatttgttcattttgcaaatcaaaacggaccttcataaacaggtgcaatcgtgtttttctttaactgatcacaatactcctttatggaacttaatatttaatttatgtaggttcattgattttgtacattcaaatacttgattggttttaggtttaaaaaaaaaacctaatcagttaaaatgtaaacaatactatcatattgaaaaacttgaaatagtgatggttatttcaagtggaaaaatgtgtgaaatttatctctaatttcgttgctaagtgttagaggaactaaatttcatgatcaattatccatatctaatttcagtcttcatttcccttttcatggcaaacaagctttatcatcatccataactctctcaaccctcttaaaaataattcacatagaaagacaagagtgacaagggctactagtgagatagataagaaaacaaaattatcaatattcataatgatatctattataaggacgtaacaaaagcatatatagccctacttcattccacaacctataatataaaataaataattgtttttgaagggtaaaacaaataaattgtatgtattgttttgtagtgatctaaacttattagcagccctatgatatgagccataattatacaaattatagtaatgggaatcactttgtataattttgttttgaatagggaccgcgcaactagggttaaacatgtttaagccacgatggtggtgggttaggatatagacagtacccaatttgcagctaaaaagcaactaatgagtaattatcaaggaccctcctatcacatgctctcaatttaatgtaaccatgtgagttttgaatttttatgcaattttgctgtttatgcatgggatcatggatcatacaaattttaaggtgtcatggtttaacgcgtaagtatgcatatctttcgattaaaaaaaggaaagtttaagtagtgtccacacactctttaagtaagtttcagtgaaaattttatgtgtattagaaattaaagtatttgatttttttaagttataatgcttaaaga

SEQ ID NO: 4438 - DNA, 4031 bp, Medicago truncatula
  Intron number 6 from transcript Medtr7g117900.1 (locus Med tr7g117900) derived from phytozome v7.0 (chr-ID MtChr7; po s 27642553 to 27646583)
tgaggtaacatgttaaattgttatcttctattataatttatatgaaaacgatcagttttgatagcctttatatagtaaaggagtgacccagaattcaaaccccacgattcttaactagacatgatttaacttccgtcaaactttggattaccaaagttgatatttcccctgggaattggagggttaaaataaaaatataataaaggggttaaccatggattacatttttgtattcatggaaaaatactttctttctattggtaaaggtcaaatgctttgactgttgtggcagccaccttctaggttcgatcattttgatagtgaggcattctggttgcatctaggtagtgacagtcacacaaatattcaaagagaattgctaaaattactcaatttgacaaattgtaaccgaaaataagatctgaatttaattccaattaagtcacggcaacacttttaagacattagctagttcaaatgacctgaaacatagtgatgtaattgtaaatgcacatccaaccaaatgcaattcaagaggccaagcgatacactcaataacaaatattaggatatgaaatgaaaggataacacaataattgcttttgatggtatgtcagaatcatggcgacccaccgtgattttccaaaagctacactttgtagcttctgcaaaatcacagtggattgtcgtgagataccaaacatacaccaatttactgcttggtttggcggtggtgtaagaaaacgcacgtccagatggctttgcgcgtgattttaaagaagcttcaaatactagcttccttgtggccgcacatatgtaacgcccacactaaacgtatctagacagtttagtatgtgcattatctttagtattggatacattaaaatttacaacataaattcttcgaatgaatatcttatacaacaatgcgcgttcgtacaatcaacaatacaaactactcgtccaaaaacatagaaaatacattcttgaaatcgaaacatcctgcagcgggtacgaacgaacacttgctgaatatccatccggctacagcttgctagatcctgccacatcaacctgcttgatctgaaacaaataaggattgggatgagacataatgtctcagtgagttctacccaatcctaggctataggtaacctcggggaaacctatggtcaccacgtgtctacaatacaacctgccggttgattatacgtgtgtgggcttgctttcctagacggttgtgcatactagtccgtcgtaggttcttcgtatcataactcccaagtcttgtcttactttacatgtcatggcggtcaagggaacctaggaccgctatgtcgagatacgataaacgcatcgagacctaaacataactcattcatgacatgttcctaaactggatgattggggagtcactcagaccgtcgacagtgtatcatctttacttgtgctattgcataaacttattctcgtctcgtaacgtatcataaacatacacatattcattcttatgttagaagttagcgtgtaacaaacaacattatcttggttcattttacggagtgcatcgggtggagtaaccccgagtacattcccttacttgaccgatgaaaacctagctaaggtacaccggactccctcagtgacgtgcgggcctaccttgcggagcgtatcccgttccccttgagaacctctcgtatcccccttggcgtggataacggaaagccacgacaactacatcttactttatggtcttgaccatatatgatatcttgtcttagtacttgcttacttaaacgttcttacttatagtgaatagactacatctatcaatccttggcttaacgttacttaaggttcttgctaactttctagttctcgacaatctatgtcgaggctctatgctttccccattcttagtttatcgctaccaaaacaaaacatgttaaactctcttgaccattcttgacatatatgctaatattgccatgattttcatttgaaggatcaatcgttgtaatgtgcgttgtttcgatgatgtttaggggttttgtaattggaaaacattgcaataaaagtatcggaaggcactacaggcacccatacgaatctacaagccatttgaaaaagatggaaagtcagagacttccgctaatggctaaataatttcgccaacgacggttttcttctggggaatttcgctattagcgaaataattttgctaatagcgaatttctttgggtctgtagtgcagattttgcattttcaccctaaattcaccaaatcttgatcctgcaatgcacattacacttccagcaacttatataaacattataaacattttgcatggcaatattaacacataatcaacaagattggacattgggtactagggatttgtcataccaacttaactaaaatcttgctttcttgctaagattacacaacccaaaggtatgttaaactatctaagaactcacctagtgattgcaacaatctccaagcttcaatcaccaaaccctagctcttgatctacttgcatccatgattcttgctcaccaatccaaaccccaaagtttcaatccactcttatggttgtttcttgcttgttgaattgctagcatccatacttgattcatcaattacacaaacttggaagcttgagggaagaagattgaggaatgggggcgccattctagagagaaggaggagagaatttcttctcttgtattctagagtgagaagcaacatgaaaataatgaaggttcttggtccaacatgcttatatactccttgtgcgaaaatactaaaatgccattcttcttaatcgtgtttacactgacactgataattcaacccgtgattaactgacatcacataataaaataaacattctctgtcgtacttgcttcccatgaatattcgtcctctgatatgtttgactggtcatatcccaatgatcgtcgagcgggatattacagcatatttacgtggactctgccgcgataacaaacacattataagtcattcttcaaagtcatgttccccaaagtcgaaatcattgaccaactcttctaagtgtggcaattgactccatttattcatcgtccatccattgcatccaactatcaatccattgactatacaataaaattgttaatagattggatccggttcctctattttctttttaaatccaatcgataactttttatttaacgatccaacttttttcaaacaatccaatggatcatttttatgagtgaactccaatggatttttttttttgttaaaaaataaaatagatttatgtaaaaacgaaaaaataattataattattttaaaaattaatattttcattaattaaaaatcaaaggtaattatcaccaggccggccgttggttgccacttttggcctcagttagccaaagctgctaccaccgccacttccatgtattataattaaaattattaataaaatttttaaataataataatttctttttttagagatttgttttatataatttaataaatggattggaaatattgtaatggatggttttatatttcagtggattgattagatattttgaactgacttttattgggttgtaaatggattgtttgaattcatccaattacaatccaaatccaaggttaatatagaacatgccccctcacgtgagaggcaaaagagcgttcggtgcatcataaaataacactcttgttttttttcattttaatcggagcttattgattcttagtcgcactattgatgcatgtatcattcacaatccatcacatgatacgaatcattggcttgcccaactacatcaaattatgatcacccatgcatgtatcaaaagattctaagccatttacaatccatcacataatacaaatcactggcgtgccaaattgtattgaaatgtgatcactgcattttgtcttgattatttttttcacttcttttatcaatttgtcttgatgcagttgtctgagactgcagaatattctgtgctctgcag

SEQ ID NO: 4439 - DNA, 1859 bp, Medicago truncatula
  Intron number 2 from transcript Medtr7g011470.1 (locus Med tr7g011470) derived from phytozome v7.0 (chr-ID MtChr7; po s 2796804 to 2798662 reverse strand)
tttttgttattcttcctgttcctcaggttagaaattttccattattctatatttttttactaaattattataatttttgtgggatttaatttgatatacatcatcaataacttaaatcttttttatatacagatgtatttaatcatatcattacttttattgattaatttttaaaatatctctaaatatctacgtattatgatataatcaaatgtatgaataaaaaagttttacacgatcaatgcatagagatatattttataggttataattttgaatttaattcatatacagtgataattaaagatattttacgttgtcattgaatcaaaattgataaatgaatgaagacattttgattttgatcataatacttctaaattcaaacacatgattagtagtgcatagaaatttagaaattaaactctacgatttttagtttatttttgtaaattaaactttatacgaaatgatattgtttatgtttgatgtggtccactaatatacttttggttcacatgttgtatctcaagtcttggaaaaattcttcaattagtttacttttataatagtttttttttttttttttttaagatgtttttgtttttactacttggtttagttttattagaataataaagaaaaaatgatggaattacatagagtttagtttgatttgtttatagtttatatactcttgaatagatagttgagtacagttttattagtttaataattttaaattttgaagaatgagtaaatattaaaatggaactgaaagaagcactttttaaaaattaaaagtgtaaatttatccttaaaaaatttaaacgtgggtttatttttttgttattttaaggataattatggaagatgttttaggatttgtcaacaaaaaaaaatggaagatgttttaggtatatttttttgttattttaaggataattatggaagatgttttagttttgtaccatcaatgattaattggcctacagccccacacatgtgacattcttaactattaaattgatgcttttcaaattatagttctatgtggttttcatttgtgaccagattgattatagattgtaaccaagattttttattttatttattgttggataaaaggacgaaataattgattcctgaaatattgtggtctacaaacaaagagtttgatccttcaaaaaaaaaaaaaagagtttgatattttctattctttgttaagtaatttttcaacatccatattgtttcatgaaaatttaatttaatttttgaataataaaagataaatataaaatagttctaaaagagtactactcaaaaaagtatgagtcctatagacacattgaataaattaaattgttgaaaacaaatcaactaaaaaataaaatattctagtatgcatgtttttttttttttttgacaaatagtatgcatatttatttttggtaataatattgtttctatatttcttttacattaaataatatggtttctatagtttttataaaaattcatctctttataatttgagcctaaattgcacactcaaattcccacgcaaaattgcacatatgtgaaaaaaagtcgatatcatgttacttgattattgccttgttttataaattgttcaataagttaattgttctttgtaaattaatcaaaactatcacattaaactataaacttttatttagtaacaaataagtagataaattttcttttcaaaagtaacataagtgataactagtccttgatatgtttgttcttgttaattctaaataagttttttttgacaatctgattttgttttgtttgcaggttgtgttttggcttgtagtaccaaaattgataag

SEQ ID NO: 4440 - DNA, 1753 bp, Medicago truncatula
  Intron number 1 from transcript Medtr4g015830.1 (locus Med tr4g015830) derived from phytozome v7.0 (chr-ID MtChr4; po s 3021061 to 3022813 reverse strand)
acttgatccttctgttaaacggaaaccctttactggtatttaacttgttcatgatcgcttttaagttcattttttcgttgttaaaccttccggtttgggaagggggctttgctaatttagagttcgattgtgaggtaagtgtaaaatatgttttaagaattgttcctgaatggtttgcgctttaagtgaaagttcgttaaccgtttgagtctaatcaattggtttgattctttttaatttgaatttgattgtgtttttgtttttgtttttattttattttgattaagtgaaggctaggttttaagtattgtgtatctggattagaatgaaaaatgggactaggtggaatggttttatatgcattgtggttttagattgttcaattaagattgattatgtatattatcaagttttagggtttattatagtaaaaaataaaagtttttagggtttatctgatttgtaaaagagaagtacttgaccaagggttttaaagcacggtcgagatcatttagtcgtggtcaaatgtggttggtggggaatcacctggagtcgtagaaacataaaaaaatattaataatgcggtctagattgcaaaacaacaaggataaaccttttaagttattggaaagggtttaaaagtttggttgtggtcatttacgcggtgaagaatcatggtcaatatgtggtcaaatgtggctggtgtggcctcaattgcagttgttgagacaaaaaataatcttaagttataggaacgggttttaaagtgtgttcatgatcctttatcggtggagaagcatggtcaaatgtggcttgtgtagcgcctcaattggagtcattgagacataaagaaatcttaatagtgtggcctagatggcaattgctgacctttttttattaaaaaaaaaaaacgtactgtttattggtgggtgattttatggtacaagtgtaatgctacaagtttttgaattgctgctgcggttcatggccgttccggtaccatgtaaattgtggacatgtgttgtatatgtgatcgtcattatgttgtttcgtaaacgtctaaaatatttatattgtggttacgactttggttattggctacaatttttaaaaccttagtataatgtgacatgtggggtttttaaagcttaatggtacatgaattaatgttatcattcaggataagttctttttttaatttgctagaatatttggatttgctgtaggtttattattgttcattgatagatcataagtaataatacctttcatctagctgttactttatcaatttgtattttgtcgttacgtcaataatgttgattgggatggtggtagttattgcagctattacttactgactgatttccgtgattcttgctatagtgtggttgatatgtggcaagtggactcgagcttgaaccactccggaaaagtagggtgtgaaaattgtcgtttaacaggagggttgcatacttgtaagtagaaacccgtaactataaataggtttacatcccatttgtttgtgttttagagaccccaaatggccccacatagttgaaggttatatttctcagttttgactctgcctaagatgggcaaaataatgaactcgatgttctgacataggtcctcatcatttgagcttccttgtgaatttcatgcttcatgttctaagtcttcatcatttgaaattccatgtgaattccataccttgtttatatattgtgcatcttgttctgcagcgaagtag

SEQ ID NO: 4441 - DNA, 2863 bp, Medicago truncatula
  Intron number 1 from transcript Medtr5g077880.1 (locus Med tr5g077880) derived from phytozome v7.0 (chr-ID MtChr5; po s 28754144 to 28757006)
aaaccactcagaagcttctccttcagggtataatcacttttctctgctaatttagtttacccttttgtttgatcttgatcttaatgcttgtttctttgtgatccatgtgttttctcaaaagggtttcttttggtttggtttgaatttgattttgttacccttttttcttagtagggcctttgaatgattatgtttgctataatgactccttttggttaggcttagatggaatgtttttaatacccattttggttttttagactttttgtggcttggtttaattaaagtttagttttttagatgaaattatgaatttatgagagtgtctactttcatacactggttgaaacagttttgttagggtttgatggaaattgtttttagtaccccttttggtttcagagagcctttctgtagtttggttcaattaaagtttagttttttggatgaaattatgagtgtatgagagttggattaatttaggttatggacttggctcattgtctcagaatggttcattgtttcattcatgtttagcttccatattttgattgtttatttatttgtatacataacttgagctgctttacacttgaggtgcttactcagcggttagagcttagccttttaacctcaaggtactgagttcgaattccctcagggatggttgtaaaatggtgattagtgtcactttaattagtaaaaaatacccgagctgcttttgtttttaagccttctctgtcactgaatctccgtgttcatttgatatatggttttgcttgatgctcttatgattgcatggagtttagtttgttggttcatttattaaactaggtcaagtttttccttttctgcatgcatgtctgaaatttattaaataatgaggaaaaattcaaagttaatagtggcatagcacatagagtataatcgatcagtttggtttgattttagggagaaaaaactcaaaccggtaaaaaatggcagttcggttcaattgggtcagttgttttccaaagttaacaaacctgttttaaaaaatgtaatgttggcaactatgaacacaacacaactaagagtggcggtggggagcacaacaggggactgaggtggccgctgaaccagagggtttgcagtttgcacaatgcaaacagatatagcgttgcaaccaaggacacaccctgtggtgtacgcaacgccgtttgtaggtaacggtggtgccatctgatagtacatgcacattgtctggactgcaagtgaaaccctagatttgatattcaagaatatatatgttctgcagattttcaaaatagtaaccaagtgataacagatcattgtaagtagaataaaaaatgggattttatttttatttttatttcattcgagtatcgggtgatcagttttgaatgtcatgaacctatatcctaaccaatagaggttgcgatggctcaagtttgaccccaacatgaataaaatttgaactaacttgattggttaggaactaactttctttttctttttaagggtaaagttgttgtcacatgctggaaacagcctcttgtgtaaaaaacaaggtaaggctgcgtacaatacaccagaatggtgggacccattcccggaccctgcgtatgtgggatctttaatgcaccgggctgcccttttaacttaattggttcgaaactgattttctggttgaaccaaaccaacttaaaccctgaatataatataacagaggaaagctacagtaacaaaaaaaaaagagtggaatgaaaggatttaaaaatttaacaggacgcgtagttgataagtagttacttgaaaaaagtgatcaaggttaactaatttatcttaataatagcagttgaaactaaaatcatatttaacatagtaattacagatacagatgactgataataatgaggcatgaataggaagagagacagatcttttgaaaaagaagaacaagtgccaagacaactgctttacaaagctgcatcttaccttatcttataggttgaaggaaatagaattgcatgaataacaaattttcctagttagatgctgtagtgaatgaagagtcggaggctagagcaaatttattgagaaaccttaatttggatcaacgaagtaagatgctatgtttgttgcttggagaagtagtttttgatctttaaatattttgtgtgttgatggacgataattgcagtctacacgccacaacagtgaagtgctctgcaacaggcatttagaagtggccaatggcaatgctactatgctgttacctgtagtagtatccttgagattttctgatattgtaaaaagcatttgattccgatggaataatctattggtggatgaagtttgaagttctattgtgcaccaaatgttttgtcacagttttctccgaatcatgctagttttgttcttttttctaattgggtgaatttaaatcaacgggtttttgttccaaactattatttgtcagttttaactcttatgcattgttaattttacattatttgagtggccttagatgtgtgttcagatgctctatggtaatcattttcattatctttaatcgctctcctttttcattatcttttaagttgtcatcatatttgcgcataaggatccattatactgacattttgagcagcttgagcattgtattatcagtttctgggtcgttggtttaatatttcattcttctctttttgaagcccatgattcatgaatgatttctatgggctcattggttctgaacttttaatttaaactctaaatgaatttatgccttattctctattttattctccttacagcattgatttctaaacataatttacttgttttacagacacattcc

SEQ ID NO: 4442 - DNA, 1736 bp, Medicago truncatula
  Intron number 13 from transcript Medtr4g012250.2 (locus Me dtr4g012250) derived from phytozome v7.0 (chr-ID MtChr4; p os 2050195 to 2051930)
tttcagtaatagaggttcggtttaaaagttattgcgcaaaataatgctgggcgatctaatttctgttttagaattgttagaacgaagtagagtaatagtatcctatgctcatataataatgtaatctagtgcatttaatattttcattctatatagttcacctcagttgtgtaggctaagacacaaattccaattgtatctcgtttatctcttccctaacacgctttcagagtctaatgggagacaatcctatattttgtgcagttacatttgccttgttactttgattgtatgtattgttgttagttgttcagatttcttttggtcttgtagtcttgttggtatatattataagatataaaacccacaattagtcatttggatcagtcaggcatatttaaaagtctatgattttgtcagatcttctccaccccacctcttgaacttctgtttttttttgttggatttagaggaatcctgcatttaattaaagggttatagaagtttttggtccctataaatatcttaaatttcgttagcccctctaaaaatttctgctagttttggtcccacgaattttggtccatgttattaagtcaactgatatgtacccttcacattttttaatgaatttttactgagatatttacaatttaggacattataacaatatctcgcacacaaatttagaatttttaataaaatgagttgaatatgaatttttaagcgctaataacttatattcatatttaaatcatcctttgttaaaaaaaaattgaacttttgcaagagagatttctataatgtactaaatatgactgcaaagaataattcaatatttcaaaggatacacatgagttttcttaaaagtagggaccgaaagtggtgatggaaagtatttgagggactaaaacttgatgaaaatttttagagggaccaaaaatttaattaaccattaattagattttaatttatggctgcaaaagccagcaacctgtttttatgtgttatattactaacagaaatttacttttgtatgtgtattaacatgaaaaattgtgtttcttaatggaacatgaaactatgtttaaatgccttccggacggaataaaagaaaagaaaagtcttcataatctgttgactaaggaacaatgttggttgtaacttgttaggtatattacgtctgatcttctagggcctctagttgcttttctttctcagaatgacgtcacttatgagtgaccatttgaaacctcggcaaaggtcaatcaatggttggtatgtattagttgcagccttaatcacatttgtctgttaagagtgaatttattgaaggatgctgtggtgaacatccaagttgggctttcttaaaatatgtttggtggaaaccaagtgattgggctcaagtggttaatgagcttcaccaaaggacgaatcgctcgggagaacgcgagttcgattcctgggtgtaacaattcttagccaggctttacttacctcgcggctgaacaccggattactagggctcctttcccctaggaaccggagggttaacacccaaaaaaataacatttggtggaaaaccttgatttgatgcatcataaattgaaatttttgaaccgtgtctttcctttgttgtttttatctgctctactttctttcatgcctttcttgattcttggtagctgtgtatgattattggctaatggctcaaattttggtgcagcgacccttct

SEQ ID NO: 4443 - DNA, 1840 bp, Medicago truncatula
  Intron number 1 from transcript Medtr3g077040.1 (locus Med tr3g077040) derived from phytozome v7.0 (chr-ID MtChr3; po s 18050413 to 18052252)
aaggtcagtgagtgaaggatacttcactttttgtgtttctagggttttgttatttttctatgttgattgtgtaaaatgtagttgaatttttagttttgatctgtttgagattcttcaaagtaaaaaaatttaaatgggtgagttaatttaatgtcaaaatgggttttttcagttgaatttgataaaaataaataaatgggtaagttaatttaatgtcaaaatgtgttttttcagttgaatttgatcaaaagattaaatgggtaagttaatttattgtgaaaatgtgttttttttatttgaatttggttaaaaattaaatgggtaagttaatttattatcaaaaatgtgtttttttagttgaatttggtcaaaaatgatatttttacaagtataccttgtgttgtcctccgcgcacaatagcagagactaatcgcaaataccaattttcttgagataattgagattaatttaacagttgagctcccctaataaatgttttaaatcgtcggtcaaatggttaagggttcaagtactatgttggtgaagtccgcctagtgtgagtggcatataaaaaatttgttgtactttcagtgtgattttcttgctgacgttaactatacaaacacagcatatccagggcattattctggttctgttggaattaatgttattatttttgggttcttaacaatgatttgagttaattgttgatgagttggagatgctgtgtgtttcatgaaaaggtaggaaatttttttttttttttgaaagaatgaaaaggtaggaaattgttgtgagagtatatgtgcttgtttaatctggtggctaatataattttgcttgtttgtttattctgttttataaatgatctttttcacttggtagattttattatatgagtggtttgtgttggtacagtcagattctgatgcttgcatttgtagaattctattttactgctttatgctcaatatggtaacctattgaaaattagaatatgactttctcttatgatcgttcaacattttttttttcagtgttgttttttcacatgataaatctcccttttgtgttgatgcttttccttttttgtttaacggtgttgtagggagcacaaaaaacccttttttacctccaatttatacatgtggaaaaaacgaatagatgcatcaccatggattagttagtggattccttttttatttctgtataacatgacattagaataatataaagaatgtcagagattctgtgtcatgatattttttctttgaaaggacgtgattgtcttgatgttcatatcatagttcgggtggtcctaacctaacttgtgcagttcaagattcatgtgagaatggcttttcggagttgtgtttatataagttctgcatatctaatatctaagaaccaaataagcatgtgatattattgtgtggagaaaattaacaactttgtttatactcagttgtaattgctctttctgcataggtagctgataaatctgctaatatttctggtcaactcagatgattttgtatgcggttttttctttccgttattgctattaattcatcggtccattctccattggctgctgtttagggccatagattttccaggtataatggaagttgccgttatttagtccatttcatttttcatctctttccaacttgtttctacgagtcaagagctataatcaagggcattacgagggttttttgagcattcatttgattcgacaattgctgcgaagagggttttagattatatgatagtataatattttttcttatctcttgcaggtagaaccttcacctacaacaggctcccttcctcg

SEQ ID NO: 4444 - DNA, 2425 bp, Medicago truncatula
  Intron number 3 from transcript Medtr5g080760.1 (locus Med tr5g080760) derived from phytozome v7.0 (chr-ID MtChr5; po s 30236487 to 30238911 reverse strand)
ctaagctgaccaaagaacaactttctaatttccaggtacttctacttttgctctctacttattttttggagtcagtttttttaacgcattcatatgtatatctaccaaatataaagcgattgtgtatggaattgtaggaaatgattttccttattcacaccttaatattgaaatgacaaacttttaatcttgcatttttatatgcattcccagatcttccgttacatagtttacatatgctacactatttaatggatgcatatcaactacaaaacctggctattatgatgattaaaaagtagaataccattgtgaaaatgaaataagattatggaggcatttagtgctaagcctttgtttcatcttcacatgctatattgctaacatatttctctctatttggtttacatttctgggttatttgcttttgctaatatcttaattgtaccgtgtactatgaatctatgataaagtgaggaatgtgagaaactaatgagaaaatgagatctgagaaatcatgtatttgcattatgaatctgtacaggggagcacaacacatatacttggaatttatatatctgctagttatataatagtacatgctcagctctttttttatattacttatacagcacgtgtgcagactctaacatactattatctgtaaaataaatatgttattaaagcttgatacgaacctgtatttagtttggaaattgaggaagttctcttgactacaaaactaaaactctgcaagtttgtgcattaattatgtagaatggggtttaaagatttcaatatttgaaattattgaatgaaggcgattcatttgcataataggtgattaatgtttatggaagttattattttggtggctagggagtatggtctattctaattctaatgtttacattataaaatcatggaagatataactaatcataataagatgtgaggtgtattattgagagtcataataagatgaggggtatattattctacgggggtaaacttcactctgttattactaatcatggaattattaacttcctttttttaggaatatggtgaggatagaacattagcaattaccaatagcttttcattacttgctctgtgctcgggccaccattattaatctagtacttgagcattttctcagaactgtatatgtcatacttcagcaataatgtcacttgtcacatatcatacatataagagtgtaagagtgatattttagctcttggtcttaggcttatattaaattggtgattaacgtttattgaagtcattattttggtggccattgtctattctaattctaaagtttacagtataaaataattaaatgtataactaagattaataatagtatagaaaaaacccaactcatgagacagttatggtagttgtgaattaggagagtcgtgataaaagatgagaggcccattatttacgagaaacttcactcctattattactaatcgttgaatcggtaacttttgttcttaggatgtggtgagggtagaacattagccattaccaattatttttctttaattgctcggtgcttgagccacccttattaatctagtacttgagctatttctcaactttatgtcatacttcagaaataatgtcccttgtcacatatcatacagaaataatgccactcgtcacatatcatacatattagagtaatattttagttattggtcttgggtctatgattaattggttaatttttcatgttatttttttatgtcccaaacatttttaaaagaagaatagctgcaaaccgggtcacatgtatttgactattgttttaagccattatattgtagataacatttcttatgaaattttgaagtaaatgagacgtatttcttgcttaaaatcttaaacaacacagtatatgtatgtcatgttaaggtttttggaagtgttaatgtagataacatttcttataaaattttgaagtaaatgagacgtatttcttgcttaaaatcttaaacaacacagtatatgtatgtaatgttaaggtttttggaaatgttgatgtgatattagatgttaggtggaatgaccgtcaacaataacatgattggagacaggtgtgttcattaccttatattgttgtagaccatctatcacagtcacacacaataattatgatggttactttatttttatatataattggtagaaatgtgaagggaaataacatcattctattgtagatcaattaatgaagtcatgtaagaggagcaagtttgaatttacttgaccatttcagtagaacttgtacttcttcgtagttgtatagtgcgtccatttgtttctgacttatttgaataaatttaaatatgtttattataactgtcttgtaggctgttgtttttaccgaagtcagtcttgagaaagc

SEQ ID NO: 4445 - DNA, 951 bp, Medicago truncatula
  Intron number 3 from transcript Medtr2g091650.1 (locus Med tr2g091650) derived from phytozome v7.0 (chr-ID MtChr2; po s 20702815 to 20703765 reverse strand)
aaagaggtaagtaattagttcatcttgcattcaactatttactatgttttgaataaaactataaataaaaacaatataacatgatttggtttctataatctaaatctgtctttaataaaaagtttaagaattctgttgattcaattttctttgattttaaaagttattaagaaattggtaattaaaatgaaaaggctggagcaacttttatgccattcctatgaatcatgtgggcttccaacagcaccaccatacttttcgccttaattaaatgtggtccaggtatgctggcttggttgtatcatgtgacacccttctttattgtggattatggtggtggagtacactgcactttttcagaaatcccggtagcccgagactcagattccctacagtcgggataaccacgtatttatgcaataacgaatctgatctcaaatgtctgatcataatcatacagcatgaattcctatttttggaacatggcttgtctgatgttgatccacataatgtgattgtgtacaatccatttccctggagccccaccattacctttctcaccctggctgccctaccacataaaacatgttttctcactatcagaactctttcattttaaacgtctcgtcagaatttattacccaaaaatgtaaaccaaccatttggggggtctttaagattcttttacaaattccaaacaggcttttgaaaagtataatcaggagaagtacagtaaaagtggtaacactagcttggcttgagagtagtgaaactacaaaagcaaaattctttgaaatttggaaatactattgcgccttgtgtttgttatgatagggctagaaaaacatgttaatttcttgcagtattttccttcatcaatgtttccttgttctgattcttgttataatatttgcaggcgcaaagtacgagctacctaagtacgttttgagc

SEQ ID NO: 4446 - DNA, 3321 bp, Medicago truncatula
  Intron number 1 from transcript Medtr7g111900.1 (locus Med tr7g111900) derived from phytozome v7.0 (chr-ID MtChr7; po s 26389769 to 26393089)
tcacatttaacgttagatctaacactttttcactcgttccactccttttcgttcattttgtttagatctctgcgtttctattacctatacgttgttttttctcaattcattactatttttcgtgtaattttgataatattgcacaatttttagtcgattaatttcctgatactataataagtaattttttactgttgtatttggcacttgcgtttgttttgtgttcattattcaacattcatggcttctctatcagatctaaagatgaatctcgtttttcagtattttttttggattattgtctctgtaacacttttgatagaacgtgtgtcccgtgttcgacatgaataatttgtcattacattcagttaattcatgtaccgtgtcaatgtgtcagggttgtgtatgtgtcttcatagatttttgccgaatctcacacgaagttacagactttcattgttcatttattataacacctgattcatacttttgcgaatgtgtatttttctgttgcggatctcatttcttcagtttgagtttatgtctgcattcaaagcatgctacatgtgtgttgtgttaagaatgaatgactgtctgttttttattttattttttattaaataaataaaatttgtgtcagtttcaactgtgtgatataatgaatttgttttataagtagattttgacaacatggttagaaagtggtgtatatatttggtttttgtaatacaacttaatcaagtggagcgtaaaacagagagaaaatccattcaagacggcaatttctaatttaatgttgtttgagaaagctgaacaatctgtacacttgagttgttacacaatcggttgatattatttaagagagaaaagggatatgccgtataaacttagtcttatgttcaatactttgcaattttttttaattacatttacaaagtggctttgcaaagtgaatgacttttcaatatattttttttgacggagacctttctaatattataatgtatcaataaacaatgtgttagtggcttttgtatttttttgacctgatgaatgtacttttgaattaaaaaaataaagaataatgtatatactttgcacttggtgggtagaaaaatatttaggactttccatttatgctcgtggacggtatatttatttgtttttggagattttatcaaattgggtaaggtttaattaatgattcttgtaggattgtcacaatcacacagtaactttgataactttgattcgtcttacaaaatttaccttcttttaactttcatttccaattttagttattattatttttaaaattctacactacaactggtggtaaacaagtatttttgtttttctaaaacttgtttaataataaatgcgattaatttctttccttacaaaaatgaataataaaaatatgatgaaagtatccctaaaaaaatataatgaaagcaaacatcacgtgaaagatctggacccatgtcatgtgaagaatatatttgcttgcaggaaacatcagaagcgtatagtttggtaagatgttacgtgcagggaccattgattattttttctttttgaggggagggaccattgatttgggtaataagggagctttggattttttggtattggaccattggttttattgtcacataaagggtccatatcaattaattttggaccattgattttattgtcacataaaagggtacattgcaattaaatttgacactgtacatttataaaaaaacaaaataaaactgacgcactgtctaccagattagattaattttcggttacaacagattggtatcctttttttttttttttttgagggaacagattgtcacataaagggtccatatcaataaattttctaatgaattaaaacatgataatttttttaattaaaatgtacagttcaataaaaaaagcatgttttttaataccaaaattagtagtttcttaaaccaatattctaaacattatgattgtagtgttgacagtagccttatattgcttacttgattatgttatgtggatcatctcacatgtaattggcatcccgtgttttgtgtacaaaatatctccacgacatgacaatgtgtcacaatgtttttgttgtttgtttagtgatcgcaggttttgcaagctgtctttgtttacttttgaaacaataaactattcccgcgagttgtccgttatgaatcctcgtgtggttgataatctatgtgcgtgttcatttattcattcatttaaaaatactcctacaataaaaaaccttactgtaggatggaccaccagtccaccactaggcaaatcaaattaatataagccaagcaaataataaagttcactatgtagtgtttggtagtgctgggattagaggcttagagctgctttatttggcacatgcacatgcacaccctgcttgcggtggagtttggaggttcttattttgttggatagggtttggaggttctgattcttaacagccttagtttctgaatttccaaagataatgtatatattatattttttaagaggccaagagaaaatatacgaataaaagagaggaggtctaattaagcacaagatgtgtctctaaagaggactcaaaattaagtctcagtaaaaactatataataaataatgattacatacacacacttaattattattataaatataatttatttcatttcgtttcgcacactataaatagtattcacttttgtaaattaaggagagtaatgttgaaaaaaacttatttttattttataaatacagaaaatagtgtaaatatgggattgaatagtagtatacaaacatcaatgttttgttgagaaactagaaggtgttggccatacgaaataattcttagtaagatttgatttgttatgtggtagcaaataataatgtaagtgttaaaggaggatgttggagttggagggataacttctggagaaatgacttatttttttatcatattgaaggttacaaaatgatagatgtatgaggcaggattctattagaaatattgtttcgtttcagaaatgacttaagtttgtttaccaatatggatagtgttgcacacatgcacttgagaactacaccttagttattgcagttttttctatgaaggacacacacattgttcattctaattctgtatgcgtctagagaccattatctagattgatgatttcagtcttgttactatgaattgtactataaattgcatatgtagacctgtgttaaatgatcagaggagtgttgtaacaaaatgcattttcatattattgcaggttgctgaag

SEQ ID NO: 4447 - DNA, 1535 bp, Medicago truncatula
  Intron number 5 from transcript Medtr4g081690.1 (locus Med tr4g081690) derived from phytozome v7.0 (chr-ID MtChr4; po s 17145672 to 17147206 reverse strand)
tatttcaagaagcagcaaagcttttcaaggggaaggtattttccttacaagccactgtttaatattctttcattgcattcgttctctagactctagacaaatttgtatttgccttttgtttcacaaaaaaatgcaaataaagtggaaaacttttcagtttattataattctggtgcagtgcgtgactgagtggatcatgatgatagatagaatgggaagagtaagcatagacaaattttagtttgcaaggcatgcaattgacatgatgcattgttatatgtactttcctattatagtgtttcccaaactagtatggatatgtccagcagtgtcgtttgcagctgagtaggttaaataacataattgtgtcatttgcttcatatagctgactacgcttgttgacaaagatactgtttttttcgtaaccagatccaatggagtaagttaaaatcttgtgtttgtagtcactgggatttattgagactagttataggtttattagattttaagtcctaaggagttcaacggatagtacatcatagagttggttcttaaactaaccactttttaatttaatattaagtttcctgtttcctgtttttctgtctctttgttatttaatattcttaaaatggatgcactatttggtataatgctggttcaattttttctctttttggcgagatattgttattgattgtaatcatatttcttattatcctctctgttattagctttaatatttatagggatattcgatttgattccacagttaaggatcatgataggatctcagtactataaactatttagattattcccctcatgcatataaatacttgtacaaactttgttattagtaagagagaaatattcagattcaaggacagtatctgaaaccagtgttttttttaaggaagtatctgaaaccagcttaaattatatagatttgtgaatgaatttaatttgtatacagtgttagtgtaaatattttacacattcatctaatcatatcataccatttagttatttgtggagatgtttaggaataaaacaacaaagtggcatcatggtgtggtttgattggatggatgatgtctaaaaacattttgcactgttagtgtatataatgtaatctctttgtgaatttgctttgaatctgaggagttgtgacttatgaaatagttttgaattttaccaaaatttcccttgttgtacgcctcactctacgattagcaacaatatccttatttgtaaatcatcagaatatagcatttgataattgcctgtgctaaatatttggatatttcaaatttgataaatttctgttgtcgtacaatttgctcataataatcctatgcatcagtctgtaaaaaaaactcctaggcatcatttaaaatttaagaataaattttagtttccacacttccccaaagaatcttatttttctgaacaatactgccccaaagaatcttgatttgccgacaatgacttatttctactgtacaatgatcctttgcagctgatctttgttc

SEQ ID NO: 4448 - DNA, 1139 bp, Medicago truncatula
  Intron number 1 from transcript Medtr5g096480.1 (locus Med tr5g096480) derived from phytozome v7.0 (chr-ID MtChr5; po s 38340766 to 38341904)
tctcaggtagtagttatgttcttcttttttgtggattttgattagttgaaattgattttgcttctgatagattgaattataagtgattagttgaaaatttgaatttacacggtttaattagaagatgttacttgaatttgaactcaattttaatctgatctagtttacaaaattaaatgtatattttggattgacgttgagttttgagaaatcactgtggaaatgtgattttgtgaaactctaatctaatgtgtagcttttgtccaaattatgatggcatactgtgattctgccaaattcactgtcagtccaaacatatgtgtgcgtgtttggattcatttttgggagagtcaaaagtgattctctgtagtgttaaaacttaaaattgatttcatatgtttggtgttctcgattagaaatgattttatctatggaattgattttaacttgaatctagaatttgtagcttttgccttcaaacatggttatgacatgtttggttgtcatcaagtaaagttgattctgtgtccaaaattgattctacttgaagctaagatttgtagtttttgattctagaattgattttcacacacaaatatatagttaaactcactttttacatgaatatatccaaacacaaatcatttttagtcataattactttaaaccaaaacgaattctacaaaatcaattctatcagaatcacttctccccaccacacaaccaaacacacgcaatcaattctacacctccagaatcaattttggtctctctagaagtggaaccaaacatacattcaaaagtgatcctgcagatttaaaattgattttgctatgttttttgcttttttattagaattgattttgcctctatagttgattctgacttgaagctagaattcgtagcttttgcctctaagcatgttttttacaccgagatttactgttcaaatcactttcacgtgaaagtatccaaagtccaaacataaatcattttaccttaaactcacaaacaacttaaatcaattcaaccaaatagaaacaaacacacttaatttcaatcagaataatgtttgtcaaacttaggaatgtgccggtggttgtctttgctcaggtttctattttttttacaggtaagaa

SEQ ID NO: 4449 - DNA, 2406 bp, Medicago truncatula
  Intron number 14 from transcript Medtr8g073630.1 (locus Me dtr8g073630) derived from phytozome v7.0 (chr-ID MtChr8; p os 14424675 to 14427080)
cttcctttcaatctaaacaagtttttcccttctgtgtaattagaccatgctcttagaacttggatggtgatgttcaatttgaagaaacacaattttcttcattcttaatgtagcaatatgaatattgtcattttttcacaagaatgttgtcatattgaatacaatatcatgttgtagttgtagatgcttgtttattgaagaatatcatagttatttctgtgatttaaattacttttatttcttttctagtaatttacctctcttcgtttacttcttggctgcacatcacttggcaaagataagatacaaattatgggataaacagaaacctgttaggcaccccggatacgacattgacatcgatagtaatttgagaaaaataatttataatttttttttaattgcaaagaattttattaataaagaaaatggaaaagagtataagtggtactacttccacaatttggaacgtagtataagtggtattggtgggtaatttatcaagtttactaaactgttgttgaatagtaatatttataaagcttgtaaccgcatggattttgaaaattctactaaaaaatgtcaattgtaattaggatgtgtaaaattggcgaagtgattggttttaagtaactacaaactcttccttaaaaaaaaaaaaaaaaaaaaagtaactacaaactctgaatatagtactacactactactaggccaatatctttgtcgctaactctcttcaacggttactactccataatgtcttagatcggagccctaaccgatcgaaggtttaagaacgccaaagtgagtaacaattattattagtttatgtttaaatctaaccaactattgaatggttaaactaggtcaaggcaagggttagtcttcattgtcacctaataatcgatttatagaatatagttagggttattactcatggtcatataaaaagcattaagaatggattaaccaagtgaaataacaaagtaatcgacttaatattcagataatcatttaaagttaaatgcacaactaattacaaggaagttcctctacatgacataacctagagatgattagatacttatagcttctaaatacatatgaataaaatagcatgagaaaaggatcacccgttgatgattcattggctccaatccttcagaaatcgcatttctacctttgtttgctcgttagaaggtgttttttttatcgacctatgggtatagtatttataggcgcctatttccctaagttttagggaaattggtttgcgatgtgcgcctaatcctcgcgatgctaggtaggaagagagcatttccttttgaccttattgctctatctcgcgatgtgagatagacaatagcgatatcctttttcccattgtattattgtgatgcggagctcatagccccggatgtgaggtaggaagttgctgactccttggtttcttcactccttgctccatttattctcaccagaacgttcgtggtgattatgtcttaagcttaatcattgataaacttgtaaaaaacataacagagctacaaagttgtctcgttcaaatggatttgcatggcttattcccattttctgatcatttatgacttttgattgaattcttttacaaactagaccagaactaacacagagaaaataatattgaacattcttttttttttttttgggatatattgaacaatcttatcccttcatttcttctagtaggaaaacaatgtccataattaaaagttcgtgaaactattgtcgtttttaattttggccgttaatttcttattaaattaaattgagggatacatttgtttcatatgattttttccaaccattcttatatgaaagaccatcaaatgttgttttctactctttttctttgtctttctttcctataccttccttttgtgaactagatataaatttagagtttgatatgatgtttaatcgaaaagttgtctatctcttaatagataagtcgtttggtaattttggtaggtccaaaaaattgtcaaacaaataaaaaaatgttgaaaactaataattttttaaaaaagttgacatcttttttgttaacatattatttttaataacgtatttgtttaaaagctattacgggcttgtttgttttagttttttttttatgtttgagcaaactctttttttaaaataattttgttaaaaaataatttttatatttaagaattatttttattagatgttgaagaaaagtattttcaatagaagagaaagaaaacttcaccttctctttcattcacgaggaatgagtgattttaggtcattttttgacctagaatcatccatctgaatttttttccttcttttcaatctaaataagtgattttcacatatatcaagttttttgtgattttg

SEQ ID NO: 4450 - DNA, 914 bp, Medicago truncatula
  Intron number 1 from transcript Medtr5g074490.1 (locus Med tr5g074490) derived from phytozome v7.0 (chr-ID MtChr5; po s 26895470 to 26896383)
agctgctggatcagcttagaactaaatgtgtgtcatctcactctgctatgctgaaaaagcttttggatgatatgcatgaagcagctaaggagaaagagctgaattttgtgcctctgctggacatcactcctttctatccagaagaagagtacatcactagggctgctagaattcaggctggatttaaacgaagaatgagggaaaaggatgagctacttcagaagaaggatgatcagatcaagtatctcttagaacagttgtataagcaagcccaaccttagttgcacacccaactctagcttgttttttacttttgttcttcgtagctgtgtccttgtatcttaatcttctttatatatattatcattgtttctggatcttgtgctttttcaccttcaatatgttttacaagctttaactctgatgatatttactgtttaatgctgcttgctctgatactctttcttttgtttctattctttttgttgatgacaaaagggggagtaaatgtatagtatttgttaaggcactgagccctactataaccacttctaaatttcttttaaatacttctgatttgattttataagtattttattgaaatttaattaataagaatagaacttagggggagcttacaaacctcaccttaaagatctattagactcagggggagcttacaaacctctgtcccagtagtcaacttattaattagatcaacaacaattgaacattttaaatactattgtttgtcatcatcaaaaagggggagattgttggaacaaaatgtgtttcacaatgaaccttattaagttttgatgataacaaggtattaaaaattgtcaattggttattactaataattgttcaagtgtacaggaccaaaggctactcaagttatttcaataggtctt

SEQ ID NO: 4451 - DNA, 1567 bp, Medicago truncatula; identical to SEQ ID NO: 4040
  Intron number 2 from transcript Medtr4g084670.1 (locus Med tr4g084670) derived from phytozome v7.0 (chr-ID MtChr4; po s 17874698 to 17876264)

SEQ ID NO: 4452 - DNA, 1932 bp, Medicago truncatula
  Intron number 10 from transcript Medtr3g127940.1 (locus Me dtr3g127940) derived from phytozome v7.0 (chr-ID MtChr3; p os 32629978 to 32631909 reverse strand)
agaattttattgcaaaactgtacactgttttttatgtaggacttgagcatgttaagtttattcagttatgttagagttagtgattagtcatataatgttgatcaactatttgtagcattgtcaaaaggggactatccttgcaattctcatcagacctagctgaagaggggccagataggattagcatgactttaatcatgctggaaaacctaaaatcccaaccccattaagaataaaaggttcaaaaaggacccagggtcagctttgacttctgacctttgaataagtatctaagtacttggggaatactcccataaaatctagctatcaaagggaagaaccaagtcatttaaatactccatcaaacatcccatactaatcaacgtgtacttgggcaccccataatatccaagtctttatcatagcaccgcagctgagagctgacatctggcactctacgacactttactcagtctttccaagcaaagcaacgacttgtctctaataccaattgataagtatctaagcacttggagaagcattgcttaaaagctagctatcaaaggggaagaactaagccactcacggaacgttccatactactcaatgtggaacttgggcagcccataatacccaagtccccgtcacattgggttaaacaaagtagaaaattgaaaatcctaacccattaacacttgaagttatctgatttggatttggttgtctagaatattctcaattaaagtcgtgcttcgcggccaagatttcaaacatggatgtaataaataagcaatactactcaattctcatacaaccatgaatgttgcatcgtccggaaaaaagtgtattacatcacagcttcaggaacaggacttttcagtttctcttctctgcttagggataactttctattaaaatgggttgtagatttgtagtttcttctgtccttttctgttgtgttgagatatgtcataagtttccagcaaagtttgctaagttcttatggggatagtgttctgtcttgtggggacacacacatataatttgtaggttccttatgtcaagtaaatcgaggcctaactcatactccttataaactcttctcaagaatcctatctatccgatgtgggactaaatccaccgagtgttggctgctaacaccttaagttcttacttttaacattgagatatgggttcaaacatggcttaaaaattagagctagcaaactcaggattgaggttataagcctcaaatgagatatataacaaaaataaattgtggggtgtttttttctggtcaaaatgataaagtgataaagtaaactcaaagtgatcaagtttattagataggactcaaaaaaatttacttttattcacctgaaattaagtacagatttatttacaacaatggctgactcttaacttgatcttcttcagattgttgagttaaaataagtttttttgtttgaaaaaaaaaaataatccatgtaaatcatgtcatgttacccttagtttatctctcaagttttttgcatgtaagtttatttccactgatgtttacaattacatatataaatgaacacacaggaaactgtaaataagaaatataattttgaatgtgaagtcttctaatttttttttaccaagtaggaatacaaaagttggtaatcactatctatttctgttatatagttgagcagacgtaaaccgagtctaccatgctgtttggaattctcctgtctttgtaattgatatttttcgaaaaatgaagaaatataatacacatcagatgtatccttttcgtttgagctacaatatctgcttccacatattttttttcatgtctggttaaaaagttgattaaatgcctattcttcgtctttaaaaatgtttttaggggcatcatctggatctacgactagttcggaatca

SEQ ID NO: 4453 - DNA, 879 bp, Medicago truncatula
  Intron number 3 from transcript Medtr8g090140.1 (locus Med tr8g090140) derived from phytozome v7.0 (chr-ID MtChr8; po s 19583650 to 19584528 reverse strand)
gagagaaaataaaggtaaattcaacaacatgcgtccactcctatagtcattacatgttctagtttgagtttaacttataattataattaaatcacgcacacattgaatccgtttgaaggagatgacaattagactattcgtttgactgcattacattttgatgatgaaactagtaggtgattgctgtcttgttattcttatgaaactttgatttgtaaaagttgaatgagtttgcatgaatgaatatgagactcctctgaccatattttttctatccttgaattaaattgttcagaattattttgtgtatattgaggatttcttagttcttatatattatatagcactaattatgcatcatttacgcttttctgaatcccaagcaacttgaactatcttgttaatcagttgaagacgatttttatacgtacagttaaaattagaacaatgtttggtgaattttcttgtgttgtgtaagcaggatccgtggagggaaaagttgttgatatgggtctaacaaggactactttattaagtaacgaaaaatatctttagctacaaccccaaactcaaaatttactgatgaggtattttcttgtaaaatttgttttacttattgtcttttgataagttgatacattctatgtttttttaaatttgcatgcaaatcctattatagaaataaatatcttctgtccacccttttacgagtggcatttttgtagcctatacatttgagtatgttttgtgttttagtactactatccctatggcctgagaactgatggcaaaaacttgaaactctaacttaaaactttcctttttatgaatctttttattgcaggtagttgtgaatcagtcacaggttgcttataaagc

SEQ ID NO: 4454 - DNA, 3770 bp, Medicago truncatula
  Intron number 3 from transcript Medtr5g095810.1 (locus Med tr5g095810) derived from phytozome v7.0 (chr-ID MtChr5; po s 38005161 to 38008930)
ctctctctctctctccccgacactcagaatctcaggttactaacctctcacttcttcctatttcctcctgtaagttcactctcgccattcttcaacctttcatctttcttctgcaaaaaatttcattcattctgtatcaatttcaccctaatctactcctaaaactaaatgggtatttattatttcaaaccccatttcgaaaaaattgtgcttttcttagaattgttgtgttttcttcttaaccctaatttttcagttagggtttgtttatgctgtttattgtctcttaggttatgaattttgagtttcaattgtttatttttggtaatttttttcattaatttagggaaaaattcagaatgatttgcatttgtgatatattactattgttaaatctgttttaggatcttgtgatttaattctaagatacagttgactaattgactttgagccagtttggataaacttctccgttcgtacttgtgaaagaaaagagaaaaaaaaaaaaaaaaaaactaaagacttattttagtccctctgattttcttgcagaccatttcagtgcccaacaaattatagtagtaccaaattagtccctcacattttcatgtagggtagtccctatgttagtttaaatgagggactaatttgtccctcatgaatgtgaggaactgatttggtactactattttttgttgggcactgaattggtttgcaagaaaattttgagggactaaaatgggccattcttaaaaaaagttattgaatgaatcttacaatgactgagtttttattagcttctcatatagagaaagataaatgcatgccgtattgtgtatggtgtatgtattttgatgttcaaataactcactttgttattaaatatatcattcttttactctcttttatctaattctcactttttccttctatttatctttcttggtagtaaaaatcttaacgtctacacatgaatctcgaacatttggatgagaacattgagaatgttaattctaaataattaaatctttaggaaaggtaagagcctagaaatggatggtgctgtatataatttgtgggttagatccattgttccttgcctacagttgttttgctgaaggcaggaaaaacggggcaatgattagaatgagagaggcctcgagtgggaaatacccaattccattgcaaaatcacaacccaatttctatcaagagtcatatccaaacaaagaaaaagaaaaacatatacataagccagaacttgaaggtgccgccacgccattttcatgaaaaggtttggctttggtatctcagattctgtctgcatcttctttctacttttcatctttctcatactgtcccttaaattgaattgggttttttttcccacagtgacagatctttcaaaatttacacttgatatgagcccctcaacctactgattttctattatgattattttaaattatttgttttaaaaatttgttttcttgagttgttgtttttgtttcgcactgattttgtttttgttgccaaatttgtttgagggtcttttcacttatttcaaagatatagttaactaattgacttttagcgtatttagataaacttcttggtaaatacttgtgaaaagaaaatgaatcttgcaatgattgagttttttgaacattagcttctcatatagatacagataaatttatgccgtatcacatatagtgtctgtattttgatagtagcaatctctttgtctaaatataaatctcgaacatttggatgtgtacatagagaattttcatcaaaaaaataattaaatcattaggtaaggaaaaatcctagaaatggatggtgttgtatataatgtgtgggttagatccattgttccttgccttcagttgtttttctgaagtcataaagaaaggggcaatgattagaatgagagaggccttgagtgggaaatgcccaattccattgcaaaacacaaccctacttccaacaatatccaaaaccataaaaagggaaaatatatatttaagccagaacttgaagatgccgccacgtccttttcatcaattggtttggctttggtatctcagattctgtctgcatcttctttctcctttttcctctttctcttactgcctcttaaattgaattgggcttttttttcttcccacagtgacagatctttcaaagtttacacttgatatgagcccctcaaccttctgattttctattatgattattttaacttggttgttttaaaaaatcttttttgagttgtagttttttttttttgcactgattttgttttggttggggaaacatttctgttgttttcttgtttgagattcactgcgtacaggaaaagccacagcttgattatagctactgcttgtttcaatctcccccagcctaaccaaaccatactgggttcgacatcagtctatgtggtttctatgccggttagttgatgtattctaaaataatacctcaattaatcgggcataagctgttgttgaacccaatttggttagtttgttggagattgaatccatccaaccactgagcatgtttttcaaaaatatggttggttttattgtacttgggcagcggctaacacaactgtagagatggaatccgcaaatgctgagtttttttttgtctcaccattctattaattccatctcacattttcttatttgttggtatctgctatttagatttaatcgttttatgtatttttttattttgactaaaaatttggggtttcataataaggaagacgacataaagtagtgtgcatatggataccgtgtttggaatcaatttgctgcatttgcactcttattctcttttaataatagttttacgcaatatggacataaagtagtgtgcatatggacataaagtagtgcgcaatggtgaaagtggcagcttcataagtgtttatacctaatttcatgaagagttcaatggataaaatagttttacactgtcatccagatatatctctgcaaatgtttgtgaagatattttaggatttaaaatagcggtgtggctcaatgaagagatatgatttgacgacaatgtaaaactatttcacactttcaaaatcagtcaatataactcatatttttcaaagctgtcatttagtttgtccacaaataccgattaagcttttaaggacttttttgcaagtgaagaaacataaacttattctaactgagaaactcccataaactagaatttggtccaagctagcgctttatatagtagcagttcttccatttgttgtagtcttgacttgccgtttctagtaaatggagtagtctcgacttgccgtttgtagtcttggcttttgcatgcaacccaatcaaagcctttgtttacttcatcacaaaaactagaagaaaccctctccacatttcttgttttgatgtccattgtcaagaatttgttttctagttagattaatcctttattcagctctcatatggtgccaactccaagactgcaatttttcccttcactgctttgagtttaactggatataacttgttccagtttcactgttttacttactcatggttagcatacacatactgacactataatggccaattagggctttgaatcttcagaattattttagttattgatccaatgcttttaattgtttctatttttgtatggatagatatagatatgttgcagaagtaaaattgaattttgatgcagttttttctatttctaattctagttgaagaaata

SEQ ID NO: 4455 - DNA, 696 bp, Medicago truncatula
  Intron number 4 from transcript Medtr2g121930.1 (locus Med tr2g121930) derived from phytozome v7.0 (chr-ID MtChr2; po s 29044389 to 29045084)
tctctggtgaagaggtttgcctttaataagccttgtgtcatcacactcatattatacatttgaagttttaaatgtacaaattatatattctttatatttatatttttctgccaaaatattagttatgaaagaacaatatgaaaattctgtaaactaaaatgtactactaataataaactattgtttaaaagatttgttgttgtgctatggaagaacaatttcaattcatattacattctaaataacaattttggaaatgaaaaccattggacattgattttatgttaatctatagaaaattactggtatagctgattttaaaccattcaccttttaatatgaatttgaatcaatttcatacttctattcactattcccattatttttccactctgcaattgttactttatagcgcaatttggaagtttctcttttgaggaggttgaaatgttgaattattactatgttaatgggattatattatttgtatatgccatttataagtttatttacttctttgcctattcatcttatctttgtaaatattgtactttgtattgtggacaaagatggtaatttatttcactgctattaatctccaactttcttttgggtctatggcaccttgacttagtgtgtatttctgtttcatcatttgcagagccttcagcaaattggtcacagagcaggccgcct

SEQ ID NO: 4456 - DNA, 366 bp, Medicago truncatula; identical to SEQ ID NO: 4053
  Intron number 2 from transcript Medtr2g132830.1 (locus Med tr2g132830) derived from phytozome v7.0 (chr-ID MtChr2; po s 32368660 to 32369025 reverse strand)

SEQ ID NO: 4457 - DNA, 676 bp, Medicago truncatula
  Intron number 1 from transcript Medtr7g148290.1 (locus Med tr7g148290) derived from phytozome v7.0 (chr-ID MtChr7; po s 35115872 to 35116547 reverse strand)
atcagatcaagtatctcttagaacagttgtataagcaagcccaaccttagttgcacacccaactctagcttgttttttacttttgttcttagtagctgtgtctttgtatcttaatctttctttatatatattatcattgtttctggatcttgtgctttttcaccttcaatatgttttacaagctttaactctgatgatatttactgtttttaatgctgtttgctctgatactctttcttttgtttctattctttttgttgatgacaaaagggggagtaaatgtatagtattttttaaggcactgagccctactctaaatttcttttaaatacttctgatttgattttataagtattttattgaaatttaattaataagaatagaacttagggggagcttacaaacctcaccttaaagatctattagactcagggggagcttacaaacctctgtcccagtagtcaacttattaattagatcaacaacaattgaacattttaaatactattgtttgtcatcatcaaaaagggggagattgttggaacaaaatgtgtttcacaatgaaccttattaagttttgatgataacaaggtattaaaaattgtcaattggttattactaataattgttcaagtgtacaggaccaaaggctactcaagttatttcaataggtctt

SEQ ID NO: 4458 - DNA, 1581 bp, Medicago truncatula
  Intron number 1 from transcript Medtr2g025370.2 (locus Med tr2g025370) derived from phytozome v7.0 (chr-ID MtChr2; po s 6715398 to 6716978 reverse strand)
atcactttccccatttctgttaaacaggttttttctttctccattctcattttctatctctttcctcatatgggttgtagtcaaaatcaaattttatttatttatgtagcattaatttttgattgaattgattttgtagcattgattttggttaaaaatgagttgaagtgatttatgtttggatgctttgaagtgatttgtatgaaaaatattgtttggatattgtgtaaagtggatattgtgtaaagaaccaaaatgtgttggatttggttgtttataatgggaagattttgtcaaacaaggtatttttttaaattgaaattttgtagtggatttggttgttttttatgggaagattttgtttgatgcattgagcttaattgggttctgaatttcaaatttagcatgattaatttgtttggatgagggcaataaagttttcttacactaccttgtttctttgttatacttatttggtattaattttatgaaaatttagaccaaaatttatgtttatcttggtgttgttgtgacttatttgaagttttttaacattgttttataacaacaaaagaaaatatatatgtatgttttgatgatgcagtcatgtcatggtagctgtgaaggttatggagtcattggagttaaactatatcattttgatttttattgtcttccaatttgtaactctattaagcaacttataatttgtttgtgttactgataatctgttcctttttatatgtttacatttaccctttgggtctgttatttttctactatcttgcgcacaaaagaaaatgcttaatctttctaaatgttctttttctcaatgtggaattgtattttggttggtcaataagatcttgtgcagaaaaaaaaatgattactctttctaaatgttctttttctcaaatgtggaagattgttattttggttggtcaatgttattaatggataatgtagggttttggcctaattctagatattttgtgctccattatatccacataattttatgttctatattatctgagaggttgggaccactaaattgtgatattaagtttttcaactttcgtgaaactttacatgggaaattgcagtgtaatttccttaaaaggcattgaaatgaccaggttttgtatctggttattatgactgttataatttagactcttagtctatcttgcatcaaatatcatctactggtttggctaggatataatgatgttttggttgagtacgggctgttaacactgacacttcatattgaaggtgtgtccggtgtccgacaacgtcatgacaccgacacatgttacattcaattattccatattctcaaattattaccggtgtcgacgtgtcagtgtctttgtcatgtctagtgtccgtgtttgtgttttccataatattctcaattacttccatattcttttgttgttgatctgtagctttcctaaccaaaaagtaggagaggtcactgttttgggctaattgagtgggctccataagatgcctctttggtgttgaatattatacatggaattgcccttaagattcccttgtttgtggaagagc

SEQ ID NO: 4459 - DNA, 1451 bp, Medicago truncatula
  Intron number 1 from transcript Medtr5g069390.1 (locus Med tr5g069390) derived from phytozome v7.0 (chr-ID MtChr5; po s 25067531 to 25068981)
gggttaggctcatcaaaatcagtttctttgtttaatttctttgagtagtttatcacccaatattgtgcaatattttctggactttgtagtaatggaaggacacaattttaaaaaaataaataaaaaaatatgcaaactttgatgcaaaatatgatcttaaaactttctagaggttctttctatttatgaattgattcttatgtaggatatatacgattaaactaaccccatatccactactccttaattacttgttttagctttttatttttgttcataaaattgagaattttaaggctggtttaatttgcgaaaatacattttatgtccatttcttaacatgtatgttaattttacttgttaacaaggtgaatagagaccgttgatttcacgaattaaacaaacttgtacttaaaatgttttgtatttacaaaattacttatagtgagttatttattttcttttcattgaaaattaataaagttattaataaactaactttattaaaatttatccaaatgtgcatccttatcgtatttagtaaattttaataaatactacatctcttcctttttttttgggtacaaatcttttattattattattattattatcattattattatcatcatcatcatcatcatcatcatcattattattattattattattattattattactattattattattataagttaaatattttactaaaatactgtgattaaaggtctaccttcgatccattttttgaagttccatatgagacaaatccatgtttttatgaaaatatacattaattaaatgattccttaaaccttatgcaaatatcttaaaccaccaaaattttggaatggaggaagtagtcattacgtggatagatgatcaaatccaaggaattacttacaaagaattaacaatgagaagaagagaaaaaaaacagaaaaaaaaaaaaaattaattaaagaagggggatgctacaaatctaatcacctaacatgcacaaattgagggaagcttgttaaatataaataaacaatgacaccttattcttgtaatggcaagtccattatgttatgttggtgggtagtggctacacgtagaataatatatatagagagttagagtttgcaaattgcaatgcaagaaagtgaagcttggctaaattgcatgttttgttttattagttccttcttattggggtatgcatgcattgcattaattcccaaatggtcaggtggggtacaattggtgtttgtcttgtctcttggattttgaggcacttcacaccctttcatgccaaatagttgcctctttactagaccaaggtgtattagtcttttgaccacatcctcaaagctagttctttaagaacccatcattcaacaatttttataaaccaaattaaacaagttacactcaagttgaaagctttaagcttaagaaaa

SEQ ID NO: 4460 - DNA, 681 bp, Medicago truncatula
  Intron number 2 from transcript Medtr1g023130.1 (locus Med tr1g023130) derived from phytozome v7.0 (chr-ID MtChr1; po s 5042855 to 5043535 reverse strand)
ttgaagctgccaagttccagtgcttcagtacttttgtaagtaactgaggtatttttaaccattgaatgtgtgattattaaatccagattcatattctgaatcggaacacctttttttttagagttgtgaattgaatcttattatcaattgtaagatatataatcaataagagtatgacatttttatgtaaacacgacatgacatagcaaaaaacattagctaatatatacaaatttcaaaattcaagtcctaaatcaaaatgatataaagtgtatgcaaaacactgcacaatacactgtaggaaggaagaataaaaagcacgttgtaggaggcagtggggaccaaaagcacagtatgcaaggctcttcagtggtgattttgatgataaactacacagaatctatacaaagttaattatttatagatacaatagttattgaccttttttatttttacttggatgggatgttctttctctggcaatttttgatgtatttgcataagcgatttaagtcatcgccgactttcgaagacttatcgaataactgttacttgtgtcggttgcattaagatataccgagccctgcaaatttccggggccttaattattgtgcaatgtcaatattgtaaatttatgttttagctgcttttcatttttgcagagctgacaagggagactcc

SEQ ID NO: 4461 - DNA, 2422 bp, Medicago truncatula
  Intron number 1 from transcript Medtr5g016730.1 (locus Med tr5g016730) derived from phytozome v7.0 (chr-ID MtChr5; po s 5937322 to 5939743)
tagaggattcgattctgataaaggcccgggccgaggtcggggccggcgctgcaacacttgtcaaagttgcctaatattgaagagcaaacatgttttatttccatttgggccaatgccaaacagagagggttaagagctactaataatgggaataggaagaatcttgctcagttttgtaaccgattataatcgccaaaaaagaaagaagttggtgtcttgtcaaggactcttatctaagtgaggcctaaataatgatagagagactgagagagatggaaacctactttgtacaaaacaagtaagaatttgtgtggtgataaatatttcacgaggttatttctttattaaggtttgatgttgaatgtgatggactttttgggtacattgtttttccttaattggaatgagtttagggttccaacgctaactctttaccaacttgtcaaaatcgtgctgtttgcgttgttgtgactacgataaatacctatgttgctaaaataagcatgtctacatgattgaacagctcatattcatttaattttgtatgcattttgaactttaattctagcttcccttgaacacttggggcatgtttggcgtcacggtagtttgtcgaaattacaatgagccatcacggttaacaaataatcttttcaaaattacagtgattcaacgtgattttaataaactcgccatgataataaatatgaaccgacgattgagtgaaagaaatgcaattgatattttaaacctttgtatgcttctagggagtatatcaattttttttcgtatagatgcctatgttttaatttccaaatgattttttgggaccaaaaattcaaaataaaaaggttaatggccgaaaataatagggattctttttcaccagcaatgtctctcatgcgcgttgaatgtccaaaaacatcatagaatttttggattataaaatctgaattaggatttttttgtcatttttaagtgaaaaaaattagtcacggttcaacagtggctagttgcttttttcacaaatttagattataaaatttgaaaaataaatacttctttagattttaaaacatgaatgcccatacatgctttatattattcgtgtcaaaataattttaacacttttccccgtaattttcttttgcacaataggggttcaaaacatgtacagtggtgtttggattctaaaaccatttttttattggattttataattcaaattggtgaaaaaaactattagccatggttgaaccatgcctaaaacaacaatgaccatttttttctcggattttagaatctaaattggtgaaaaatcttaaggtatttttgtacctggaaggacacgtgagaaaaatagatggaagatgagaaaaagagactatcaaaataataacatatattacattttattttttatttttaagaataacatatattacatatttagctcaaatttgatattacgcccaaactatgaagtccctttagacttggtggattattttttgaaagtgcgacttgtggaatagtaaagatgatttgttttaatattttgaaactggacaaaaaaaatctagtagattttgtgtccaattcaattttacaaaatcaacttctaagtaagttttttttttaaataaatttttgtaaggtggaagtaatctgcaacgattgccgcttcaatgacagtaatgaataatgataggtggaagatagattacacaataacaaatgagatattttttgtagggaacaaatgacataattgttaatgagagtgagcataaaaagaaaacaaaaatagtgaaaataaaaattgcacgttgattagcaggtgtataaagaaaaatgaaatgaatgatgaagcatggcttatccaacaaaaaaaacatgggcttaaattggttcgggatgaacaagctcaacaagaaatttgatcaatagaccccttcatttgcttataataccgaaaatatctctctcggcctcgggagttacggggtatctcccgctcactcaagtttgaaggttacgacctgattttttttacttatatatcaagcaaccagacttctactacacaacataccctacactctaccatcatatttgcaaaataaaaaatcggggtttccaattttttattttgcaaaaaaagagtttctcaaatcatcattaaagaatttctacacttatttgctgtcaaagaacatatattaaatatcttaaactgattgcattgttgttttgtgtttcttttaaaccagagttgttttttattaggatttaacacctaagcctatcttgattaaactcccgaaccatttaggaatgaatgactcaatttaatcgcaatattttgatgttgctaaattataattttttttttattttgttatgtgcttcatttatagtt

SEQ ID NO: 4462 - DNA, 3148 bp, Medicago truncatula
  Intron number 3 from transcript Medtr1g103520.1 (locus Med tr1g103520) derived from phytozome v7.0 (chr-ID MtChr1; po s 21584943 to 21588090 reverse strand)
ctactgttccagtatcttctttgcttaaggtgcaggttggatgcattggagtgttcatcactttacaatcttctagcttgaacttcttcagaagctcctttgtatattttgtttgatgaacatatactccttctttactttggttgatttgaattcccagaaagaatttcaattctcccatcatactcatttcaaattcatcctgcattaacttagaaaattctttgcaaagagatgcattagtagaaccaaatattatatcatcaacatatatttgcacaatcaaaatatctttcttaagagtccttctgaagagtgttgtgtcaacttgtcctctttcaaaatcatttttaattaagaaattacttagtctatcataccaagctctgggagcttgtttcaagccatatagtgatttcttaagtttataaacatggtcaggatgcttaagatcctcaaacccaggaggttgtttaacatacacttcttcttcaatgacaccattaagaaaggcacttttgacatccatttgatataatattatgccatgattaattgcgtaggatagaagtaacctgattgcttccaatcttgcaactggagcaaatgtttcagtgtaatcaatgccttcttgttgactgtagccttgagcaacaagtctggctttgtttctggttacttctccttgttcattcagcttgtttctgaatacccattttgttccaataatgttcttctgagaaggtttgggtaccagatcccacacatcattcctttggaattgatttagctcttcttgcatagctaatatccatccatcatctgagagagcttcttcaacagttttaggctcaattattgaaagcagtcctattaatgactcttcttgtctaaaatgtgatcttgttcttctaggactatctttgcttccaatgattaactcctcaggatgtgaagatttgtgcttgaatttaggttgaataacctgctgagtgttatcttgaaagtcctcagaagcactttcattctgtacttttgggctagattctgcttctgaattagactcagcttctggagtgatttcagcttctggacaagattcaacttctgtatacttttcagaatcagaaggttgatcagattctgatgcatcttcagaatcagttgtacctgcattactttcactttgctctgaagttttacttccaggctctctatcatcaaattttacatgcatagattcttcaacacattgtgtttctgaattatacactctgtatgcctttgacctttcagagtaacctaaaaagattcctctttgagccttggcatcaaatttcttcagatagtctttagtgtttaagatgtaacaagtacatccaaactgatgaaagtaagagatattgagtcttcttcctttaaagagttcatatgctgttttctccaacataggtctgatatagatcctattttgaatataacatgaagtattgactgcttctgcccaaaaatgtttagctaagttgttttcatggatcatggttctggccatttcttgtaaggttctgttctttctttctacaaccccattttgttgtggagttctaggagaagaaaattcatggagaatcccatgtttttcacaaaaaagttcaaatggctcattttcaaattctccaccatgatcacttctgactttcaaaattttcaattctttttcagattgtatttgagtgcagaagctgctaaacacttcacatgcatagtctttacttttaatgaattttacccaagtccatctgctgtaatcatcaacaatgactaatccatatttacttccatataaggatgcagtgttaactggaccaaaaagatcaatatggagtaattctaagggtctggaggttgatacaatgtctttagatttgaacgaacttttcacaattttccctttctgacatgcaccacaaagtgcatctgaatgataatcaatgttaggcaatcctttgaccagttgtaacttgctaattttagaaattaatctccaattagcatgtcccaaccttttatgccatacccattttttatcattcattgacagaaggcaaactaccttctgatcagccagatcagagaaatttattttatagacattctcaactctctttcccttgaatgtaatggatttgtcatccttgttaactagtgtgcagttggtcttactgaacgttacatcatacccattgtcacaaaattgacttatgctcaataggttatgcttcagaccatctactagccacacattattaattgagatggaggaattaccaatagtacctgtaccaatgatctttccagtttggttgccaccaaacttcacttctcctccatctttcattgtaagggtaaggaacaaagctttctctccagtcatgtgccttgaacatccgctgtctaggtaccatgacctttgtttctctcttgcccttaagcacacctgcatttttggacaattcagatttaggtacccatatctttatgggtccttttgggttagctttggaggttttacttttcctcccttgtaccttagggtgaatgctgagtggcttctgatcattcaatactttaggtttgacaccttttggtattgttttctcagaagcagtagctgctttgttcttctgatccttttgttttggaattttagattctggtttaatcagattctgatgaacaggttctgatcttttcagaattttaatcttttgactcttaggatcagattttgtcattaccttgatcttaagattctctggctttgatgtgatcttagcctgtgaacctgaagcttcaggttttgactgaacagcagttatagcatttgtaccttcaggcacaaaggtggatttcaatccatccttgatacaatcacagtagctcttgagactgtattctttggatttctcctcagaatatccaatccctttgcctttgttcttgtatgtgctgtagatcatagaagcaactttgcttctgtctattccagccataataaaatcatctaaggcaatctcatgtttattgcctgaacctttatcacatttttcttgtagcttctgacaaagactcttgagtctatcttcat

SEQ ID NO: 4463 - DNA, 805 bp, Medicago truncatula
  Intron number 2 from transcript Medtr3g105540.1 (locus Med tr3g105540) derived from phytozome v7.0 (chr-ID MtChr3; po s 26429045 to 26429849 reverse strand)
ttgttgcttacggtggtgctccaataaaccagcaggtttatgtcccatttttgatttttgcgtataattgatgattgctttatttattttattaaaagtgattattcaggatactcatgtgacgtgatactattcttcgtagatgatgcttcaattattatcttttttgttcagttattgatccacatagctaacccaacctagtggtataatgcttaggtgctattcgttacttgagttcttgttgattctgaatcttttgtggttaagcttttagcacattcaaggttttgttttgtatatcagaggttctgtgaattactatatccttacaaaaatttgaatacaaaccgcttataactttttcattaaagcacgagagattttgaaagtaatcatgtctctctatctgctacgctcttgttgatttcgttcttatttgatgaaataattcaattcggactagacactagcatattgttcttgaatgaccaatcatattttactttttaatgccagtactatatccttacaaaaatttgaatacaaaccgcttataactttttcattaaagcacgagagattttgaaagtaatcatgtctctctatctgctacgctcttgttgatttcgttcttatttgatgaaataattcaattcggactagacactagcatattgttcttgaatgaccaatcatattttactttttaatgccagtataaagcatttatattttggtatagatcataactaaattaatttgtacagctacgagagcttgagagaggagtggacattcttgt

SEQ ID NO: 4464 - DNA, 2154 bp, Medicago truncatula
  Intron number 1 from transcript Medtr6g005910.1 (locus Med tr6g005910) derived from phytozome v7.0 (chr-ID MtChr6; po s 563875 to 566028)
atacagttttgtgtggtgcttggactcttactagagtcgatggcatatcgtttcgcctttttatttattagaatttctctatttttgttaaagataatcttagttttattatgtttttgatacttgtaaatttcttcttaagaattgaaaatccaaattatacaccttcaattcgtatattaatctataaaagtcacaaatcaaaacttataaacaaaatagtgaacaatttaatactttgaagttttttttttgtaggagatactttgaagttttgtcacgtacgtatccaataaacaatcattgaacaacacatcattttttatatttacttattttcaatcaaatttaaatttgattagtagtaataacttaactttataacctcaaaatacaacgtttaattctcttcgatgacaattacaaaatgataattagtgtcatttaattaaaaaattattccccaattttaattataagttgtagtaccatacataactatagattatcaaataatttcacaaataagttggggaagctaaaagaagcaaagaaagtgggtcgtagacaatacatgcaacgttatttccatgttcaacaaaatccaacttcatatttctaatttacttttttcctttttccatttttatatatatgcttcaagccatttagaaaagaatctttggtgtgggaagtatgaataagatggataaagttttttgacctttggtcaatgtcttaaactattataaaataaaatgaaataattttgcttaataataaataaattaggttaatttccacttcaacatgtaaaattctctttatgtttccctttcattgtctataaaataaattgagtcagtccattctctttatacaccaccctctctcttttttgcattcactcaatttatacttttctctctaattttgcttctgcattcttttgttttactttttttttctttctcttgtttgtttcctcttgttttttattttgtgatcactagatcttacatgaaatggggtgctgaatttttatatttgttttgttataaggtgttgtttatgttgaattttctcatattttgctctttagacactatacagtttcactatttttaattttaattttattttttatggtaaattttgttatttgttatatatatagtctactgttaatattggttatttttggttatattctgttttatctttactcttgccaactagcatgaaatgaccttatttgtgagtataaataaaataaaaaatcagagttaaaaagagggaagaacttgcttcttctatcactttttattgtttcttccttcctccatagtatttattgtttaccatttcattttattaacattactttttttatttactcgtttatgcatgttgttgttggtggttttaatgtgcaaaatgtgacttttaatttagttctttttttttttagcaaacttttaatttagttctatttcttcggaatgttgttattgtattttgagtttaaaactaatgagtgttgttaccttagtttatttattagtttttatcaagccttttcacattccttttgttttaacggaataaccatgtagtgtgcattaaaatttaattctatttcttcaattttttttctttccaatttcaatttcaattttgagggttctgtcctgcgtttaacagtattaagcctctaaatttccattgttgaactaaaaccaaaacggccacaatctaacaaccaaaacggctactatttattcctatcattctcacataagaacatgagtcacaggaatgtattaagcctaatttatttgaagtaattgatatacataaggctcttagtggtgcaatggtaacgtgtttcttctataggctagctgtcatgtgatcaacacccatccatgccattttttacaaaaaattatttaattaaaattatgctgcacattaaaccggtccggttttcaaacacctccggtccggtccagttttaaaaactatgatctctcctctccatcttctatttcgttttctcctcttcaactgtctcacggacgtcactctctctttcagttgttgtaagcggtcggagacggatctgtgtcgttgtagtcggagaagacgagt

SEQ ID NO: 4465 - DNA, 1283 bp, Medicago truncatula
  Intron number 5 from transcript Medtr5g100440.1 (locus Med tr5g100440) derived from phytozome v7.0 (chr-ID MtChr5; po s 40169617 to 40170899 reverse strand)
gatcttatactacattggaacaattcgaggtgtgttaaaatctattgaccgttcgtagttgatataggcagtgcagatttattttctttttgagattttgattgttttggcaaaatgattatactggtattctattttgtctatgcttcttgtttttgttgaatccaacgatagattaggatttgtcgaagtcattgacatcaaaggtgtaaagaaagtattttttttttttttgtctgataacttgtctattttggcattgataaatcataaatgatagtcttcttaacttggtggtaatattgcagtttcaccctcatggtatgatcttgcttaaacactaggcaaaacaggatacaaaatacaatcattatagagataattagggtagtccccattttagagatggtagaatcttgtcttaggtggtttgggtatgatggagaaaatatgtagaaacaccagtaaagagagccggccagatggtagatataatccaataattataaggtagatagagataaaaaaactatagactaaatcatcaagagaaatttagagataaactgtatctttggacataatgcatatgatagaactctatgacatccataaatctttgaatctaactctacctggtgtaaaaggtttggctgttgactgtcgttgacttttatgattttgcttaaattaagttacgagcagaccagacatttgcatacaaaaaatgatgtctattcatttgtttaaattaggtttaatggccttctttgttactggttttcctccatgctttgtgaatcgttagtgttattcttattctggttgttataaacttgtaatgcatgaacagatgtgcttgacatagatgattttaggttgcaaatcttgatttactaggaaagcaaaggcaacgccgatatgatataccttatgatgcatggcttgccatcaatcttcactcaaatctcaaaaaaaaacaattttatgcccagtaaggccacagaggactgcaatttctagaggttgaccgttgataggcattagggatatattggaccgtcttttagatgaaagggatgcaggagaagacaatgatatctgttaattacaaaattgttacgttaataaggatccctttatttcattaaaatcccgatctttgtttgctttatcgtctgaatcaattttaaactgcacatagatagcactttcctgaccaagtggtgcattaaaaacaaattattttactgacatttgaatgcattgttgaatgcagagtg

SEQ ID NO: 4466 - DNA, 833 bp, Medicago truncatula
  Intron number 2 from transcript AC229695_20.1 (locus AC229 695_20) derived from phytozome v7.0 (chr-ID AC229695; pos 84461 to 85293)
cgtaaatttttgtaatcctaatgtcagttgaaatatcataatttgttctgttacaattcttccatgacacatatatttagtctcttgcaggtaactttaattgtatctttgtcaaaaaatatttgtgtttggaatctcatagcagaaagaaaacgttgattttccgtcatagcaaacgtgatttcagttaaaaatgtaaatgaaaaaatttgaacagaactgtttacagagaaactcttctatatacacaactacaaatgataaatatttaagacacactcacatcaaatgtaaaataaaattaaacgatgttgattgatgtgatttaattatttttgattaattttttccattttatgtgagtgtgcctaaatatttatcatttgtgattgtgtctatagaagagtttctcctctttacaaccttgtctagcaaacttcttagtcctgaatgacataggatataggaaggccaagaagaaactctgagttgttctccctttacatataatgtggtaagcatttcaacgcgatattagcattacgttggaggtgacgatcaaattctcgcatttcttatcactcgactcttagtcttaaaatctccactccaaccatgaagtcaactttatacacaaaaatgtggtaagcatttaagtgcaatatttcttcggatgtttaaaagaaattggaatgctgacaattttgagactgtcaactatttctaaccaccttttaaggattcgaagcctataaaattaagaagaatatgattttaaccagacttacttatgaaatatctctgaaaattggttttgtttatagtagtagtag

SEQ ID NO: 4467 - DNA, 5005 bp, Medicago truncatula
  Intron number 1 from transcript Medtr6g090280.1 (locus Med tr6g090280) derived from phytozome v7.0 (chr-ID MtChr6; po s 19151623 to 19156627)
gtatctctacacaagtaatctctctctctctctcaaactctctcttagattgtgatttacaattagaattttgggttttgtgtattattttgtgggctaatcaaaaagttgattttttttttttgggttattgatgtgttttgcattcaaaaagttgaattttttatttttgggttattgatgttgtttttctttggaaccaattaaagagttgaattttgtttttgggattttgatgtttgctttgatgttgtggggcaattttgattctccaagtcaaacatgaacagaaaaaaaaaattatactttgatgttttaaatttttgttaaagagtctcgtattggataaaaagcaacatgtctgaatatatgtttataaatcgatgtaattattatatcttaaactgattttgtggggttgaacccaaccccgattattaagagtttttttagtagagctatttactgtttcattcatattttttttttttcctacttttttcctcctcctaaatagtgatgatgatgtgtataatagtaggatattctttttctttagtcaaaatattattattttttgtataacatctaatatcatatttgatcaacaaaaagaagcaaaaacctattgttatttgttaaacaagatcatgtgaattaaacatatattatttagtgaattgaagagaaatttttaagatttcttgatagagataagaagatcaattgatttggaatgagaaaataagggttagtagataatgggtagtggcgtgtggggcttaatttgagtactttaatgacataaaaagattacgtttactaattgggatatgcatcattttcagcagactaaggggcaaaattttctgaattttttgaattttaattttggattttggcatcattcgaaattgtgtgaggagggtctttttctcatgtccatttttataatattccttgaactatagaattgtataatttctttgtgattatcataagtttttattttacaaatcataagcaagttgtgattgttatcttcttacttgtataatataaatctaaaattagttaaaatagttttagtgaaaatggtattttttttaaagaaatgaaaaagtaacttattattagaataataaaattagtccatgaaaaaagtaataatttaattagaatattatttattgaaggaatatttttgaatctattaaatgacttttatgaatgtgtatctgattgtgcaaaaaacattcaatataacactgccacactattatgtcacttcctaaattatcacaacattaattaatttacacaaataataaacaaaatcattgtatttatcatagatttctgtaaattgtagttttctaaaatattaaatattttattattattttaaagcatcttaagtttttgataatttttcagattaattttacaaaaatgagtttaatgactaatgctaaccgtgtacaaaacttaacctttgtacttatagtcattgatgtcactttaattgatatactgcctaaaaaaaagataatataacactgccttaaaaaaaaatcatatgatttgattaattattccgtaaaacttttttacattgtcatggttgttaaccttaacaaataaacatatttaagccttttttacaatgtcatggttgttaattttgatagacccttgtttccaacgtgttgagtgcttcaactttcaaccatgcattggacccaaaagaatttcaactctgcatcaattgaatttttttttggtgaattgttccccatttccccacattctagaaacctcctaaaatgtgaacatccatgtcaaaactttataacttgtttgagaaggtggttttttttatattgaaaaaagaaaaaaaaaaaaaacacacataacatagcatccacaatgagaataggagatacatcaaggtgtcacgtaaaacaacgagtctcgaagagtctgaaacatctaacttagtctaaccatcgactacaaaattcttttcacataatgtatatgagtcaactagacatcacaattcaaaagaataagatgttcgatggcttatatcgctcttaacatgatcaatcacacgaggtatgagctgcgtatcagatagcgagatttgagaaggaaattttaaaataactttttttttttctttttcttcaaattgatccttaaggcataagtaagaaccgaaactcaattcaaactgatcctcaaattttaaaactgaaaattctaagacacaactaaagacaacaatgaccgaggcctaataatatgaactcttgttgaaagttttcaaattatagacatttttatacatttccagaaagattcctcgaaataattttatcatttttaattatatgaaacagttaatgaatattccacaactaaccaatgtataaaaaaattagtatttgtgtgagtaatttatctattgtcttctaaagaatgcttcaataataatattaattttatttttttgaaagaataatcatattaatttataagcatgttctaagcatcattgatatgcttctcagttcccgaacatgtgcttctgttgattaatattctttgcatccaatataaaatttatttctatgtcctgtaacacatgttattcaatttttattttatttttttatatttttggcataactccatttcattaatcatgcatatatggggcagtaaaccttaatccccatgattcttaaaaataaaacaatactgtaaaaaaattctatgcttttctatttgctttgacagagcaaaagcattcttctctttaattttgggtcaataagtttaagctatgcttttttcgtttcaattaaaaatttcatccaatataataatataataacagtataaaattcattcatgtggaccacatgttattttattgtcaacataagatcattgacagacttaaattatttaaaatgacctgtggtttttgtgatttaagttgaaaatgataaacttaaatacttgatagattttgtctgatcatacacatgattattgtatttgtgctcataattttttatcacttaatttaattatctgttttttcataattattaacctctaaaatattattgaaaaactgatttcaaattattcagaataaatggttatttgtgtttttttttttttttttttgtgttaatttgtttttataggtgtcttctttagaacatcattgcctcaacttgcatatttacatttttttaaggtaatgtttttgcatgtttgtgaccatattgatgaaccacgtgctaacatatataatttcctttgatcagacataaccagctgtacacatggttgttccaatgtagactaagggttgactgcttgctttaatttcaaataaacattaccaatccacattgttctttcatcataattatttaaagattagagaatttcaatttaccaattttattggcttagatgaaaataattgtgttggtaatgttgtttatgcccactttactcatttaaataggaatttttattactcggtcacagatacatactagacgtttcgtataatcagaatgtcattggattgaaatcagatggtttggattttcatacatattaatttaaaaaattaagtttaaaatatgatcaacctaatctcgattcaacgaacaccgatgtatttaccataaaatagtgggaaaggaactatagaaggctatatatctataagttgttggcaacttgcaatatatctatatgcaacttaccataaaaataactatagaaagcaatatattaattgcactttttgttaaaagcactactattgttccatgatccataatgtctacaacccttttttatttttcatataatgtagtgggaaaggaataaagggatatattttccttggtaggatattattctttgaggttggcatcctcaataatggtgatatagtgtcacacaaatcagtttccactctatatttctacatataggatcataggtgagattttgaaggtaaacatgacatgtaaaccacttaaaaatcatgtacaatttttaccccaaatagtcttatgagccacttgtgtatataagaaaatagagaggggaccaaccatcttgtgttcatttatgtttatctatgtcctaattaatatgaatatgatatgtttttgacttcaaatttgatggctttaatgtactttttgcacaccttttctttttggattttttttacctaaatcctaatttctaaccattttttgatgtcatgaattttagcaaaggattgctttatctctttattatctatttataagaagctagttgctattttttttggtgtaggaatcttgttgaatacattatgacagatgtaattatttttactctgttttattttggtaatataggttgtaatatctcttattttgatgcttaaaaaaattgtgatgccaaattgtaactttagttttcttctagcattgccttggtgtgtgtttggttatgcaatgataaaagttgattttgatttaaggtgaattgaatgtaaaatgatttatatttaaatatttgtgtgaaattaagttgaataataaattttaaaattaaaataaattgtaaagcaaaaactctaaaattctaaatcctaactttcttctagcattacttcagagctcacaacacaccttaagtttgttcacagtgagtttgatgaaatcacggtgacaccttgagtttgttgaaactctaaatcctaactttctctgaaatcaccgtggttaactgtgattcccaaacccaccgctaatccgaacatacactttgacattgccaaaagtagaaccaaacacacactttccatgtcattgatgaatgatgaatgtcttatatgaaatatgaacttaatttttttacaagtgtttaatgatgtcttatatgtttatgtaacaggagtact

SEQ ID NO: 4468 - DNA, 1315 bp, Medicago truncatula
  Intron number 1 from transcript Medtr5g024280.1 (locus Med tr5g024280) derived from phytozome v7.0 (chr-ID MtChr5; po s 9630912 to 9632226 reverse strand)
atactacaacctctgtatgttcttctttaattcaccccactttttgttttttatgattttgacatgtgattcatgttttagatttgaaaggttttttctttgttttgtttatgattgtttgttatgttttgtgtatgtttattagctcaaatttggttgatttgtttgtttaatgatgttttttttaaaggataattatgttttttttttttggtcattgaatgaatggatctaattcagattttttttttttcattcttttgttcaatgtgtgttacaattacaaattccgataattcctttttttgttgggattggaatagctgaaaatgggtgaatggtcctcacaaaacattgtttttgtctttatgtacaaaagcaataaatgtgtatgtttgaactggtttggtgtttttttttttttggtgtgtgatgctccttgtcttttatatcaaatctagcacatgtagatgtactatttatgtttgttggaagtacagggaatgagaataattgtctttctcaggttaatttttgattcagtagtttttttgttttttgctgctaagatttaggagtcatttaatggatccaagacttttggtaaccataaatggcgcgagttaatgtaggatcttcgaatgtttgaatgttagaaacagaaacatttgttagacatattagaatggatgaaacagaatatttggggtgccccctcaaaaaaaaaaaaaaaaaattatttggggtgctatattatgtttgacctatgtttggatactcttcaataccacatcccaacgcaagttggccgtgattttttagaagctacaacttgtagctttgaagtggatgcgagtttaacttctcccaccgcagaaaaaaacaggctattggtgcaaattaacaaaatcggacagagtaaaagtgtaaaacaagtggtactcaattccactgagaatatggaaccaaagagaacaaaacaggacaattggtctgttttatttgggtgctatataatacttatgtcactcttcattaatctaatcagggtggttccatattaaaacaacagtctcctggccctgttgctaagaataatatccaatttcatcttttgttcatgtatttacgtttgatttcaaaaatattctatttctatatgggtaaacaattataggtgtgcatgaattgctttgtgtttgctcaaccagtgatgattttttcaattatttttgcgcaccactaatatctttttctaattttatgattgttgttttcagtcatacgttgctctcaaaatccagaaaagtgcagc

SEQ ID NO: 4469 - DNA, 686 bp, Medicago truncatula
  Intron number 11 from transcript Medtr1g019870.1 (locus Me dtr1g019870) derived from phytozome v7.0 (chr-ID MtChr1; p os 4197579 to 4198264)
aggtaaggctttcatctttttgctccattttggctggtttccagctctttattcgagcatatcccatctgaggttgcctattcttttagaagttctacaaagtgcctgtttggattagcttatttaatggcataagcacttataagcaaggttgtaagaatcgagatcttgcataagatcgaaaggggatagcaagatcgtaagacataagatcgcaaccaagattgaaggatcctaccaaaacaaaaattacacagaatatatattttacagtgcataaactactgcaagtttcaaatcttaaacataaaacaaccaaggctcaaatcttaaacataaacgactcaatgtctcaaaccttaagagtgtgtttgggtgggggaatgttttgagggaatgtaatgttttgagggaattcaactactttgaggtgagttcaaacaatagaattcaccttaaagtagttgaattccctcaaaacattactttccctcaaaatattcccccatccaaacacactctaagatttgagactttatgtttaagatttgagactgagtcgtttatgtttatgatttgagacttggttgttttatgtttatgatttgaaactttagtagtttatgcactatatatttggtattatttttgttttcgtaggattctttgatcttggttgtgatcgt

SEQ ID NO: 4470 - DNA, 1594 bp, Medicago truncatula
  Intron number 1 from transcript Medtr8g120200.1 (locus Med tr8g120200) derived from phytozome v7.0 (chr-ID MtChr8; po s 27429547 to 27431140)
gggtgagtcactcactcccctccctatgtattcccttcttctttattttctattatagccataggattagactagatttggaattatttccaatcaattcaattcaattattcactttccacttctgcctaaatggctgtttctcctgtttgtgccaattgaattcaattcaattacccaacattttagaggctgattttctgccctcatctttcaattcttttacttgtatatatttatatcaaaacaaaattaggtttttactgtttactactcaaagcaatttggtgtcataaattcaccaaacaagtctttgtagacttctcttgtggttatttattcatatgctttctcctgtatttgcggtgtgccagtatcaaaacccaggtcaccaaggttaaattaaacacctaattttcaaccaaatgacttataaggaaaccagcatttattcatatgttcatcgataagaaatgaaccaacattgctcagttctatctatataaactctttgcttctcggtgaatgaagaacttgtttggacaaacaacttaacttgtggcttatagaataatcacttatgtataagctatttctataagaaacaatataataaaactgaattttttcgtataggcaacaggttttttttcataaactgtcttgaagagcttatgaaaataaggtgaaaacaacttatgaacataggttctcccaagtagtctcacaagtgcttatgccaatatataagttcaaataagtcaatccaaataggccctaaattagggtgtgaagataagaaaatgattttctttattgggaggtattgtacattggatgcacttatatagttgatatgtgcgcttcaataactagtggataagatgtttttatagtaaattagtggataagacgtgactattgattagtgtgttgttgacaattttaaatgtaaaagagttaacttctacttatagcactttagtcctgtatcttattctaccctagtagtaattgctattccgatctactagagaaatcaattatatctctcctggatttagagattgtttggctgtactgagtcattagaaactgctctagttgggaaaaaagacaattaaggtgttgggccaaaagtcaaataagcttttaaatagcaacaaaagtagaaattctgctattaaatgaagcaagaaactggtgcttattttttaatggtgttaaagtgcctagcggcaaatttcacacactaagtgcagagaagagggtggttgtagattttaacccgtgccctagcatatcaaatgttcccgcggctttttaccatccgagttgcatttaggggacaaatctggtgcttctcctaggaaataagtgaaaaaattaaaagaaagatattttttttttttggtacaaaaagaaagattattattgctaatgaataatgatgttttatataatagcctctttaaggaaacaattctggaaaagtgaatcacagaacgggcgacatgggcttgaagactatttacaccggtctatgttttgttgttatttaacttgttttataacagtgcagtggttgttttgg

SEQ ID NO: 4471 - DNA, 193 bp, Medicago truncatula
  Intron number 7 from transcript Medtr3g105250.1 (locus Med tr3g105250) derived from phytozome v7.0 (chr-ID MtChr3; po s 26283365 to 26283557 reverse strand)
cctccatttttaggtaagttattatacacggtgctttactattattttcctatcaaacatgaacaactagttaaaatgcaatagaataaaagaaaaaatcctgtttgtttaggcaccatgttaataagattttgttttgtagctaatacatttccggcaacctcttcttttgcttgtttcaggcggtggtgaa

SEQ ID NO: 4472 - DNA, 2368 bp, Medicago truncatula
  Intron number 1 from transcript Medtr5g081530.1 (locus Med tr5g081530) derived from phytozome v7.0 (chr-ID MtChr5; po s 30643955 to 30646322)
agaacactctagttagggctaaagttttacgagaagtgagtctgttacctttaagttttctgttttgtattgaattgcatgaattagtcttgtgcatataatgaatttcaatataaactagtaagcatgataatggtgtcctgctttttttcttttggtacttcatacaaatgtaaactagtgatcttgtgaaattatacacaatagtaaaaaaaaaaaaaacagcaaatataaaaagtttggacgaaaactttcaaattgctaggatctagttgcaaattaattaaatcatagctatagatttgttgtggattttctacgataagttttagtcgtgtcgctatggatttgttgcactttagctatgacaagtcttagttatgttgctatggatttactgcgaaattgctcagatatgtcatagttatgttgctatggaaaatacattttcaatacttacttgctgtagattacctaaatatttgcttggaatttaattcttttttctacggatttactaagaaatattttcccagcaaatttgtctctcaatccatgctatggccgaatcagtaggtattctgtagcatttctctagctaaactcgtttgctaggaattagctgcgaattagctgcgaaaatgggtgtagcagatcaaatattttcttgtagtgcaactcatgaaccaaatgagctgaactatatatagtccaagttcaactcattcatttaaaaaacttagatttcaactgattaattcatgaaacaagttcaattatgatttaagtgccagtcgagttctgaatataatattcgagtagtcttctatagaaaccgtaagatcaagacagtggaaatcaatgagaatttataatagtggtaaacatctaaatgtctaaacatccaaatcatgaatatttgttcatacaaagaaagacacgaataaaattgaagtttgcatgctggaaactatagaagagaaaattaataatccattaacaagctacttaaatggatttcaaatagaactagtattaatcaatatttgttagcattctcatcttatatgtggcatatatatccatgttttgttcattgatgaagttatacaaaaatcataagctacatagcaatcgaatttttttataagtgatatttgaaaaatgtaaaatgatgtaacagctctaacaaaacattaactttttcggaaagctgcatttttctattcatatttctttaccactcgataaacggaaaacttgcaaattagtttaagtttgattcaaagattaaagtcagatctaatgttaactacaaaagaatattggatatcaaagagatcaagctcgcctttaaggagaaagagataatacttatagagagtacaaaaccgaagagagattcgttttacgccttgaatgatattagcatcatcttttaggaagaagttagagatgaattagtatctaaatgaagatatatagtagctaatagatatttatttccttggagtatctactaaatttattagtataatctaaacgattcaataagataatatcaaataatagaatatacagtgcattgtttttctcctccaatgacagttcaccatcaagttatatcataataaaatcgtcactcaagttaatttgttcgaggagacaatactatgtccttgagactataaaaatctaattgaatgtttatagtatcaaaaaacaagttatagtataaaaaatgaaatcgaactcccgtgagctaaatataaccaacaattgctccaccaagaaatcgaactcatgttatttcctttgtccagaaaattattagaaattatcaattgaatatgatgaaataagatttggttttaaagttccaatttgctgacattttttatatcaaatgcaataattgatgttggtatttatacctttgcatcataaattttgggtgcacccattttcgcattgttactaccagctgccaaatattagtaacatataccttcttaaatatgtacgtaaaaaatatatgaatttaaacttaagtttttattcagagttgaatttcggtttaaaatctatgaactatcaaatttgacaatctgtatcttcccccatttcttgatggtcccaactttcaaccattttgataggatggtattatgttgcaatatatctcttttgatatgtactcttgttgaatttgtttttgtctaagttccaaaatgtcgtttttatcttttaatcaatttgaagctcttggatgcgacatttacatttttctactttgatattaatgaagttattctattcattttcttgtgataaaatgctaaggaagagaatacaactctaagagata

SEQ ID NO: 4473 - DNA, 5912 bp, Medicago truncatula
  Intron number 8 from transcript Medtr4g133540.1 (locus Med tr4g133540) derived from phytozome v7.0 (chr-ID MtChr4; po s 32018408 to 32024319)
tgtcaccactcatatgcttcttagaatgcatctataaatacattgtatctctcacatttattcaatgaataacactaaacagtttttccctttctctctcttagatctgttttctctctcttctatccctttctctctcttccaactgaattcagtttcaagcttcatcaacggcggttgccaattctaaaatggtatcatgagcattttttctcgatcctaaaccatggcctctgcttcgtcgcaaacttctcctattcctacgcatcacacagaaactcaaatgaacaacaatggagttcaacgtatcactccagcagcttcgaaaactttcaaacaagtcgtatcggtcaagctcgacgatacgaactacctttaatggaagcagcaggttgaaggagttctgcgtggaacaaaaatggtgcgttatgtcgtttcgccgcaaattccaccagttttcctctctgatgctgcgcgcgaggccggtgaagaaaatccggcgttcaccgattgggaggagcaagactcgttgctgtgtacgtggattctctccaccgtctctgcctccctgcttgcgcggtttgttcggttgcgccactcgcatgaggtatgggatatgctattcacacttactgttatactcaaatgcgtactcgttcgcgacaacttcgttctgagttgcgcactattaccaagggaacgtgttctattactgaattcatagctcgtgttcggacattttctgaatccttgatgtcaattggagatccggtttctcaccgtcacctcattgaacttgttcttgaggccttaccagaagaatacaacgccatagttgctaatgtgaacagtcaggttgacctggatgaactggaatctcagcttttgacacaagaatcacgcaatgaaaaatttaagaaagccttaattggagatattgcatctgtgaatgtgactcaggcacctacttctgatggaaagaatggtaacaatcaggcttctggttcatattttgaccagcagaataatttttcctcaaatcctaatgcaaatgatgcttctcagtttcttaaccctaattttggtaatagaggtggttttagaggaagaggatctcgtggtggccgcttcagaggcaggggaggccgcaattatggtagaggaggctctgttcaatgctagatatgttacaaggttggacatgatgccactatttgctatcacaggctatctgttccacgtcaatatgagggatatggcacctatggtggatcatttgctggctatggaggttctggaaatggtaatggctatggaaactatggacctcctcctaatgtttggctacaaggtgcaaaccctagagctgcacctggatcttcaacaagacctacttaccctcctcaatatggtaatctcaggcccccaccaccacaagcttacttaactggtactgagtccattaactccaactctcttcacaacagttggtaccctgattctggtgcaacacaccatgtcacatctgatgccaccaacttcatggatgctgtgtccctatcaggttctgaccaagtacatgttggtaatggtcaaggtctgtgtacaaattctgttggctcattaagtttcacctcacccttttctccccatacaactcttaaacttcataatttacttcatgtgccctctattactaagaatcttgtcagtgtcagtcaattcactaaagataacaatgtattctttgaatttcatcctaacacttgctttgtaaaatctcaggatacttctaaagttcttcttaaaggtcacattggtgttgatggcttgtaccagtttgatagtcctcctgtgtctcaaccagctcctcaactatctgcttcaagtctaagtttcaactccaaatgtcaagctaatgagtgcttctcttactctagctttcctagcactaagtttcaatgtaataatcttggaagtacttatactccaatcagtagtagtagtaacattagtaaatctattgtttcttctctgtctatgtacaaagtctggcacaataggcttggccaccctcatcgtgaggttcttaggaatgtaatgaaattgtgttatcaaaatcttcataataaaagtgtcacagatttttattctattctgcctgttgtttgggaaaatctcatagattaccctctgttgcttctaatacttcttataacaaaccttttgagcttgtattttgtgatttgtggggtcctgcatcaattgagtctcatggtggtttctcctatttcctaacatgtgttgatgcctattctagatacacttggatttttccacttaaacttaagtctcaaactcttactatgttcaaaaatttcaaaagtatggtggaactgcaatacaattatcctataaaatcagttcaaactgatgggggtggagaattcaaacccctcactcagttcctcactcccttaggcatcactcattgactgacatgacacacatcaccaaaatgggttagtggaaaggaaacacaggcatatagtagagactggtctcacactgttagctaccgctaaattatccctgtgctactgggatcatgcctttttgacagcaacctatctcaccaataggttaccctcacctactcttgacaacaaatcaccctattttatgttgcatcttcagttccctgattacaagttcttcaagagttttggttgctcttgtttcccttttaccagatcctacaattataacaaacttgaattcagatccaaggagtgcaaatttctggggtattctccttctcataaagggtacaagtgtcttgattctacaggaaggctttacatctccaaagatgttttgttcaatgagcacagatttccatatgaggaattatttacctgtcatcagccttccactacttctgacaccagttcatctttcaccacttttcccatcattaagccacctacaaataacacatcctctacaactgatgattcatctctaccttcatctttaccttctggttctactcccacatcacactacatccactacatcacactacatcactactaacacatatcactagtgctcatttatcacctcatcacactacatccagttactcaccttctcatcatgcttctcatgataacaatctgccaccaggacccatttttaatcctacaccaattaccactatttcaccctcctcttctggtgttatctcttcaccttctcagtcacacagcaacaacactgtcagtcagcataatgagcctgcatctggtccatccccaccacatgctcctcctcattgtattcatcccaataatattcacactatggccactagaggcaaacgtggaattgttcaacagagaattcaacctacactacttctaactcatcttgagcctacaagttacaagcaagctatgaaacactcagatttggcttcaagccatgacacttgaatatgatacattattgaagaacaatacttggactcttgtctctcttccccacaacaggaaggttgtgggttgcaagtggatgttcagagtgaagcagaaccctgatgggagcataaacaaatacaaagcaaggctggtggcaaaggggttccaccaaatgccaggctttgactacaaggcaaccttttcaccagttgtcaaaccagtaactgtcatgactgtattgactttagcagtgacaaacaagtggtgtattcaacaacttgatgtcaataatgcctttttaaatggttatttggaggaagaggcgtacatgactcaaccccctggttttgaagcaactgattacaaggccctatatgggttaaagcaagctcccagggcatggtttgagagattgaaatctactcttctcaagtttggtttctgtgccagcaaatgtgatccattttattcactttacatgccaatcatcatagcaccttcattttagtttatgtggatgatattatcatcactggcagctctaaatccccgcttcagcaacttgttcagaagctaaattcagagttctctctcaaagatttgggtcaacttgactatttcttagggattgaggtgcaccattctgacactggctccctgcacctatctcaaaccaaatatatacatgacttactggtcaaggaaaatatgtctcaagccaatggcattgcttcccccatggcttccagcacaaagctgtcaaaatatgggtcaaatcatgtatctgatccaacattcttcagatcaatagtgggaggactggaatatgccactataaccagacctgaaatctcttactctgttaacaaggtttgtcagtttttatttgcacctctagaggatcattggaaagcagtaaagaggatcctcaggtatttgcaaggcactattcatcatggtctgctaatcagtcctgcatctttacatgaacctttgcaactcacaggattctgtgatgctgactgggcatctgatccagatgatagaagaagcacttcaggtgcctgtattttcttaggtcccaacctcatctcttggtgggctaagaaacaaactcttgttgctaggtcaagtgcagaggctgagtacagaagtctagcttaagcttctgctgaaatcttacaggaactacatgtacccattaaagtgcctcaaatttactgtgacaatttaagtgctgtatccctggctcataatccagtccttcactccaggatcaaacacatggagctggatatcttttttgttcgggaaaaggttatcaacaggagtctacttgtgtctcatgttccagcacattctcaatgggcagatattctcactaagccattatctacatccagatttttggaactcagagacaaactgagagtttcagacctccttagtttgaggggggaatgttagagtacatagagtccaaggctcttactgtaactagtcttagatagttcaagtattatagcttagcctcttggagtgtgacatgtgtcaccactcatatgcttcctagaatgcatctataaatacattgtatctctcacatttattcaatgaattacactaaacagtttttccctttttctctcttagatctgttttctctctcttctaactgaattcagtttcaagcttcatcaatggcggttgccaattctaatattatatgataatgaatgtcgggctttagagctaatgagaaagtaatcacactgttgctgaaatgacaatgctatgatggatgagtagtcacataaaacgttctcctaggataaattataaatataatgctcatgaattaattttaattcttccatacctatggtctatgtgcttattcctgcatttaagttctattaatgaatcccggaggaggagaaagaaacctgatagattcaccgatctgagtctagtatttcaattcctataggataggattaaaaatagaaatgttagcgaaaaagttggtgctcatcttatgtggtttgggtttgtgtggagtagacttgtaaaagcactgataagtgttgattggggtggaagatagttcaaacgttaaaggtagagagaaacaaagaaaaacaataggcttgaccataaaaagagatttgaatataaatgatttgtcattagacatgttcatgatattattgttgtattatttctctctcacttttacgctgctggtcatgttacatacattatgtcccaaattcaatttaacatataacaggatttaactcagaaatgcgtccctgtttatcctttcctgacaatacaattacttatgttaatgtgtttcatatgaagtttattttatttgttgttgcaggactttcacttcttgaatatcctggagtgaagccg

SEQ ID NO: 4474 - DNA, 963 bp, Medicago truncatula
  Intron number 1 from transcript Medtr4g137560.1 (locus Med tr4g137560) derived from phytozome v7.0 (chr-ID MtChr4; po s 33900640 to 33901602)
atcatacccgcagccccactctcgctgtcaaggtaatgtttttacgttttttacgatcacccttttcgttttaatttcgtgggtcgttcttcaattttgatcacagttttcgtggttttagtgttatttttttagctgacattgttcttcaattatgataatttgatgggttgatttgttgaataatgtatttgtatgatatgatttactatttttttgacgacgtaattagtaatatggagtataaaactaaaattacttatcagatttagcattgattttgaaagattttttgatgatcacaaaatggaatagatgatttgattttttgtttgcctaattgcttattttagatgatagaattgtaatgtgttgtcttaatatcttttgttgatcaacaatttgtttttgtgatattttacataatgcattcttaattgtccgtggtgttatagtaatttgacctattttgttttgtttttgcatatattaattgatgagcgaaatttgcttttgttatatgtctatttctggagctgagcagcgtaggtttgatcagttatgtgtatgatatccataaattgagctttactctgtattctctgctgtcgagttcagtcttttgaggggatgagtaatttttttctctagttgttttgattgtagaaaatgtaaacatcacagaatatatcgttcacatcgttcacatacatgtggattcgatttagtccgtggaaatcagaaaatgtttacacattggttttgagagcaatatcctttgtgtgctgaggtgttaccgtacgaaaatggaaaatcgtttatcttagttgcctaagtcatgaatcactttcatgataacttcaaatgaaaatgttttagtggagatttaattacaatcttctgataacaatttgttaaaattggtctattgcttgtaatgttttctttaggtaacatcaccat

SEQ ID NO: 4475 - DNA, 1614 bp, Medicago truncatula
  Intron number 5 from transcript Medtr8g025870.1 (locus Med tr8g025870) derived from phytozome v7.0 (chr-ID MtChr8; po s 5399650 to 5401263 reverse strand)
tgtgcccaaagataactggtatattgcaaaggcaagtccgatttccatcttactgcttacatcctgattagtaatgaccgatatgtccgaataggctttctgtttgtgttgtcagtgttttcaaatagcatcaccatagcatagaggattttgataaaactgcaacgaaaaccgcaacactatcctagtttcactattcggaaaatagcggacacttttctagtctctactagttgatgtagtagcaacagcagaaaaaatagataattttaggtgttttaaaataataaactaaaattgtgaagtctgcgtatgtgccaaacttgaccaactatagagttagtgattactcatatattccccatttccttttttatctgaatgcaaaatgccttttcttgtgtatagtttacttatttcaatgatatgcggcttcctctgtttgcctgcaatgctatctgctatttaacaacgaagttctggcgtttcgctattttctgcaatctgctatttatagcactgtgtgttatttatgataacctgtaatcttgttggacgtattctcaaataatgtttgagtgactgtattgtgctgcttgtgactgttttttctgccacaaatgtttactgtcttactagttatgcctaattaaattccaaaacgtagttaccttgacgggcttgaactttgagattaaggactcgataaggtgcattgaaagcacatgcacatatctcatgtaattctccatccactgcaaggttttacaaaagttatagcttgtgacaagaaatagcgaactgtttagcccttcaattatgctaatttctggaatattatcaatttaatgaatggttgttatgaaccaactctccccaaagtttaaattatttggtgaaatcgggttaactcgcttataggtttttttctgtgtaaacctaggtaaacagacatagaatcaagagtttgaggacaaatgaacaggcctgcaatttagttgtaacactcactacatagatgcatttaacattccaatttgaacttggaatgaataggttttttctgtgttttttaaaaataaccggatgcaacaaatgaatcataagacttcatggtgcacaaaacatcaatcttatagttgtaacactcgactacatagatgcatttaacattccaatttgaacttgtttgtaaaggaggttaacgatgttctattgggtctcaactctcaaccccatagtcccaactcaaacaatgtcacaaaccataaaacatgaagaaaaaaaaaaccatcgttgcaagtttgcaatgaacccaaaatgccaacccggtgaatgaacccaactccgatgagttgaaacctagctctactaaagctaaatttagctacaacgagaggaacctagtccagtcatccgtcgctctttagtaatattgattgtgattgattttgaacatgttatacttatttgtgcaatgaattgtgaacttatcttgtgatttgtgaatttgtacttcaaattataattgtgatgtcatggtctggtctagtatgggttaagcaggatctggcctcaggtgatttgtggcggtgtagtacggtattaaattag

SEQ ID NO: 4476 - DNA, 3869 bp, Medicago truncatula
  Intron number 4 from transcript Medtr3g025530.1 (locus Med tr3g025530) derived from phytozome v7.0 (chr-ID MtChr3; po s 6626149 to 6630017)
aaaactcaccttgcttagttgtggagtttccacaggtatgtttcctttataaccatggagtttttgagaaaattttgtttaatttattcttattactatgtaaactttattgagtggagaagttgcgaaaacacatgatgatatacacgatgcagtaatccctttatatacagtgactaactatgtttacttgactaccaagtaaatcctacgatcggattaatctctgactaactaactcaattttatatacacgacgtagtaacccctttatatacagtgaactataccgactaaccatgtttacttgactaccaagtaaatcctacgatcgggttaatctttgactaactaaatcaattttatctaactaacttattataacaaacttgtgataatctaaaattatacatcataacaactatatactagacattttgaaaagatagtgttcctaatactcttttactaaaaaacgaccaaccaatttttttactaaagattcatcatcaaaatcaatggatcgcaccaattacatcgttaatcttaatctaggtatgattaaaattcatatattttcaatattttgacagtttataatttatattgacggtaagaaaaccactatgctaaatattttttctcttccttataataaatgtcataatcgcaaaactttatcttttaaagagtgtcacattaaattttcaattttgttttaatataatttttcaagtgtaacatctaataatatacacttatcaatcaataattattatttttcactttatgtttatgataataatcaaatgccatgataattttgggacggtgagagtacataacttaaagaatgtatacacattacatccatgttatgtttttttgaacaacgttacatccatgttatttttttttttttattatgttctctattattagcaacatgtttcgtgctacctgtttttattcctgctacctgtttttataatggtgtaggacatggttcagttatcgtattccaaagggtagttgtgcgtcttgctttcaaatttcaatcttacaccaaaccaacctggtcattaattaaaaaacgatatcatcatatttataatatatgtattttaaaaaattataatgtaccataaaattataaaggcaaaattacaattagtcctttaattttattttaggtaacactttcgtcctttattttttttttgtcacgatttagtcctttatgttataaaataacaacatagttatcctttagttatatttatttgatttgattaaagattaaataatggaccactagccttgactagcacgtgtgtcttcattttcctttgcgtatgggatgactcaattttcatattccaaatcaacatttaatgttgcctgttgtattctgtgtgtatctaccctctccttatcttatgatcccttgactgttaagttttgcgcaacaagtgatgcattgcattcaactgtaaaccttgttcggtcaataacgaaacccatatcttcatttactataataataaagggtgggagttttttatttttatttttttggtctcatatacgggtattatagtgatatagaaaggaaaaataataaaaaaaagaaagagattcatattgtaaaaaaaaaaaaaaaaaaaaggagaaagagatacactagaaaaaagtgaggtaaagagaacatgggaataaataaaatatgatataatttccgagtcttgttaaaagaatcaaatatacatttttttttttacaaaagctttctgtatcttgctaaaaggattataatttcttaataaatggtcttaaaagttcttttaagggaaatggtcttaaaaatatttattacattttgctaatttttggtaaaaagaaaagagtttgatataatttattagtacataatttccgatttccctaaaaaaaaaaaaaaaaatttaaaatgttttgttttatgatacaaaaataaatatggcataacaatctttataattttttttgaggtaacattctttataatttaaaaatcagtaacttccgcatatacttttagaagcaaatgaaaaattcaaacatcaatatcattattaccacctgattgaaaaacaattattcagtattcaatactactacaaaacaaatctgcaaagaacacatgatagaagagaagttgtcgaagaaaacatataagataatttttctataaagagaaacacgatagcagagacgcaaaactagtttttaatggaatattatagtaagacttggaattttatttccactaaacaaaagactaagaattttataacttgaaaagacctattccattccactcatgtctaagagcgacaagtcggtttctgaaaatttggtggaactatataatattgccgtctaggttgtccataaaagaggggaagtaaaaccatgagaaaatgaagttttgtcatcttgcatgctacctgttgtatttgtatttttactacttttccctgcagagaggaaaagtctcttttgtcttaatattttttttttatggtcaatgtatgtattttttttttgacaaaaggaaacaatattcattcatttaaattgatagaatacatcgatataatacaaatccaaattcgctaaaaacaaaaatgatgaatatatgaacaaaatcacaacatctatgttaatagtataaaacgacaaagtatttatgcctacaaatgttatctccggaatactcatgtatccggatctgcaacgttgacaacaccaaagtcattgtcattgatcggatctacacttgctcaaagctaatctttcaacctgaatcaaataaacaccgcactaagacgggaaaccaaaaacaactcggaggggtgattttgggtcaaaattgaccctgaatcacccctctgacaagaagaagaagaagaaaaaaaaaggttacggctagggtttgagaagtcaatgtatgtatctgaatatgtcatttttttagtccgtccatatgagtatattatcttaaaagaataaggataatgttattaattaattccttcaaaacaaaaatgttattaattaatgatttactgtatagtaataaaaaaaatagtaatataagtttctttttacaaaggatgttggatatagcgtaaattattggactcttacgctgtaatgaaccaatgttttgttgaaagagatgtccacatctcccataattattgtccgataatgtctcaattcggattagcaaaataaaaaagagttataaattgctataccgtaatttttagcggataaacccaatttagatttaatagtactacatcctgataggggatattcatatttgtttaatttatctctctcaacttcgatttgtgaggaggactttggaaagttttaaaatttttaatgctccttttttgtgtgaaaagtttgcagaatctttgacatctcttttacgaatctttgtttaaagaaaagacaacactaattgagttgctaaggataagtttgtctaagaaaatgtccttccctgcatttaactttagagttgtattttatataatgttataaattactgtttttattattgtatatgttgaaaaatgcaagaggtgcttatagtacttgaccgagtgattagtcattttttaatgacatgttagtggttaattgtttgattaatatatactctcttttccgcatttgaatccagggtatcaaactccttatatggattttgacgaatttataaaaacagcagtaatgttaaatagatgtgatgtcattgttaatgcctgaaactcaaataaatgtaggaataggagctgcttggaata

SEQ ID NO: 4477 - DNA, 929 bp, Medicago truncatula
  Intron number 1 from transcript Medtr5g016530.1 (locus Med tr5g016530) derived from phytozome v7.0 (chr-ID MtChr5; po s 5831622 to 5832550 reverse strand)
ctttgaggttaaatttttattccttttagtttttttgcttttacttgatttgttattatgattttaattattgtgctttgtactagaatctttgtggagtattgtttgaataattagtgtcgcggtttttatggtaattgtcgtgtcatgatcccttatattgcggagaatcatgattgagatttgagaatataggctaatgtggcttagtgtgtgtttgattctgtggtcacaaattttgaatgaattgattctgtgaagttgattttggctaaaagtgaattgttagatgtgaagggattttatgtttggatgcattcatgtgaaagtgaattgaatgataagtataaggttaaaaatcaattctaatagcaaaagctacaaactctagcttcaagtcagaatcggtgtatgtttggtttcaattttggagggtcaaagttgattatagaggttgtaaaattgatttttatcatggttggttgatttagcttgcagaatggattctacttgaagttagaatttgcagcttttggcttctacagttgattttagccttaaatttatggttaaatccactattacacaaatacatttaaacaaacataaatcactttacattcaactcacttatatccaaaatcaattctagatccctagaatcaattttgtgtgctccaaaagtggaatcgaacatatacaattattgtcgtgaaccttttttgataccttgtagtgcctttgacataatcactaaatacagtgacaatacatgatgcgatgatggcaactttttgtttttttaaagaaatttttttttagtcaatttgcctttccctttttttatttttacgttcattgttcttacattaaaccttttgttgatttttccttgtgatggtacaggattgtgaggaaagagaggctgg

SEQ ID NO: 4478 - DNA, 12006 bp, Medicago truncatula
  Intron number 1 from transcript Medtr7g025680.1 (locus Med tr7g025680) derived from phytozome v7.0 (chr-ID MtChr7; po s 6347289 to 6359294 reverse strand)
ccttttctttcagtctaaataagtgatttttgaaggtgagaaaaacacaagaaggggggggttgaattgtgttttctttttctgtctagaaaattcttcttcagataaaacttcagaagcagtttgagagtgcttctgatgaaatgatcagaatcagatatgcagcggaaagaacagagcagagaaaagaaagacaaagacacaagcagttatcctggttccttccacaacacggaagtagtccagtcccccttgcacttccaaggagatttcactataatcacaagattacaactgctcaatactttctaagtatgagacttcacaacactatgctcaagcacacacgcaagagtcttccaatgctcaagcactaagcaagagacttctaatgctcaagcacgcaggcgagagacttctaatcaaacaaaaatacagagaattgagtttgaattgaacacttgatatacaatcagtggtgttcacaatacaatacagaaaagactctagactttgaatttctaagatgtatcaaatcagtgcagaaattcagtgtgctttgtagtatcaaattgacagagttttggcgcttttgaacttatgtatttctctatcaaatcttcaagtcttcactcctttatatagaggcgtgaaagagacgttgagataatcagcacgtctaaagagtcgtttggaatcctttgattatccaccagtgatcctttgcctgatttgggtgtagtcctttgaagaatcaacttcaaattcattcccatcttgagttgtacaaattctgcaggcatggctgttgttttgtcttgtagcgtagacagaaaacagagtagtggaggtagtggttgtacacttgtactttgtcaactctattaatgagagacaagtgctcagtgctttccatatatccgttgatacctccctttcagttcttcgttcttctttgataagactgaattgagaatcagcaactttgaatcttcagttggattaaaggatcaaatgtagcttctggtgaaaatattgcttctgatgaaaacttttgcttctgatgactttctgcttctgatgacgtcatctcttcaggagcagtttagcttcaggagcagtttagcttcagatgctcagaatttctttttctttccattgttcttccaagacctattgaaataacttgagtagcctttggtcctgtacacttgaacaattattagtaataaccaattgacaatttttaataccttgttatcatcaaaacttaataaggttcattgtgaaacacattttgttccaacaatctccccctttttgatgatgacaaacaatagtatttaaaatgttcaattgttgttgatctaattaataagttgactactgggacagaggtttgtaagctccccctgagtctaatagatctttaaggtgaggtttgtaagctccccctaagttctattcttattaattaaatttcaataaaatactcataaaaatcaaatcagaggtatttaaaagaaatttagaggttgttatagtagggctcagtgccttaaaaatactatacatttactcccccttttgtcatcaacaaaaagaatagaaacaaaagaaagagtatcagagcaaaacaaaacaaaagaataaacatataacctttaaagatagtatttcagagcaagcagcattgaaaacagtaaatatcatcagaattaaagcttgtaaagcatattgaaggtgaaaaagcacaagattcagaaacaatgataatatatatagaaagaaagattaagatacaaagacacagctactaagaacaaaagtaaaaaacaagctagagttgggtgtgcaactaaggttgggcttgcttatacaactgttctaagagatacttgatctgatcatccttcttctgaagtagctcatccttttctctcattcttcttttatatccagcctgaattctagcagccctagtgatgtactcttcttctggatagaaaggagtgatgtccagcagaggcacaaaattcagctctttctccttagctgcttcatgcatatcatccaaaagcttcttcagcatagcagagtgagatgacacacatttagttctaagctgatccagcagctcatcaaagcttttctgtagatccatccactgatcataatagtgaataggaggtacaggaactgttctgcgaagaatcagtgcctgaatctcatcactaagtctgatcagttgttcctctatatactcagactctaggatatggtcagggatgggtgaaggttcagtttgagttgtatttgatgtggaaggtttgtcagaggttaagtctattatagtgggtgaatctggttgttgttgttgttctgttgtttggtcagaaggtatatgttggtcagaagttgtttggtcaggagcaacttgttcagaggcagtttgctcctgaacagtttgctcagggatggtttgggtttctgtttgggtttccaagacagtcttttcaggaactgtcttagaggccttagtgggtgttggttgcatttcaccacctagatgtttttctaagttgtgaagggttgaggattcttggtgttggggagtttctgaagtagttgcatctgaagctgcttcagaggctttttgtgtggttgagttatgtggtgagtttgttgtaggttctgggttgggttgaggttgttgtacactaacaggttcaggattatctggatagagtggatgagtaggaggcaaattgaatttctcacacaatttaattctattcttagaaaattctatttgagtttgctcccagtcaagtgttcctaaatctgttagtttggtaggtttggtttttagaagcttgtctatgtgttggctaaggggttggtcatctgattctgttgatgatgaagagggtgaagagggtagagaaggaatctgagtattagttggagcgttagatggattacctgaagactgagcttctggatgaactgcttctggagcttctgaagctggttctgatgaagttgctcctgaagcttgcttattcttcaaggcttgagaaagcagagttgctccatacttaacagtttctaactccgacgctaaagcagcaatgtcaggagtaggcacataccctgcagccttgagacgttcatccctttctttttcatacaaaatcttcatccttttcttttctgctatcttggatgcagcaacctccctagtatactgctccatttcttcagtcatttcgaaactaggcatgactatgggctctgaagttgcagtcctttttgctttcttagggcttgagtcttcatcccagttctcttccagttctttcaacatttcttcccttcttccttcagctgtcttcagatttcttgttgaattagacctcttccttttgatggtctgaagagcagcttctcttttatttttgggacttgaaggcttttcagaagcagcttgatcagaagcagcttgttcagaaccagcttgttcagaagcaggctgttctgctgtttcttgagtactccttgtcctttttctgataagagggacatcatccaaatcctccacttcctcaagaatggtggacatagcagatttttccttcttagctttcttatgcttctgagcacccacctcagtagcatcttcagcaaggtattcttccttggtgatctgcttctttttagattttctgcctttggccacaggcagatcaccaccatacatttcttctgggatatctttcaggctgattttcttgttgtagctcttgtagtagtccaagatgtaggccctctgaacatccaggggatctttcttgcagatagggatgtgatgagtgactagatcagatatgacatcagattcatgcatatctgtatctagtttcttgcaagttgaaatcagcctcatcttgactagagttgccccattgattatttttcctgtgactgctcccagcttctgattatcataaatacccacgtctttcagggcacttaggagtcctccttcttgaaagattatggagagcagccttccatagggaacaaacttcctgttctccatctggctcttcttgagttccttgatcatgtatttaaacatatacttgggaacgttcattgttgtttcctgagagatggtgtgatgcagaaagactttgtgaccaagtgaaggttgatcatttcctccacctttgggaaaaatgttttcattttggatcttcagcagcattttcttttccatgcttaaggtgctgtaaggcttagcatcctttgatccgtagatagtgttgtttactatctccttccatgggcttgttctggggttaggaatcacttctccatcgtatgtcccagaagcatcccttctcatggcttgagcaatcacatgctcattgattgttacaggaatccccatgacgtttgatctaatctcagtcccagtgaaggcgagtagacccatttcttctctggtttttccctccaaagtaggatcaaccagaatcatctgagcttcttcctgtttagcagcaactttgtcaaacactgaagctcttacccagaattgtctgacaagcacttcataagtaggaccgttgagaagactgaagtaactcatcagcttctgctttttgtagaatcttaccaagtcgcatccatgatgagttagagaagtgaaatccactggattttccgcttgaatgattagatcccattcctcaatcgacatagttcttcctttgatttcataagcaggagtatctatatccatattcgatgaagaaccaccggcagaacttgaagatgccattgatatgaagtggttttagggttctaaagagtttttgagaggatgagagaatgcgtttactttcgcagagggttgagaagaaaaaatagaaagtgtttgttgtgaagtgagaagtgtgtgaaatgacttagtgttttttattaaaacgtttgtaattcagaggggacaaacaaacacagcattaatgacaaattgggggcgcgtgtaagtacgtcaaaaagcgaataaaaacatcattgccctttttgttatactccaatacaaataaaccacgtcagagactcttcagaaaactaccttttgggtaatgagacagctgttacataaagtaacttccaccgttcccactaaccaagctattcagaagcaaagaataacacttctgaagttttagtgctgacgtcatcttcagaagcacattttcctcagaacctcaattaagagcttctgatgaaccaaaatgcttctgaataaacttcagaaccaaacttcttattcagaggcaagcaattttttaatcagacacaaaatgcatgttcaaatttttcttaataaaatcaaatctttcaacagacaaaggttttgtaaatatgtcagcccattgatgttcagtatcaatgaattgtatatctaaaattcctttttgaacatagtctctgataaaatggtgtttgatttcaatatgcttggctcttgaatgtagaattggattctttgacaaacaaatagcagcagtattatcacaataaatgggaatactgttagcattgatctgatagtcttccaactgatgtttcatccaaagcagttgtgtgcaacaacttgcagctgaaatgtactctgcttctgctgtagacatagcaatagttgcttgtcttttgcttgcccaggatatcagattctctcccaggaattgacaatttccactggttgattttctttcaatcctatcaccagcataatcagcatcacagaatccaatcaacttataatctagggatttcctatacaggagtccaagattagttgttcctttcagatacctgaagattctcttaactgcagttaaatgagattctctaggatctgattgaaatcttgcacacaagcatacactgaataaaatatcaggtctagatgcagtgaggtataacagagaaccaatcatacctctgtaaagcttctggtctactactgttccagtatcttctttgcttaaggtgcaggttggatgcattggagtgttcatcattttacagtcttctagcttgaacttcttcagaagctcctttgtatattttgtttgatgaacatatactccttctttactttggttgatttgaattcccataaagaatttcaattctcccatcatactcatttcaaattcatcctgcattaacttagaaaattctttgcaaagagatgcattagaagaaccaaatattatatcatcaacatatatttgcacaatcaaaatatctttcttaagagtctttctgaagagtgttgtgtcaacttgtcctctttcaaaatcatttttaattaagaaattacttagtctatcataccaagctctgggagcttgtttcaagccatatagtgatttcttaagtttataaacatggtcaggatgcttaagatcctcaaacccaggaggttgtttaacatacacttcttcttcaatgactccattaagaaaggcacttttgacatccatttgatataatattatgccatgattaattgcgtaggatagaagtaacctgattgcttccaatcttgcaactggagcaaatgtttcagtgtaatcaatgccttcttgttgactgtagccttgagcaacaagtctggctttgtttctggttacttctccttgttcattcagcttgtttctgaatacccattttgttccaataatgttcttctgaaaaggtttgggtaccagatcccacacgtcattcctttggaattgatttagctcttcttgcatagctaatatccatccatcatctgagagagcttcttcaacagttttaggctcaattattgaaagcagtcctatcaatgattcttcttgtctaaaatgtgatcttgttcttctaggactttctttgcttccaatgattagctcctcaggatgtgaagatttgtgcttgaatttaggttgaataacctgctgagtgttatcttgaaagtcctcagaagcaatttcattctgtacttttgagctaggttctgcttctgaattagactcagcttctggagtgatttcagcttctggactagattcaacttctgtatacttttcagaatcagaaggttgatcagattctgacgcatcttcagaatcagttgtacctgcattactttcactttgctctgaagttttacttccaggctctctatcatcaaattttacatgcatagattcttcaacacattgtgtttctgaattatacactctgtatgcctttgacctttcagagtaacctaaaaagattcctctttgagccttggcatcaaatttcttcagatagtctttagtgtttaagatgtaacaggtacatccaaactgatgaaagtaagagatattgggtcttcttcctttaaagagttcatatgctgttttctccaacataggtctgatatagatcctattttgaatataacatgaagtattgactgcttctgcccaaaaatgtttagctaagttgttttcatggatcatggttctggccatttcttgtaaagttctgttctttctctctacaactctattttgttgtggagttctaggagaggaaaactcatggagaatcccatgtttttcacaaaaaagttcaaatggctcattttcaaattctccaccatgatcacttctgactttcaaaatattcagttctttttcagattgtatttgaatgcagaagctgctgaacacttcacatgcatagtctttacttttaatgaattttacccaagtccatctgctgtaatcatcaacaatgactaatccatatttacttccatataaggatgcagtgttaactggaccaaaaagatcaatatggagtaattctaagggtctggaggttgatacaatgtctttagatttgaacgaacttttcacaattttccctttctgacatgcaccacaaagtgcatctgaatgataatcaatgttaggcaatcctttgaccagttgtaacttgctaattttagaaattaatctccaattagcatgtcccaaccttttatgccatacccattttttatcattcattgacagaaggcaaactaccttctgatcagccagatcagagaaatttattttatagacattctcaactctctttcccttgaatgtaatggatttgtcatccttgttaactagtgtgcagttggtcttactgaacgttacatcatacccattgtcacaaaattgacttatgctcaataggttatgcttcagaccatctactagccacacattattaattgagatggaggaattaccaatagtacctgtaccaatgatctttccagtttggttgccaccaaacttcacttctcctccatctttcattgtaagggtaaggaacaaagctttctctccagtcatgtgccttgaacatccgctgtctaggtaccatgacctttgtttctctcttgcccttaagcacacctgcatttttggccaattcagatttaggtacccatatcttcatgggtccttttgggttagttttggaggttttacttttcctcccttgtaccttagggtgaatgctgagtagcttctgatcattcaatactttaggtttgacaccttttggtattgttttctcagaggcagtagctgctttgttcttctgatccttttgttttgggattttagattctggtttgatcagattctgatgaacagtttctgatcttttcagaattgtaatcttttgactcttaggaacagattttgtcattaccttgatcttaaggttttctggctttgatgtgatcttagcctgtgaaccagaagcttcaggttttgactgaacagcagttttagcatttgtaccttcaggcacaaaggtggatttcaatccatccttgatacaatcacagtagctcttgagactgtattctttggatttctcctcagaatatccaatccctttgcctttgttcttgtatgtgttgtagatcatagaagcaactttgcttctgtctattccagccataataaaatcatccaaggcaatctcatgtttattgcctgaacctttatcacatttttcttgtagcttctgacaaagactcttgagtctatcttcatatgttgctgatatgaggttaaaccctttgagttcttcttcagaagcttttagtttcaatagagttgacttttgttgtttcatcaaatcaacatatttttcttttaaatctgtcaactcattggttctgtgttcaaacagtgataaaagttcttttagagaatcaacaagttcttgtctagggattttagaatatacctcattttcatcttctgaatctgattcagcttctgatactgcttctgatgatactgttgctactaacccaacggctgccttagcatcatcatcagcttcttctttatcagaaccagattcactatccaaatcttcccaggttgccatcaagctctttttgatttgctttctgaatttactggagttgaagcttgatttcttggatttgcctttaaacttctccttctgaagatcagggcaatcagcaatgaaatgaccaggcttcttacaattgaagcatcccttctgatcttctttcttgaagttcttgtagctacctctcttgctcaaaaatttcttctgcttccttgccagatactcaagcttgttggacagcatagccatctttacagattgatcttcatcagaatctccatcaggtgattcttcttcagattcactggctttgtaggctttggaagactttgaggtctttcctttagatggtaaagcaatggatttactcttcttagaggtttcatgctcatttagactcatttcatgcactttgagtgagctaacaagatcttcaacacttaaagtatttagatccttagcttcctcaatggcagttactttgggtctccatcttgaaggtaggcttctcaaaatcttactaacatgatcagaagaaacatagcttttcttcagtatttgcaatccagaaactaaagtttgaaatcttgagtacatttcttctatactctcatcatccttcattctgaaaagttcatactgatgaactagcatcaaagctttagcctcttttactttcttgctgccttcaaagtttgcacatagagaagcaaacatggccttcgcagtagatttgtcactcattttcatgtattcggtgcgaggtatagaagccacaatgattcctcttatcttgtggtgtttcttataaagcttcttctgagcaggagtatgtattcttctgtctatagcagctccttcttcatccaaatccagatcatcaactccatcttccagtatatcccatagctcttcatccaatcccatgataaagctgtacatattagttttccaccatgaaaactcttctggatctccattaaactttggagcttttccagagtctgttttcttgtcagcagtatcatagtcatgcttgacacttgtgtattttgtagtagttgattcctcatctccagacatgtttttctaatagatcttgaaatgtaacacggttaagtgctgtgataacagagcaagctctgataccaattgaaggtgagaaaaacacaagaaggggggggttgaattgtgttttctttttctgtctagaaaattcttcttcagataaaacttcagaagcagtttgagagtgcttctgatgaaatgatcagaatcagatatgcagcggaaagaacagagcagagaaaagaaagacaaagacacaagcagttatcctggttccttccacaacacggaagtagtccagtcccccttgcacttccaaggagatttcactataatcacaagattacaactgctcaatactttctaagtatgagacttcacaacactatgctcaagcacacacgcaagagtcttccaatgctcaagcactaagcaagagacttctaatgctcaagcacgcaggcgagagacttctaatcaaacaaaaatacagagaattgagtttgaattgaacacttgatatacaatcagtggtgttcacaatacaatacagaaaagactctagactttgaatttctaagatgtatcaaatcagtgcagaaattcagtgtgctttgtagtatcaaattgacagagttttggcgcttttgaacttatgtatttctctatcaaatcttcaagtcttcactcctttatatagaggcgtgaaagagacgttgagataatcagcacgtctaaagagtcgtttggaatcctttgattatccaccagtgatcctttgcctgatttgggtgtagtcctttgaagaatcaacttcaaattcattcccatcttgagttgtacaaattctgcaggcatggctgttgttttgtcttgtagcgtagacagaaaacagagtagtggaggtagtggttgtacacttgtactttgtcaactctattaatgagagacaagtgctcagtgctttccatatatccgttgatacctccctttcagttcttcgttcttctttgataagactgaattgagaatcagcaactttgaatcttcagttggattaaaggatcaaatgtagcttctggtgaaaatattgcttctgatgaaaacttttgcttctgatgactttctgcttctgatgacgtcatctcttcaggagcagtttagcttcaggagcagtttagcttcagatgctcagaatttctttttctttccattgttcttccaagacctattgaaataacttgagtagcctttggtcctgtacacttgaacaattattagtaataaccaattgacaatttttaataccttgttatcatcaaaacttaataaggttcattgtgaaacacattttgttccaacaattttcacatctatcaagttgttccttttgtgatttcgtcgtctaagtgcggc

SEQ ID NO: 4479 - DNA, 1423 bp, Medicago truncatula
  Intron number 3 from transcript Medtr6g043810.1 (locus Med tr6g043810) derived from phytozome v7.0 (chr-ID MtChr6; po s 9226835 to 9228257)
taaaactggacacacatgtgctgctctccaatttgtcccattttacataatccattgatcaaggttaccaaaaagtcaatgaagataattacaagctattcttataattttgttagatcgtaatatttagttgaatcataatatatatgtcgtctttagcatacaaaatatgtggcgtgtgcatacatctccagagtgacactaactcctgtaaagaatgactctattctgaaactacgaaattcacacgtggaatttgaatatgttatacaatcatttgttttttatctttaaattcgaatatatctgaggttatttcctatcagacagttcctgaagtaaattgaaaggaaggtttgtacaaagcggttcattggtttcacaacaatgggcttctgattttgttgtaaaacattagtataatgtcatttcctggttttgttaatatgttgtctaattgcctaaaattttataatttgatgcaccaatgactgcattgagatcgcgatcccgaccgcattatccatatttctgcgcaatttttgcaataccaaggatcccaacacgaccgtgatttaaaaatttgataatatattattagttttgaagatcaataggaggatgcacaacctaatttagaaagtaaatttaaagatggagtaacgagacagagtttcccacattaaccacagtatgcagagtttcccacagtatgttctatacaggtattgagatttgaacagtcttgttgagcttaaattttaattaagttcttttccgaaactattaagacaacaaagctacaattatatgatgatttttcatgataacagaagtatgcataaatatctcaggattttaattgttagattgataaattttctttagctaatttttcgggttaataccgtttttggtccctgaaatatgatcgaattccggttttagtccctgtaaaaaaaataatttagattttatctccgtaattttagattctaccactttaagttcttcacttcaacttgtcagcagaatctattgacgtgtcaagctgactggactattttcctttttttcttatttaattattaccacataattttttttgttaatatttatttaagaaaaaaacaataaaaacattaaaattaaaaaaaaaaacaaaaacacagaattgtttcttttctcttgtccttcttctgtggttcttcttcttcgtaaattcttcttctttttcctcctccatcgttcttattcttcttcgtcttacattcaaatttaaattcgatttttgtttcgtttcattcatctcatcttgtttttgtttgtgatttaaggttaactgcagattcaatttaaccctaaaagattaacgtttctgggtgattcaaactgcagatctgattcgtgtttccttctgcag

SEQ ID NO: 4480 - DNA, 1457 bp, Medicago truncatula
  Intron number 6 from transcript Medtr3g113840.1 (locus Med tr3g113840) derived from phytozome v7.0 (chr-ID MtChr3; po s 28691901 to 28693357 reverse strand)
cttggtgagagagttactgctttaagcacatccaagtaagttttatggacagagcatgtatctcatatttgaaagatattgtaaactagatgtctaatgtgcattgttgagtagatggtaatcaattcaattatcttgcatctgttaaaacagtctataatttccaacttatgtttgtgctagactttctttgatacaactgcctttaatcagtgtactgaatagcatgctatagcggagcagcagagggtgactgctatagcaccctctgttgcattacatttcagtctagtaagcattgtggcgaaaaatagcagcaaccacctggttctgttgcttagggggagtcagatcttttttgaaggttataaaaacccttttatggccaaaaacaataatcttgagctttgtgtaaaaacttagcattgatttagcaatttaacatgaattgtggtgagggaaatcattttttattctttagacattcatcttttacccaacttagaggcggccttcaagaagacatcaaggaattaaagccacatttaatcggggggatctccatcaatgatttttgttttttcattagtgttttttcggttcccttgttgcagaattttcaatgtctcctgagtgctatttagcagtgtttaactacatcacaattatttccagactcaatttattgttttgatttggttcaaagttgtgaccccactgataccaccatcatttttagttgttagcggtatcccggtccaatattgtttttattttgtttgaagttgtgtcaccttcaaattagggctttagagtgttgattttattctcaatattgtttttattttgtttgaagttgtgtcaccttcaaattagggctttagagtgttgattttattctttctgtttgcttttgaaattgtgacgtattctggtttgcgcttcagctgcattaattgccggcctgcaatagtttcattttcttgttttattttctcttcatgaatggcagtaacggtttcttcagttggagtttggtggtttgttctttgacacaaaccttattgctgattgttatagtgttatctgttggtttatcaatatatctttttgggtttgattatgtttggtgttctatattttctctacaaagattatatttgtataacaagcttaaatgcatagaaagcttagaaagtaaatgttagatctccttagcacacatagtcgaagcttaaaatgttcccactccaatggttagcagctccagttaagcaagcatggaaaggatcacttgcctgaacctctcttatacggatccgtttgttggtgctttgtaatatgtcattctaacagtctgaccaaaccaaagatctcttactgtgtcagggcctcttgagttgccttgatgggttcctaaataattatgtattaacaaagggcctcttggtttggtc

SEQ ID NO: 4481 - DNA, 2795 bp, Medicago truncatula
  Intron number 1 from transcript Medtr1g023970.1 (locus Med tr1g023970) derived from phytozome v7.0 (chr-ID MtChr1; po s 5484649 to 5487443)
tcaatcaaggaaaaccctctcaagcccttcaagcggtaattttttttttctttactttctttgacatcaagattcgtattaataacttgtcaaattaactaaattaagaaaaattagggattattttgcatgttgggttgctaatgtattctgtgattcacaatttgtaatttgtagtatagtggcattttgttgcaaaattttagactatgcagtgaattttaggggtttcatatgaataatgttatgatttttatatggtattttgtttatttgttatgataagcattctgggtatttggaatttgttactggtttgtctcgattttcttgtgtgttaaatttctctgaaaacgtttatttagggtgaaatgaagtaatgaactgttgctggtaacttcacttaactaatcagtaggacattgaagtgtgtgattggattatagctgctttttttgtttactaaatcacttttctttgagattaagcaaaaccaaccattcaggagttttgtttgggaaatgaatcatgcaactactcaaaccttagcttatagaattttatgaaagttttactagttcttaaatttgatggtgttttgcactttctttcaatgattcctttctctcgcgaactcttactgttcccaaacatactaaaaatgtcaaactagcattgccttaatcacatttacattagttttagaagaacacaaagtttcttgcctcatcaaaatggtgtttttattgcatttatggagtgtttatttagacagtggctcttggtaggtttgtgtcaccctacattttactgaaatggtatttgaacatcaatttgggacagcaaaattcgacaacttcgtaaatggttaaagcagatcacgcatgtagttaacatagttcaatgggtggttaactgggatatcgagtttggtaactcagtaatcatcaattgaacttaactaaccacaatttcaagtgttccaactacatgtggatttcaacacttgaaaatcaagattaatcgtgtttaaatttgtggctaataaagttcagtagatagtttaagttgcaacacctgatatatctattaaccaaatctaacattttgttatccacatgtgtgaactgtgttaactatttcaaatgttgtcgaattttgtagtctcaaattgctgttcaaataacatttatgtgcattttgagaggttgtattatccctttctcatgtctaaagaacctgcaatgtaaaaggtgatgcttgactcagctatttaagcagaggacattatgttctgatgtgtgaaactgataggtactggtttagattaagggtgtaaagattgtatttttattgaatatatagaaagatttgattccatggactgctctacctctcaactccgctttaagagtgttcacccttttataaaaaattatgaagtgacacagggaaaatgtataatgagtaagctcaatgtgtgctaaaatccaatgtaacttacagtgaatcagaaagtagaagctattatttgctatatgaaataagttccatttgtggaaagcaataaaggaaagaaaaaccctgcagaatcggtgcagcagtgtatcacagattggggaagagattcagagggaggtatatgagctctcaacactccacacgttatccaatgccttggattcccttgattcagagggagtactatgagttctcaacactccacctgtccctttacagcctgtgtttcagttacagctggaactgaatcactatgctcattctaatgtctactaatacactcattaacaataaacttttccttaataaatcttaacatcactatgaacttgggaaaagtaaaaagatgttgccaaaacttccctgtaaaaaccttgtccctgtctgaaactatgaactaacgaaatccatgtaatttgacaatagtgtgaacaaaaatttctgctaatttaaattggagaaatcagccaagttttcagcttccattctgttgagaaatttagctaaaaaaattttggaaccacaattgttgtttaggtgtttgagtggtttggtcattaagagatttcaaactcttttgatcagtgggaataatgaacttgtgaccaatcaagtaatgcctaaacttgaatattgcctcagattgcttttgctttctacgactcaatttgagtaataaacagtagggtgtttaccttgacttaagacagcacctttgcctgaaccgaaggcattctaggactcaatttgagtaataaacaatatggtgtttacctcggcttaagaccgcacctttgactgaaccgaatgcatcagtttccaaaatgaatggttgctgaaacaagccttcattttttctaattatctcagcctaaataatacgtagcagacctatcagaaacataatgcatgcttaaacaaaaatggaatatagtatgtacttgctcaaggagaaaagctaggcaaaaacttagacggtgtttgattttttatgtgaattcatttgtagttgatatgttacactagtaattacatttgtttttctgagtttttttatttattttttgtattttaataaagaaaatagtaaaaaatagctaagttttgattttaccacttgctcattcagtttggaaaacaagaaaataaaaataaaatagtataaaagtagactaaccaactgaaactcttcttaaacctgcaagtctttgtggtggctgatatttatttataattggaacaggtggttgtagcagtgaagaataaaggtggcg

SEQ ID NO: 4482 - DNA, 1102 bp, Medicago truncatula
  Intron number 1 from transcript AC225517_8.1 (locus AC2255 17_8) derived from phytozome v7.0 (chr-ID AC225517; pos 37 633 to 38734)
acaccaaagcttccggtgaagaggtttcaagcgctgtaagtattcttaagaattgaatttaaaaaataaaatgataatataatagaaaagtgaaaaataaacgttttgatttttttttttcttttctaaatgtgttgcattttatttatttttggtagatagacgaaatgacaaagtcattataaacctacgcacacaagtgaagttgtcggggttcgaaccccgatcatgacgttcgacctaacaatttcggcattttgcgacttgtggattgtgttgcacttaatttaaatgaaaagcatgttgacagcgatattattttttttaaatgaagaaatttaattaactacactttgtgttggtgttgatgcatatcgaacactggacacactcttcatatgaagtgttatttttatttttgacaaatcgtatgaagttttaatgctacataatttagaacgtagaattggatgtattagggatgtatgtttggaattttagtataagaaatataaggcttatgctggaagttagcttctatttgaagacaagggatcttgtctataatttgattagatgtgcgaaaagcatgattcttggagaacttttaaagatatggatggccacataagtactaatgtgaagagcatcagggatgaaagtctggatttcctaccaatttaagtcaataattcatttcactaatcatatatgttttttacatttttcttccatgtttaaaaatagaacttggtttgcttgcatctgaatgcaatctgagcatcattctgagattggttaatgattgcatttttgggaaaaaaagtattataaatttgccactaaactaggcaatcaccaaatcttattagtttttataaaaggaaaggaaagcgatctaaacttgccaataaaaatatattgatcacttcatctgtccatttatacggccctcttcaaaaagactgttttatctcttactctatgattgaattttgcttcacagtaagaactcttactctactaatttgcatttgttgtgtttgaatgcatttgttttccttcagaaacgagtctcctagccctagatcacagtctcaaa

SEQ ID NO: 4483 - DNA, 5447 bp, Medicago truncatula
  Intron number 1 from transcript Medtr1g108200.1 (locus Med tr1g108200) derived from phytozome v7.0 (chr-ID MtChr1; po s 23003633 to 23009079 reverse strand)
agagagagagagagagagagagagagagagagagagtaagacatttctagtgagagaaacacaaatcaagcatgttagaagtagattcttcctaggatttgtagagatatcatgaatcttagtatggaatcttcatctttcttccatcttttgcaaagttatcatagacatatgtagctacatctacgcttgtggtttttaaggtattcaaacaagctattaatttgtaatctttgatcatttaatttaaggttctagcttatttattcaatattgttattattcttgagtttaatgctttatttaagatttgaaatgttattgaaagattgtcataccccaatttttgacctaaggtcacactgacgcatgtcatttgaccctgatcagtccctaacttttcaatgaaaaatctctatgaaggtactttaaaatacctcatttttgaatccgagtcgggccctcttctctatttatttttatttccatcttttatttttaaattaactttaattttgcttttaaaaaatctttttattgttgtctttatcttgtttttatttcattatttttgtccaatgataaatccaaaaacggtcccaatccaaaaattgcagtctgtcacacgagcgtgcttcacctcatctcaatccaaatccagcaaaacgcgttgcaatccaacaacagctaacacgctcctctcatctcagcacaagtttctgctcatctcaacaaaccctagtctcagccttaccctataaatacaacctgaaagacaaccagaaaaggacaggaataaaacaagacaggaaacacataagagaaagccagcaacgcacacacagagggaagcggaatcgcacatcaagcaattggagtccaaccacaaacctaccgcgacgttcgtgaatccaagccatcaccaccgatccaaacaaggccgctattccaaacacggcagcacctcacgaatccaaatccggttcgaaatcagacgcaaaaggtttttgttttcctcttttttttagttttgaatttgtctgtgaacttcctgtaagtttttggtttagaaagggtttagatcttagaatataaaaaaaaaatcaaaagagaagaaagaaagtagtagaggtgtagaagaaatagaataaaaaaagcaaattagggttccggccaaccgccgctggaacccaccttacctccgtcggagaagatgaagtttcgccggaaacttcatatcacaacccagaaaatgaagaacatagaagagagagtagagagagaaccgagagagggaaagaatggcagagagagaaaagacttgagaacatgaaagaaaaaccggtccatagcccatatatacatgtcaaaccggttcggttctctggaactgacccagggtttgaactgaaccggccccagcctgtcctctaagtccaattccgaaattgttcttcggcccaactctctgctgttttattttctgcttgctgtttgcatctacctgaatattgctgcacccctaccttgtgattgaaccccattttattttaagtcttgcatgcattttattttattctgttaaccttgcatttggttgatctaaataattagaatgtaatctaggattgatgtaaataatttattttctttttgtcatttatttttccgcagactttagaatgtatcataggccttttatgtaatagtcgtaggtgcaaatatgggtgcgtgtgtgggtgtatgctttatttttatgctttttagtttacggtaatggtctttgtggtgatccaacgtcactacaaagtacctacgcttttactttcttttactttcttactccgttagttttaattttagttattattcaaaaaaacaacaaaaacatgcaaataacaaaaatcacaaaaaaagtttttttacaataaaccttgatcctaaatcaagtgatcgtttattttattttattttcttaatcaaacttcaatcaatctaatcatactttgagcccattttctttaatataaaaaatacaaacaagcttattttgccactcggcttttatttttaaaactttttttcaaaactaataaaaaacacacaaccaatcaaacgtcaatttctaccccgaactacgaggttttgatccctcacgggtacgtaggcagaggacactcgtccttccaaacaataaaaactgtagataatttaggtctcactttctttttcttttaatcatcccattaactcctttttcaaaagcaagcaagtttatagcacattaattaaataaaatcaagaggttcacgtagagtactacggacataaagggtgctaataccttccctttatgtaactaacccccgaacccaaaatcttttcaaaattgggtagtttaaactttttttccccttttcttaataaaattaaatgttcagtcgtgaaataattagtgagtcaaaagctaatcaaatagccttgatctccgaaaaatgacgcgacaaagatacttttgggtctagggttagaataataatctatcaaagtttttattctcgacatagggtttaagttttggtaatcactttgtaatcaagaacttaatgctattggatcgtttaatagattgagaaaacgtcgattagacgatatgattgaactcatgaagttatttagacataaataacgattgaaatcatgacattatttagacatgaataatgttgttgagtgattgtgataatatcgtttgaaaatctagaatctgttatttgatcatgaggttgcagttgttacgcttggttgattaactctaatcccaagtgaaatgaccctatcccgtctctatttatttttaggaaaattagttatgatagttttacacaaacaaacttttaaaccaaacacttaagatgataaatgtcgttgaatgatttattatatacattagtccctgtagagacgatattaatatacttacgtgtaaatagaaatacgatgtggaaaaatcttacatcagtatgtttgggagcatcaagaaataaataatccactagtgaaaaatcgctccaagtatgttgtttgatatgactaatcaaatttgaagaatcaagtgcagtaatcgaaggtttggtcaccaatgaaattataaaaatacaacaagggtaaaatgtcaagtggacaaattttgttaattttagcttaccaagtctgcacaaaggtatatctcttaatcatccactccacacacacacttctcaatcactctattgtattgactaatcgaatttgaagaatcaagtgtagcaatcgaaggtttgggatttagggatttctaacttcatctttcactttagtccatgtccttcattttggttcaatttctttcactttagtccttgtgacacatcatgcatcttgtcagcacaaaacatttatcacctcattagttaacaggagtttttaatgtcaaggattaatctgataacgtaaatgcacatcttgggactactttgaatttaatctcgagtcagagacatttgtgataacaagttgcaaattcatggaccaaagtgaccatttatccactaaataattgtactcgcagttatcccctaataaaatttgccttagttacagagtgtgtaacttaattgatactcgcattttaggtaaacgtacattataactgttcgtcagttatcgatatggagacagatataatggtcattgtacgtgtgaataccttcgtactttttttttgtaacgacatttttacgaaaattagtaaaattattaaaatatctttttaattaaatataaaactaccccaagtgaagaaaaaaaatactaacctgttttcaaaattttcgtctatttttttatttgtagtttttttgcagaagcgtgagggcaatatattcatatacttatttattacattttgtgttgtcaagagaggatgatgtagttcaacataaatgataaaaattaataatttctttacttgaatgattttttttttttaaattaacattatacacatcgatatttgcgaatactcatagatgccttaaaattcattaaatactcgtcttacgaatattcacaaggataaggataacggaaaggcacatatgtcatttttatatagaacaagaagggtggagatgattgttatttctatttgtggataccattatcatccctacatcatgtatatataatttcttgtttattgcaatacagcttggtcctcgcatagtatttcaacgtttttagattttttttgtcaagtagactaatgactaacattcatcttttaggtgaataaatgaggtgttcggagttcaaacttaggcgcatgcatacaacaatgcattatccctaccaacaaacttatgttcacggggacgtttttcggctatttctattttgcatgtgcattatttctctcttggtagtgcttaatagaataaagttattaccccagcctttattctttcatattaattaatcaatttcgaaacctacttgacgaaacgactaaaatggacttacttgcaattgataaagattcggttatattaatgactatgattatgttcaatttaaccaatcatatatttaacggaatacacgtaagtggaaaagtcacagttcaaacgccgagcgcaatcaacatgataattttggtatttttgtcggttgacctagttctatttttttcttatattataccaaccggttagttgaatttctcaataatattagtgacaaatcttgatgagatcatgactacattcaaaccttgccccgactttttgtttttttttggctctatgacctccttgctagtttttatttggagtattacatttctgaaattaatcactttgaatcattaacataataatttacgatagttggttcttaaaaaacctcacctatacaagtaccaccaacttaacaacaattggttagaaaggaagacaaaaaaaagaataaaataccctgcatgtaggtttttttttttttttgaataaaaactaggcacaaggttgttagtattaatataaccttgattatcacattggaggttttatccaatccaaatataaccttgagaaacaatatatgtatccacgattgcaccaaaaaaaaatatacattgcacccacgttgatgtcgtctcgtagaaaatctttcgttttgtatttttgtgtctagtgattgctgggaaccaaccccaccctgccgttaacatgctataattttatatttcatggctataaggtaagtcgtatattattccttaaaaagatgtaaacaaatgaattaattaaatcccagggaatacatccactttagattgaacttgatgaatgtttcctcataaaattaaatatatcacaatatcatgttggttggtaggtacttggtga

SEQ ID NO: 4484 - DNA, 2261 bp, Medicago truncatula
  Intron number 1 from transcript Medtr3g008890.1 (locus Med tr3g008890) derived from phytozome v7.0 (chr-ID MtChr3; po s 1173083 to 1175343)
tggcttgaagaagaaaccgctacttcttcttccaagtgagtctatctatcttcttattctttgtaaagtttccatttttattaatgggttttcttcatttttcatttttcttattgttttcacaattgggtatatgttgtttatttttttttctttttgtttgaaatttgtatacaagtggatatttagatgagtacaattttaactctgtaattgtatataaatcatttgttggaacgtgaagaattaatcaaattttgagtgacaaaagtatagaagaggaggagtgaaaattttcaattttgaattaagagagttgttcattgtgtatgatcataagttatagtagtaattaggatttggtacatttaggatctgtttgggaggggggttttggagggaaggggaggggaaggcttgtttttcttttctaaatgaagcaagctataaaatgtttctgaaaattaatgaacagtgattgaattgttatgtgatcatatataatggtattcattcgatttttgtaaaatctcaaatatattaaaatgtagacctagcctcaaaaatcccccttccaaacagacccttaaaaatttatgatagcatatggaaaacctaggtttgaattccggttaatgaggcccttagattgtaggcattagaaattttgtactggtaaaaaggtttgtcttttcacttctgctctccctttgacttgaaaggttgatgagaatatgaggtattttttgtgtgatgaataatttagacttgttaactatgctgtatgtttggtttcgctcttggagaagctaaaatccattgcaaatgtataaaattgatttaaacttgtttggatgttttctagcagaattgattttgccttcgaaattgattctaacttgaagttattgtagcttttgcttttaggaaaaaaaatttgagttctatttctctagaacaaatcaagaaaataacctcctttatttattttctatttatttatttagatagatatacaatagaataaaattcggatactgatcgaatctttccagttcttttttgtagtatagagtggatatttggccttaaatttatggttctactcactttaacatgaatatatataaacacaaatcactttatattcaacttatttttagcgaaaatcaagtttatagaatcaactcattcaaaatcaatttttgacaacgtagaaactaaacacacctgtgattgatagtctgctaaagttgttttggttgatatacataagttatgatgttcaagttcatattttcctttttctggtatgaatttgaccatttgggccggattatgaattcttttgagttcttcacaatcatcaacataatgtgaaaactcttttggctatcacagttttagtcacagttgttgacggtttactgatttttaaatgatatagatctactaccctcttgaagaagaattatgtatatcatgtaaacttccctcttgattgaaaagaaataaaactactgtagttggttgaacttggacccattttgtttccaactaaaatgtccatccaaagattttgttacaattttcaaatgatgttttggttcatttcgtcaaccctataaaaaatgtaagttatgaatcttttcggataatgatttgatgagtttcagttggatttgattattcttttgtgagaatatttataatgaaatgaatttataacctaccatatatttagagaagttctcaagctttatgattacttctgttcgattgtgccaactatttttaaacgaaaggtataattgttttgttgggcttaggttgcattgagttttatgtagtttaacgcctatctgttgaaatcatggtttatttcgagagttgggttagttacttgagtgcattattttattatgattttgaatgtcaatttagtctccaaaatatcaacctctcgaatttagtccctaaattatataaaataataagtggtccttaaagtatatgaaatctatcattttagtccctaaagtatatgaaaacttgtcaagatttcacggactttaagaccgcttattatttttatgtattttagggactaaattagatactgatgtttgaggtactaaattagtggtttattcatataggtaatacttattagataataagataattcatagtttgtaatatgatatgatttttgtcatctttcagggttccaaaagaactacaatcaaaggttcctcctc

SEQ ID NO: 4485 - DNA, 1788 bp, Medicago truncatula
  Intron number 3 from transcript Medtr2g005440.1 (locus Med tr2g005440) derived from phytozome v7.0 (chr-ID MtChr2; po s 233893 to 235680 reverse strand)
aaaagactccagaacaggtactaaatcccagcttttttttctttctcaaatagatatctaagtgcatacaggtgcttaaattatatctgatgttcagtaatataattataatatatccaacgtcactgctctaaagaaatctctgtctgatttttcatagaaatagaaaaaataaaaggtgatctggattgcagtttagttgccttatttatctttacattgacattgagtggggattaatcaattttgaggtataatattattgctcaactgggctacttcaaacagaaattaaatttgattgttggctgcatatttctccgttctctttgctgctgcatttcatttgaatcataatcttcaattgaatcacatatatcttttgtttttgtttctaaggttatttttttatttttttattttttttatcttgttactggctctgtggtcaaacgcggccgctcccggcgctaccgcggccaaaaacaaggagccgcgtcacaacgctaccgagtcatgcgtttgtggaaagcgggtcaatagcgggtttcgcggacgcgtttctgtgaagcgaagcgggtcgaaatcgggtcaaagcgggcgcgttttgcttcgtgtgtaaaatctcgtggtaaaattccatatctgttcttgattggattgggtcattgggctaggcccaacgatgacattagcttacagattttaaataagtaaataacaatggtgttaatactaaatatgaatacaaaataaaattttcatttatattaataaattaataaatatattgttaaaaaataataataaatatatgcttcatttatattgatagcaattattaaatacattttattatagtttttaatactaaaaaaaaaaattaatcatctttaatttttcatttatattaatactaaacatattttttcatactttcttagtccttgttattatatatatactaatgattctattcaattatgtctaagacttgtggcttttatttcaaattatggatactacataaatttaaagtaatatgtaaggtattttagcatattttttatgtaaggtattttagtatattttttgtatagtatggtattttaatattaaatatattagtgtccgcgttatgaaatagcgcctgcataccgtgccgtgtcaatttttggggtggccgcgccgcttttccgctttgacaacagaggttactggggggctattttgtttacaaatattgtgtcagagtctccctgttgtataaaccatagcaaattaagggaataggaaaggatagtgttaaactaataaagcatgagtgggaagcgtttccttttcttaccccactcgattcaggattttttatttttgccactggtagttcagttttgctaacaaagtgtgcctgaattttagcataactgaaattgatgagggaacttttgtgagatttttagataaccatatagtgtaatcagagcatggcatttttttcttagctgagtacattttattagatatcacagaaagtagttttcctgtcttggtaggttcaaacctcaaaattttggattacgatttttatgatgatgttaataccactaaaacaataatgtctcaaactttatattggattttttgaaatcctaatcggcaacttttgccgtatttctatcggctcagtttctttcagctgccatgaaaatgtaagggtttaatctttaacatactgttaactattctttaattatctttcaggaaaggttggaaagaagacggcag

SEQ ID NO: 4486 - DNA, 1406 bp, Medicago truncatula
  Intron number 2 from transcript Medtr3g062130.1 (locus Med tr3g062130) derived from phytozome v7.0 (chr-ID MtChr3; po s 14250514 to 14251919)
gttttaaattgcagtcagatacgacaatgtgacttcaattacggttgtagagattaggactgttaaaaaaacctaaaaacttgattgaaccgcatcgaaatcaatgaattgtggttggcagctcacacaatgaactatccatcacaattcgactcttttcactgcagttcattttttgttttattttttttaaaccatcataatatttggtttcgtattcatttgaagccacatcgatgtggccaaaaaatacaagtttttactgaagctacaaaagatagcttcacaaaagtaaagacgagaattccttgagacgcgagagatgagtgtcaaacctatatccaaacatagacgtagtttgatcttttttttcaaaaattgtaattattagttaataattgcaatttggtacgttttgttcacaacggatcaatttggtttctttctagacatagtttcggttcaaagctatagaatcagtgcaccaaacctttatatcagttccgttcagaatcaacaattaacatttcagttcaattttactaacctgttataacagttcggttcggtttgcgttttgaaccaaatcagaactgtcctgctagagatataaaaatattgatgtcacggggtagttgatttttaaagacccttgtttgtgaccttaaattatgtgacaatttttaattaaaaagttaaaaacacaaataaaaatatgcaaagctagaaaatgtatccttgtgaatgattcttgggttccattttgaagagacaagagacaataaaataaaggttgtactgtagtgtatctttgaatagactttgaaagtgcattggtgatatatataggaactaaaaaagtgaaattgagtgatgcacaagtcaagcttttttcctactttattgcaggctatgtatcatgtccatatcaaaggtgtcttgtttatcacaattattttttatttttttatcttatccattttttgttaataagttaaacatttttttatatctataaaatttaaatttgatcattattaaaatgttatttgactttggtcttaaaattgtgtatatgtagtccatcatttttatatttataggagattaaaaacacacaatttaaatatttcaaaatgctaaaaatgaataaattttgtaggaatcaaaatcattttttgaattttactgtaactacaaatatatttaactaatgcaattgatttgtatacttagtataggacgttcgaattcaaatgttacaaagagtgtataattaagtagtttgtcaaaaaagagagtgtataactaacattatcctaatatctacttgtgtattttttaatttatttttaatgcttaaaagcttttattaatttattaatctgtgtttcaggtgttgggac

SEQ ID NO: 4487 - DNA, 4670 bp, Medicago truncatula
  Intron number 1 from transcript Medtr6g080490.1 (locus Med tr6g080490) derived from phytozome v7.0 (chr-ID MtChr6; po s 16158434 to 16163103)
tgtacattagacaaatccatgtaagtatttcttttttgggagaggcaaaagtgattctcgaaacctaatattgatttttgtatgttagaagattctcattataattgatttcacctttaaattaagatttataggttttcatctaaagatggttctcatgttaaatttattattcaattcacttttacttaaacaaatttaaacataaatcgttttactctaaacttacattagactaaaaataattttacaaaaacgatttcagacacgataaaatcaaacacacacttataaaacttttcaagtcacatcctcatgtccaaatctccattagaaaagagaaatgttagattacttttttttttttttatttatacttttcaatatagtatttatgattaagtaaaattttatatttgccccactaaagaactttgttccaattcttattagtggggatgacattgacattgagaaagtacaaattgtttcctcatgatgaaggtatcatgatacaaaagtatggatgagcaaaaactttggtttagtgtcctatgattctaaatttctaatttaagtttgaaatccatagtgggttgttttaaattgttctccaaattagaataaagacatgattgaagtgtggaaacaattggacatgtttggcatgaaagctttcgtatttgaattgaaaagctagcctacaaaacttggcatgtttggcatgaaagcttttatatttgaattgagatcatataatatgatctaaattgaaggcaatttacatgtttcggcaatttttaatttgttaaatacatgtaccggttaatctgaactttacctaacacaataactttattgcatatagtttttttttttaaatcacaaacttaactcatctcattcatcaaaatatcctaaaatataggatgaagtataatcaaagacgtaaccgatatataacaatattgttgttttgagctagtgaatgagctatattattaacttatcttttaataaaacattttttttttaaagagtcaaactaattcaccaaaattgataccaagacaattgaacctgaaaccttaaacggaacacacttcaagatttcaagtcagcactatcaaactaatccaaattgttaactaccatcatcattcatccattcatgtgtcaaaatgcatgttaaaaaagggggacaagcacttaactactatggtggggcccaaaagttagagtggtgacatcatagactaacaaactttaagcattatgccaaagctgatatgcacaagcaacattaatctaaaagagaaaaaataagctgttgagaattcatgaaattctcatgtagctcttaaaacatgcaaacacttattgatcttgggtccttgacaatgacatagatttaagacatgcaattttcttttaaactttattattcgttcataagaaccaactctatcatccactggttggatcataggatcaattgaagttagatcaaaattttgtatagattagcctaagacaataattgttagtaccagagggattcgaaaacctgtagagaagcacactttgaggttcgaagctaccgactgtaacgcctaaaacgactttaagtattgtcaactgaccacataaaccaactcgagtctttttagtgtgttttgtcctaactcacacgttttctggacaatccaaaatattattcatctcaaattgctctaagtcaagcatgtttaactatggagatcttatagtatatattagcaaaaagacgatgcatcttgtttgtgtagttaataccaaacaattgtttgtaaatcttcattcaaatatgcaatttcatacttacgcaactctcatgatctctctcattctgatgtgaatttgattcatcgatgtatcattttcgattcaaagcttccagaaaccgctcattggtcatatcttgtgcaccttatcctcgccggcctcagatgtcacaccaatataccattccttgaggacttttaagacatacaatatatcatgaataagattttaaattgcagtcgcaatctttgatgttgtggaaaattaggttaaaatataatcaatgttgctaaaaattaaggttgtgattcagttgcaaacacataaagaaaatcttgacattgcagcaactcttgtggccacacaacatttttgaaaatgttgattaggacacttatgaaatcacaacatggacttacatgaatagaaggtgtttgaaatatttcaagcatgctctactactttcttgtaccaaaccatgggcttacattttttattagttttgttattttttatttgaattccacaaatttcaaagtaaataaatataatattttgattacatttttcatccattctcattgaaaatttctatttccattttttttcctacttttaaatcacccttaccaaacattcataaatacattatactaagactaatccaattgtaagatgcaacaattgtccaaaactagtgtagtatgagtgtagtactaaaattttcaaatcacttttgccatttcacatagccgttttttatgcaaatattaagaatgtgtatcatgtgatgtaacaaacattgcaatggaaaaagatggctccaaggatacaaaagaaaaatatgcagatacattgaattaatattataatatatacatggaaatatgaacatttgtttgtattcacattgagaaataagcggtgaaaaaaacccgttcacaagaggattctatgaaaaaaaacctgtccacaaaaactacatcaaaatccatacaaattaaactagaataatcaaattaatttataaattaattttacaaagtaagttggttgttggtaagaattcaactcagaatttacgaatattcgagtttgactttcattgataatatgaagatcttgttggttgataatatttaacatatttaagttatcttcagctaaggatctcacatatttctacaatgcttacttaggtcgttgttggatagaaatcagacgatctaaatttctgtcataagttccacattggatgacataagacttaaacataagtttataagtgggtgcaattttaactctcatcttataagttggttttgtaaaaataagttagacccagcataaaaaaattaataattatcaaagtctatctaatatttattatgtcacctgctattaggtcagtctagacagaataaaagcttataagtgagtgcaattttaactttagaagcaggtttacaattgagttaggcaccaacacaaattttatttaatactttcaatgtagttttttactaaaaaaattccacttaggttgatctgatggtgttgacttgagatctttaaacgtgtctcttttaagatctcatgttcgattcttctaatgtcaattttagtatatttatatttgtttgacttcttaaagctgactaggtgaatggtgaggaatctataactgtaacatggaatccagattcatatcaagcacctttgcaatgctttgagtcttatacctttctttgctttgagtcttttcactaaacatatttttaaaatattataaactcttgaattttgttacctttgcccctaaaatacgcgtcatgacttagaaaataatggttactcatgaataaagaatagcattaaaaatcatcaaatttgcaggccaaattaacataaaactatacttcaccgacatattaatttgaaatttgaacttagtggatcaatttgccgttttgttggttctatttctactactgattataactaaatctagaagttcatttacttgaaggtctcatatttcaactaaacgtgttatacctttgattaatttgatggttttgctgacaataattttggactttttacgtttatgaattatataattttgtgagaattagaatatggaggtattctagaaaacaatacttttctaaatgaatttgtctagaaataaattattaattatgtttcgacgttattaacgactcatgctaaaaaaaaaaaaaactttaataaccatgttattggtgtgaggtatggattgtcttttacaagtgactaatcttcttcaagattatattaaatataagagaaatatgatatttgtacatccactttgtaacaatttcttagacaaatttctctctcatactcacattatgtttttattctctttttttttttttctctctccattgtctttgaccaatgaaaaatgagaaaaaagaagttgtatcaaaagttgtctaaaatggttgttcaaatatcactactctaaatataaaaagttgaatttctttgtttacaaataagttttctctatgcgtaaaagtcaaaaaacaaacttttgacaacttgtttaaggtgtctgaatccctcttgactgaatccctcttgattgtttatataccatgaaaaagttactattgattgttgttaatttgaaatacatttgatagagtgatctacttttaatatgtgttatataaataccatcacaaatattacatgatgtgatatcattggatgcgggtaatgggatcaggatttgttgttgtagcaaattcacacagtttgccgcagtagcaaatctcagtcatcaatcc

SEQ ID NO: 4488 - DNA, 1500 bp, Medicago truncatula
  Intron number 9 from transcript Medtr4g158090.1 (locus Med tr4g158090) derived from phytozome v7.0 (chr-ID MtChr4; po s 39576297 to 39577796 reverse strand)
tgcttgtcccatttgagggggccaactcagcagaggtacaatatttgcccatctgtcaagctttctttgctttatggtagatatagcttggttatcctacattagcagttatagaatttgtattttctgattgaatatttgtgtctataatgagatcacacaattgtatttatactagtgttacaataaatacattgaataaccactagactaggaagtaaatacattgaataaccactagactaggaagtcctgtaatcctaggaatatataaaatcagaagctgttacacttatagggaatatctacaatctataattctaacagcagtgtttgattttcatctagtcaaagcttacacgcacgtttttctttcttgatttgaacttatacgctctttgagtactaagaaacaagtatactctatctttcttgcatgcccatataaaaggaacatgattataccaccttggtcacaaaacagcctcttatgtcaaaaacagggtaaggctgcgtacaatacaccaaaaatggtgggaccccttcccagactctacggttgctaaatcaaaaaatatatattcttccatctcttctactttgtcattttttgttgtaagtttagatttaaatttccttttatgatttacacaattagaaacatgaactgaagttaaagaggggaaggaagttgtgataaattgaacaaaagtaattctaaataatcctgtcaaataattcttaaatgattccaaataatcctggttttcaagaggagtcttactgtgtactctggcagatattaagaaaaggatgtggtactgttgtggtggttttccagatctaaaaatctgaaattttttggaagaaaaaattggtgaagatgaagattctttgaagaacacatgaataatattaattttttttggttactttaatagtatttttttttggtacagtttaatagcttatgtttagttaaagaaataatcctatcaaaaaaagccaaaatctatctacacgttaaaataatttataatctccataaaatgccatttccaacttttattataaatacggaaatgttcagaggtggggtcattatttttgttgttggtacaataacaaaaggttggtaataggtaaccggtctttgatctgaaccgtccatatataataataatatatcaatggttatcaatgaatgagaagataatttgtgcatactaaatgccacctgagtttatcatatcagattgtttgtattctgtgatttctaaatcaagcagccttttgatgttccagatacttacatggcataatttttttcattgtttcttttctaacatgggtttcatgatagagtcactatcaaattgttcccgcagagacatttccgctcttgaaaatgaaataagttttttagtaaacagattgtttcatccattttaacttctttaattctgttttttagttaaaggtgagaattgtagtgaaaga

SEQ ID NO: 4489 - DNA, 1876 bp, Medicago truncatula
  Intron number 1 from transcript Medtr7g111140.1 (locus Med tr7g111140) derived from phytozome v7.0 (chr-ID MtChr7; po s 26031380 to 26033255 reverse strand)
ttactcttaatcaacctgcttattggtggtaagtttttcttatactctgtttcttatgtggtttagaataaactatttaattgatctctacttcagtaaccatcttaacaaaagttaagaaacttctcaatggttgtttttagtttaaaaacggaaattgcaggtaaataatactaattgaatttataacttccattcattaagttatttcgagaagtttgattcaataagctaaaaatagacacttggatgataatttatatgacaaggtaagtataaataaatctaagtgttaaatatgctttacatacaaatttaagtatattttgtctttgtaaggatgtttccatttttttagtcaatataacttacaaaattacatgtttttagtccttagaatgcaattttgtactaatttgtagaaattagaaagttaatacatggactaaatacaaaattataatgattaaatacgcattcaagactaaattctaaataagtcattctttgctaaatccagtttaaccgttattgacgattttaaaataatggagtaatttttaatggctagcaataaaacttggtcagtttttacttacctatcaatggatttatgaatgatcagagtttcttcctctgaaaaccggacggttaagacgataaagatattaaatggctatggaaatataagaatttgatttttcttcttgggtagaagtgtaggaatgtgattgggttaggatggaatgaagaaaaatctacataaactatttttgtgtatatttattattgatttgacttcttgtggcgggctcagtcagttgttgttttggaaatttgaggtttatctgcacgcaaaggcaacataatcagtttcagataaacgtaaagatttctgctcttcccccaacacattttgctcgcgctctgcggtcatttcaaaaatatccctgcgttagttaactaacgcatgtgtaaatcaaacgtgacttaattttatatatgcgtgacttaagtcacgctgcaagagttaactcatgcaggtgttatatccagcgtgagttaactcacgctagttcaatttcttggaccatgacgctagttaacttatttatttgcatgttttcacttgtctgccatatgcgacagcaataaaggacatgtgttccatcctattggttcttttgtcaaaaaataatgccatatataaagaacaaaaaggaaaggactttcttaatagtctcacatgcaaattagcttaggtgtcaaaatttatagtggttgctatttcaaactcaaacaataatgaaccatgtggagagaaaacaatgtcagtgtagttaactggtgtaatatgtactgcgtgagttaactcgcgcatgtgttaatctctccatttgagttacgtcacgttagtttaacacttacataacttaaatcacgctgtgttagttaactaacacacaattttacacttgcgttagttaactaacgcaggcgtattttcaaaatggctgtagagcgcgagcgaaatgtgctaggtgaagagcagaaatcaaacataaacaaattgcaatttacaggggcccatgacaaaaatgtctcttctagccaatgatgtatttgtttgagctgcatcctcattgaccataaataatgttttataatacaattatacatcacctactaacaagttatggaattcccttcacataaaaaaaaaaaaaaaaaaaaatcaccggaaagtttctgtttgtcattttacttttggtaaaatttattctgcaaaatctttgataaagtgcattaagcaccctaacgaacctactttatacttgcagcttacacttggtaagaagtgaaaacataaccattc

SEQ ID NO: 4490 - DNA, 811 bp, Medicago truncatula
  Intron number 1 from transcript Medtr5g099880.1 (locus Med tr5g099880) derived from phytozome v7.0 (chr-ID MtChr5; po s 39979208 to 39980018 reverse strand)
cgaggagttctcttcccaagaggaacctcttcaaggtcagtttcttaattcttatcttatttaccattaattaaaaatgcctaatttacaaaaataacaataaattaattggttagggtttagtacaaattgaatcagaattaacggcttgtttggataaacagcttatttgcaccttatacacaagcgcttatcttgataggcactcatgtataagcttacataagctatttctattaaaaaaattatgaaataaagttaaattgattttctgtaggttataagctgttttcatgacctatcttggagaacatatgaaaataaattgaaaaagcttatgaaaaatgtcacaagttgttttcaaatgttctcccaaacgtctttacaaaacttatgccagtagatgagcccaaataagccaatccaaagaggccctcaatctgatagaaatatatagcaaacaaattattatctcattattgtgaactcttttataaaataattattttttttctgctcaagaattattagtagtatagattgaattacagtgtttattttgatgaagttaatttgtacaccgacatttgctcaattaactcatttcatggtgatgtcacttttttaggctagttcctaggctagaatatttctacaaatatctatttgacatgatttgattggatgcatgtgtaaagacattttacaccatcagtgcgtagaatttattctcttattttgattctgaaataaatgtctctgttttgtgatattagtatctgcgcattcctcggttcagaatcgatctgta

SEQ ID NO: 4491 - DNA, 1579 bp, Medicago truncatula
  Intron number 1 from transcript Medtr3g020370.1 (locus Med tr3g020370) derived from phytozome v7.0 (chr-ID MtChr3; po s 4594399 to 4595977)
ctgaggctcttcgacttgctttcaaaggtgaatcatactttaacatttttgtcttatttttttatttatttgatggtgctagattatagttgattaattataatcatgtgatcataaacttgattttaaccatgcaagattatgtgtgcatttgtttaaccttttaaaaaaaatagattttatgttaaaaaaattagagatcttcttttcttttgttaagaaaaaatctagagatctttttttagagatttgaaaaaaatgaagttattcctgtttgtttgctatccataaaaatcaactttttaaacaatgattttcaactgttcttgtgttagctccttattttcgaaaaaaaaagattagattttagagaaagctaatcatgatagtttttcattttgtagtcaaaaattattttttattttataaaatgatatatattttttaaatcataaacaaaggcatctcatgttctttacttgtagcggatctaggtgagttatatctttcagatattaaaagttatttagcctatataactccttttgatctcagttataaataaaaatataaacttttacattatataagaaatttagtttagtgtgttatttttcctgatctacttaaaaagtaaatgtaccctccaaaatagtctcaatgagaacttattttacgagaataaagagttattaaaacataaaacttatgaaaattttaggaaactagtttacttttttggtataacaataagttcttttttttttttttgacaaaaaatcatttatattttaaaccatcaaattgtaatttttttacttttatttgagacaccataagttttttttttattcctctcaaaaattaagcttctatgacaatcctagttcaacttatttagaatttagataccaagaccttggtggtattgattattcattcaataacgcaaggtaggaaaaaacaacttagtacctactaaataccatttatgggggataagggtaacttcagattctttaattttctacttacataatgtctaaatatacatacaatgtgacaaaatctttcttctaacatagtagcactatgtctacccttattgctcccaccaaccattcctcagttgaggacggacaagcccttcaacatgctttcaaaggttgcattaaattattgtttcatttgaatgaatggtttatatgaatttgcttttttagacaataataaattcaaattgttgtagtcacatgtgttggtgttttatgcttcaatatgaagtgtcggtgctattcttatgattgatcaatgtggtgacatgacatcaattttatacgagtctagatcctcattatctggaagtcccattagactccgactagtctaacgagtcggtggatctatttggtgacgacaaactctacaatgcttttttttttttttttttatcaactcgagactttgcttaaaagaaatgaaattctttcactagacgttagtgatggtgtaacataataatctattacaaaaatgaaattgtgatattgtgttttatttatttttcaaactctgcagg

SEQ ID NO: 4492 - DNA, 1915 bp, Medicago truncatula
  Intron number 1 from transcript Medtr5g095860.1 (locus Med tr5g095860) derived from phytozome v7.0 (chr-ID MtChr5; po s 38042651 to 38044565)
cttctgagtcccatcaccttattgcccccacttgggttataagctgccgttacacagctcggcgaacatacatgcttaatcaaactttataaagttaatacttatttccattttagactatgtgggacttttctgttacaaaatatacacgatgtggcaggcacaacacaaataccgggatcaatattaaaatatgtcgctttcaaactttataaagttaaatttatgaccttttttgaactaatgaactctttaagttaagtcctaccttggatgtatctattgccaattatattctttatggttgtaactcttatcacttagtatgtcttctgcttgtgatcttttagtatattagtgtataatcaaatatccctttttatcatataaattctatactttcaatggcatgcatgataacttggtgaagcaatttaatttcatatcagtgtgagtatgttgaattcactctggcattagcatacattgagccatgattaatttcatatttgatgctgacaaatatattcttccattaaattttattgtttggccttggtctttttacttatatattgattatttatgtatttactactaaatatatttttccatttggtttgtcctcttctacttctttttctgtctttcttatatgtacattttttactatgagccttcttcattgtgataatatatagtagctgcgaacctaaagtgtgggttctttaaacaggtttatactaagaatgctagcttccttttttgtcattgtaagtttccattttgttcttaagctcaatcaaatttgaccctcctaccaagctattatcttccgcaacatattttatgcaggttatagataaatacgatgtgttcccaagatggtcatagcattggagtactgattatgtagatcctagcaacatttatttttgtgaaagagtacgattgaggttcttggtatacaatacaagtctatttgatactatgtaatttaataaattttaaatggaagaaattcttattggaatattttattattcaattatttagcaatgttattatgtgaacaaatatcaataataagaatacatgttttggactgattttttcacttacaattataccattaaacaagtttgtctatagtaattagtgcaataaaaagagctgacaaacgggtacaaagtgtctgtcggaacactagtctctataatgattatattatttatttatcaactaggagacttaattgattagtgatcaaataaatttggttaattaattatttgattaattcaaacctattatcgtttatgagattcaaaatatgttttttcgtatagagattaaaattataccatgtcattcaacttgattggtaaaaaagtgatggtacaaagggttttctaaccggcatgttatccattgctatctatgtgggacttcatcacgcaaataacggaacaatattgtttgtcatgttttctactttcccttattctttctaaattctaacaacttctccacgttaatatctctactttgacccaaaaattgaagccatatcctaccgtatcattcaaaaagcaaataatattgttcctataaatgggtggtttttacttaaatatttgtatagatgatcagacttggtttttacttactagtatgtatgcgatttgcgacaacatgttatctgatacttttatgtaacttctattactttataaatttctttatgattttcagttggagttttgttgcacccatatttttgattgaagacatgttcaatatccaacacttgtaattagcttaaaatatatcattttctcaaaattttatcaatactgacgtattatattaatgtcgtgtctgtgtgtcataggttgcagtttcataaatccgc

SEQ ID NO: 4493 - DNA, 1562 bp, Medicago truncatula
  Intron number 10 from transcript Medtr7g027050.1 (locus Me dtr7g027050) derived from phytozome v7.0 (chr-ID MtChr7; p os 7020174 to 7021735 reverse strand)
tccgtttgaaaaggtgattgttcttagcactctataaatgcaatattttcataaattttgtaagggagttacttcataattgagaaataatagaaaactgatttttcttaccttattttttcataaattgtttagacaatctttacctctttgttgtcattttttgtcactacttttctgcatcttcatgccatgtttaatttttgtatcattagctatgctctcttgtctataggttctaatatggaaatggaaaaatgtatctgcagtccttttccttcaaatattatatatatgaaaaaattgaactcatgattttttggtctagtctatcttggaccataaatattttgtttcaaactatttgatattataaaaaaaacaagcattttaatccagaaaagaaagagaaaattgagttgtcataagatctgtcaccattatatttatctttgaactacattgtcaacatagtctcgaacagtgttgttaaatggatgcatggcgatcccattgtagaatggcgtggcggatttttgacaaccgccactggccaatttatgaagggatgtcccccattgcggcaccataggccgcaatggcatgtttctatgacggattccgctatccatgtcaaggcatttattaagcaagatcctatgttaatgatattgataaatcactagaaaataagcagaaagaggtcttttgttttaaccactttttgtttctacaactcatcctaccttctccaccataatgtgtaacaaaaattaataaacagaaatttgctacccattgatttcctgatctccatattgttttacttttaccctgctaagaattactcaaattctaactttggattatcctctaaagtctagaatatgatagatagaatatcgtggaggaaatgatctgatattgttttttaacttttaaagaatacccttcaatctttgcttctcgaatagatctgtacatgtatttttggtggattcgaatagattcacacaagtatcacttatataaaactcttaggaaaaatattagaactataactgtcatgaactagaaattcataatgaatagtgtcttaattttaaggaaatgataactaattatagtaaatgcgttattccaatgatctagtgtctagttccatagaattagtgtgttgttttctggaagataattcatgtataaagtttccttagttgtatatgattaaatataaatgccacgtttagcttcttccagtatactaaaatttagattatcgaggaagcctggtctgagaataatgcaattgacaattaatgaaagtgaaatttaagtatcgtctagactctagaagatataagtattaggtttatgtttggaatattacttttgtattttagtggtcagaaagacaagttgatttaagttagggtagttttgttcaatcaagcttgctgctatttataactacctattctgtatgtatggacacatgcaaatatggtgaaaactttatacttatctgtaatagtctgttattctctgcaggtggtgctttg

SEQ ID NO: 4494 - DNA, 1643 bp, Medicago truncatula
  Intron number 1 from transcript Medtr5g009530.1 (locus Med tr5g009530) derived from phytozome v7.0 (chr-ID MtChr5; po s 2112015 to 2113657 reverse strand)
acacctgatttttttgctggttgattttgctgaaggtaattgcaagtttgtatgctttcacttctattcacgggttgtggtatctattattgcacggcctaatctcaaagcaataacattcaaaactaaagaataaaatgtcaggttactatctctgtttgtgagctacctatttataacctctgtaaaacacttccccatttacgtggtgattgtaggtttgatcgaagtgtaggagccatgtataccaaacattacatgtttggatttcttgcaagcactaattgaactgaaattattttgcctcttgttattcttctcggtatagatatttgaacatctaaaattgtacaactgattggacaatttataaaaccaagtgttaatttggttaagtgagagaaaagggaaattattataaaaatcttagagttgttttgagtgtgattttataagttgtcacattttaaatgtttaaatatcaatactcctaatattataatcttatcggtccaaatttatttgaagaaaaaaacaagaatttcaccatggcatctttgcgaaggaaccaaccgtaataatttttcgatgattttaattgatatgcacgctgtaaagttattttatacataatttgtcgccttgttatttaatgtgtttgaaaacacatcgattgtggtattttctctatatcgatatgagtgtaaaattactttaaactttttttttttgagcaaaattaatttaaactttaaacttattttactttattagacaaccttttattttattttttctttcaaaaaaacccctttattttatttcaaccccaaaattactgttttttttttttacaattttttatgattttttttttgtttgttgacaaaatatggtttttttatttgccatctattttatcctttttcttttcaatatttctgaatccaatcgggttgttggaaatcgacttccatttcccaggtactgtaacaattttcattttgtttctatatatctgattaaaataggaaatttatttggatttgttatgtcatatgcttcattaatttacatttcgtcgaaggaaatgtgtcctcccatttgcttggaataatttttgcatatgaaacacggaatgaataatgtaatatgtaacaaaagtatgtggtaacattatatgttgaccagtggtggttaatgtataacgtttgaggttatgaaaattgacgaattcatgaaatacttaaatttctattatgattttctatccattttgtcatttttaaaagctgaccagaaaatggtgactaatttttttaagatagattcaattgattgtagattaaaacgtttttgagaatggtgatgatatacatgttcatgtgtattcatcaccatttatatagattccgtgcttgtttcgtatggattcgactagggcattgataatatcaaatgcatgcatggaatgggaattcgagatattgtcaaacaagctacttttgtaactccaagttaaaaatagccgtaaaatgataaattttcactaaatatcatcaatgtaaaactaatttcccttttaatttgtcatgtgtgttttcacttgttaatttcaggattcctattcaataacagagaaa

SEQ ID NO: 4495 - DNA, 2107 bp, Medicago truncatula; identical to SEQ ID NO: 4155
  Intron number 2 from transcript Medtr1g064730.1 (locus Med tr1g064730) derived from phytozome v7.0 (chr-ID MtChr1; po s 12622032 to 12624138 reverse strand)

SEQ ID NO: 4496 - DNA, 1787 bp, Medicago truncatula
  Intron number 7 from transcript Medtr1g031910.1 (locus Med tr1g031910) derived from phytozome v7.0 (chr-ID MtChr1; po s 7839735 to 7841521 reverse strand)
agaaagctttgaggccttactttgaacttactaatgtaagtttacattttcaactatacttagttatagtaaagtccagagtaaaagtgaacttattctattggtttgatcataaatgtcatttctgtagcttcttattttgatataattcttttagtaatttccttttttctgatatctagttgctgttatcctattttataactcttaagttatgaagtgtcagttgaagaaaatattgatcacatgactggtctggtgtagccaaactttttgacacatgcaccctccttttttttaccggtgcctttgccacattattccaccctatgtactctttatttattctttattatctctttaattattaaactccaaagccttaatttttactgtattggccaagaaagcgttcacagatgttttttaaccaaaattttgacataaatagcaaaattgtgaaccaataagtttaggtgctgcattcaggcagatttcattgaaagatgtagtgtagtcttgctctgccctaaactcaatagttctttgtcgtttggcctcgccagaatgtaggccaattgaaacatacaccttattctaaatattggttgatgaaagtactcaattagaaataaatttaatctggaagaatccaaatcttgttgatgtatttcagaataagctgaacctatgggaactaaatgttctagtcagacaattctggaaagtgaattaaaaaattgtaccatttttagccccaacaggtcgtcttgtgatccacttttttatccttgtcttttattgctattctatttatttttcgtcagttgatttactcaattattggtgctattcactctactgaatgaagtgaggcctttgtgtgcatcttttcatatattgtactatttgactattatgaaatagaatatacacaacaattttgaattactctctaaattgcaggtggcaaatttcattgtagagttatattacatcaaagcaaaattttgtaaacaaaacatcaaattgagaaatcagattgctttattatgaaacatgagagaagctaatgacaaacatcatttcaaatataatactgttggcttttgaattactctcctcattgcagtcatcaaattttatcaaagagttgcatcaaattaaaatattataaacaaacttcgaattgagaaaatgtaactgatttattatgaaatttgaaggaagctaaatgacaggcatcatttcttacacaaataaggttgactagagctttaaaatagaaaacccacttaaatgctatgtcattttttattttttttgaatatagtttaactcagttttttgagaacatgtgactatttatgcagccaatttatatcctcataaatatttgtgtatgcactttcttccttgcctgcaggctagcgccctgtagtatattgtgttcagttaactcagttttcggtgcatcttccgtgctgttgagatgcaccttagggtagaggattttggaagttgtggtagttaaaatttgaattacctgaaacaattatccttttgttgaaattctgtaataagacacattttagaagttatttgttttcgttttctaaatcttaatccactattttttattcaattttgatgtctcttccaaatctaacatgaaagcttttgataaccataatacattatttactgtcgtgcttctttgtggtaatgtttgtatatgttgtggaatttcaggctgttaggattggtgatttagagctctttaggaa

SEQ ID NO: 4497 - DNA, 2139 bp, Medicago truncatula
  Intron number 3 from transcript Medtr5g092390.1 (locus Med tr5g092390) derived from phytozome v7.0 (chr-ID MtChr5; po s 36213219 to 36215357 reverse strand)
ctcagaagcactttcattctgtacttttgggctaggttctgcttctgaattagactcagcttctggagtgatttcagcttctggacatgattcaacttctgtatacttttcagaatcagaaggttgatcagattctgatgcatcttcagaatcagttgtacctgcattactttcactttgctctgaagttttacttccaggctctctatcatcaaattttacatgcatagattcttcaacacattgtgtttctgaattatacactctgtatgcctttgacctttcagagtaacctaaaaagattcctctttgagccttggcatcaaatttcttcagatagtctttagtgtttaagatgtaacaagtacatccaaactgatgaaagtaagagatattgggtcttcttcctttaaagagttcatatgctgttttctccaacataggtctgatatagatcctattttgaatataacatgaagtattgactgcttctgcccaaaaatgtttagctaagttgttttcatggatcatggttctggccatttcttgtaaggttctgttcttcctttctacaaccccattttgttgtggagttctaggagaagaaaactcatggagaatcccatgtttttcacaaaaaagttcaaatggctcattttcaaattctccaccatgatcacttctgactttcaaaattttcaattctttttcagattgtatttgagtgcagaagctgctaaacacttcacatgcatagtctttacttttaatgaattttacccaagtccatctgctgtaatcatcaacaatgactaatccgtatttacttccatataaagatgcagtgttaactggaccaaaaagatcaatatggagtaattctaagggtctggaggttgatacaatgtctttagatttgaaagaacttttcacaattttccctttctgacatgcaccacaaagtgcatctgaatgataatcaatgttaggcaatcctttgaccagttgtaacttgctaattttagaaattaatctccaattagcatgtcccaaccttttatgccatacccattttttatcattcattgacagaaggcaaactaccttctgatcagccagatcagagaaatttattttatagacattctcaattctctttcccttgaatgtaatggatttgtcatccttgttgactagtgtgcagttggtcttactgaacgttacatcatacccattgtcacaaaattgactaatgctcaataggttatgcttcagaccatctactagccacacattattaattgagatggaggaattaccaatagtacctgtaccaatgatctttccagtttggttgccaccaaacttcacttctcctccatctttcattgtaagggtaaggaacaaagctttctctccagtcatgtgccttgaacatccgctgtctaggtaccatgacctttgtttctctcttgcccttaagcacacctgcatttttggtcaattcagatttaggtacccatatcttcatgggtccttttgggttagttttggaggttttacttttcctcccttgtaccttagggtgaatgctgagtggcttctgatcattcaatactttaggtttgacaccttttggtattgttttctcagaagcagtagctgctttgttcttctgatccttttgttttggaattttagattctgatttaatcagattctgatgaacaggttctgatcttttcagaattttaatcttttgactcttaggatcagattttgtcattaccttgatcttaagattctctggctttgatgtgatcttagcctgtgaacctgaagcttcaggttttgactgaacagtagttatagcatttgtaccttcaggcacaaaggtggatttcaatccatccttgatacaatcacagtagctcttgagactgtattctttggatttctcctcagaatatccaatccctttgcctttgttcttgtatgtgctgtagatcatagaagcaactttgcttctgtctattccagccataataaaatcatccaaggcaatctcatgtttattgcctgaacctttatcacatttttcttgtagcttctgacaaagactcttgagtctatcttcat

SEQ ID NO: 4498 - DNA, 1404 bp, Medicago truncatula
  Intron number 1 from transcript Medtr8g120560.1 (locus Med tr8g120560) derived from phytozome v7.0 (chr-ID MtChr8; po s 27585648 to 27587051)
atcattacagctaccaactccttgtcattttgcaggtaatacaaaaactttggaatccatttggttttgtgttttcatttttggttattatttcgtctacttttaatacttcaaacctaacaatgttttatgaatttgttcttgcattgatgaatttgattctaacactttccataatgcacattatgaatgttccaggtcatgggggatggtggaaggagaaagaaagggaatacaacataagagggggtttctgaaactcatacaaactttcctcattataatatgttgattcaatttattggtctgcggtatgtggccactagaccactcttctataagaagaaatcatggttttgaagtgaggtgaatcaactcaacttcattcatgaattatatataatagtactatgagatatgcaagtgattcttctctgagaaaatatgtctgttggaaaaagaaaaaaaaaaggattatgtataagagttgttatctgattcttctctcacattggacttttcagatcacaatggactctctctgctatctgcattgtattgaactactgctatttcttgaactcctattcagttagctatgccttttgacatgtggctcaacattgacatctgacaagttcttttttcattacaaaataataatagaaatctaattaaatattgtgttactcacgattaggagtatattttggaaagaatattaattagtatttgatcaatgaaaagatttcagattcttcatatcttataatgtgcattaaaactttttaaattgccattgtaattgtagatttgacagtataatgaattgaataaccaccttgtaaggcaaggttcttcaacctcaacggctctatttcataaaaaggaaaaaaatgaaaagatttcaagaataataaattagttaaatattaaagaccaaaaactactgaagacagaaaaagaaattagagagtgattttgtgttcctggtattggtttttgtgaaaatggtattggttggtttggttggactaagaaaggattcattgcattctgaatcctgcagcatagcattgcacctattctgtgtttttattccttttcatgaatgacacctaatattttttttttccaatttccaataaataaaaccactttgttttgtttgtttcatgacaacattttcaatttacatgacataaaaatatattcccccaatacagaaactgatttaaagcttcttcctttttttttcatttttttcttcttagggagtttttgacaaccaatgctcttgaccttttactctgttatatacctctatgtgttgtgtattcttcttgtgccttccctttgtgattttcagcttttacttggagtagtatactgtttcttgtgctc

SEQ ID NO: 4499 - DNA, 8623 bp, Medicago truncatula
  Intron number 2 from transcript Medtr8g088440.1 (locus Med tr8g088440) derived from phytozome v7.0 (chr-ID MtChr8; po s 18728540 to 18737162 reverse strand)
ttcaaattttggcccctaaatcccattgatttcaggtataaattcttatcaccactaagttcttaacttttttttttttggtacaagaagtaactaatactttattagctttacattttgctgtagggaatatttttatacttgaagtataaactatttacatttaaatgtattttcgatctctgcagagcataaccttgtggtatatagttcaaatctcataggagatgttgtaaaatgattatcactttaattaacaaaaaaattccttccaaactcacttgtattgattgggtgatgttggtttaggtttcttgaagtgtgctcattctcaagtttgattctttctggtattaattttgatggaatagtttagcttattaaaaaataaggtcatgttaaccagcgtctctgaggcattagttaagtagttaaaaatgaaaagaaaaataaagtcagcattaaaagcaacactattttaagtttcaaaaagtaaaaaaatacacaatttccgagaaaacattttcttttataattccttaactagtgtctcctagctccggaagcactgtttaacattttcctaaaaaataatatttttccccttttttttaatgatgtactattttttgtttttagcctcagtaaaaaaaatagtctttataaatatacaactttttttgtaaatcataacaatgacctttttttgttttttgaggggataactatgacacaattatttgctctatcaatatgtaaatgaagaatcgtgttggcggatatgtcaatgcaggaataccatacaacaatataccgaatgtgtctggcagttatatgaagaaattttcagggccatggcgaagttactgaacttggaagaggattgtttcctaaaggaatgtggagagaggggtacaatgtctatgagaaccaattactaccctccatgtcctatggctgatcatgctctggggctgaagccacattctgattcatcatctataacttttttgctgcaagataataaggtagaaggcctccaagttctcaaagacaaccagtggtttaaagttccaataatccatgatgctattgtgattaatgttggtgatctaatggaggtaggtaatgactttcattgttgaaattatgttttgatggagttaagatcctcttcatcatttgccaaatggagaggatcttacttgttttgaagtactattcccttctttaaaataaataaaaataaagtcaaacattatatgtctagttaaacatttgaacatacatcaattttttttgacttttttttcttcttatatttaaaattcaaaccggatacatcaactttgtttgaatgtttatattgcttttgtactaataataaaataattgctcaatataatgtcaaccacgtcgttgatttaaaaattaagagaaagactaattatttgaaactgatagaaattagtaaaattaattacgataagtataagatattgatatgatcagatcgacgtctggtgtagtgagcttgtttttcttgagtgcttgtaactgctggaggtggtgtacttgtagacactgtaacgctcaagtcaatattttgagttggggggattgaaatcaatcgtaccttgaggagactctttaagtctccttgtacagggaggtgcaggttgccaatatttcgacgtgtgttgccattgttcggtgattatggatgacaggctctgtaattgtaaagtgttacagattggcattgatggaggaagttatgaatcattgtgttgaatcgttgccccaaatttctgcgagcaccccctcgtggagagggggtgtgagaatggttatgtgtctaatgcagaattaagcctgtttattggaccttggactgtgagcatatgtttttcaaccatccagaacaatagccccacaagttgtcattcttggattaaatagtgatgacttcgaggcgttggatgttccatgctaaggaaaagatcatgcccgtgggaagctttaagttgtaaccaaatatgaggagtcattagttcacatggaagaaagttatatgcacgtaatgaacttatggtacacaagaaaccttgagcatttaaggatgcgtgagagcgtaatgcttgtatgacgattgtattttgtatgaaaacctgacgttagtgatggataaattgcaatttgcaaggtgctttgaggatatgttgcttagagaggatttgtaattcataaagaacttcgctggtggagggactcttagtctatgaaggacttgttagtttgggagaaactttgctcgcggggagctaatgaaattactttgagaatggtgctcacgaaaatctttcttttttgtttgtcaacttatcatgttcatatgatagaatgagggggcgatatccttgcaagtgacttggtcatcgatcaaactcgacattaaatgcaagtatttcaaagatgagattgagcggacatgacatttggttagtggatgccatgtgtaaatgctagtaatgtacttgagtacatagacacattacccataagtgaatttttagcgttggttttcaagggaatgcctcacatgttggattgatcccaatgtttgggtatctaatggatccctccttgaaccgttagaatggtcaaatgtcatgatcttgattgttgctttgttttgagagtgcaatatctctatgtgaacggttacactgaatgaatgaatttgggtgttcaaacattttagagggaggtataaaaggttttggtagttcttccatctttcaaacttcttatcaacaggttggtactctactgcattgatttgtttctttcttgttcttatgccataagttcgtaactatttaggcataatttagaatcgtcggtagtggttattaaccgcccctttttggttattgtttccaccatgggttgtgtttctgaatgggtaaataaacttagtttttactgtttcttaggtttttttcgcttttgtcgatgttaggcggtggtttgtattttagagttgaaccaggtgccaccgtaagaggtggtcaccatcataaccattcatatttcttggaggtttgtgtttcttaatgggtaaataaacttagtttttactgtttcttaggttttcttcgcttttgtcgatgttaggcggttgtttgtattttagagttgaaccaggtgccaccgtatgaggtggtcaccgtcataaccagttgagtttgattgcaaaaaagtaaaaggtttagatgggcgaatttagcggtggttagcattccttgaattccctctatttccttgttggatttaagacaagtatatatcagttataaaacaagggttctatttaagttatgagtttgtgggattgttacgcccctccaggtgtcaagttgcacctatttatcagagtatggttatacacactataagggtataggattgtcaatcctacaggtccatacactttcataaggttgttatagtgggaacttactctctcagatgtaattgaaacataacagaaatgatatttctaaattttcatataaagctccacctcagtttatgaattttagaagtacaccacataccatctcttaccttaatagttctacatacagacagccccaagtctatcttacaaagggaaaagaataaagcgtataatgcaacgtttggaaaagttaaccaaaaatatattttgtaagccccataaatatctttatatattgttatagatttataatttaaatagtattataaaatgacaaaataataaaataatttaaatgaaggaatgaaatttaatagaaaatatccaacccaaaagagtgtattttttttatgcaaaatgctaacaagtgtctcgaaacattgtttaagtaatcaaaggtgataagttttgcatagaaagatgagtattcgttacttttacatatttttacgtgtgttttcaaagaaatatttctttttataggttgtttatataatgtccttagaacatttgttagtaacatcttttttttatatattttatagatatagaggattgacacaacctgttgaaattgaatgtaatacacagataatgagcaatgggatttttcagagtccaatacacagagcagtggtaaatgaagaaaaggcaaggctctcagtagctatgttatgccgcccagattcggagaaagagattcaaccgattgacaaactagtgaacgagtcaaggccattatcatacagaccagtaaaagattattgtacaaaatatctccagtactaccaacaaggaaaaaggccaattgatgctttcaaactctaatcaaatgcttcttgaaagtttctgagatggaagagaatgaaaacgaaataaaatgtgtgttgtgaatgttctaagctttaatctatgaatttggtgcttgcaagaggaatggtattgtacgtattacgctatctggttaggtaatttttctattcttgatactagacaagtttttgtgataaaccgattagggtttcacttccacgagttttactaaaaatagcatgagtcatattagatggaccctaaaatgtaagtttgtatcaaaacaataaaaacttctttagtctatggagttaatgacacgctaaatctaattaattaggaacgagaagaagaaaaaaaattgaaccatatggtgacatcctatatttagaggtgcaatcaagaagaatatagcatgtcacctgccctacttggcctcccttatcatcctaactcatttgcctaataaaagggttattttggtcgagagagtaactatgtagtttaatctaacttatagagttaaatgagaaaagtgtgtatgaataaaaaaaaaactctttgcttctttcttgtaaatttatgagtaccgttgataagtgtggttggaatattatttaaagaatacattaaatcaaattttatcttaaaaatataagttgttactttgttactgtaataataattacaccactttctttcaaaaaaaaattacaccactttattatttagtactttttgttaaaaaaaagtttttttaattagcatttctctaaatttattacctgaattcatattgctcacgtagatttttgacaacaaatttcaatatatataggtgtgtctataaatatccaaggatattcaacacacttgtaaaattacatttaattttttattcgaggacctaagtcttggcatcaatcaaacactgttttcctttcatgagaaaactatgtatgatgtagtgtaacaacagaaacacttggccaaataacacaacaaactgtaacatcaaaagagctgtcgaccaaaaacagagatagaaataattacaactctcataatggtgaagggaagggagttgctgttggcaccctcttatcttgctaagtaccctcttatcttgtaataaaaactaccattgatatttaaagatcaactaaatcattttgtctaacaaatgtgaaagtgagcttattgtgggataatgtattacaacgttgctcttggggatgcaaaaaaacttctattttttattaaaaaaattattcaatgcgggaacggggatgaggcggggatacccgaacccgtcgggcactaaaagaaatatgacatattgccaggggttttaaaacccctaagaaatttgtcagggcctaagccaaggaaaacccctggtatattgattttgggaattcggggaccactaaccatttgacaggggtgaggccctcacaaatgtacacacgccctggtatggtttgcccgcgaaaatcaaaattcaaaccgcctgccatgtttcagaaattgcagcaaaaagccacgacatatccgacggactgcccctctgacgcgtgattcagcagagaatctctgctattgtcattaggttgtcaagtcaacctgcacaacagctgttgcaggaggcgtgacaggggtaaaacccctcgtttattgcatgaagtcgtggctttttactgacctttttgcacctagccctagctaggatttgacttggtctgcgagcggctacccgtcgatggagccctcgtttttttcctggcctatatatatacaatcaggtccgtttcttcattgcaagtgtctcaaacttagaagaaaaaaaaaattactcctccatttctatacactctactcttcaacatcaacacatttctctaactttggtaattaaaactctcttaacttattaatttttgtgtttatgttttttttttaaattttgctaattttaaaaactgtttctaaaataaaaatacttcataaaaaataaatactaaaaaggtttattgttggaaaacattttatttaaatagtgtattgaaatctgtttttctaaaagtatgttaaaatctgttattatattttatcaaattataaaataaaacaatataatataataatgtatattgtttaaaaatagtatagtacaagaaagttgtttatttaaattaaaactatgttacaattattttagttaaattaaaatctgtttttttataaaataaaaaaaaatcgattttttaattaattaaaataattttataatatttaattaattaaataaatattcggttttataaataaaactttttttaaaaaaaaaataatatacacttggccaggggttaaacccctcactagtccctggttttttgcgaatcaaatttgccattctatcagttagtgcgtcagcgtgttagttagtcattcaatgtgtcagttgcagaaaaaagtgagggattttgccagcggttataacagggaaaaagttaggccatataccaggggttgagcccctcgtttttgtcccaggggtgtaacccctgacaaaatgtttgcgacgagcgcttttgccagtacttccgcccttggcaaattccctcacaaacgtcccttttcccagggattctgtcattttctcaaggattttgcccctagcaaaaggtgatgtttcttgtagtgggggacggggatgggattcaatttctcatccttgttgggtatggatatagggtaaagggtaagtatatgagaatcgggtatgagaacggggaaggtaaaatccgtccccaccccgctccattgccatgcttagccacgccatgccttacttgtcaccaaaaaaaaatgtcagcttagttttttttgtagagttaacggtataatataatttccaagaccaaagtggctaaccaatttttgagtcggaggcttttttgtgtattttcctaagttagggtcttagggacaagtctcatggttaggcgtacatcaagagaccaaatagttgtttgcccaaaaaaaagactttatattaacggaaatgtcatttgtttagattttcaaagatggaattttatattgaaaataacgtatttaacacattaaaactttaaaaagaatttttttataataaagacttatcaattatttttttctcccgagtcatcaataagtgtttcttttaagaaggtaaaataatccaccaaaatcaacacaaaaagaatctaatacgagacttcgagatgagtaaactttaatgtctcaagccaacgtcacaatgaatctcaaatgcttttaagacatattttagcatgattcttatagttatcttacactgtagataagataagtgtaagatatatgtcaaatattcaatggaccacataagatgagcatctgcattcaaacgtgcaacacaccggtttttgtctagtttgattattattgcttcttcttattacttgtttagtaatttcatcataataacaataacaaaaatggaagtgtcggcagaggtagagatagttggtaataaatcagttcaagagttggcattgaattttgaaaatcttccaccaaataattatatatacaatgaaggtggtgttggatttcgtgatgctcttcttccttcagaatcagattttcatgttccaattattgacattgccaacctcacttctccatctacatcacaacatgagcttcataaactccaatctgcacttcattcatgtggcttctttctggtctcattttcattattatttatttatttatttatacatacttttattttagttatgtattcctccgtaagctccaaaattattcgcaactgttttccgctattcaggtgataaaccatgggatgacaagctcgtttcttgacaaagtgagtgaagtttcaaagcaattttttgaacttccaaaggaagaaaagcaaaaatatgaaagggagcaaatcaatattgaaggatatggaaatgatacaatatattcagaaaatcaaatgcttgattggtgtgacagattatttttgaaggtacatcctgaagatcaaaggaatttcaaactttggccccaaaaccccattgatttcaggtataaattcttatcgtcactaagttctcaataacacttaatattattttacatggcatgaagtagcaattatttgctctattaatatgtaaatgaagaatcatgtcggcggatatgtgaatgcaggaatactatacagcaatataccga

SEQ ID NO: 4500 - DNA, 2664 bp, Medicago truncatula
  Intron number 5 from transcript Medtr3g039870.1 (locus Med tr3g039870) derived from phytozome v7.0 (chr-ID MtChr3; po s 10689267 to 10691930 reverse strand)
atcgtctcaaactcaacaaggtacatttctttgtaataaatacctttctttgattgagatttttactttgttaaaaaaaggatttttttgttggcccctacctgtatatgtgtcagtaccctgttggtttgtctgtttgcttcaccatttagctcgtgaaaaaatatctgtctttatttgctctctgtttgtttcccttttgcttcaccatttagctcgtgaaaatatcttttttcactgtctgttgcttcagctcaattgaggcaatgttaaaactccttaaaattcatattgatcccatcaaatttaaatcgaacttataagatttggtgtgaagctatgttaacttaaatcaataaaaaaaatgttgaatgttctacgttaaagaatatgttgttaatattatttcaatagaattgcgaatatgataggaaaacaacaaaaaagaatattcatcttttttgtcaaccccatacatttcgtgaagtttttaagtacatttattttaaggataagtagagaagactttttaattcatacaataaaatataaatactaaactttttggtatgtcgtacatttttttccttacatctttattaaaagccatgacaaaaacttccaggcctatatagaaatattcagaactaaacaatgacaaataacttttaggtgtattttctcatacctcaccaaagggaaaataaagaatatataatgtgaattaaaaagtcagcgttaaaatatatttgaccataccactttcttcaattaaataataggcagacttatttggttaaagggtcaatgtgtaaaatataatttcaagttatgatcagctgccatgtatgtaggataaaatcattcttaaatatttgagttaagaaaacttctacgtgtacaaacaatttaaggatagaagatttgaatgattttttaatttgagcatattctgaatggtttttctcatgacacaattctctgattcttgtttgtttcttctaattctcttcttaggctctcttcttttcttccctaaaagagagcaaaaaaaataattaaatattcggccattaagaagtttttatagggatttaatttgtgttataaataagtaaatacattataaaattttaataaatgacatttcacttgacattgaattaattaattaattatgacttactataaagtcgttattgttgtatacaataaaataatagagactgatctttcaaccccaaatctgcacagcatgcattataaataaataataagaaaaagtttgtccttttttattttatttttgataagaaaaagtctgaccttcttatatttgtacgtgggggtacatatgtacagctgttgttgtatttgcatatatatatatatatatatatatatatatatatatattcacgtttttttgaaaaaagattactctataatatgaatagtgatatatgtacatctaattgaaacaactttgataacaaccttatttttttatttttttgttagtaaaaaattaagaaaagaaaatgaataaggaaaagaatatcatgtaaatattggagaaaagttatccaaaaattgtgtacaaatatcaatttgtttttttaaggagtgtacaaatatcatttcaacttgaatactaagcaggtcgatctcacgatgtgtttgactatctgctgcatacactcaatggttatagtgttacatcaaatgccgaaacattttagaggacctctagtacaggcaaaatttgacccacaattaatatcttctatctcaatccattttaaggccttttactcataaatcagtaggtcccaaagttccaatttcagttaccagtacactatttgaattgacacaattccaatgatctatggtgatatgtcatttcatataaaataacaacagggaagaatggagtcttgtcaattttccctttcatatattgggtcatagtagctcagttgttcgaagattaaaaaccaatgaattattattgaatctacaacacataaattgttccgaatttgaacttgagatataaagagaaataaattcgtaagtttcaagccttaagagcaaagcatagagtttttatatattaaatgtttaattacataattttttttttaattacttcaatataaactgtgatatattttaagtactccctaacacaaaataataataacttaaataataatcgattcatttacctttaatttatttagttaaaataatcacctttttattttcttaaaacaactaaagtttgaaacatccttcaaaaaactaaagtttgaaacaaaaaataaaaaagcttgtccattttcctttactattcaaaaaactccaataaatctgcaacagggtcgtactcggagtccacccaggttcctctgtaatagtaaatctttccttgaattcagtggttgatttcaagggttgacttctcagattctcatgagatattattgtttggactttgttttactcttctccatttgactgcaattgtttttgtcccgtcacgtagttcattttactaggcagtagaaacttcttcatcactggagaattttgagctgaactatgattttttgcatggaattatacaggtcgtcagggaattgcaacattcaagaa

SEQ ID NO: 4501 - DNA, 10667 bp, Medicago truncatula
  Intron number 1 from transcript Medtr2g121530.1 (locus Med tr2g121530) derived from phytozome v7.0 (chr-ID MtChr2; po s 28865961 to 28876627)
tatctctatattttatcttcaagtcctttatatagaggtgtgaaagagacgttgagataatcagcacgtctaaagagtcgtttgaaatcctttgatcatccaccagtaatcctttgcctgatttgggtgtagtcctttgaagaataagcttcaaattcattcccatcttgaacgtacaacttctgcaggcatggctgttgtcttgtcttgtagcgtagacagaaaacagactagtggaggtagtggttgtacacttgtactttgtcaactctattaacgagagataagtgctcagtgctatccaatatatccgttgatacctccctttcaattcttcgttcttcttggataagactgaattgagaatcagctactttgaatcttcagtttgattaaaggatcaagcgtagcttctggtgaagatattgcttccgatgaaaacttttgcttctgacgaccttctgcttctgatgacgtcatcacttcagaagcacttcagcttcaggagcagttttcttcagatgctcagaatttctttttctttccattgttcttccaagacctattgaaataacttgagtagcctttggtcctgtacacttgaacaattattagtaataatcaattgacaatttttaataccttgttatcatcaaaactcaataaggttcattgtgaaacacattttgttccaacaatctccccctttttgatgatgacaaacaatagtatttaaaatgttcaattgttgttgatctaattaataagttgaccactgggatagaggtttgtaagctccccctgagtctaatagatctttaaggtgaggtttgtaagctccccctgagttctattcttattaattaaatttcaataaaatactcataaaaataaataatatcagaagtatttaaaaaagtttagaagtggttatagtggggctcagtgccttaaaatactatacatttactctcccttttgtcatcaacaaaaagaataaaaacaaaagaaagagtatcagagcaataaacatataacccttaaaatacagtatatcaaagcaaacagcattaaaaacagtaaatatcatcagagttaaagcttgtaaaacatattgaaggtgaaaaacacaagatccagaaacaatgataatatatatatatagaaaagttaagatacaaatgcaaggcaactaaagtacttagaacaaagattaaaacaagcaaagaataaatgggtgtgcaactaaggttgggcttgcttgtacatctgttccaaaagatacttaatttgctcatccttcttcttaagtagctcatccttttctctcattcttcttttaaacccaacatgaattcttgcagcccttgtgatgtactcttcttctggatagaaaggagtgatgtccagcagaggcacataattcagctctttcactttagctgcttcatgcatatcatccaacatctttttcagcatggcagagtgagatgagacacacttagtgcttagctgatccagcagctcatcaaaactcttcttcagatccatccactgatcaagatagtgaataggaggtacaggaactgttctgcgaagaatcagtgtctgaatctcatcactaagcctgattagctgttcatctatatactcagattctaggatggtgtctgggataggtgtttgagatgtagaaggtttatttgaggctgtttgttggtcagaagaggttaggtcaattattggtggttctggttgttgttgttgttatgttgtttgatggtcagaagctgtttgttgttggtctgttgtttgatggtcagaagcaacttgttcagaagcagcttgttcaggaacagtttgctcaggaacagtttgcgtttctgtttgttggttttctaaaacagtctttccagggactgtcttagaggcctttgtaggtgtaggttgcatttcaccacctaaatgtttttctagattgtgaagggttgaagattcttgttgttgggggatttctgaagtagttgcttctgaaactacttcagaggctctttgtggagtttggtcattttgtgggtttgtttgattaggttcttggttgggttcagggtgttgtacactaacaggttctggaatttctggataaagtggatgagtagcaggcaaattgaatttcccacagagtttaatcctattcttagaaaattctatttgagtttgctcatagtcaaatgttccaaagtctgttagtttggtaggtttggtttttagaagtttgtctatgtgttggctaaggggttggtcatctgattcagttgatgatgatgagggtgaagagggtagagtaggaatctgagtatagatatcagttttggatgaaatacctgaagattgagcttctggatgaactgcttctggagcttttgaaacaggttctgaagaagtagctcctgaagcttgcttattcttcaaggcttgtgatagcagagttgctccatactgaacagtttcttgctctaactcagatgctaaagcagcaatgtcaggagtaggcacataccctgcagccttgagatgctcatccctttgcttctcatacagttccttcatccgttttctctttgctatcttggatgcagaatactccctagcatattgcttttgttcctcagaagcttcaaaactgggcatgactatagtctcagtttgaatagttctctttgctttcttaggacttgactcttcttcccagttatcttgaagctcttccatcatttcctccctacgtccttcagctgtcttcagatttcttgaagatctcttccttttaatggtttgaagagcagcttctcttttcttcttaggactctgaggttcttcagacgcagcttgttcagaagcaggttgttcagaagcaagctgttctgctgtttcttgagcactccttgttcttttcctgatgattgggacttcatccaagttctccacttcctcttgaatagtggacaatgctgatttttccttcttagctttctgatgcttctgagcacccttctcagtagcatcatcagcgagatactcttccttggtgatctgcttcttctttgactttctgcctttggccacaggcaaatcaccaccatacatctcctcaggaacatctttcaagcttatcttcttcttgtaagttttgtagaagtccaagatgtaagccctttgcacatccaggggatcctttttgcagatagggatgtgatgagtgactagatcagatatggcatcagattcatgcatatcagaatctagtttcttgtaagcatttgttggaatcaatttcatcttcacaagagttgatgcattgattatcttaccagtgactgctcccagcttctggttatcataaatgccaacatccttcaaggcacttagtattcctccttcttgaaagattacagagagcagccttccataaggaacaaacttcctgttctccatctgactcttctttagttccttgatcatgtacttgaacatgtacttaggaacattcatcgtggtctcttgagtgatggtgtgatgcaggaaaaccttgtgtccaagtgaaggttgatcacttcctccacctttgggaaagatgttctcattttggattttcagaagcatcttcttctccatgcttaaggtgctgtatgattgagcaaccttagacccataaatggtttcattaacaatttccttccaggagctggttcttggattaggaatctcttctccaaagtacttgccagaggtatcccttcccatggcttgagcaataatctgctcatttatggttacaggaatacccatgacatttgatcttatctttgtaccagtgaaggagagtagacccatttcttctctggtttttcccttcagagcaggatcaaccagaatcagttgagcttcttcctgtcttgcagcatcaatgtcaaagattgaagcccttacccagaattgtctgaccagaacttcatacgttggaccattgagaagactgaaataactcattaacttttgtttcttgtagaaccttactaggtcgcatccatggtgagttaaggaggcgaaatccactggattttctgcttgaatgattaactctcattcttcaatagacatggttcttccttttatctcataagccgaagtatctatttccatatttgaagatgaaccaccagcagaacttgagctttccattgattcgaaggagttttagggttctaaggtgttttgagagggagagagaatgcgcttacttcgcagagggttgagaagaaaatagaaagtgtttgttgtgaagtgagtagtgtgtgaattgacttagtgtttttagtaaaacgtttgcaattcagaagagacaaacaaacatagcattaatgacaaattgggggcgcgtgttagtatgtttaaaagcaaataaaacatcattgccctttttgttatactccaatacaaatagaccaagtcagagactcttcagaaaactaccttttgggtaatgggacagctgttacaaaaagtaactgccaacgttcccactaaccacgctattcagaagcaaagaataccgcttctgaagttttagtgctgacatcatcttcagaagcacattttcctcagaacctcagttaagagcttctgatggaccagatgcttctgaatagacttcagaaccaaacttcttattcagaggcaagcaatttttcaatcagacacaaaatgcatgttcaaatttttcttaataaaatcaaatctttcaacagataaaggttttgtaaatatatcagcccattgatgttcagtatcaatgaattgtatatctaaaatccctttttgaacatagtctctgataaaatggtgtttgatttcaatatgcttggctcttgaatgtagaattggattctttgacaaacaaatagcagcagtattatcacaaaagatgggaatactgttagcattaatctgatagtcttccaactgatgtttcatccaaagtagttgtgtgcaacaacttgcagctgaaatgtattctgcttctgctgtagacatagcaatagttgcttgtcttttgcttgcccaggatatcagattctctcccaggaattgacaatttccactggttgattttctttcaatcctgtcaccagcataatcagcatcacagaatccaatcaacttataatctagggatttcctatacaggagtccaagattagttgttcctttcagatacctgaagattctcttaactgcagttaaatgagattctctaggatctgattgaaatcttgcacacaagcatacactgaataaaatatcaggtctagatgcagtgaggtataacagagaaccaatcatacctctgtatagcttctggtctactacagttccagtatcttctttgcttaaggtgcaggttggatgcattggagtgttcatcactttacaatcttctagcttaaacttcttcagaagctcctttgtatactttgtttgatgaacatatactccttctttactctggttgatttgaattccaagaaagaatttcaattctcccatcatgctcatttcaaattcatcctgcattaacttagaaaattctttgcaaagagatgcattagtataaccaaatattatatcatcaacatatatttgcacaatcaaaatgtctttcttaagagtccttctgaagagtgttgtgtcaacttgtcctctttcaaaatcatttttaattaagaaattacttagtctatcataccaagctctgggagcttgtttcaagccatatagtgatttcttaagtttatagacatggtcaggatgcttaagatcctcaaacctaggaggttgtttaacatacacttcttcttcaatgacaccattaagaaaggcacttttgacatccatttgatataatattatgccatgattaattgcgtaggatagaagtaacctgattgcttccaatcttgcaactggagcaaatgtttcagtgtaatcaatgccttcttgttgactgtagccttgagcaacaagtctggctttgtttctggttacttctccttgttcattcagcttgtttctgaatacccattttgttccaataatgttcttctgaaaaggtttgggtaccagatcccacacatcattcctttgaaactgatttagctattcttgcatagctaatatccatccatcatctgagagagctttttcaacagttttaggctcaattattgaaagcaatcctattaatgactcttcttgtctgaaatgtgatcttgttcttctaggactatctttgcttccaatgattagctcctcaggatgtgaagatttgtgcttgaatttaggttgaataacctgctgagtgttatcttgaatatcctcagaagcattttcattctgtgctattggactaggttctgcttctgaattagactcagcttctggactagattcaacttctgaatacttttcagaatcagaaggttgatcagattctgatgcatcttcagaatcagttgtacctgcattactttcactttgctctggagttttacttccaggctctctatcatcaaattttacgtgcatagattcttcaacacaatgtgtttctgaattatacactctgtacgcctttgacctttcagagtaacctaaaaagattcctctttgagccttggcatcaaatttcttcagatagtctttagtgtttaagatgtaacaagtacatccaaactgatgaaagtaagagatattgggtcttcttcctttaaagagttcatatgctgttttctccaacataggtctgatatagatcctattttgaatataacatgaagtattaactgcttctgcccagaaatgtttagctaagttgttttcatggatcatggttctggccatttcttgtaaggttcagttctttctctctacaaccccattttgttgtggagttctaggagaagaaaattcatggagaatcccatgtttttcacaaaaaagttcaaatggctcattttcaaattctccaccatgatcacttctgactttcaaaattttcaattctttttcagattgtatttgagtgcagaaactgctaaacacttatatgcatagtctttacttttaatgaattttacccaagtccatctgctgtaatcatcaacaatgactaatccatatttacttccatataaagatgcagtattaactggaccaaaaagatcaatatggagtaattctaagggtctggaggttgatacaatgtctttagatttgaaagtacttttcacaattttccctttctgacatgcaccacaaagtgcatctgaatgataatcaatgttaggcaatcctttgaccagttgtaacttgctaattttagaaattaatctccaattagcatgtcccaaccttttatgccaaacccattttttatcattcattgacagaaggcaaactaccttctgatcagccagatcagagaaatttattttatagacattctcaactctctttcccttgaatgtaatggatttgtcatccttgttgactagtgtgcagttggtcttactgaacattacatcatactcattgtcacaaaattgactaatgctcaataggttatgcttcagaccatctactagccacacattattaattgagatggaggaattaccaatagtacctgtaccaatgatttttccagtttggttgccaccaaacttcacttctcctccatctttcattgtaagggtaaggaacaaagctttctctccaatcatgtgccttgaacatccgctgtctaggtaccatgacctttgtttctctcttgcccttaggcacacctgcagttttagccaattcagatttaggtacccatatcttcatgggtccttttgggttagttctggaggctttacttttcctcccttgtaccttagggtgaatgccgagagacttctgatcattcagtactttaggtttgacaccttttggtattgttttcttagaagcagtaactgctttattcttctgatccttttgttttgagattttagattctggtttaatcagattctgatgaacaggttctgatcttttcagaattttaatcttttgactcttaggatcagattttgtcataaccttggtcttgaggttttctggctttgatgtgatcttagcctgtgaaccagaagcttcaggttctgactgaacagcagttacagcatttgtaccttcaggcacaaaggtggatttcaatccatccttgatacaatcacagtagctcttaagactgtattgtttggatttctccccagaatatccaatccctttgccattgttcttgtatgtgctgtagatcatagaagcaactttgcttctgtctattccagccataataaaatcatccaaggcaatctcatgtttattacctgaacctttatcacatttttcttgtagcttctgacaaagaatcttgagtctatcttcatatgttgttgatatgaggttaaaccctttgagttcttcttcagaagctttcagttccaatagagttgtcttttgttgtttcatcaaatcaacatatttttcttttaaatctgtcaactcattggttctgtgttcaaacagtgataaaagttcttttagagaatcaacaagttcttgtctaggaattttggaatatacctcattttcatcttctgaatctgattcagcttctgatactgcttctgatgatactgttgccactaaccccatggctgccttagcatcatcatcagcttcttctttatcagaaccagattcactatccaaatcttcccaggtcgccatcaagctctttttgatttgctttctgaatttactggagctgaagcttgatttcttggatttacctttaaacttctccttctgaagatcagggcaatcaacaatgaaatgaccaggcttcttacaattgaagcatcccttctgatcttctttcttggagttcttgtagctacctctcttgctcaaaaatttcttctgtttccttgccagatactcaagcttgttggacagcatggccatctttacagattgatcctcatcagaatctccatcaggtgattcttcttcagattcactggctttgtaggctttggaagattttgaagtctttcctttagatggtaaagcaatggatttactcttcttagaggtttcatgctcatttaaactcatttcatgcactttgagtgtgctaacaagatcttcaacacttaaagtatttagatccttagcttcctcaatagcagttactttgggtctccatcttgaaggcaagcttctcaaaatcttactaacatgatcagaagcaacatagcttttcttcagtatttgcaatccagaaactaaagtttgaaatcttgagtacatttcttctatactctcatcatccttcattctgaaaagttcatactgatgaactagcatcaaagctttagcctctttcaccttcttgctgccttcaaagtttgcacatagtgaagcaaacatagccttagcagtagatttgtcactcattttcatgtattcggtgcgaggtatagaagccacaatgattcctcttatcttgtggtgtttcttataaagcttcttctgagcaggagtatgtattcttctgtctatagcagctccttcttcatctaaatccagatcatcaactccatcttccagtatgtcccatagctcttcatccaatcccatgataaagctgtacatatttgttttccaccatgaaaactcttctggatctccattaaactttggagcttttccagagtctgttttcttgtcagcagtatcatagtcatgcttgacacttgtgtattttgtagtaactgattcctcatctccagacatgtttttctaatagatcttgaactgtaacacggttaagtgctgtgataacagagcaagctctgataccaattgaaggtgaaaaacacaagaagggggggggggttgaattgtgttttctttttctctcaaaaaatacttcttctgataaaacttcagaagcagtttgagtgcttctgatgaaatgatcagaatcagattgcagcggaaaagaacagagcagagaaaagaaagacaaagacacaagcagttatcctggttccttccacaacacggaagtagtccagtcccccttgcacttccaaggagatttcactataatcacaaagattacaaatgctcaatactttctaagtatgagacttcacaaaaatgctcaagcacacacgcaagagtcttccaatgctcaagcactaagtaagagacttctaatgctcaagcacgcaggcaagagacttctgatcaaacaaaaatacagagaattgagtttgacttgaacacttgatatacaatcagtggtgttcacaatacaatacaataaagactctagactttgaatttctaagatgtatcaaatcagtgcagaaattcagtgtgctttgtagaatcaaattgacagagttttggcgctttttaacttatgtatctctatattttatcttcaagtcctttatatagaggtgtgaaagagacgttgagat

SEQ ID NO: 4502 - DNA, 1634 bp, Medicago truncatula
  Intron number 2 from transcript Medtr3g006210.1 (locus Med tr3g006210) derived from phytozome v7.0 (chr-ID MtChr3; po s 686444 to 688077 reverse strand)
ttcacaaggtatgtaatttgatttcatattcctagctgcatgcttgtttcattttgtttatagtctaatattgcataagatatgccctgaaaatgagtttacaaatgggaaacatctttcaccttacaagtcaattttgtatgattgagattgacccaacctaaatttaagatgatatcagaacctatccaagatatataaaattgttcgaagaaaatgtaattgtgttctgttgacttttttataaattctctttacttattgacatgtaatcaagagatactgataataattaaaatgtgattgaatagaactacatgtgtcactgtccgacgttgatgtgtgtcagaccccagacacaccttcaatcagaagtttctgtgctacatagttcctcggcaatgtttgcaccatcctagtctccttatattgtgatcttcaatgccaagttgataagattataggtagatattttggagactagttacttcacttacgagcagacctctatttacaaaactctcataatgccaaaaagggaaaagtaaaatgaaggatagcaatagtgtctttaaatagagacagagaatccccacctggtctcatacctcttcaaatcatatcaattctactatcctatttttcactcacttgtttcttcctcctaacataaactttggcaaacagcctttcaataatcttctgagaactacaatagatttcatattttacaagtattttcacagcattcgctataataccattcttatcacttcaggagcaaggtataagattcttatgaaatcaatctttaaagtaataatttaaatgtgttgtgctactattgaccttgttaaaataataggggttttagaagaggagggaacagaaaaaatagatcgagttgtggagtagatttcccagactttcaaccttgaggaaaaggttcttttggaagatggcagtactattagctcccacctcaatattgttaaacctcatagtctatacctaatgttcttaatgtcaagttaggagttgatatatatcatataaatgcttaatggatgttgcatgttctgggatgtgtgcctatcacacacaaaactatactaatagaactctccacttcttttgagaaatggaaataatccctactcagttagaagtagttcataacggcagccaactagggttggcctaaaactttattttggtctgtagttaattaggaaacttactattaaaagcactgcagagcagattttggatgtttttgagattcagaaacctagagcattgattatgctttgagtttctattcttttcttctaattaataaagtcttggtgacgtggtgagatcaagtaaacgtgtgttgagtgtgaagatacgagtagtagcttttggatggatgtgagttgtcaccgtggcaactggtgtttttacaaacgcatatgtaatatgccacctggctgcagaaactagataaacaaaatatgtaattatagaatgtatattctagaatagattttcatcaattttcaccacatgtaatttgtaaatagattaactatttcaaacctctggccgcaacagggtttcagaagaaccagtgcaaatctattggagcc

SEQ ID NO: 4503 - DNA, 708 bp, Medicago truncatula
  Intron number 1 from transcript Medtr4g134210.1 (locus Med tr4g134210) derived from phytozome v7.0 (chr-ID MtChr4; po s 32321835 to 32322542 reverse strand)
agttcattcctcaggcacctcctgaaggacctccggtaactactcccttcgatacatttttaaccgtcgcttttgaagaaaaattaactcttattccatttgtagttttcaagttcaatgcaacattaactattgttttgtcagttaccaacttaacaattgactgcaggaatagaattagatggaatgagataacaaataactcatggtattgtaggaaaaacaaacaattctatcaaaagtaacaaaatttattagatttcttgatacgagtaaataagcgtaaaacaacaaataaaaagaaacagaataatagatgttttattgctgttatgtggcttagaaattgagtactttttgtgcttctttccttgtgtagcaaatggccagaacctatgaatcaccgacacaaacatcaaactcaatactgacatttacatgttgatactgataataattgaatatatggaatgactgaatgtaactacatgtgtcggagtcgtgtcagacactgaatacgtcttccatatttgaagtgtcagtgcaacatatcggagaacacatttagatgtgtaactactaaggactgccaactaaatttcttctagttgaagtaaattgattcttcacattgtttgttttgttatcttgtaatatgcatttacttttgcataaaaataatgtgcagattcatacgtccaaaaaagc

SEQ ID NO: 4504 - DNA, 1920 bp, Medicago truncatula
  Intron number 1 from transcript Medtr7g005870.1 (locus Med tr7g005870) derived from phytozome v7.0 (chr-ID MtChr7; po s 653243 to 655162 reverse strand)
gaagtgttttcccagattattaaatctctcaacaattatcaggtttaatctttcttttgtatatgactagtgtctgtgcatactagcgattgtttgattttgtaaaccaatttcttgttttatggccttgttgtatcgttattctaaaatataaaaataaaataagaaattatgaattcttatcattcttcaaaacgtaatggtcaatttaagcgagatgatataattataattcaactcaagttttcttagagagagccgttgtatttagtattgaatattaattatggattttcttgagtattgagtgtattttttataccatatatgtcgtcttcaattaaattatcatgttagattcatatgcacttctctattattcaattgataggcgacatgaatatgtttgtttaaaaaaaaaaaaagcacatgtcaggtttcaaagttatggttatcttgttttttatacttctgttttttaataataaaaggattcagagtatggttagtaaaagcatggttcaattatcatatgcctagaagtgtttcttatttattttactagttctttaagtggctcagtatgagaaaaattagaagttatctaaatttactagttatttaataaagaatgtttgatattaattagtccacaatgaatatattaaagactgtcacacaaatttgtgatgtaaacttaagaaaacatcacgtaattaacagtggagctgctcaactttctttatttgtttacactttattcttaactgtgtagaaaattcagagatggaaaagaataagttgtattatgatatcaacataaagctcttaaacaaacaagtaagtgaaagacaatatatgtgctgcaatgcctatgtgtttgttcttctagagtgcacaatcctctatatttgttagttatgcctatttgtttactatgacttttcgtctcctgttggatagtctgtagacctcttatggctataccttttttggctaattgaactactagtaacttctatatgtttgtacattcagtggtcacttaacattctgttattatatatatccacgaaacatctgagatgatattcggtgaccatattaaatattatcgattcggttacatgtaattagatttaaattcatggcatcttgcatatatacaatgatgttataactaaagagagtaccaagttgagcatagggcatgaactacaaaggaacatgacaaatttgtatgatcaacgataaagcaagtagagaggagttcgttgttgtttccctcagggccaacaacccaagacgaggatcagcacatgaaaagaaaatggaacgtggcatacatcttcagttttcgtgattaatattctcagaatccaggtgatattgttacagttcgatatattggaatgctatatacataatttggtagaaaaatttgttggcaaaacaatgacaaagttaggacgacaacaacaaacaatggggaatgggcggttagttccaatataatagaaagtaggcgagctactcctaacaagtagacgacctaatctaatttaataggtgaagaaaaagaataatacaactgtgattatactctattagatttgaatttccatcattaggaaaattattcaaactactatagttactcatcaatgacacaagtgaagtggagtattgttaataggtcacagagagaattctatcaaggaaagccttggtatttaagtggtccaacttacatctgtgcccatttagagtgtggagtcatgtgatatttattttcacacacacacacactcactctctctctctctcacacacacacacacacactcacacacacacacgcgcgcgcatgtatacaaacaagcagacttcagcggaaactttctgagcaaaattcgggtg

SEQ ID NO: 4505 - DNA, 1874 bp, Medicago truncatula
  Intron number 1 from transcript Medtr3g123350.1 (locus Med tr3g123350) derived from phytozome v7.0 (chr-ID MtChr3; po s 30927936 to 30929809)
ccactaagctcggtaagtctgctctatttctgttaatacttagggcgataggaatacctatatcatacatgtaagactgttcttgttgtggatatgttaatatgtagtccattagggaaattagcctctaaatggtgcatttgatcggctgaaacaaaaaacaaaaacaacacagaataaggtagaacaacacttgacaaacttttatggtattgaacaattttttctcttatactatgttttgtggacaaaatgctgttttgctattttacacaacttgtacttgggttgccaagttgcattgtggtttagtgaaagacaagaatttcagtttttgttgtgtcccttgcccccaaatttgtcgaaaaccttggaacagagtacaaacaactgaagttgttctgtcatgtccctgattttgattttttaacagatcaaacgaaatgagagaactttgaagaagtaatagtagtttaaaacctttatagtagtatccaataatttgaagatacgatcttgtagtgaaaggaggtgtatcatctttcataaagaattaaactttgacattaagttgaatagaacagaagtcgccttatgctgtcccagtaccttatttttttagaaaaaccaatctttctctgatatggttgttgaaaataacctttttgtcagtgtgtactgattctttcgtttcaatgtagaagtatcaaagctactttttatcagttagcaaatcctataatagatagtgtttatttgacagatattctctgatgatgaatcttattgatttcttgtttttatgaatgtggtttatcaatgatgattcttatgtgtaatcttttgagtgttctaattccagtgaatgtgcatcattaatatttgtagattgtacccacaattttgtaaatggataaaaggattcacaatggttttgatttttaatgtcttatttcaaatctagatatttcagcatgtacttgttttgattctttgactaatattgctggtatattctctatttatcagaatctgttgtatttttgctttgctgtatctatggcccagaccaatattaaccttttctgctataaaactggctactttttttaacaataagacaaactgctgttgatgaatgttttctagacaatcctaatttttttaaattcaatatcttgtgagagaatatgtagccaatatgttgctgtgtgtctaatggtcacggcctcacaggtgcacgtcgtggaatcagcctcttgtaatgtaatataacttatataagtctgcttacaatagacccgtaatggttccagaccctttactagatcctaccactgtgggaatttcgtaggttgccttttttatcatcgaggttgctgttttttgctttcaatttccgactgaactgcctgcaggtttgtttgacacgcatgcaatttatactgcttacaatagattcattctgtttgatggataaggccatctgttcatctaatggcaatgtgttgttctgataatgatagtaacctttatattgggaaaacaagtttataacatatgaatatccctccctcgatcgatttatgggcatttgaaaaactttctagctgctaagactaatattgaactggtttccaagatgaggccaaaatattacaaataactctagttttggaatgagtaaaagggtttctgtttatgtttatgctgtttgagttttttgtccctgtatgttcctcgttcaggagtgtatctgtatagcgatggctacccttgttggttctctaattattgttgattagcaaaatgtgtggttatttggttgaaggcttgcagctgttcgtgcgcacataggtcaaattcttcattag

SEQ ID NO: 4506 - DNA, 5536 bp, Medicago truncatula
  Intron number 1 from transcript Medtr5g066780.1 (locus Med tr5g066780) derived from phytozome v7.0 (chr-ID MtChr5; po s 23579229 to 23584764)
cttgccagaaatttaaacagcaaaagatcaacaaggtactctctatattccttttgcatattccttttataactaaatatgtttttattgtttttttagttcatacaagttttacagcacgcaattttggtttcagttaaatcagttttgatcttgagtatatcgtaagaaatgtaggcaatattcttagatttccaatgcattaaaaaacacctcaatcggacatccataactctagatatgacaaaaacaagacagtcatataatcacctacgaaaataatacttgaaaccaaaattaatttggttcattttattccattattaaattagctcttgtataagatgataatagtaggttctcatcaccttgtcacgtaattgtgggaacttctagtatttatgcctagactagacaaaggctatacttttgacttttcctaaagatgaatcataagtatcttaacaatcatactcacattcaaggaggagtgaacccagacttgaagctccggatatttgatccttgtcttgtatcgtcaactttatgataaacataagtgcgttcaagggtcactatttataggcataattactagggggttaagagatgacaacttggttttttcttgcaatctagtttggaaaaaaagcttgaaagtgcatttttactccatggaagcgcataacgcttggcatggggtgcatgagacagcccgcagggatgtccaaagtgcactggcacatggctccatgcgcatgacgcatgagacaggagccaggatacgaattttccatgttgtgatatttgcaactttagccacaacgtaactttgttctgattcactattttctagcacatcattttccttctagagagagtctttgatgcattgttgaaggaacagctccaaccccatgttatccattctctgccaattagtagattgtagttagcctttgactcaactaccaagaaccaagttgcccttttcacggttcctaccaccaggtcaacttcaatagcaccaaaggaacttccagatttccttcatagttacaaagaacaacattatgtggcttaaaatcagtttctggtaagccaatctttttcaagagaaagtgtggcaataggtttactgttgcaacatctccaattgtttattccaacatcatcaattttagcttggatgaacaaaggcttgaggtgatgttgcatgtgataatcaggtctttcgaacatagcctgctggccttcaacacaaccattatccatcacataataacactttggctgctgagcagtcattttctcagtgaagtcttcctcatcttttgtaatctctgatataacatcatattcaatcggaatcattgatacgacaagaattatattaaggctagcttcagaattagtgaagttagaagttaatttttcatcttcgacagaaaagacctttcttcacaaccgaaaggggaggaaagatcctcttagtggaaggctttctaaacatatcgaagatagttggttcttggttatttcctttatcggcattcttgttaacattggtaacatcttttaaagtatcaacctttttttgacgttggaatctacaccattgagttttcgtcatgggatttttccctttgtagttaacgttatggacgaacctcttcgaaccatatcttctcttttctgatcaaacatctcatttcgattgtcatttccagtagttctctttccaccagaaagtacccactgctcaattggagattttctagtgcctttattaacccactttgcaggcggagacttgtccttaggctttttaccactagaaaatacccattggttatttggggatttggaaggaggagagaaggttttcattggtcccttcttctgatttgtagttggggatgtgtccttgagaggaatgtttgctttttcgaaactaaatttaggccttttgtcagcccatttcctttccgcttcgattttggtcgaaaccctttaacattctttgcagctttctgctcgaaatcagcactacacctaggacacaacagaactggggaaccatcaatcttacatcaattaagaaaatccatcagatcttcttcagcttttggaaataccacctgtattttttcttcgtactgatcttcagtaatcactgaatcagcacatttatggctttcagtggccatttcgacatcaacctttgggtcatcagtagccactataggatcaatcacagatatttccaccatgttcaaacctgttatttccaggtacatggaatctacttccttcataggattagcatcaccttgcattggctgctttggtttgtctccaaactccagtttgccttcatctagtccatttctacactgaatccctgaaaaccacgcaacgagatgtgttgtggccaaaattaccatgaaatttacaatatcctcttttctacctttgttgaagaggaggtaatttcaaaccattatgcactatcattttgccttcattgaccaaaagatcaaaaatcttgtcacatttggtaacatcaaatgtgtaagttttgggcacaaatcgatcatttttaggttcttcatgattctttccatttgaaggtttcaacaatttacataagaataggggtcctggttgcagttcagcgatattaacttcgctttcttcgactggaccccaatcaatgtcgaagtcttgattgctatcattagtatcgacataagaaaccttctctttttaccaccatacttgctagcccttgctttttcagctttaagtctttcggcttgtcggactctatctgctaactgtgccatatctcttagatactgcgtatctaatttatttcgaatagaatagtttaaaccgccagcaggcatttcgactaattcatgttcgggcacttgggtaaaacatctagctttgagaagtctgaacctattcagataatcatcaatagattttgttgttttacgtcgaacacttaccaattctttaagactaatcttagattatcccatgtagaattattcatggaaagccttttctaattgactccaagtaaaaatagatctttgaggcaaagttgtataccagataaaggcattctttgtcaacgaacttggaaaatacttcattctcaagttctcatttatcgctatgtcacctgcttctgtcaattaacgagcaatatgttcgatagtggattcattattttctccaccaaatttggtgaatttaggaattttccatcccttgggtaattcctccattgccatatactctgataaaggtgacacaaaattaggtctatgtaggctcaaattgaaaccattttgagtcaattttcgagcctccaaattaacttgttgggcttgcctaactattttatcaggatctaggttcctttgaaccaagattggaactctttccaacacccttcgtacttgttgttcgaccacaggttgaggcactggattggcatgatttccatcgttaggcctatttataggtacttcaataggcctaggattttgaacttgaggtatttgcacatttcgcataggaggagcgccaatgaaatcaacaatttgccccatttgatctgatagtgctaaataactattgtgggtatccataattaaagggttaaaaattgttccaatttgttgagtcaacatattgaccgtttcatggctacaatcctccatttgctgtctcaacacagccaaggaagcattggtcagtgactgttgatgatttaaactaggaacacttggcccaggataataatattgagggtgaaccgtattcgaattctctgaaacattagatggattattatggaggcccatcacaaaggatgaaggcatttcatatggttggttcctaagatttactggatcaaaggaccatggacttaaaactaacggattaccaaaatttgtgttagattgtgtaaccgctgcaaccgtcgaagttgtaatgggaacggttgatgatatatgagcaggaattgttgcccccaccgtttcatcaaagtttgcgccatgagatggcgtcatttgtggacttcgttgtggaattacatttaatgatgtattctccatagatgcccttgctgggcttcatggtggatcattagtgcgagtagaacgtaccatttctggaagtttctttctgctcctcaagaacatgcacaacaaaaatcaccaatttggaaaaaaatggaacgaattttcaagaaaatttaaacaaaagcacaaactgtcccactgggcgtgccaatttgtttactctggattttggtaaactactgaaccgatttaaaacaagggcgagcgagatcaaccaacaagtctcaagaccttttacgcttgattgtttttcagaaaattgtgactgttttagcgaactatgaatataaccgtcgaaatccagacacagggtaagaactgtcgagattatcttcaagggaacaatgcgaaagcttaaaagtaaagatttaaaaggaaaacgagtctaaaaagagacctagaaacaaacttgaattgcattaaaatgaatataaagtggtgtacagattcatacattaggacttgttgctcgtttctccttgtgtgggcggattgtttgagcgtaagttttcactatggttgaattgtgacccattttccacagaggaaaatgctacttatattaagtaacttcctacagacacgttcgagacgtaactgttaaaaaccactacagacctatttgaatttcaaataatgtctcttcgacgagaaaccacttttcaggtcctcctttcgatgccaatcttcctttgacatcttctgcactctatcgaaccatcctctgcgatcaacatatcttctggacttcacttcgacagtcgaacttgagaatcgaacctatttcattctctttgaatcttaggtcaaacttcattgaccacatttattatagcctgtcgaaaatacaggctaacatcagcgtgagtttagtcatgcagcgtttaacacctgtgtgacttaagtcacgcgggggcattttcgaaagttcagttgagagcgagcaaaacgtgatggaagaagagcaattttcatgtaatggcttcggcttcggttcgctccaagggcacttataacatattgggctttggcccagtccagatacattgattgtctttgttagtccaactcttgagttccttttgttgagaaccggttgttatttcaatttcaaatctcaaagtttcttttgtttggaaaaaagagtgaaaagcaccactacttatactataatatatcatgtagatgcttgtttctattcctcacaaggaaagataccaaacactaattttgaaattgtagctataggatttcgttgaaaagtttctgaaataattgaaaggtttctctattgtttttaataatttatctatcggggatctccatccacagaaactaaagaaagttagacaaaaagacagagtgtt

SEQ ID NO: 4507 - DNA, 277 bp, Medicago truncatula
  Intron number 2 from transcript Medtr1g008810.1 (locus Med tr1g008810) derived from phytozome v7.0 (chr-ID MtChr1; po s 911345 to 911621)
ttgcccctcttgctcccacaacaccaacactaaatgtacgcattcattctttcatttcatttacgtcaatgtttggtatcactatatatggtgactcaccgtgattctgaaaaattcactgtcataccaaacattcacgacacctaagctgaatcttatcaaattcataattaattgtgatattaatgtttagagaatcggattgaatgaattgatttggtttttaatgattgaagtttgagatttgtagttataattttttttttttggattttag

SEQ ID NO: 4508 - DNA, 1252 bp, Medicago truncatula
  Intron number 4 from transcript Medtr3g043350.1 (locus Med tr3g043350) derived from phytozome v7.0 (chr-ID MtChr3; po s 11738772 to 11740023)
gaaggatgttgtttgctattctccagtgctactgatagtatatgtagcttggtgtttatgtgattttggtttaaattaggtggcttcagagctttgtaatactagataagtatgtagagtttgatgtacattttatccacaagatattcatagaaaatgttgtgttataatgattatgtaaacgtaatcaagtttagggatctttgattgacatgttactcttagagacaacaagatgctcatagattgtaattactcttggaggtgtcatttgatatgctattgctagttagttcatgttatagcatttggaattttgtcttgtaacatatattggaagaaatctatgctgttcatggttaggaaacttttttactccccgtgtgttaaattctttttgataaatcatcgttctcaatttgtgttcgggataaagtgagtatctctttgtccccgtgagcttagttcagttgatagggacattgcataatttatgtagaggccgaggttcaaactccggacacctcatttctccacatttaattgtgtgagtttcagtcattaatctaccagaccaaaaaaaaaaaaaaagagtgagtacctcttttgctcttacagtccattcttttaaaatatatctctatattatcttaagaaaatgtattggaaaaaatcttgctatgtgatacattgtcctattttagacttatgtacaagttgtgtcactgtcatggcctagcctctatacatttgagatcccacgttgtcttacaaaattcaaccagtgtcataattgaagatagtgataacatatggtttcattctgattcttcatacttgtatatgttaataatgatggatggcatatgtggcattctgacataaaagttctttgatactttttattgctgtaactcttcatatttgaatttgaacgcaatttgaggtttgttacaacataagagattgtagttgaaagggtttttgtaacagagaaataaaaatgatttttgttttcaacttttttcccttttatacacactaacaattcaaccagagttgtaaataagatcctcacaaagcaacatcttaccaaggttgcaacagtgcctgaattattttacgttgttgcaataaaaaaaaaaaatcatgcattcgtttttttacatctctcttttactaaaaaattgatcatattacttttttttttttttttttgtcaataatacttctaagtatttattgtagatag

SEQ ID NO: 4509 - DNA, 980 bp, Medicago truncatula
  Intron number 5 from transcript Medtr7g104030.1 (locus Med tr7g104030) derived from phytozome v7.0 (chr-ID MtChr7; po s 23487331 to 23488310 reverse strand)
cacagctctcaaggtcatcacttcttgctgaactggtaagatattctcattatttgaagcacaaagcactatataaatcccttttatactgtcattgtaatttttattattatgaagtgtattgttatggattgggttttcaagtaaagaagttgaaccatgtttacaacttccagtctttcttaattgtggactgtctttgagtagatgtacaagattttttttttcttttaatatttagtgtggttggtcatattgatttgaatttctttcctcatcaacttattgccaacttacaaacttataacagcttttgatcttgcattttgcattctggttgtgaatatttgttgtgcggtaattatattaaccactatttacctttagtatgattgtcgatatttcatgttctcagatggaaaaggattataatgagatagtatatatttgccgtggcaaacactaatctaatactcctatatatgttgattttctcggtcaccgactagagtagtacaattattttaagtacaagtacatccaagtacaaattacaaacattgttagactctttaaacaatgagaatcttactattcaaataatttccaaatcctgaaaatagttttttttttaatctcagtatattatggatgtatggtttatattgatgttctaataagagtcacattttatatagtagactgatgctgatgtttatatctgtaattgcttcagttatcatgttttattattctaaaaaaattctgtaactgatatagttatcacattttttagtaacccgttttaattattttgatgtcaatgctttccgttttgccattaattgtaagccatctgtatagtgtagaacccattatctataaggttcagggggttgggtattactgcgatcgacaattgctttcgactcggtctgaagattttatgtttggattaattgcaggcatcaaagggtgta

SEQ ID NO: 4510 - DNA, 2416 bp, Medicago truncatula
  Intron number 2 from transcript Medtr3g080280.1 (locus Med tr3g080280) derived from phytozome v7.0 (chr-ID MtChr3; po s 18835403 to 18837818 reverse strand)
catctataggtatatatttgtttatgttgttgtggatttattcgtcagtacagtagtaactatagaaggatttattcgtcactaatttagattgagtgagccactgttagtgcagggcacctactaatcctctgtgtaccccgatctatagtgtgtgctttgagcttcggtgagtgtgtactgcatatttggatgtttattggtaattacgtttattctatgattgggtttgtgattacgtttattctattattgattttgtgattatcaatattgagttatgatttcaatttatcattattatttagtgagttggttgattttgaatttgaatatcaacgattgaggagtgatgcatttgatattactcttttatctctttttctctgtttgctgtaatgcttaagttttagccaagttttaggtttcaagactttatatttacatgattccacttataagccaatgtagtttagttggactcaattagattgaaacattttctatttcataggctgatgtagtccacttatttctgttgatattattattgagtttatagaactaaaagtttcaaaagcctttacaatgagataagagtatggacacgctttaaaattttgtttattttgtcattagccaattttttatcatgaaaaaacttataaattggacatttttcttatgaattgattttaatgattaagattgtggtaggaatgtggtttagtttgaagtttattgcagcagttctctactcaaaatcttagatcatggagggtctaaatcattgagcaaatgtagtaagttgtgtggagatagtcccacaagcaaccaataaaaaaagaaaataatcttccatgcatattggtggcagcagtggcaaacatgttagcaggatttatattttgttggtattaaagtgccttcaagttcattcaagttagtcaatgcattctataatttgttattatggataaatatatatctaccaatgatacgaagtaagaagttgaatttgttttttggtgtatattacatatggaaaatacctttctttttacagaactgatggttatttacacatatagtattgttcttattatttttatgttgaagcttaagataatgggttgttggtgtctgctgttactttgcttttgtaacccacaatgagatgaaaattctttttgtaatatttattttaagcattgtttagaacttctattcccaaaaagaaacgataaagagtgccctttgagtatggttcggtatactagaacgtggaatgtagagtaattttgttaaaagaggtctgagaaagtttattattgcttatgtaattaagattttatttttttatgacagagagcttaggaagatgtggaaactgtgattaaattttctctgtctaattttcttttgtttcctttactgcatttgcaaaacaagaactattgtaatttcctcataaatttatgatttaaggttacattctttacatgccttaccttcttaagaggtatattgtatattcatacattgaccacacctgtgttctaacagtgctattgttgcaatattgcatatatccaatcttgcttaaagtgtcttctatattgttgagttgacgagttttcactcctaaattttgttcagctaatagtttattttaaagttttagtgtttctaacttctctaaatatatgataggtaatcaagcttaacttaattttttatgtttatttgctttcttttttcagacaaggtatgattctgtatattagaatgtggaatgtggagtaattttgttgaaagagtctgagaaagtttattattgcttatgtaattaagattttttatttttttttatgacagagagcttgagaaagatgttgaaactgtgattaataatattttaaaaactgagatacgctatgggtctgagaaagtttcttattgcttactgttttctcaatattaacttgaaagatgttgagaaagatattaacttgatatacgtactgttttgtgttttcttctatggaaatagtgtgtgaaaggacttctgttattgttgcaatacgtttgcataaatatatagaagctgaattgcagggacattacaggttttgtgtttgagtatctgggcatatatacgtaaaatacaggtttgtgtctgatccactattttcaatctattttcaagtgatattgtgaaccatatatgacccgtgcggaagcataggtgggagatctagttcattctagggagagtaacatagtggaggacaataggttatagctgacatgagttatgtttacaaaagaatcagagtttgtttttctctctctatgtctctaataaacttgtttttttattctatgataattgctgatgtgaggaaaaggtttg

SEQ ID NO: 4511 - DNA, 1811 bp, Medicago truncatula
  Intron number 3 from transcript Medtr3g087710.1 (locus Med tr3g087710) derived from phytozome v7.0 (chr-ID MtChr3; po s 20950804 to 20952614)
aggatcttctgctgctgctacttctgctccaagtaatatgaaaaagttgttgaagaattagaagcttctgtaattaatgttagtagaaggacaaacgagtagccttttggcagatggatgcataattcccgcaacaattaggtctgcaaatgataaggaattaaggacatgaagtctccttctgtagaggacacttgaaggacaaatgtctaatttcctgtaaaaccgaagagttcttcattaattctagtgtataggttgtatatagactcatgaaatgatattccaaaaaccgtaattgtttccttttcttttcattttttttttggaagggtgattaaaaatatatagataataattttattccaatacaaatattatctttttttttttgtatgtattaaaattattactaaatttttaagcatgtttttacggcagatttttaatcatggtttgattctttaattttctaaattaaaatcatattaatattttataaatgcttatataatgacacatccaaacatttcaatttctgtaagtacttttaagtgtacttatccaaatgtaaaaagcttattgagtacaagagcttctaatgcaagctcttatacataagctctaatgctacaagcatatgtataagttatttatccaaacgggacctatatagaaaattcgaccaattaattccttaggcttattaagtgtgtgttgcccgagtattgaagaggtggagaattcataatttttttggtagaaagtatgatgaaagattattatgccttaaaaaatcagttttgaaaatactagaaaagatcattaaaaattcaaaaaacaaatacatttaatatgttgaaaaactatattaaaaaaaacatatttggctggatataattaaaacttaatatacgtagtttattgagatatttttgctatgtgaaaaataggtttttaattaataatagactttaattatttttactaatatatatatatatatatatatatatatatatatatataaattcattacaaaaataaattatatatttaattgataagattaaattaaaggtaatatagcttattttgagatatttatgacaaataaaaaaatcagatatgaaaagcaaaaaaaacatagaaatatataaaaaaatataaatttattaaataaaaaaataattagaagttaatgaaaaaataaaaataaaatgttaatagatagggtcaaagttctttaataaaaagatatagggtcaatgtaatatatgtaatatgttgaaatatttataataaaaaagaaaaaaatgttaataaatagggtcaaagttctttaaaaaaaaagatagggtcaaagtaatactatatgtagtatgttgaaatatttatgcaaaaaaaaatacagttttcaaaaattgaaaaatgaaaattgatcaaattaatcatgattatctatttcaatgacacccaataatataacaaaaaataaatataatctaattttttttaatgacaccaacaacaatctttatttacaaaaagttgttcaaggttataaatgggataatggaaaagttagtataaaattatactcatctaatttgttacattttttaaaggataaaggaaaaaaaaattggacatatatatatatactaatataaaattggacatatatatacttatatcgtgtttgttacatttttatttaggtgataattagggtacccatagaagaatggtgggtaatttaccccaaccaatacacattaaccacataagcatatttttaagtggtatcc

SEQ ID NO: 4512 - DNA, 1443 bp, Medicago truncatula
  Intron number 2 from transcript Medtr7g140550.1 (locus Med tr7g140550) derived from phytozome v7.0 (chr-ID MtChr7; po s 33878242 to 33879684)
caataaggttaggtatacatgtgacttttcaatctcaaccatctatttttgatctaatagttgatgatcattctcgtcattttcatataagttagtcattctcatagtatacatcatcctctagagatagatatagatatagatagactaacaacattgtttgctatgaatattgctatcaacttggttgacaagacatacattttttaataaatacaaataaaaaccaagttaaaattcctaatagactaacaacatgtaaaacaacaaatacaataaaatataaattaaaagggtgtgtttttttttttttttagagaaatataaaagggtgttgttcgcatcttcatatggagaaaatatttgttcatggtccatttcctgcaataaaacaaataggggttttgtcagtcctatttatggtcattatgtgtataaaaaaagtaagacacaatatattacgatcattatgataagaataaatctcaatcattggatcaaagtgtatggttgagatttattcttatcataatggctataatatattgtgccttactttttttatacacataatgaccataaatagaactgacaaaactcttatttgttttagcagaaaatggaccatgaacaaatattttctccatatgaagatgcgaacaacacccttttatatttctctcaaaaaaaaaaaaaaacacccttttatattttattgtatgtgttgttttacttgttgttagtctattaggaattttaacttggtttttatttgtatttattaaaaaatgtatgttttgtcaaccaagttaatagcaatatccatagcaaacgatgttgctagtctatctatatctatatctacctctagaggatgatgtatactatgagaacgactaacttatatgaaaatgacgagaatgatcatcaactattagatcaaaaatagatggttgagattgaaaagtcacatgtatacctaaccttattacatcaattctcataaactctttcatcttctcgaattcaccatgttctgcaaaattgtatgttgactgaattgaatctatcaataaaccaccatgttataattgattgaaaaaaaattcttaggattcaaatttattaatttataattatttttggttcatagagattgagttcacatgaaaattcccaatcttatttattgttacctgtccaaacctacaaagcttattaatgaatagaaatatagtaagaattctatgtttttggttgaacaaatctacagaggttattaattaatcttaggtaatctgaaagattcgttttgcttttttaatctgcaattcgtaagaattcttgtgtttttcttttcttttagaaatcgtaataattctctgagattgcaatgttttcatgatagatcaattaggtggaacctgcttgagagagacttcg

SEQ ID NO: 4513 - DNA, 3010 bp, Medicago truncatula
  Intron number 1 from transcript Medtr7g077050.1 (locus Med tr7g077050) derived from phytozome v7.0 (chr-ID MtChr7; po s 15961336 to 15964345)
gccgttggaggtgctctaaaaaacttaaagtgcacgtgacttcaaaatacttaagaaattataagattaaaagtttgtaagaatttctccaaatttttctcttgctatatattttactctattttttaatgaaaaaagagataagtctaactaatgatccatattcgtgtgttaatagtcggtaataaaaaaaaaaaaaaaaaagctttgtttaatgtgtttgaattgtgattcaaaagctttattagagaaatgatgataaatgacaagtttgtgagaagttagcacagtttaaacacatgattgattacattccttagaaggtcaattaatctatttctattcctctcctcaatacatttcctcttcatttgtagtacaattttgttccatcttccagacttcttttatacacatcatatctcatttgggatctaatttttggtttggaattgaagcaaaggaaaggattattgtgccctgcatgtgtaaatttaagttcgtattacagtttgaggatttaatctataatcattgatgaatttctctttttgtcattgcaaaatttctaataatttttatgtttttgtttcagatctaacttgaaaatggaagcaactaatatggttagaacatattgtttattgcattgttagtttcaaatgttcaatgatattttgttttagaaagtatttcatatcttattttttttgttaatttttcctgctttaactatttttgttggtgtctatttacatccacacgatttttaaaaaaggtgcacatacaaatatattttaacctacttgttgcatggaactaatgggtctaacggaagtggcttatttttggcaaacaggattgattgtctcattttgaatatggaaggatttgtttctaaatttctaaagaaaatagttatttctacatgtgtttcaaatgtgttttttggattatgatgttagaagctattggttattgtctgataaaatgtaaagtgtgttttctttttgtgattggagttatggatgctgtaattgatcttgaatgtatgcaaggcagttcaaatataataatactagatgatttagttttttagttaataactattctcttactttggtttttgattatgaggagattactgaatctaatgatctttgttagaattaattcaagcgacatttaaaataacttgatctaattatatttcttaaaattagttccagagacattttccctaaaaaaatagttccatggaaatttaaaattagtattctgatctcttttagagcctcactaaggaatgaaaaataagaaactttaccaagttctaaattcactttaaaattgccatatattgtccttctgtaagaccgtaacgaaaacacaattttgatggggattcaaatacatcgtatgctaaacccgtgcaatcttatgttttattttgttgacgaaagtaattttaaagttttatcgtttttgttttgttgatgaaatataattaaggatcgctgagaaactgaagggtttggtagttcattgattgaacttgtggattcaaacttggaccaaatagaaagaaaaaaaaaactaatttaacaattaattacatgatatttgtcattaaaaaaatctttaagtaagcttaattcgtgattatgaaagtgtttccctttgagtcttattcttcttattatcaacacatcatgtgctaggatttgtgaaatttaatttagatacatcgtgaagcttaaatattctcacatttttatgtgtagtttcatgtttatagtatactcttaaaatattacgtcaaatttaaaataatatgatattaggtataaaatattgtattattttcatcaaaaatttgtttatttttaatttggttcaaataaaattttccccgttggaagtcatggattcaaacttaaacgaagaagaaaaaactaattattaactttttgttatgagataaactaaaaacacaagatcaaataagaataagaagatgatgaaagtttttgtattattctcttcacaagtgtatctttatatcatcgcatgagtcctatttataggatacaaatacacaaatgaatgttcatatgcaataaaagagtactaacaattcattccacaaatgggagttatagaacttgaaagatcaaaaatggacattcaccaactttattattcataacacttttttcattaaataaagtgagaataatagttctccaacgttatatgacagaacatgtgaatgtaaaccagacactatttatgaagttaatcaatcttaccaaaaattattaagaataactgacttgttatggtgacaattgaaacattaagatcccttaaattcatttgttaactagtttaggttctcggattattcaaacatttgaaaacctagaaacctaaattttgttggattaatttaattaatcaattatggattgacaataatcaattattataagttaatgtcataatataaattatggtctattgtgttaagcactaattagatgatgaatatttgtgattgggctattctaaatggactgtgatgggttggaccatttagctaagcccaatgagaggtcccttccctcagccgtttagctatttaaacgtcatcccatcagacggttaagcattctgaacactctactgctaaacggaatgagggtagtcatccctcttatccttttgacagttatccttcatcaacctaattcaaaggtacacaatttctttattcattctttattattgatgatatgctataatttgtatatagtgatccatggctaaatccttaaactcttatcagatttgatattagactttaaatccattaaacttcaatgtaggtcaagatcatgagtaagttagatttcctctattcaggaacccactgatatattaatttcttggtcacacaatccacagtgcaggcgatttggtaaccctccggctagaaataattctt

SEQ ID NO: 4514 - DNA, 1265 bp, Medicago truncatula
  Intron number 2 from transcript Medtr2g097160.1 (locus Med tr2g097160) derived from phytozome v7.0 (chr-ID MtChr2; po s 22718578 to 22719842)
tagctcttcttcagctccacctgcaactcaacaaggttttttgattgtttggatttaattttgattttattttatttgcgtttggtattgcatgatggtgttttatgattgatggattagaataaacaattgaatcaattcttgtttggataatcaatttagttaagtgcttaaagcataattagttaaatacttattatacaacttatgtataagctattttgttaacaaaagtttgagaaaatgatagaattgaatgtaatctcatgtgtttctgccttgctggcgtgttggtgtcagacactgatacatgttggatactggacacgccttcgattagaagtgtcggtgctgtagagcatataagctataagttgttttcataagctatccaggggagctgatgtggatcagttgaaaattacttgtagatgtgtcataattgattccataagttcttccaaacagtcttataagtgcttatgtcagtaaataagctcaagtatttttttgatctaagcaggctattaatttgtgaaatatgcttgaagtgactgactgtgtattagtcagagaaattagttgaaattatgaagataatggataaattgaaattatgttgattttgttggtcaaattagcctccatgttaggtattttgaagacgaatttcactaatgatcattcatggactaatttgatgtataaaatgtcattcagagaatttgaacatgaattctattatttagaggctaatttgaaaatgttgtactatggtttaaggattattttgtgggtttctatgtttgatacaatgccctggtgaataaatataataagagatgcaatttaggttaagcatccggttaacggtattctttttagattagcccgatgaatggtactttatagtgaaaatgcagaagctacaatatgtagcttgtaaatcaacacataatatttcactagaaagggtcgatggacttgaatattgaaactgaagtagtttgggggatctttatgcacattcctttacttttctatttcactagatacctcttcattatattttgttcaagtgtttagggtggatttcataatgtggagtcaactacttcccattgttatttggctctctgtttttgttatgtggaaatattgttgaactagtagtgctttgtgggaataattttcatggattgcatcttgaaatcaagttgcatttgtgaagtgatcaactgtatacatttgaacagagtctggag

SEQ ID NO: 4515 - DNA, 1873 bp, Medicago truncatula
  Intron number 1 from transcript Medtr1g093440.1 (locus Med tr1g093440) derived from phytozome v7.0 (chr-ID MtChr1; po s 18987447 to 18989319 reverse strand)
gttaaaggtgaataatatagccaattattgcattgaaacatctatctgttcagtttagtcatctttgtttgcctttggttcagtagtgtgtcgactgtatggcacagtttatgccaaatttatcctgattctggactaataggagttaattttatatgttgagaacgagaaggatgcatgatgaattgtaagttttttttttgggattatgatttgtaagtttgagttgcattctgtagtgtagaagctctttcgtggacttgtgtaatcttagagcttatggccaaagagaagatcagataccataaaaacaagatgccaacattaagtgtagcttatgcttatgttatgttctgatacaataaataatcaatggctattattgaattaaatttaaatgaaaaaaatgataggaataattaatagccttaggattggtcaagattaaaagactcaattcaagtgttattgtgttccttcaatctaataaacatcatttcttcttctcttctcttcaccccacaaaataattctgcagagacaaacccaaagaacaattgaacgagcttttaatctcactggaatccaccccgacagcaacctcgtcctcgaagttttgcaacgacatcgatccaattgaaaaccagcgtttatattcttgaaaagggtcaccaaaacaaacaactacacaccccgttgcgaagtgtacactgagattattaaaattgttggtaaaatgaagcattttgaagagttacaccaagtgctcgacgaaatgtcgcaaagaaaagaatttatcaatgaagaaacattttccattttaattcgtaggtttgtggctgcacataaagtggaggaagctattaacattttctacagaagggaagagtttggattggataatgagcttgattcagaagcttttcggactcttttgatgtggatgtgtaggtacaagcatattgaataagctgaaactttgtttcataggaatttgaataagtttgggttttgttggagtgaaccatcaacttcgtccttgaattttcacggatcagccaaattcatccctcaattatgcgaaatatcaacttaatctatgaatttgtcagacgtccatcaaaaaggtccttccgtccaagtgctctgttagcatgctgatctgtcgccatgcatgctttgttgtcttgtacgcgtggcaagaaagaagccacgtgttcagggactaatttgattgaatttgaaaaagttcaattttcacttttcagttttttttttttctttctgctttttccattttgcccctacattacccatacatccttcttcatatttcagtcagaaaaataaaaaacgtccttgacccttctccttcccactaaaactttattcattctcgcctctccaaaatcatcatcatcttcgacgattctgatgtttttgaagtttctgtattcggttgtttcaaaaaggtaacgcctttcctgttgtttatcaagtttatgtgttcgtattcaccctgtttttgtccattttttttgtattttcgttttaagttttgatcattttgtttaccacatctatgtgatcgttgatgcttgccttgttcattgtttgtgtttgttgcgtttttgaaacaattgttttgattattccttttagggttttgggttaaaacttaaaaatgttgtgcttgaaaatgcagaaagtgcatgaaatgttgttgcaaatgcaggacagatataacacttgcattttaaggatcgatttaacagttatttaattaattgaaggacttatatgactgattatgtcatagtctagggactaatttgattgaatttgcaatttcagggtgttgcaccaaggaggt

SEQ ID NO: 4516 - DNA, 2075 bp, Medicago truncatula
  Intron number 1 from transcript Medtr2g013990.1 (locus Med tr2g013990) derived from phytozome v7.0 (chr-ID MtChr2; po s 3406908 to 3408982)
gagtgatttcagcttctggacaagattcaacttctgtatacttttcagaatcagaaggttgatcagattctgatgcatcttcagaatcagttgtacctgcattactttcactttgctctgaagttttacttccaggctctctatcatcaaattttacatgcatagattcttcaacacattgtgtttctgaattatacactctgtatgcctttgacctttcagagtaacctaaaaagattcctctttgagccttggcatcaaatttcttcagatagtctttagtgtttaagatgtaacaagtacatccaaactgatgaaagtaagagatattgggtcttcttcctttaaagagttcatatgctgttttctccaacataggtctgatatagatcctattttgaatataacatgaagtattgactgcttctgcccaaaaatgtttagctaagttgttttcatggatcatggttctggccatttcttgtaaagttctgttctttctctctacaactccattttgttgtggagttctaggagaggaaaactcatggagaatcccatgtttttcacaaaaaagttcaaatggctcattttcaaattctccaccatgatcacttctgactttttaaaattttcaattctttttcagattgtatttgagtgcagaagctgctaaacacttcacatgcatagtctttacttttaatgaattttacccaagtccatctgctgtaatcatcaacaatgactaatccatatttacttccatataaggatgcagtgttaactggaccaaaaagatcaatatggagtaattctaagggtctggaggttgatacaatgtctttagatttgaacgaacttttcacaattttccctttctgacatgcaccacaaagtgcatctgaatgataatcaatgttaggcaatcctttgaccagttgtaacttgctaattttagaaattaatctccaattagcatgtcccaaccttttatgccatacccattttttatcattcattgacagaaggcaaactaccttctgatcagccagatcagagaaatttcttttatagacattctcaactctctttcccttgaaggtaatggatttgtcatccttgttgactagtgtgcagttggtcttactgaacgttacatcatacccattgtcacaaaattgactaatgctcaataggttatgcttcagaccatctactagccacacattattaattgagatggaggaattaccaatagtacctgtaccaatgatctttccagtttggttgccaccaaacttcacttctcctccatctttcattgtaagggtaaggaacaaagctttctctccagtcatgtgccttgaacatccgctgtctaggtaccatgacctttgtttctctcttgcccttaagcacacctgcatttttggccaattcagatttaggtacccatatcttcatgggtccttttgggttagttttggaggttttacttttcctcccttgtaccttagggtgaatgctgagtggcttctgatcattcaatactttaggtttgacaccttttggtattgttttctcagaagcagtagctgctttgttcttctgatccttttgttttggaattttagattctggtttaatcagattctgatgaacaggttctgatcttttcagaattttaatcttttgactcttaggatcagattttgtcattaccttgatcttaagattctctggctttgatgtgatcttagcctgtgaacctgaagcttcaggttttgactgaacagcagttatagcatttgtaccttcaggcacaaaggtggatttcaatccatccttgatacaatcacagtagctcttgagactgtattctttggatttctcctcagaatatccaatccctttgcctttgttcttgtatgtgctgtagatcatagaagcaactttgcttctgtctattccagccataataaaatcatccaaggcaatctcatgtttattgcctaaacctttatcacatttttcttgtagcttctgacaaagactcttgagtctatcttcat

SEQ ID NO: 4517 - DNA, 7014 bp, Medicago truncatula
  Intron number 1 from transcript Medtr7g106920.1 (locus Med tr7g106920) derived from phytozome v7.0 (chr-ID MtChr7; po s 24860774 to 24867787 reverse strand)
tacagtctgtgctgcttttgtgattccttttttcggtaagtgttaatctttgtctcaatacaatacatttatatgtcatcacatttagcagacactcaagaaaattatatcaccatactatagctagagatggtcagcacttagcagggctatgctacaattatctgatactcggctagaacatcaatcttgccacatcaagttcaacacctcgaacagcctcctattccaactatgaaaatatttaagaatttataatggttccggaaacttaaaattatattttaatattgagaaccaactggttgtttctgttgagatattgtgtgattttgtcttgattatactttcctttcttagttaatgttttccctcattcttgggattgattaggaggctcatgcctctgtgtgtgtgtgaattttcctcacattatttagacaagatattaagtctcaagttggtatcgagagccaggttcaaaaccctggcttttctttggctgttggatatccaagagagacctctgtttgacctcatccatcaccagagcccctgccgccatcagcgacagagacacgcggcccaccatcgtgaccatacactgccgatttgcttactgtcaaaatccctctggtcacagtctgaacgtttttctggtgcgtgtgtgtcacgctctaacctctggtcttatttttgcgctgtcgtttattcccgtttttctttccagttctattggaaccccttccagcttgtgggtctcgcgtttgaggtgtgttctggcagttttttgcttcccatgtgttgattcttcactgtttcggttttaccgcctcaaacctgttggtttggtcatgcaacccagacttcgttatttggtattgttgcattttttggttgagatgagacatcatgtctaaaatcccaactattgagtcctcaaagtctgcaaaggttgattccacgaaaaggggcttgatatcatctgcactccaaggaatgaccactatcacaacttgaaaaattgaatggtaagaactatttgagttggtattcatatgttgagttatggttcttgggccagcttccttcatatcatcttactaagaaggctttcaagattggtgctacatcgaaagatgattgggaactagctgaatatcaactaatatctctgttgtggaattctattgagcctcagctgatggtacatttccgtccatataggacatgttatgaggtttggcataaggctaaaaatctttaggctaacgatatccaaagattgtatgaatctgttcccagtttagttacccttcagatgactaatcaagatttatttgattatttggctcgagctcaatccactattgacgtcctcaaacttatgttagttagtgatgatcttattcttaagcaggtattggtgaagtttggcaatatgatcatggtgtttatccttcatagcgtccctaaggagcatggtaaaataccaccattcctaggtggaaaaacttattaatcgtctcggccgagtttctttaccaaatgatgagattaagaccgcccctaagtttggttttgtctattccctattttgagtcttttgaatccacacctctattttttgttcctcccgaagtactagatatgtctttattacccgagtttctgttaaactcagagaaacgagggatattaaactcagagagactaagaaatgagggtcaaaactgtatcccccttcattctgatttctcatataaatacaatgtatttacaagttgccaagttgactttcaacccactaaattagctaaactgacgtgtatatatttacaactaattatgctaattgaaaggatgattatttgactattacaaataaatgtgcaatcttatagaatttgatttgccattaattccattgacatcccccctcaaattgatgctggtaaatctacaagcatcaatttgccaagtagaaaattgtgccgctgacgtgtcaaacttttagtgaaaatgtcagctgtttgaacagatgttgagacatgtggtagattgatgattcttcgatcataggcttctcgaatagagtgacaatcaacgtcgatgtgtttcgtccgttcatggtaaactggatttgctgcaatctgaatggcactggtgttgtcagcatgcagcggagtcggttgatcttgagagaatccaagctctgttagaagtccacgcaaccatattatttcagaacaagcagcagacattgcgcggtattctgcttcagtggatgactttgagactgaatcttgtttcttacatttccatgaaataggagcatttcctaggaacatacaccaaccagtagtagattttcttgtgtctggacagccagcccaattggcatcactatatgcttggagtttgattgatgaaccaacaggaaaaaataaaccacgctttagggtgccaaggaggtatctaatgattcgttgcactgctgaaagatgaaaatgtcgtggagcttgcatgaacttactaactgtgtgtacaacaaaagaaatatctaggcgagtgatagttacatagatgagacttccaaccagtttgcgatattgagtgggatcgtcaaggtggtcaccttcatctcttctatatttaacattaacttccatgggagtgtctacaggggttgcatttgtgagtccagctagctggaccaagtcttgaatatacttttgttgatttagaaaaacaccttcatgatgataatgcacctctaaacccaagaaataagtgagacggcccaactctttcatatgaaaagttgaatgcaacaagtttttgatcctagaaatagcatcttgatcagaaccagtcacaacaatgtcatccacataaacaagaagcaccaccatgcctttaggagttctttgtaggaaaagagatggatcataccgactttgactgaattcaaaaccaagtagtgtcgatcgaaacttttcaaaccatactcttggtgcctgtttcaatccatacaaagattgttttagtttgcaaacagtattaggtgaaggtgtaggcataccattaggaagtttgatgtaaacttcctccttaaggccaccaaggagaaatgtcacagcctttacaacctcggttgattcatctattcctagcaactcgatcaatccagcaccagttcagcagaatgctcctagtagttcaacagtcacccctgaaatggttcaacaaatgatcatttctgccttctctgctctaggaatctcaggtaaatcctcttcctcctggtactttgattcgggggcttccaaccacatgaccagcaatgcccaatttctttctaatatcaaaaaatattttggaaatctcaagatacatactgctgatggaaatcaattacctatcacagccatcggtgatatttcttcatctctaacaaatgtttttgtctctcctggtctcactagtaatctcatttcggttggtcaattagtcgagaatgattgtcaagtacaattctcacaatctggttgtcttgtgcaggatcaacaatcagggaagataatcgcgaaggggcctaaagttggacgtcttttcccaatccagttttcattgcctcaaagtctttctttgcctttaatttcttgtaattctgctattgttgattaccaagtgtggcataagcgtcttggacatccaaacgcaaatgtacttcatgagttgctaaaatctaattttcttggaaataaacacaccccatcacttaattctgttcattttgattgcattccttgtaagcttggtaagagtaaaattttgccatttccaacacatcagtctaatgtaacacaaccttttgatataatccatagtgatgtttggggtgtggcaccagttatatctcatgctcattacaaatattttgtaacttttattgatgattatagtcgtttcacttgggtctattttctgcgatcaaaagatgaagtcttttccacattcaaattttttcatgcttatgtccagacccaattttcatcaaaaatcaaaatatttcgctctgacaatgggggggagtacatgtcacactcatttcaggaatttttgcaatctaatggcattatatctcaaaggtcatgcccctcaactccacaacaaaatggggtagcggaaagaaaaaaccgtcatttgcttgatgttgttcgcacccttttgttagagtctcatgtgccttcacgattttggtgtgaagctctttccactgctgtccatcttataaacagaatgccatctccgtcaataggtaatgagtcccctttcactcggttatatggtcacccaccaaattactccactctacgtgtcttcggttgtgtgtgttatgtccatcttcctccacaagaacgcaccaaactcactgcacaatctgttgaatgtgcttttcttggatattctcctcatcaaaatggttttctatgttatgatcctaaccttcgtaggatttgggtatctagaaatgtcatattccaagaaaataaatatttttttgcatcacatcatgacctcgtctcttctccagtttctattttgccattgttttctgactctcattcaaggcaacaactttctaaacctctcttgacctacaaaagacgtagtactgccactcatgggccccctcaagataattccttggttgccttattggacattccttgagaatatgtccgtcttgtttgcagcaattgcagactttgtttggacagtttgaagcataatgtcccaatttcttgcaacagaaacattgaacagcactcatgtcatgacttcttgtctttcctcgtgccacataagccactggaacagaagacactttttgatcttcaatgatggactgtgtcagcagacgttgttcttcacgtaatagatcattgaaacatgcatccaatgatggtagagggtttctatgcatgagattggaccgaataccttcaaattcagatctcaatttcataagaaattgatctcgcttggtagtttcatgaacagattgtacagaacttagaccttcagaagtcaagtctgcataaactatctcagtatattcagcccaaagattcatgaattgagagtaaaattcagagatggagagactatcctgtttaaacaaagctatgtcgtgttcaagctggaatcttcgagcggcgttgttctgattgtagactttcttcaagtaattccacattgtggctgctgttttgtaaggtcggagattcaggacaatgtttggatcaacagagcctaggacccaggacatgacttgagcatctttgactacccatttggcatgtgcaaccttatctttctctttgtcaggaaatggggtgctgccatcaacatgaccccacaaatcttttcctgtgacaaatatctcgaaatggaatgcccaagttgagtagtttttgccattaaggcgaaccaccaagatttcatgtttttcggtagacatgtgactatggaaataggtattgaacaagaggttaatctggactgggaaacgaataactgagacacagaagtgaaaagaataaaaaacagactaggttcttggtttgtaacctaggctgataccatgttaaactcagagaaacgagggatattaaactcagagagactaagaaatgagggtcaaaactgtatcccccttcattctgatttctcatataaatacaatgtatttacaagttgccaagttgactttcaacccactaaattagctaaactgacgtgtatatatttacagctaattatgctaattgaaaggatgattatttgactattacaaataaatgtgcaatcttatagaatttgatttgccattaattccattgacagtttccacttcctttgaatcggtttggcatcacctatgagtgaaggtttggaccacatgcttcagctcttgctctaagtgtctccacctctgctcctgctccacctgtgtctgctcatttgcccattgccatccacaaaattaaatgttcaacccttaacgatcatcttatttataattgtgtcttaccatggtttgtctcccacttattgtgctttcgtttctgctctttcatttgtctctatgccaaaggcttttcaggaagctatcccatccagaatggaggcaggccatcttgatgagatgtcagctttagactctaaccgtacttgggagctatcccatccagatgtatgcaaagtacaagtctttgtatggcttgaaacaatcacctcgagcagggttaggaggatttatttttttttgaacaaggggttgggaggatttagcaaagtcctacagtaatttgggatgatccattgtgaggcagatcactctgttttcactaaatgctcctcattaaataaatatatcaatcaacctggtagtttatgttgatgatatacaagattcgtatcagtattatatttataaatattattctttccattaatatgacagtatctgccttggtggagtagttaaacatgatttaatgccaagattcaatcaaggtactggcgaaacaagagcaccaaactattgcatcatcgaacaatttatgtggaactagtgaaatataatttactcaactctttggcccctttcaaaaaaactagaaaagctgccattgctctttaagaaccagctcttatcttggatcattgatgacatgggatatattatttttaaacttcaatcacttttttatcatgaggacaactattggatcatcaaatagatattgaattgttactttatacgtaatcacaattattttttattctggcagcttaaatgctcatattgtccttgataaatcttggagcgctaactgctaaattctaattacatacttatttatctgcgcaaataatgtgtttgtgtgtgtatatttagaaattatgtattaaaaaaatcaacactgcattatgtgtcag

SEQ ID NO: 4518 - DNA, 432 bp, Medicago truncatula
  Intron number 4 from transcript Medtr5g037440.1 (locus Med tr5g037440) derived from phytozome v7.0 (chr-ID MtChr5; po s 15734919 to 15735350 reverse strand)
agaggtttaacatccaagtaaataatttgactcaagtaagtttctgacctgcaatcaggatagttcatgctatacttattctttgtgttgcattctatagctttctgcttctgtaactcactgaatcaccttcagttagttacagttattcagttacgttagtttgcagttcatcaatagaacttctatgaatttcctgcatccctgtatccgtgtcatatcatgttttgggcttcgtagcttacattgatttacttgtttaatttattagttgacttttgaggaatattgcaataggtattatgtttattgtgatgttcaaatctatgatgggctaatattttgtttttctctatcttgctaaactactttattgggatccttggctttttggcagtttttaccgcaagacagggtctgtgagtttgcaaa

SEQ ID NO: 4519 - DNA, 2367 bp, Medicago truncatula
  Intron number 1 from transcript Medtr4g005090.1 (locus Med tr4g005090) derived from phytozome v7.0 (chr-ID MtChr4; po s 72356 to 74722)
tcacaggaagaaaggtatttataagttcttttgaaattaatgccatatatgcatagtgttatgtactctaatgctttaagctgatttaggatttgatagcatcgtaatgttcttagatgttttgttccggggatgcgttttatttgccggatgtctgttaaacaggacatggttgcctgttactatttttttagcgttcgtaaatatggtgttaaaaccaaaatattgactattcgtgcatcatattattattatgcaagattatctattggacagttttgaaagctgatctaattacccatagtattgaacaagagattgcatttttttacattggtgtcatgcacttgcagcaattgtcattgagaaaactattattctaggactctagattgaaacctttttgatgaacaatgttgcactttccaagtacaattagagttcattatatcataggcttcattgcattcttagattctttgaactttaaaagttgatgctagttataattccgctttgtttaattgttcttatcaagttatcatgtataggtagatgctcttgtcgagtgtgttactcactctagcattgagaaatctctatgatattttgaggagttataatgtagggtaatgcttagtggtgcgaaaaatcttgaaacgaattttgacgaacaagtaaccacatctcatgtattgtggtagatgtcctcgttttgtatcattaatttttatttaaaataattttaactccaaccatcccatgtattccggcaaaagggagttacactattatctttctattaaaaaatgggagttacactattatttaataagtgcttcaatttaagctttcgtggaatttcgcacatgggtggttcgcaccacatagcactgctctataatgtatatgaatattcatctatccagctgttcattcatttcacaacagaactgtttgcagaaagaaaacactgacattttcttgatgcgattcgtagcttgttacttaatcaagctacgaattatggtgagatgtaatccttactgctggttatttaatcaaccttaaaccatattttgtgctaaataaccagtctccgccttcaatttcaattttggtgaatctacatataaacttcctatgtgtttttggttgtatttgttttgtattttatctatgttatttctctaggaaaagactagcgtttatgaaacagtcccactttttctaccttctttggatctcagttatatcctgatccaacatttttacattcaccacactagcctccgtctcaaccggtagctccagtttataagccactttacggttcactgctgaattttgtagggttgatagtaagatggacttattgtctgattaggtctctgcattggtgactttatttttatggttgttgttttataaagacaatccccttcctgtaagttaacctccctcctgtgcatgtttgcatagtggcttgtttgatcttgtgctttaagtaggttggtcctaatcttatcagtaattcgtctctttgcttatcaagtctgttcactacttccagcttcgaaggtatagtggtgacttcaattataatggtgggaccggactagatatggttagctattttgttaaacctaaacccttccagaagtttcaagatcttacttacaaattgggaaagatagatatcccatttactctttgaaaagggtgttgtttctaggcatagttatcaattgtggattgtggcacattaactgaaaccaacaatttataatgggttgaccactgttctaatttattttaatgcatataaatcagtcttactatactaagatggctagttgagccagtaaatggacatgtggcctgtccaagccccactttaggtctgacaagccaacaaaccagagaaactagtttgactccattgagcatagttaccagccaccgctcctctgccattgattaatatgattttagaaagatcttttatttcttttattagcagattcattgagaaaagttaccatgcaccattcccctgccattgataattatgattataggaatatcttttatgtcttttattagcatagatttattttctcttaattgtacaacttgtttttattttttttactattatgacagattatcttctattaattttagggtaaaaacctatagattttttattttggtgaaaaattaagagaatctatgatagtcgtgtcctcgtacgaataaagttcagtaatttttcttcttttcaagttggcattcttaatatttttccatgacgacatgtctgtttcagattgaagcgatacaagggcttcaaagaggggaagc

SEQ ID NO: 4520 - DNA, 2307 bp, Medicago truncatula
  Intron number 2 from transcript Medtr5g077870.1 (locus Med tr5g077870) derived from phytozome v7.0 (chr-ID MtChr5; po s 28740347 to 28742653)
tggataaatcaacacaacggacattcttgcattagtaagcattgatatcatgcccttaagtagtgtaaaaatagacaattaaaggaatggcacaattacatgcaagaaaaaaaatatatatgagttcttctgccaagacgaaattctgctgcatggactccataattaaaatccagattatatatcattattgaatagcaagtggagaaagcacttacatagaaaaagatgcattcctttattacaaaataagctgcatgagaatttgtaagctcatctgatgagggagacttcattaccaggtagacaattcttcttaagccaagatctcaagactggaaaggcttggtaatagaaaatgaaaacttcagcatcttcaaactatataaatgaagcaacaaaaaattactgaaaaaggattcatactcatcctacataagtacttttatagttgtttatatcttgctactaatcaagtatcatagtgccagaaaatctcttgtgacaataatcttgcaggttttgctgcactatgttttgtggaataatctcttgtgatagtaaggacctattgtgatagaaaatcaccattacatacgtgattgtgtcatccactccgaagaaaatcactattgcatttctaactttgcaattttcatctaaatgtatttgtgatttgtggcattatgaaaaggaagagcatcattcaccaaaaatgaaaaaaataaattattgatgataggtagcagcagaaacaaaactcaaaaaatagcactatcagtgttagcctgagttgcaatggctatgtgagtttccattcatatttattttttttgtaccatttaaatgtatttgttgcattatgaatttttcgtaactatacaacaccaattttttttaacagaaaaaagaagagcatcattcaccaaaaaaaataaataaaaaggtgaagaaactactgatcacaagtagcaacagaaacaaaactcgcaaaataaaaatatcacctttaggcctgattgcatatttagttttttgggttaatatataagcctttacccatgtaatataggtcacttttggttttgcgccctgcaaaaaaaaaaatttggattcggaccttgtaaaaattttttgttttcgaaaaccccctagaccaactctgcatttttgctgatgtggcatgctgcgtcgccctttttggatgacgtggcgcgctgactgtataatttttttattttttaatggggtacacgtggcatttatgatttttttaaaaataaaaaatacttaaaaaaacgaaaaaatattataaaaaataaaataaattctggaaaaataaaaatattaataaaaatgattaaaaaaacgaaaaaataattatggaaaaatttaaaaattctagtaaaatctagaaaatttaataaaaaaaattaatgtatatcgaaattttcaataaaattattaaaaaaatctgaattaaattaaaattataaaaaaaatcgaaattctataaaaaaaaattaatatatatggaaattctattcttcatgatttaatgttatgtttttttttaattatgaatatactttccaatattttgattttctgtataaaaaataaaaaaacaaactttttaatttcgaaagaaaaatctgaactttcatttttaattctattcttattagattcataaattttgaaatattttaagttgctgaattttttatttttttataaaataaaacttcttaatttcggaaaaaaaaatatgaatttcttttatttttccagaatttttaaatttttcctctattgaaaataatatggaaatgtgaatttttacagattttattttattaaattttctatattattttcattttaccagattttttaaattatttttactaaattttctagattttttcatttatcagatttttattaatttttacataattattttcgtttttttaatcatttttattaatatttttatttttctagaatttatttcatattttttcgttttttaagaattttttttaaaaaataatcattaatgccacgtgtaccccataaaaataattatacagtcagcgcgccacgtcatttaaaatgtgtgacgcagcatgccacatcagcataaatgcacattcagctggtctaggggagttttccaaaacaaaaaaaaaaaattacaagaccgaatcaaaaaaaaaaaaatttacaggggacaaaaccaaaaatgacctatattacatgaggataaagacctattaaccctagtttttttcagctaaa

SEQ ID NO: 4521 - DNA, 2086 bp, Medicago truncatula
  Intron number 1 from transcript Medtr4g095540.1 (locus Med tr4g095540) derived from phytozome v7.0 (chr-ID MtChr4; po s 19905352 to 19907437)
ctgtttgtgctggcaccgttgtagcttctactcaggtaacatctacctgttaacctttccttttttcgatagtatgctattgtagtatatatgaagcacggacatttagacattttatgaaaatggtagtgattgaatgtaattacatgggtggatgtcgagttgttctgtcaaataccagacacgtgttcaatttgaagtgtcggtgttactaaattactatctagtgtgtgtctttgcatggagaatgtagatttggaatgctattttaagaaagaatttgataagtttctcatttaagttagttatatttaagtagcaataaacttataagggattttgtgtaggccaagaacttgatagatatttcagttgacaagctcttgtatgttgtatgttaaactaatgcaactaggtcttaaaagctgcaataggggtttagttcagcacctctaacttcctaattgcaatgtggtctaagtttattagtttgaattgttgagaattagttaatttttccctttttggtcttttttgtttgaaacttcaaaagttacatacttacattgatctgattaatgcaattgaataatcggtggcggcgcttgacatcattttttgagggggccaaaaatatacatataatttatttatttatacatatattgaagtaattaatgttggcgcaatgtgttggtctctttattttaatgagaggtactgggttcgagtccgatatattccattttgagcctttattttgttatcttgatcaagaaagattaacggagatacaaaaaatacatacccaagtttcgaaaccgcgcgcttaatagtgaagcaactactcttatccactgcaccaaggtgcacaatgtgatatgcttatcgcatagcagtatatatatcaaaagtttggagatgtccccttaaaataattttttttggagatgacatggccccctttagtccttgagaagctcgctgctgattggatgcgtgtttagaaaaatgattatgattgatttttgcaaaaattgtttcgagcctttggaccaagattatgtgatttgtgtgtaaatgtttttcttaataacgatggttgtacaaaacttaatacaaaactaacaacttgctcaagatttattctaccaatgcaattttggtttatagtaagtttgtttttttgtaatcaagtttactgccaccaaactcacatttgaagtctttcatcatttgttcccaatatgctagtcaagctgagaaaactattgatgtttcacaatattcaaatatgattatgtgaaaccttgttttacaaattgtcttcgacttaaacaatttaatctttttttttttaatggggaatgcttgttatgacgtaaggcatcgcaaaagtatatgaaagttttgtggttggttattttttcacccataatcccatgtttccatcgatacggattggctatttgaccaacctttaataaaaagacaagacagcgtcagtgttttccgttttatatttgcttcttaataattagcatcactatttttcttatgatcttttgctgactatattaattaaacgaataccaaattaatgcaaaatagaatgaatattgactgttttcctaggtgccttccaaaaataccaaagcgcctatagcctggttgttttaacttttgagagatctcggacgagatctatttaagcagtattacttcatttgatacgaagtgtatcaggagtttttttcgtttacctttgctgtaacccaaagctgtcgaatttgtaccttgcctaattttgacgtttcctttcattagatatttgatattgattttttatcatgttaattgcatggcattcgacagtgtctagttaaattttctaagatgactttctaatttgacacaattttatccagccatatattttattttatttgtttcattttaacgagagcatattcatcagcaccatagtacgaagtatttatgctttagacaatgtttaagtgcttagacaaacctttctctactcaattcaggtgagaaggaaactcgtggaagactggcttcctgt

SEQ ID NO: 4522 - DNA, 1482 bp, Medicago truncatula
  Intron number 2 from transcript Medtr5g049800.1 (locus Med tr5g049800) derived from phytozome v7.0 (chr-ID MtChr5; po s 21403756 to 21405237)
cagaaggtgaagggtggaagaagaaagaagaggtggtgagttttttagagagagaaagtgttgttacagttgactataatgaaagcttatagtataattacaactcatccattatctctcttcggttgcttttattatcagtactgtattacttaattaatttcatcattatattttttttatatatattccttttcttaaccattgatttcaagaacacactattaccgacttggacagaaactgttgttttctttcttcttctttagcttttgactttggtaattctctctctttttctagtttcatttttattcattcatgtatctttatcaatgaatttctcctttgtgtgttttacatggttcatgatttccttgtggagttttttattttccagaaatggttgattctcagggtcagaaaatgggaaattttttttttttggtgattaaaataatatatagtatgaaatatctttttgaattttttttatcatatgaaggttttgggatctgaaatagagatctcaattttcattttgaccatgttccccaatttccttcatagggattgaggttgcaaaaaaccaacccagtagttgttttttcactttactttttctggatttctaaacatgtttattctgttgagtcagatctattcagtgctaaaagacaaataattggtagggatttttttttttagtgtgttttgtaggccttttgatttaaaatttggctttgtaattttctagttgaaaactttcgtaaagttgggtgattttttaaacttttctttcttgtccttttacacgttgtgcactgtccttggattctacttgggaaaattctttcattatttttttaataaaataaaaaaagaaaaggtaaattgtactttcttcttctttttttgcttataaattgtttattttcttaggttcttagaggctacacatattcttaaacaaaccaactttgattggtatgtttatatgtgttatggttgcatgttagaaccttaagatagaatatggtccccattttactgattctagtgccaatttaaaaccttgtgctaaactttctatatggtactttcttatgttctttgttttaccttatattttggatcaagaatcaaattggattcttttctatatcattttgcagctaaagttacttgcctttatggaaattgagaatagatggtatcttatgaaggattgaatattttgtttctttctttttaatttcttacttgtttttattctttacactttttaaatttggttattgtttggtatcattgaatttgaaatagaatcatgatgttggtccttcgctttcgatactattttaaagcatttcctttattagattttttcttcattaagtgtagttattatgctaatctagtcgcgttcttattttctgatttgcagattccttctaaatattgtctgatcaaaattgtctc

SEQ ID NO: 4523 - DNA, 5285 bp, Medicago truncatula
  Intron number 5 from transcript Medtr3g147440.1 (locus Med tr3g147440) derived from phytozome v7.0 (chr-ID MtChr3; po s 38175358 to 38180642)
cacagaaaaaggaagagagaaaagcaaggttacaggtaatattgcgcaacaatggatcaacagttaattctatgctttataattacagcgtgtgtggtaataattacatgactttcatttggtagcaaaattcatcttttaaagatcaacaaaagttatacaacaacccaatagttttttttatatcaggtggggttggccaatggatcaaaattttcaaatgaagctatcctatcctatcgtcctatcatgaattgattctgttcacagattattaaactctaaatcatttttaatggtttagtcgatagtttccctcggtcatcctttatctagaactattggattatcatccatttggtttaacgactttacctgtgtttctagtggtcttatccacatttcttaatccatctgaagttactttgccatcttttccaccactgatgttgccccaaatttttgtttaacgctttcattgataatcttgtccttttttttttactacattgctccaccgcagcatcccctttgcaattctgagtttactttttagtcccatatatcatatataatggcaggatttatagttatacgatagaagtattttgaactttcctttaagcttgacctgtacttttctatcatagattgcacaaaagatacatgtgcccttcttgaatcctatggcacaaccctttaattccatgtcattttgaatgataagctcaagatacttaaaattgggtcttgtgggtctagtatgtattccaattttcacctctagtttggaatttgtgtgcctgttgtaaaacgtacatttcatgcgctccattttacttctactcaaatgaaaggtcaaatgctttgaaagcttgtctccacagttgtaatttttcatttcctttgactatccaacaaggactacggggaccaattgtttgtgcttttttaaatcagaaatttgtttaaaattataccttggcgacaaaattggctttgtctttttattatttacgtcttttatgtgtggattctttgggtttgatttgatgaggaaataactagatgacagtcacagtttgtagtcgatactttttggtaaatatacacttaagtactctaggttaatatattacaaacatatttatattttaaaacctatatttgagaaaaagtacccaaacataaatgacgctatagaaaactgatttttaactaaaattatgtttgcaaaatggcgtttattcaaaagtacatttataaacgttaatctgaacacatacttatagtattgtatcttagtattaacctacaaatattgatgactttggaagatggctagtatttatatttttttgcattacaaaattttcaaaaaggaaatactcttctagtgtttttctcataaggtagtaatagcttctgaaaagagttctgaaaaaaaaaatgttaaccatacatattatgttatatcttttttttttattttttttattgtaccaaaaaaaatattactacctccgtccctaattataagacacttttgagaaatttttttgtccctttttataagacccctttggtatttccaagtacattaattatttctttactaacatacccttatttattttgcatctttttcttcaatcaagaataaatattatgttgaaaacataaattaactctctcccttaaggataaaattgtaaaaacaatagtaattatatacaaatttaatactacaaccaacttttttaatctccgtaattttggcaaaagggtcctatatttagggacggaggtagtataacttttttcataatataaacgagctgcctttagtatctacaaaaagcatgcaacatgatatactagttcttaaaaatgttgtgaaacacatcttgcaccaaataagaagatgcatgttaatgtcgatgattcatgttgtagacctaagttttaggaaaatctttgtgctcttacctgtgcagttgtgagttgtgacctcaaacatttaattattcagatggaggaaatataatttgtacttcgtctaaagcctcttataaaatctctttggcaattttatcatatgctcttatcatatgccttttctttatcatgtcattcatccatcacttctcttatcatatgccttttctttacgatgtctttcatctatcagttgtaagatatcattttatacaagtatgttgcatatatgaagtgtgagtgcagatcctctccatttagggaggaaattgcaatctcaatttccattcattaaaacatgacacgtgggaaaattaatatcaatggttcttatttattcaatgatttattttattttattttaataaaattacatagaaaaccactgccgtttccttctctcttgtctggagtttagcttgcagaacacattaactttgccgatcaaacctcataaattcattgtaccggcggtccgccgccatagacatgttgccaaacatgagatcgtcgctgttctgactcgtaataggaggcatgggctgttcttgttgctgttcttgattgcccttgcatttgagttgtatccgagggtactgaaaagaacatgaaattatgagacggtagatacaacaaaaaaccagaattaggattaagaacggtctgttttcatctcatctcatgttaaactcatgctaactcaaattggttatgattattaataatctaacctaaatccagaaagtatgagatggtagatacaacaaaaagaacaaggagaatgaggattaagattgaatttaaagtattgaaaagaattaagatgaactataacagaagaattgaaagggaaggttgaaaacgaagcatgtgttgctgaaatcgagcaaggagaaattgtgggataaagtaacattattaatttttattatagaaataaatgtgagccattgatattaatttttccacgtgtcatgttttaatgaatggaaattgagattgcaatttcctccctaaatggagaggatctgcacccatgaagtgtatagtatggcatgataaacaatatagatacgtattcatttctataaagaagaggactagatatgggtttgatgtactcacaaatgcatgtaacagttaccgttcattttttttgtaaattggtatttcaaactattagaattatttaaattaattcataaatcccaaagtagacataccatgttttatgtgatgattccttcaaaaaaaaaaaaaatgttttatgtgatgataaatattaaatgggtcatatgttaacttgtgccctaagggtacatgttaaggaacccaaaaaaagcaactttgcattggaaaacataacattttaaattttaagaagttgaatgcacgacttttgatgcgaatatttctataaaaagttccttaacatgtgcccttgagggcacaagttaacatttgccatattaaatagtcatgtttgtatacacagcgttggagcttacggaatcatttgattgagaaatgagaataatcataataccatcaatttgacagagtggaaagactagagggattggtaatccaagtgatggtcaaattatcagattatcttgtgaaaggaaagcaggataatgcacatgttttatttaattcaaatcaggagaaagattttgtcattaatctagaacaattacagatattgtcagttgtgacttatctgaaatattagggttttaggtagtgtaggtaaagcgagatagatgagactttggataataatctattatgtattaatactagactcttattcttaattaaataaagaaacaaatcataagattcttctctcatttatgttaatcattaatgttagaatatctataaaatgtctcataatattagtgttgcattttaaaatatttttacagtaccttggctgatatcttaagtttggcatctaattttgaggaaaagagataaaagagactaagtaataatttatttttattaaaacaaatcaccaacccctattcattctaatacttgtccgttgttttattttgtttgttttgtttgttctttgttctgcttttgatcaatgattgggttacagtagacatgatcttgttttgcggtggttaggtttcgttaacccaaaagggtctggttactgacgtattggactcatccctcgatcttagttcttacgcgttgcttgctcgaaagagctttttatgcttgttgttgctcagggagctgttggcacttggattcggataccgcgttgacggtcgatccattcgccctggttacactctaattgttctctgcaatattcacttttcatcttttttttgaacttggtttcgcgctcgtacgcgggttcgctaggttgcgtatgtgattagtgaattttggttaggatagattagagtagatccacttggactgctttatcacgatgtattcctgtttgggttatcctaggtctggtcctatgtccccccaatctttgtatctttttctttttaggctaaaatatggttttggtccctgcaaatattcctcgttttggttttagtccttgtaaattttttttgttgtttttggtccctgcaaaatattttgtttttgaaaatagcccctccagggactattttcaaaagtaaaatattttgcagggacctttttaaaaatcaaaagattttgcagggactattttttaaataaatgggttcggtcatcatgtaccacgtgtgcaaatcatcacaaaagtggggccatggacgaaaaccaaaacgagacatatttgcagggaccaaaaacaacaaaaaaaaattacagggactaaaactaaaacgagacatatttgcagggaccaaaaccatattttagccttctttttatttaatatattttcttttcgcttaaaaaaaatactagtttttctagtcctaattatattatattaataaactaatcataaaatatattgggataatttaaatatagtaatgatatcatgggataatttatagatgttctaacataatagagatcaccaaaggtattgtaaattttttaaaaataataatgataccatgggataattgatagatgttctaatatgaatagaggggtcttaacttattctttagtttatatgggcacttgctaacttctttcacctagcttatggcttatttccttttttttcttctcctggaacattaattatgtattttgtacaggcacaattttcgcaagtgaggccggttaca

SEQ ID NO: 4524 - DNA, 1890 bp, Medicago truncatula
  Intron number 1 from transcript Medtr5g077450.1 (locus Med tr5g077450) derived from phytozome v7.0 (chr-ID MtChr5; po s 28556576 to 28558465 reverse strand)
ctattgagattcgtaacttccttggtgaaaaaaaggtacctttttgttttaatttcactttttttgtgtttattttactattattttatgattattatggttattgctatgattttagaaatgttattagtagtgattgtgcttttgtatacgagtgtattataattgtttaatgtatatgctttagggttgttattgtgtaattgcttagttttgaggttaagaatattgattatgagattattcatgatgggaaaactcagattttatttgaatgaaattggttttaaagcttttatgtattatgcatatgcattgtagtttatgaagaaaaaaaaaaaaacagcttaacagcttatgaagatacaatttccgttggtgaggacttatgaattaacataaaagcttatttatttgcataaactattttttttataagctgaaaaataagtcaatccaaatgggcccataagctgaaaaataagacttcaaataaatatttttgtatgtactcttgttacatgaatattcttgtacatgatttttgacttgagaagaaccatgttttttatttggtgtatagtgtgattggtggttattagctttgctgtttttgttttggttaatgtaacatctttttgtctgtgtttctttgatttatttgcttgatatttttaacaagctaaagcgtctaagaagtggttttctctgtgatgatgaacaattgatgtcgagtctgaatcattccattcttaaccctgatgacatatcgaggcatttgtctgagaggattccacttttccttccaaatgtcgtgcatttcacatgaattctgattgtatgttattgtgcatttcacatgaattctggttgtatgtattttgagattttgaggcgattagtcttattctttttacatgaatagtcatgtacttcattacacgattgttcttgttttttatttggtgcaccgtgtgattggtgtgcatttcacaagaatgattttcgtttggggcttctgtatttttgctttggttaatgtaacatgtttttgtttatatgtttgttttattatttgcttgattttttactaagaaaaagggtctaagaagtggttttctctgtgatgatgaacaattgatgacgagtctgaattgttttccattcataaccctgacgaaatatcgaggcatttgtcagagaggattccaccttttcttcaaaatattgtgcatttcacatgaattatggttgtatgtattttgagatatgagatgattagtcttattcttgttatatgaatattacatgtattttttttacttcagaggaactatgtttttaaaactaatctcaaccactatgtttatttgctcggttacctctaataatttcttgtgaaacaaaaacatagtttggacaaactacatccctatgtatttttagattttgtgttaatactattacataaatagttttgcacatgttttgtgacttgagaggaactatgtttttgatttgatgattatataatatgtctgagaggattccactttttctttaaaaaattgtgagcatttcacaacatttcaagttaacatccatatgtactgtaatattagatctattacctttaagaattggttctgggatacatactctcgataatttaagtctgaagaatttatacaagtctaaaacaatcaacacaattataaatctatattaagcagaaaaggtttgccaagattactgttggaatgaatggattttaattatatatgctgttagttaacacaataagatggaattcctttttgtttttagactctattttatcaaattttaatgtgtatttggttgtcatctttgcaggtgagaaaagttgaa

SEQ ID NO: 4525 - DNA, 2663 bp, Medicago truncatula
  Intron number 1 from transcript Medtr5g043990.1 (locus Med tr5g043990) derived from phytozome v7.0 (chr-ID MtChr5; po s 18215782 to 18218444)
tcttaatcttttgttctcagtaggtttagaactaacaatatctttccctaattcaattaatatagttatgtttgatattaaaaaaaaaaaaaactatattgcacttgaatgtgtaataaattggaatttagataatcttatattgaaacttttcacttaaaaaaaagtcattactataagtgaattttaatagtaatatttctcacataacttgttaaaagttccacatatttgatgagacaattcataaccttataagtcaattttgtaaaaagtaaagttaaatacttaaatgcaatagaaattctaatataatatcaaaatttattcaaaatctattagatcacatgctatcagatcatcgctgtctaaatgtccttgaacgtaagagactagatttagaatcaacatgttgaatgaaacaaactttgaatataaatttataacatgatgattatattgtctccatctcataaactgattttataaatatgagttagactcgatacatcgacgacatagtcatgaatgagagggaaaggtaccaaaattaggggaatagacttatgctgccgactccactaataaacacggcgtaattagctgaaatctcaaatacgttcacatagttcgcatgagacatgaagtcaatggaagaatattggcatatatcgacatggtattgtataggagattgtaactccaaatgtgtaatgtaaggaattggtacggatgaggataccctttctcttcacctatgtcccacacaattcccttaaacattctctctcacactcacacatgtgtgcaatagtacaactattctctatgatatttctttcatcactccaaaatattcattttatatttcttaattttttttttatatgcaacaaataaaatacacgggataaattatcattgactaaactaacctttatttacacgacaagttgtcctgtataaaaattgttcctgttaaaacgtttaaactatttataacatcatcacctcaattcaattttacaatgatattaaacacttatcaacttaaatgcacaggataaacagagattgaatacaatttcgtagataactgaaatacatcggataagtggtcattaactaaaatttcaaaagtaaaataaatgcacgagacaagttgtcgctaactaaactaactttgataaacgatatttataaaaaattgattttgctaaaatgtttcatgtcacctcacttcaattctataatgatattgaaccctcataaactaaaatacacgggataaatgaacattgactaatctttcagaagaaaaaaaatacacaagatatattatcattgactaaacttactttgatttacacaacaagttgtcctttataaaaattgttcatgctaaaacatttaaactatttataatatcatcacctcaattcaattataaaatgatgttaaactatttataatattacatgacaagttgtaaattttttttttttgagcaaaagttgtaatattataataaactgttggatattatttttaatatctatataaacttaaaatatacacacaatatctcattttccattatattcaaatattataacattgtttacgttttaagtttaacaaatttaaataaacttatgttatgtaaaaattgtattatattttaatgtgcattatcatattctgcaaaatgtaacaatcattatagagaaataactgcccatcacatgtaaagaagttatattaacattttcaaaacctaaaaaaaaatattacatcaaatttttaaataacaatatataacaaccattaaaaagaaaatcagattcttttaaacaacaaacggttactgtacccgtgcgtcagcacgggtatgttactagttcccttaaacattctctctcacactcacacatgtgtgcaatagtacaactgttctctatgatatttctttcatcactccaaaatattcattttatatttcttaaaaaaaataaaattatatgcaacaacacaaaataaaaacaaatggtggtactatttacaatattaattttctcatatttacaaaattatgcaattgtcttttatcataaaggtaaaggggggtttgatacatgcaaacaaagtgttccaaatctaatatccttatatgtaaaaaatgatttttttttgttcggatgctagaatccaaacatgtaaaaattgttatgaaccgtggctatataactgtgctaattttcttccttcttacatgatggtaaatcatgggaatggattctctcgattaaaatctcctcaattgttgcatcttaaccataaatttttttagagagaaaatgacaaatgaaattacaaggaaatgaaggactaaatttaataatttgagatacaacaaattaaaagaatttaaattgagagagtctattcccataaaacacgcttcatattttagaatccgagacattttttaaaaagcgatgaacgcgagagaggtgtgtatagagattttacaaagaggaatgttaatttgggctgttaaaagcccaaaaagcttataacccaacaagaaagaaaacgctaacctctttcttctctctcgcatcaaagttcaacactcgcttccgatctctctctctctctgc

SEQ ID NO: 4526 - DNA, 1809 bp, Medicago truncatula
  Intron number 3 from transcript AC233662_34.1 (locus AC233 662_34) derived from phytozome v7.0 (chr-ID AC233662; pos 163619 to 165427 reverse strand)
aaaggtttgtgtttgtgcatactactacattgattatggatttgctacattgaaaaactggtagagaaaatctatttttttcccccttcccttttagttccatatttgtggttttttatttgggagtgaattttctggtaatgaagagtgaaaggtagatgagttaaaagattatgtagagttcaaggactttgtccttcggccggtatattgtgctcctttagatagtgtatgccttgggatgtttgcaagagctgcatttgagtttttatcacagaatgatggacggtcactagttaatctgggtcaaattattcccaaatcctaagttattagataagaataattgaatggttttatgatttatatctttaatatatacaggattgataaaaatcataatattgattttgagacatctacataatttgaatgacaacgtctcaatatatatatatatatatatagaggatgtatctaatgagaatgccttttttatgtgagaatgatgagaatgattatgaacccttagattaaaattaactgaatgagattaaaaaccctcatttaatagcacatattcctctctccactctatcatttcttttaaacctagttacatttcggttcttcctcaccctttcgtcttcattagctcactcatttcctgcaacttacttgtctctagaatctatgaatttcatttgaattataaataatttttttacattcgatacctattttatgtgaatcttgttgttgactgttcatcttcaacttggggcaaacattccagcatatatccaatataccccctttgtcaaacctcattcagtttatgttttggaattcacagtgaaattcaacaagcatctatatccaattccatttttcaacagctttcttcatccaaagaaaacaagaaggggagaatcgaaatgtttatgatcagataatttcaactaccaacaccaataatgtttatgaccagatctcttattttaatttgttatgattaatgatataaacagggttttaattattgaaaatcaaaatctattctttttgcataacaaagtcatccctgactccttagtatgatttattttttattttttatggaatcatggaaaatagatgtgtaaagctaatgtttaagcagtatagaaagggtctatgaaactgttaataacaagtccaggtgaatgcaattgttttgcggacaattttcttattttcttttacaattagatttttttatcatcagatgtcaattcaagattaagaatatcaaataagaaaagaaaaccgccggagattgagagagatggccgccagagattaaggtggtcgccggaaagagagatgacggcatgagagaactgattgtggggggagagagaaagttgaatgggaaatgagaatgacacatgacaatagcacatgactcatttaagtgatgttttaatctcatccctttattttaatctgatggctgtaattcattctcatcattctcatataagaatgtcattctcatatgatatgtcctatatatatatatatatatatatattgttttgtaacagttgtctgattagtgttctcattgcacatgctaatattgctttgtcttatagaagccatgtttttcgttttttagcatttattttttttttttttcttttcatattgattgtcttcatatgaatggagtaaacgattgtaaaaactgcctccgcttatcaatctgttgatgcattctttgaccatgttttatatgccctactatttagaaaaaatctggag

SEQ ID NO: 4527 - DNA, 3727 bp, Medicago truncatula
  Intron number 1 from transcript Medtr6g038880.1 (locus Med tr6g038880) derived from phytozome v7.0 (chr-ID MtChr6; po s 8473205 to 8476931 reverse strand)
atcgtgttaagaagaaagctgatcgttactgtaaatagtaaaaaaaaatgtaagatttttttacctagtaatttgtgttaaaaaagtttaatcttaaatttaataattcagaattgtaactgaatttttttttatctgatttagttaaagctatgattttgatgaggttttaggtcatattatgtttgtgattgtgttttttttttttaagtaattttctgttacatttgttattttttatttctgatttctaattttccttgtttttaatattagatttataaatcagaattagattaaatttagctcaaattgattgtgtttatgtttttgatttagcttaaatttgtaaatcagagttagattaaattaaatttctaatttagctatgaattgagtgtgtttttaattttgctagagtttttgatccttatgaatatgatgaaatttttagttcaaactgtgctggtttattttcatttttaaattacagacactatgaaatgtttttctttttttaaaagttaacatgataaacaatcatatctacttcaatcacacttaatttattttagaaaaacatattatatagtctctaatttaaagaagaaaagtaatccctcccctctcttcccatcctaaaccctcaatccaaacacaccctaagttctaagtaacgaacatggtatcttcttaagctgtttctcataaaccacctttacaaacttttagttctttgtgtatgcaaatagctcttttcgtaagcttaagataaaaatcggtttgcataagttctcatacacattctcacaaaatttatgctagttatgaagctcaaataagctaatccaaataggcccttaaaagtgtctagtcaattagaaactctgaacatataaaatataggtttttaacattgaaatttctaaatggagtatgtaatgtgttatcctgcccaatgatgtataaataaacaattgaacggttacaggttttgttcacaacctgatctacacctctctctctctctctctctctctcttatctatctatctatctatcttcctctctctctctctctctattatttctctatctatccccctctctctgtatgaaggttgtgaatgaaacctgtgataaaagccgtggatgattctatataagctatgagatctgagggctatggatacaatctttttctgtttgtgtaattagaacggtgattctaaaatgtcaaattttcaattatgatcttgtttattttccattaaggttaattttttctttctggtaaggtttgtcatgatattgatcaaaatttagctcaaattatgcttgtttggtatacgatttctttgttttctagttgaaattatgatttgtttgtttggtaaattgagaactaagaatcagaacaaaaatcatgccaattgtttaagttgaaaattaaggtctatatactatagcgcttactgtgttaatagagtaaattgttggttctcctgcccaatgatgtatcaataaactattgaacggttacacagttttgttcacaacatgatctgcagttctctctctccctctctctctctctctctccctctctctctccctcttcccctctatcctcttctttgtctctccctctgtgattttgtgtgtgtgtgtgtgtttgtttggagaaatgcaagaaggttgtggatgaaacatgtgatgaaaactgtggatgattctttataagctatgagatctgagggctttgagtaccatctttttctctgtgttgttagaagggtattttttttactttttgctttactgttttttctagcaatgaactgttttaccttttgtttttctaaattcttaatttcaggtcaatagtttgagaattttctcttcaattttctttgccatgtttaaattttttatcttaactgtattgataatgatcgtacgtataattctaacaaatttgtagacgttttagttaatagcagttccttgctgtgcaaatacagatgctgcatcaatgaatgtttgcatgcaatatttcattacaacgtttatatcagctgttattttcatcggcagttgagttttgaactattgcctggtaaattgttttgcccattttatgtgtagttttttgttgcttttgtttttagtgaatgatgatatgcactgggctctgagcagttttaaactgcactatggatggaaatgcatagcctagaaagctttatctgacccattttcttcaaacttatttttatccattttttctaaattatttttgaactttttttttaatattcttcattatttttttatttcaaacagcttacttattgttgctgtttttaattttttctcttcacccattctgttatgctgaaatgtttggtcctttaaatgatttgatgctttcagataaattattaatttgttaggctttgcttgtgtggttcacatccatttactctatttaatgactgaataagaaaggagggaaattgaaaataacaattgtgaatcttttcttgcaattgagcggctctatgggttttgtttaaaacctgttctgcacctctctatctttttctctcaatccctgtgtgcgtgcgtgatctaccatgtgtgtgtgtgtgtctctggatttccgccttctgtttggataacaacttattaaggtgcaagatggttatgaattaaacttgtggataaacccgtagatgatttattaagctatgagatctgagggccttgcattaattttgtttttgtttttgttgtttattataatcccattgcttgtgttttaaatgagtaattaaccaaaacttgtagttattgtctatgctgtctcatatagttatagttatgagcttttttgctgtctgtttttctttttaaatttaaaacaatatgtagaagcgaaacagtagtttctgctcaaagaacttcaaattctgaaaactacttggtttgctacccaatgatggacaaatagactattgagaagctacatggttttgtttatagcctgacgtgcacctctctctctctctctctctctctctctctctctctctctctctatttgtctcggttactcactcactcactcattccattcattcatgatatttctcaaactaatctatactatatagaaagaaaatattcagctggtgtgcgaaggctgtgaatgaagccattgtcataagctgcatatgatttattcttagctatgagatctgagggtttttgttgcaatccaatatctcgcctcttattcttaacaacagtctaaatgtttctaatagttgtttttattttttagtgtactaattatggcacaagtttaatgactttttccttttgtttgtgtgttgtggttattgatttgtcttataattgcaacttttctatgagattgactttgttcctattgctaacaatgataagatatgctaatgctatgtttagttataaggaatactgttttgatgctctgatggagaactagacgagactattgaggggatatctggttttgtttacagccatattctccattatatctcacatttctaccttgcagatgatttatattttactattggcaacatatgtttcaattctggtagcattcttttgctaattttggttgggttgaatttgtcctcattgtttaacacttctgttattgcaggattag

SEQ ID NO: 4528 - DNA, 5356 bp, Medicago truncatula
  Intron number 3 from transcript Medtr5g006950.1 (locus Med tr5g006950) derived from phytozome v7.0 (chr-ID MtChr5; po s 898912 to 904267)
gctcatttgagggctaagataaggtctatttttttattttactgatgatgcaaaattcactctgagctatgttgatgaagatgccgagatggtgaatcttgtcgatgataatgaatttatgtgtgtgggaatggaatcttgccattggaattctctctaaagaaaactttgaacctgattttacaaaattacatgagttttgtactgttattaagattatttccgttgtctcatctatttgtatcttcaatcaatccataggtttctagttattgatagtctaaataaataaaatgatggaaacatgattaaaactcttatctggttattgggttaaactggtttcgaatgttagtacagacctatactccaaatgcaaagcactgcatagcagaatttttacctaagtctaaaattgcagcatttatcggaaggaaggtataaaattcatacgaatacttcaattgcctcctcatttctttgaaggaaacatcaatgtatccacaccttccaagttttcaactgctgtagcctaatgcaggaacttgaaaattgaaacaccatctgaaaaagctttgctttaaggagttcgggcctagcaacggggggttgagtatagccgaggatagacttccctattgcggcgaaccaaggtttatatcttagatgtgatgttcgacacacttcaaacaagattttttcccgttgaagaaactctttttttggccaaagtgtgtcgttaaacccttaaagaaacatatgaggaagaaaaaaaacctgggtctatccatgttttaattttcagtcaagatcccatcctttgctcaaaaggaaaggtcccatcctaaatccgacataaaatgacaacaggtgctcaatggacacctcaaaattgttcacttggttgaaaaaattgatcgaaaattattcgatcggaagcgaaattgagatgtctcttgagcaactttcttatttatttttggcctatctcccagcaatctctggcccataaacatttggaaactccatgatggccttgtccagcctatttgagagaattccaatctatctaccgtcgtggcaaaaacaaaaacaaaaaaacttgttggaaatttcatgcagaggcatcttggatcagtaagtggccagttagtggtagtgcttgattgattatgtttgtattgcactttcaaaatcttaacttggagtgtgtaaattgattttagactatgatgataaatagcagtacttgttttatattttggaataggaatatcaagattgtggcgtgtttaatatcggagcacaaactattaagagttttacaatggatgagataaaacccgacaatatatttataagtggtgacatcttaatcttaaaagttgattttgtagtagttgagttagacccaatataaattctaactccaaccatttaattcttttggtaaaaatagttcttttttaccacgagttgagttagttgagtctaagattatatctagtcacctatattttgtacttgcaccaacaaaatacctaaacaactaaacttcatgtaactatagcaagtgtgaactgtgaagtgaattattatgttgttgaactgtagtacctaccattaccctattgcccaatgacgcctttatgattttttacccaaaggcaacaaatttttaccctgttttggaaaagatgcacatatccagctagcacagataagtgaacaaatgatatggaaccaaagacatttattaatttgagctatcaagcttttgggggaaacttgaggacaacatgaattgatcaagaagatcatcattatacaattatatggtgaatgatttaccagcattggcagtatggtgcaaaatggaattactctaatgttacacttcttggcacaaccatgttgtcttaataattatgacaaactttttcaccttgtaatctaaatattatcacattagtgaggagccataaaccattagatttttatttacattttaaaaaatctaattaaaagaaaagataagtgatagatcattcctttaaccttaaatgaacttttaaaaaatgtgcttataataatacaagtgggatgtctacattagaggtatactctcttgttcaatttgattgggtgtgaataccttgctctttaatgcaaaagatagtgatggatgaggagagttttgtcatattttgaaaactaaaaaaaaaaggtacaccaaacccaaaatccattccattaggaaagtagaaaaaggagagacacaatgtagtctctctctctctctcacacaaagtagaaaaagcaagaaagaatcaaactagaagaatcaattgctgctcccattgactgcctcgaaaattttaccccgaattttataaggtggattaaacaggaagacataaagtaaaagcatgaagcagatcttcttgcacttcttttttgtattttattaacttttttctatcactttatatcaattaatttggggtaagatatatattaagatttttgtttttattatatatgtctcttaacatagtataaccttcctttgtttttatttagttttaaacatattggctataagtagggaaactaatgttatgattaagattgcaattataaaacaccaacatgtgttagtacgttatgaatgcaaatatggtcccaagttccaaccgtagaatgttgtctaaattatttgttcaattgtggtcagtgctatcctagcaatcaagatgcaatcgtcttcacaatcaatattcaatatgtcatatagtcttatatagtaacagttaacgcccctttgaaacatatcctagtataatgaatgagtgcttgtgttaatttcaaattctttttacatatatagcaaatggttatgcaagataccgtgtggttgattcaatctttacgtgaaaaatattgcagattcataatctatgcgttgaataacccaatagtgttgtcttaaaaaagaataaaataaatcaacagtgttcctcttgatactacttgatgatatataattggatttcattgctttttaattagcaaaataaaagtgtggtagcttcttaaagtgttcttaattagctagtataattgttctaccaaccatgactaggtttagcaaaagggtctaatctcccctattagcagtcaaaaagactactcatttaataatagatattgagtccaagagaattgctaacctagctacagctttggttacaacttacataccatcttaatttttatgatttaaacttttttaatcctaacctatgtaggcccatattattatatattattgaaaaatgttagtaagtatatacttaatttatgacaatctaattaaggacctcactcaacaagtgttttttcatatgcataggtaggaatgaactcaagattaatgcttaaaagacttgattatctatcaattgtgtctcaatattttaatgtaacatatacagtttaatataatataccgatgcttgttaggtctatgaaactttttaagtgacctaaaatatgacatttggagttaaataaacttataagaaagcaatataatatttaagattaaaaaaaattcaatttgttcccccacaatttttttctccggtcaattttttcatgacaaaaaataaactcaaattagttcatgacacttttatacataggataaattagtctctcttgtaattaattatgatctaatttgtcacccgtataaatatgttagatattagttttatagtttactttttatcaaaaactaaattggaacgggagaaaatttttaagaaccaaattgagtcttcgctctatatttaaaaagtcggatgagtgcgagggaggctaggccataagctccatccgacagtccaatctattttcatttctattttatttttattttttagaggaattttcatttctattataagtaacatacctttaatggtattttaacatgttttaaaatcaaattaatcagaaaaatttcacaaactttgtatctcaaccttagaatgatatgtcaaagaaaatgcttatccaagtaatcccatttcatgatatccttattgaatccaagaatgttggttccgcttagataccactgatgaagatgctatatcttgtaggttgtcaatacccaaatatggaagacacaattaaataaagactttacatatcctaaatcgtgggtccatttttctttttttgcttaaatttagaagatacacgcaattaccatgtgtggctcaaaactcttcagtattggctactatacaattctttcctttacgagtatattttgactattcaaatatatattcccattttttctttcctcgttgcctcaaatcattccaaagacccacacttaacgacgtataaacaacgtaaccatgttcttaaattctttcaaaaaggaaaagtataatgcatcatcatcaacactattccatgttggtaagcaacgaatagatcatattagagaaattagtgtgatcatgtcaacactaatagtctaatacaatctgaactctgcaataagtgtgtttaagagtagttttataaattaaaggtgatattcattaatagatacataatatattttaaatctaccaataagttgcgtcgaaataaaccaccaatacgattgatccaagtgataagagactcaatattaaacaaaaaaattcataattatagcttcaaatttaaaatatatttttttttaaaaaaactataacaaacagaggcatagatattaaaaaaaaaaaacatatcacttgcgtatagagaaacactgattagaaagaaatgattttttttgtaaggttgttattctaatattattcggtcacaaacatgaaagtctactcattactcatatctttgaaaacttcacaaggcaaatggggttctaattaattggccatgcatgcccatttgtgtgctttaatcctacttctttcaattcaaccatgttgcttttatcatgcatttatttcatcctccacaaaatatattcccactgatttgattagacctgttatttattttgtcctttccctaccactatcactgttcttgcatcagttgctgaaattatgaaattcaaattcaaaggttgttataaactcgttaataacctttgacctcagctagtgtttcaggcctcaatgtactgtacctagttcttttttttctttatgctatgtattattacttttttttttggtacaatgaatttattagtactatgacacaacacaatgtgttagaaaaagccacaatattctccttctccatttggtat

SEQ ID NO: 4529 - DNA, 1832 bp, Medicago truncatula
  Intron number 1 from transcript Medtr1g060270.1 (locus Med tr1g060270) derived from phytozome v7.0 (chr-ID MtChr1; po s 11904636 to 11906467 reverse strand)
tggtttaaggtatgtacacaatcctgttttataggtacatgtttgtctatattgtttacacactttcgatgtgggacaacttctgaactatcacaataataataatggaatgcacacatgcctcttccttcctctttaatcacttggccattggataacaaaacataactgttgccgccaaccatatgatactaacgttaaagtttatattaaatgatagaaagaaagagtttcattaactagttatcaaattttagataaggctcaagaaatctccattttcatttttgtagcaagtctgttaatatgtagatttcaagttcgtttatcttgtgagctggacataatagtaatacttaaaattaagtatgtcgaaaattacactaaatgcgtgtaaattggaagtctttcatcgtggatttatggctgcaaggttaagatgagatgttatagtttgaacctttttcattttaccatccttttcgtttttcaggtcgttgcagagagcttatctgaagaagaattagctggattaaaagaaatgttcaagatgatataatatggtcattgcagagatcatataatctggtcctcacatttccttcacaaattatatgaatggacgtagtgtaggtgtttgaaatctcaaatcgagtaggatatgcgctgtgcgcatacaacaggtttaaatcatgatcacgattcttgatattgtagagaattacgtccaattgtagctgatgtgaccccagatcaacgtgtggacctgtttgtgaaacccgagcgcatactaattgaaagcctatttttagctctataacagtttatggacaaagttaaaactgtgacattcaatgaggaggacaatgtgatctttgaacgaatgtattatttgttattagataattgtatgttaatgaatgttgtcatgcttaaattgattggttattttttttttttgcaaaacctatcacttatttgcagttttagatttaaagaatatttgaatcaatgcactcagaagattctccaatgtcaattgtcaagaaatagaagaggtactgaaacatttggcttgagttaattgtcaattactctcatggtttggccaattagattcattgtttgaattaaattttgggagtatcaactatcaactatcaatttggatttcaagttggcatatttcaagattcatgcttattggtaaaattgcttgatgacatgagagcttaatttaaagatctctaaagtaaaaaaacatttgagaacaaattatcaacatgactgaagccaatttcaattagggccggggcagcattggatagataaaaaaggtttattaatccattacaatccactattttattttaaaaagattatacttaaaacaaatgaaaaaattgacaataaaagttaaaaataaataaatgggcatgtctagtattagaccgaccaaatcaggctaaactagaaaatcatccatgttattattcagtaattgcaaacatcgaaattctaaatgactagaggcataaaaaaatgcatcaacttaaatcaagttaaaattttcaagtttacaaaactgaacaataactaatgattccaatatatatgaatatatcaagtgatctacattgtagttttataggtagatattcctgtgttgtttccacacttttgatgtgggactgataaacaacagaaatggtatacacgcctctggggagagaacaacgaaggagacttaacactttaatccgtttctgttcacattcgttacagtgcatggcttgtgtttgactattgcaggatttgcatacctagcagaa

SEQ ID NO: 4530 - DNA, 661 bp, Medicago truncatula
  Intron number 4 from transcript Medtr6g008710.1 (locus Med tr6g008710) derived from phytozome v7.0 (chr-ID MtChr6; po s 1225784 to 1226444)
actttgactcattctccatccattacattccttcggtacgtaattgaattgcaatttgaggatcattttgatcatactttttcaaatgttatctttaaattttcatgcttgtctgcacagaagtcatgtgattcaattgcttgaataatagtataatttgaagaaatagtggttccaccttgaattcgaattctgccaaatccatttgaaacagcaccatattaggctgaacatgccttaactttttgctgcttaatgagaaagttatggttaaccatttatgtagattaaggcataatttgcttgataagattgttttctattttattattgtaaaataatggtgtaatagatatttgatatattataaaccattatttacaattgaatagaaggcaagcaggtaacaagctgcgccgctagactttttccaatttgtgtttctagggattctgagatattataccaacattgcattattcaacttctgacaaaaaatgtaaacaatttttccatgcattcagtagacatattatacaatcaaatatcactagcaccaatttggattacaacttatgtttttacctcaacctctacaaataacatgtatttttctactgtttaaggaacacaacaaaggagcttctgatattgcaaacta

SEQ ID NO: 4531 - DNA, 4146 bp, Medicago truncatula
  Intron number 1 from transcript Medtr6g059110.1 (locus Med tr6g059110) derived from phytozome v7.0 (chr-ID MtChr6; po s 10519904 to 10524049)
tttctcaaagcaggtatggttgttatgaaaaaaaaaagtttttttttttttttttttttttttgcatttttgattgataccctttttgttttttgtgattttggaatgtgggtttgtgtttgttttgtcaatagaacctttttgcttttctgggttttttttcccagctgaatatgcggttaaggtttttttccttggtttttgtgtagtttatatgtgtcttttgtttctgtttatttatttagtttgttttatggccttttagtatatgtttggtgacaaaaattgattttgattgaattgattttaactaatagtgagttgaagataaagtaatttgtatttggttacattcatgtaattgaactataaatttatttgtaaaaatcagttatagaatcaaaagctacaaatcctaggtagaatcaattctttagacagaatcaattctaatcgaaagcaactaagcataccagaatcaattgtacaccttcaaaatcaattttggtccctttagcttgttgaaaaacatttttggtccttttagaagtggaaccgaagatacacatgatttatctgatttcaaggtcttagctttgttttgttttttgcaatgattgtttggttccacttttggaggagtcaaaattgattccagagatgtagaattgttttttgagatgtttggttcctctagagtagaaccaaacataaatcactttacccttaactctaactcaattttagccagaatcaatttttctcacagcagaacaaaacatataaaattgattttagttaaaattgagttgaatgtgaagtggtttatgcgttgatatgagttaaaaccagacacacaattagagttattatctttgtttttgctctccataccatgaacccaaacacacacttctgttttctgttgggactgctttaaattcttttgctgcatatgtaatcaaaagaggatgtgttgttctcaagttttcctctttcataattttctttttaactatagctttgatgatttaaagattggtattggtgggtgtgtttagagctatgaagcacggacatggacaccgacacaatacctatgattacactgaattatatcattttctcaaattattatcagtgttggtgtgtccgtgttgtgtccggtgtccatgtctgtgttcgtgcttcataggtttagagttctgcaatgttgctgtagcacgataatttgacaattttcaaaaagcaagtaaatactgaaatttgtcccgataaataaatgcagaggcttatttggtccctgagaaacataaaaatatattttgatccttaaaaagaaatatcaaatgtgagttgaattactcattttgacgatagattttttagggttattttactcctattatcatggactaatttgatcaacatttaacaattttaaagtccaaattggtatttttaaatttcatttctcagtaatcaaatagattattgttggggaccaatttgttatttagtcattcattttaatcttacatttttcaatgtctggtccacacttctgctgtgcctagcctcattagggctttacttagttttgagtagatataaattaaaaagtggttaggtgaaaaagagtgctgactgaaaattattttcaaccgtaattgaaaatgacttcattttattttcttccacctttttgacagatttttgttaacattcaaatcacgcaagtggtatgtggctttgacttaaaattttgtgcttataacattgaacaagtaaacgcagtagaccttcgtagcatagataatatcttttaaacaatgaattgattcaaatttcaatctgtaatacaactttttctcctttttactcaaatggtcaagcctagatttgagacttaccatatttttcatttattattcaagactaagttgttcattaagcttaagtttttcaaacaattttttctttagaattatttgtgattttaagtttttatttttcgtttagaagacttggctttctttttattttctgctgtgactccttatagttgattaaatgctaacaatttctgattttgagtttctttttcatgtttagtgtgtttggttccgctgtgacaaattgattttgaataatttgatttttgatgaaaggagtttaatttgaagctgtttatgtttggattcattcacgtaaagtgaattgaacataattttttacgtaaaaatcacgtattgacaacaacactgcaaatcctatacacatcatccaaatatgtaaaaatcaattgtatgtgtttggaatcacttttgctctccatacggttgggtcttctttttagttcttttggtgcatatttggttaaagaggatggatgtgtttgttcttcggtttttaaatcccccttttgttattgattaaggttttgatgattgaaggattgaaattggttgttgcttttacagttctgttatgtcgtatcttgatattgtcagttttaaagagtaaattacttacgttagtcctcacaaacaatgtggtggtttatctggtacatgagaaataaacgaataccattttggtccatgaaaatatgaaatatgagttaaacattttacgttagtcctcatattaaggatagtttttagggatattttagtgctattaccgtggactaaatttatccacattaaacatttttaaagaccaaattggtattttcatatctcagaaatcatataggtttttgttggggaccaatttcttatttggccttttattcaatcttccattttttcaatgttctggtccacacttctgctgtacctagcctcattaggctcagcttgattttgtatatgaagaaagtggttaaggtggaaaagagcgtcctttgaaaatcattttcaacaaccattcatttaatttatttttttcttctatattttttatgtaaaaattgttattcaaaacatgacaagtgttagtgactttgacttcaaattttgtgcgtaaaactttgaactagtcaaccaagtaggctcttgtagcataatatattgaaaatcatgaaatgattcaattgtcaatttgctatacaactttttcttcctctgactcaagcctagattttcagcctaacacaaaaatcacttttcttcagttcttctagtcaaattaagggttggatgctaaatcaaaatttgatcaaaacattcaaacatcaaaacttctcatcaaatcaatgcttaaacaaagtgaaaacgatttctgagctttcaaatggtggtattgaaacataccaaaaatcatgttaaaaaataagccactgtagtcattgcttcattgcttggtccctatttgtgaaatccaacctagtctaaaaattaggcctgttggaaagactacgaacatgaaattttcaaatttccacttattatccaagaccaagttgtccaataagctaaggttttcatccatttttatttggtatgagtcatttatgtttcttatataaggagtatttgtgtatgacaagtaaggggaaatatgtacatcttaaattttttatgtagattgttaagacctaatgtgcaggtatgtgttgtttgtcaatgtagtttttctcttcagaaattagtgttttgatatgataattttctcaatatagcctacgttcggtcccacgtttccttcttcattcttgcatccttttttcttgttcactatgattcctaaggtagcaaatttctgctttgaactagctgcactatgacatcttgattttgttaaaacctgaacaccttgacctccctttaagaaattatggacccccacctctcaaattttttatttttttaccattattgtcaaatattgaatatattgcaattagtagacatgactcatgcatgatttaaactaatgtttgcttgaaatgcatattctgcttggtaaaactcttttcaatcttacaaaaagtatcaaatatcaactgtccatttacatgaaaatcatggcaaggttaaaaattattctattgatttttctttttgttctatacttttgattattctatgattttatgtctttgttttccaatgttcctgtgatgtgtcttttatcagg

SEQ ID NO: 4532 - DNA, 1645 bp, Medicago truncatula
  Intron number 2 from transcript Medtr8g025010.1 (locus Med tr8g025010) derived from phytozome v7.0 (chr-ID MtChr8; po s 4847028 to 4848672 reverse strand)
cttggagacaacaggagtccacatccttaagaaaggtaatgcataaccttgttacctgtgtctcatattgtatccaaagtttctggtatagtcttttcaaaagatttgagttttgcgggataaaatttgagactggtttatttaaacaagtaggacatgtaggttgcattatcatattggacaaattagaaatcaataactcttatttatactaccattcaattcctaatagcaatctaatagtgaaatatggtaaaagatcatctgagatagttagatactctaaaaggctttgagatacaagggtggtgagaataggagcattttctagatattccaattccaatacatccctcaaactaaaactcagcgagcttttattaatgtcataatcaaacatatgctaaaataaaataaacaaaaaatataatgtaacggaaaacaacatcaggattagagatggggcatgagcgtcttggactagatttgtgacagggtcaggctgcatctttggcgaagacagtgatggtgtgagtcaacaacaaccaagctttatcccactaaaaacgggataagaaaaatcaacatttggtatgattgtcggtggactgttggctgacccatcaacttgtgaagataatgataacaaagtggagatgagcaaagatgaaaatttaataagatcctaaagatgcagctaaacgaataaacacctcccaaacccaaattaagtaaggaaaaggctggtttggacctgaaaacactggataagttaagagacaatcacaacacaacgaaaaccctttggaggtgtgaaccaagaagaagacgtcaaggttcatcacactggccacaatgaggtaagtgacggagaccttgggttgaaggagggcctcacatgctttctcacgcacagaagagttaaactgttctgtggtgcatgacagtgtgttgaagctttggcagtaatacaacttcaggactgggctgatttggatatgttatgttagagccgatgaagtagctacgagggaattagaggaacttattagaatatatgaaaacatcttataatagtttagaatatcttagtttatatcgtagaattatttcttatctttgctagaatatacaaaaatatcttataaaagtgcttatgagggtagatctgatacccatggttgtggaagagaatgagtagagcatactcttggtccaaaatttcaaaggcaggagtttgtttatgagaagaggattacagagataacatcattccaatagagttctagattctagggaactctaattgaatagtaagggaacatgtcatagagatggtactgttttgctatcatgttaagttatagatatgaggaaaagagagatcaatttctgaagaataatattcaatactgatctatgatgtgctaagcgaataaaaatttctaatcctgtttatactaatactagactctcgagtctttaccataatcaaataaggaaacaaatcatgaaatatagaaactactcccaaaagattgttgaagtcgttagatatatgatacaatactacaataatgacgttattaaatatttctagatattctaacaatatttccattttagatcccttttgttctcattg

SEQ ID NO: 4533 - DNA, 2483 bp, Medicago truncatula
  Intron number 25 from transcript Medtr3g040170.1 (locus Me dtr3g040170) derived from phytozome v7.0 (chr-ID MtChr3; p os 10935528 to 10938010)
tgaagattcattgttgtgtggtatgattaagagttatttcttgaacattggaaaatgaatatgttgttatgcgtctatttgattatatgattattttatggaatataatctaaacctcagtggttgtttggttgaccgccttcctatttgtgtaaatggatagacgacgtgcatgactgattttctcttattgcttgtgagttgcttgaggactagctttggagctatctctttttcttatgctcggggtctagtttagggctctgattagggtgtcagacttatgctatttattttatgtcttgctgagacttgttgctcattcatgtttgagatttgagattttatttggtgatgtatattgagacatggttattgagatttcattttgttgttgagatattttgtatgatgtttttccggtgcgaacttttataaacatagttttgtatgttttgagataattgaagaagtagcatctaaactcttttgaattatttccatgatttgttgcattaaggggtttatggtcttacactttatactaaaaaaaataaatcaacttttaattgactatatttgaatatactcattctcatgatctagatgtattacaatgttttgctttgtccagactaatgtgctttttcttattcaaataaaatattttcattacattcaacgcttcaacttaaaattttaaatatacttattctggtaatttatatttattagtgttttgttttgactagattaaggtcttttttcttaattaaagaatttttttctattatttgcaaatttgaacatgctaagaaatttaaaatagtatatatgtattggcacttgtgcattttgtaataaaatatataacttttaaataaataattattgatttttaatacaaagttgttttaacatatacaataaatattgcatatgttatacaaacccttaaaaacattgttgtctttcattcaatgcatcaatttaaataattgactacattagtagatatttatattaatgatttaatgtattgaagtgttttgttttgaccagactaatgtgatttttattatttaaagaaaatgttgccttacatttaatgatcaacttaaaatcttgaatatatttattatgaagatttagatgtattttttaataagatttagatatattagtgtgttttcttttgaccagattatgagattaatgtgttttttcttatttaaagaaatctttgtctttacatttagggagtgtttgtttctatagaaagattgtaatagggaaagaaagttaagggaaagaagcactttccttagtttggaacttacttaaaagactaaggaaagaaagaattttgtgggacccacattaaaaacctttcccctcatgtatgcacggaaagattgtggaaaggttgagaaacaccctatgttgcatgaaaagtccaaaacatccccaactcttgttacttttctttatttcactttttttttttactaacttatttatttcaatattcatttgtaatctctctctttttattttctcaattcattgcctaatattttttgttctgtctctgtgtcaatggcatgctgtgctcgcgatttttggatatcaaaccattaattgatttgaatcgtcaatctttgaactctcgatttttattcttgggaagggaaaaaatgagtaaaaacccttatcgagactttggattcgggggttggttatgcgaagggaaggtgctagcaccctaagcatctacggtattccgtaggaacctcttacctagattatcttgtgctaaaatacttgttcatttgaaaaattattgcctaaaatacttgttcatttgaaaaatacttgttttttgaaatttttttacatcaaaatactcctcttcccttcctctactcgaatccaagctcaaaatttcgaaaacatacaccaaaaatcctagatctacaaatgaaaatgtgaaatttttacctctttttccggtctcctcctttcctagcttgaatccggtccggccttccctcttctccggttcggtactgcttcttttccggttcgcctcctttcctagcttttttcagatccggttctctcctccctctcttgttacggttcggtccggttcggtttctttccgttccggttcggttttggtttgtttggaatgatgatgatttgtggttgtatgaatggtttgaggtgtttatgttgttattgtgtgtttctgaaaatgattgaggttcatgtgttcttgatatggttcatgtgagttcatgaaattttgggtttttgatccaaaattttggagagagaagtttggagattgtttgtgagtgtgattgctgttgactgactttttctgacgtgaatagtgttttttttctctgacccatttcccaatgattgactgtgtttttatagtgacaaactagggttggctctggtacaaacca

SEQ ID NO: 4534 - DNA, 2735 bp, Medicago truncatula
  Intron number 2 from transcript Medtr8g116470.1 (locus Med tr8g116470) derived from phytozome v7.0 (chr-ID MtChr8; po s 26395476 to 26398210 reverse strand)
tgttgaactagttcatgagagctcaatcttccactatatagtttttgctatggtatttcatttagggtatgtttggattgacttatttgagtatatctattagcatgaaaacgtgttagactattctagagagctagcttatggaaacaacttatgacatctccataagccgtttttagttaattttcataagttttctgtaatagctgcctatgtttggtttagcttctctaaaaccaaaattgcatcccaatgcacgtttggctgtgattttaggaagctacatttccttgcttccattttgacgtagaaacaaacaaccactatggaaacaacttttagcttatataaaaacagtttgactatattttggctccgtttggattgagcttatgaaaaataacttatgtaaataaataagcatttattttaatttataagctcttactagcgaaaattgtatcttcataaactattttttcataaactaccttaaaaatttataaataatacataaaaacttatttatttgcataagctgttttatataagctctaaaataagctaatccaaatgggccctttatcttttgttatagaaataacttatgtataagcacttatagagtaagagatgacttaagctgtttagtccccctccctacacacacctactgctcaatcgtatgctattaaacatagtttgactatatcttatcttgttatagaaatagcttatgtataagcacttatatagtaagagaggaattaagatatttagctcctctccctacacacatctacagctcaattgtatgctattatatactggatatttaatattgaaaaatccataaaaaaatatcctccttaggctctgtttgggagttacgaggggagggttttcaaaaaaagaaggaagaagtggaaagaatggagagatatgagagtggagggtttctggaggtttagttttcttcataatacaaaatccccttaatttggaggaacgaaaaaattgtattggaggaggagtttggagggttttgggggatttgggtgagtttttcaaatctaatctatattgttataatactttcaaagttaaaaatacattaatcataagtacttatttatcattctctacaaaactattctctcaatttttgaaagatttctctattttttcctctaaactcatccctccaaaaccctcccctccaaactctcaaacagagccttagggctttgtttggaggggaggggaagggaagactttgggggtggaaaataaagagggaaatggagaaatcttcacattttttgaaagagtatttttttagagaatgataaactaatggttatgattcatatatttttaatattaaaaatattataaccaaatagattaaatttgaaaaattcatataaaccccccaaaaccctcctccaatacaactttttagttcctccaaatgaggagggttttgtattattaagaaaaattaaccccccaaaaccctcccctcccaatgtactctatttcttccacttgttccttctttttttccaaaaccctcccctccctttccctccaaactcacaaacaaagccttagaaactgataagggaaggaaaatagaatacacaattcttctatttatatgtctaacagagcagtccctttatatttgccagaggcccaaaagccttatctgatgacttgatttgcaaactatattttccttaataattatggttacaaatcttgatcattctaactgtttagaattgtttggtgagtaatgtggctcatgctcaactcacaaagaaatcaacctcatcttattgacttatctaaataagtcaatatggaaccttgtgttcattgaatattttatattcagcgagttatgatcgggtttatatttaaaataaactattattactcaattattcacaaaatacacaactcccgacttccaatatatcgttgaggtacatgatatgtacctttgaaattaaaaaatataaaaatgcttgacataaacaatcaatgtgctatatggttactatttaaatgctgaatcaatacaaataacattttatatgaagtttagaaatgtaagaatatttttacttatagaaaatgatctcttgtgcatgtcgtgtgtgttctactgcttgtttggttcacataccaatgagttgaactaagaaaggtcaagcttggcacattcagcaaacctgttaaactttgtaaccattaccgatctgtacttgtcatttctgtttttcctagttttccaaaattgaaacatggatttctttcactcttgacattttttcctacactcttattattgagtgaaattcatgttggcataaaaggagttctagcatctctctctctcactcttaacattttttccaacactattattgagtgaaattcatggaagtctcatcactttgaaaacgggtcccaagtaatgtaacccacatgactttcatccaataagagagagatagaaagagaatgttagagtaagtattgttggtacttttcatcggcatagtatttgtagtattctatggttgaagattttttgttgcttatgtttaaaataatctttggcatatgagaaaatattgttttagaataagatgcctttgacctaatacaatataagttcctgttttccgcaggccgtgttgtatttttaggtccgggtg

SEQ ID NO: 4535 - DNA, 2892 bp, Medicago truncatula
  Intron number 3 from transcript Medtr2g127390.1 (locus Med tr2g127390) derived from phytozome v7.0 (chr-ID MtChr2; po s 31072150 to 31075041)
ggacttcaactcttggctttactattgtcgctcaggtatgcattgcaatttgcaagagtttaatttcataacacattatgatattataagcattcaataaaccattcatttgttcctatgagcatagtctagttaataagaacattggatccatagctctggctttaaacggggcccccacaagtgggcagtaggattggtcctctcggattaatcgattcttggatcggatacctgattttaaaaaaaataaaataattggataatatatgcagaatccagaattcaaaccttgaactccacattattttgttacatcacactttatgatcttaaacgcaacataaacacttttatgaataagctaatgtatgcaagatgaaaaataacaatctaaaaactgagagagaagagaatatagattattagtttgtaatatgatttcattgagtattgaatattcacatttcatgactttatttataggagttaaacgatagcttgtagcacaagtcatctacacaaaagtaactaactaacaaccgatttgcaacaacctctcttaactaacttgagacatgacaattatgaattaatcctcaacatatttcaccttataaatctaccatacgtccgttgagataatatttaaatagctaaatagatatgataaccagacacataattttagatacaaatacaacactaaggatatttttgtagtttttaataaaatgtaagggcagtgttggtttttcagcagaaacttctctctctcatcttcctcttttctcctttttctctattcctccgcacaacacaccaccatcctccacaacacaaccgtcctccaccaccatcttcttcaccggcgctccctccattctcaaccaccatcgtcctcacccaccatcaattcgttcaaagctttcctctctcacgccgccgtcagaaacatccgcttctccctcaagttgtgagaaacccgttcagatcaccacgacgtcaacgaagaccttcttgcaacactgcctacccaccatctcctcaagtcggtgaggaccagttcaaactacaagtgacgacgccggtgaggagcagatcggagaaagacgacgccgctgacgacactcgtggtcgtgagagagacatcgtacacgttgagagagggggggcgtgtgacggtgggagaggatggcagacaggcagagaaagagatgtgttgaaggagaaagaagaaaatgatttttttattttatttttaaatatgggtataaaggaacagttgatacgatatcagtattgtgtttggatttttatattcagttatcatttcttatagctaaacggttgagagtaataacctttatttggattatctaaatgttccaatccaatatccttgtcctttcaataacaataatagccaagtcaaactattcatcaataattattgatattaacttgattttgtcacattaattatttgcaggtattttattgttttatgttagagttaaatatgtttttggtccctataaatatatcaacttttcgttttagtccctttaaaaatttccttgaacttttagtccctataaaattttcaatcactacttttggtccctatttttaagtaaatttttgtattttttttaatgaaattgtgcagaaatttatggaatattataaaaatcactccaaaaaaaaattataattttttaacaatacatgaattaaatatgaatttttaccgtcaaaaatataaaaattcatatttaattcatgttttggtaaacaattctaattttgtttgggagaaatccttataatattatacatttttctgcaaagttttatttaaaaatatgaattatacatatgagtttactttaaacgagggaaaagtaaagattgaaaattttatagggactaaaagttgaaggaaaattttagagggactaaaacgaaaagtttgtatatttatagggaccacaaaaatatttaaccctttatgttattaacttagatattgtgagtttgttcatagattcgtttttttttcttcatttttaacgatattaaatttttgcttaattctattttacttgcaatttgaatgaatgatatcgtttctttttgtaaaaaaaaaaaatggtcatattttataggaaaatgctaactagtgcccccatcgcactagttaagtaattataaagtgttcgtcttttgaaaattgtgtattttactttttaaaacttgaaaaagtgttcttttaatgctaactttgtctttctttccatttttaattgtttaactagtatccgaagcattggttagtatgactctattttatattaataatagttatgtaatgaacaacttttgggttgtttataaatgagagagataatattctaaaagagagaataagctaaaactaaactaatctaacaaactaatttattcattcattcatttgatattgattacaataaccaacctattatttatagcataagtatttgaataatgactcatcacaaaaatgatctctttatatctttcaagaacaaggtgacgtatctattaaaatatctaatacaactaactcatcgtaatctttacctatttagactactttattatattgagcctatcttaggtcattatattccattgatcttgcacaaacaccttatcctcaatgtggtaattaaaaagcttacattatactcattcttcatagattaatttccacatttccactccatttaaactttgatgtttgacatactcagtccatgacaagttcataaatactttattatgtcaatatctaattgattaattaataatcaatcttttatttaataacatggtgtcctgcag

SEQ ID NO: 4536 - DNA, 650 bp, Medicago truncatula
  Intron number 5 from transcript Medtr7g081000.3 (locus Med tr7g081000) derived from phytozome v7.0 (chr-ID MtChr7; po s 17389178 to 17389827 reverse strand)
aggtattgcatatcaattatccaccatttcatttaaaatgttaacaaattcgacactctttttcttttctgtttatatgtataccggtcagttttaatttctttttaaaaagaaagaatagttaacggaagttgtaaatattttttgtaaattaaacgtagtttactatatggtgtctgattaggttcttaagttcagctctgcatcaagcttagtgtttaatcttctaatatttgtacttacatcattcaaacttacctagtttctttgttttactgatttttgtgttgccattagtcttaatacactggccaattttatcctgtttattgaaaatgtgtgattttttgttgtattaccatattggctcggaagtttgataaaaggaaagataataatttttctgcctatgaaatcatgactgttttaactgaaggattcaagttatggtagaatggttgtgtaatctcatttatctatcttagttatgaaaacatttgagttattagatttcctttttgtggttttgttttgtattcatatttcttatatttacaccaaataaattttgttgactttaaatatttgtagatgtgtgtacatatatgttagatatgaataatataaatgatttcaaaacaacttgcaga

SEQ ID NO: 4537 - DNA, 6861 bp, Medicago truncatula
  Intron number 1 from transcript Medtr5g094870.1 (locus Med tr5g094870) derived from phytozome v7.0 (chr-ID MtChr5; po s 37593493 to 37600353)
gtagtaggtaaggtgctgttttattttatcatcaaatattatttttattttttattttggtacatcatcaaatattgttattactaccaaaaaactatagactataggtatcattggattcatttttgagtgtgacagaaattgatttcagacatagaaaattgattttaactgtttttgtactggaaaatttattttgacttgtccaaaaaattagttattttcagaaataaattatatactgtagtttggagttgaaattttcttttttgtcttgaattgctttgtgagtggtgtgagtggaccatacatttaaccaaatctacaatgtggaactttgattgcagtgaaaaacctcattgagatgcaagaaagaccaggcaaacacatgcatgtctaaacatcacgttaatttttttcttagtatattttttttaggggttttcttagtattttttaaggtcacactaaacaatgttgttaaagtattagtaagataaaaaaagaaaaaatttagatgtattttggtaaatgttttttttatggtttttaactaaatttacactttttttggtttaataaactgagaaaactatgaataatttagttaagaatcataccaatagtatttaagaaaatgcacttaagtttagtccataaaaaaataaacactttatattgaaaaataatacaatttataaatttttaaaaaatttaaggttatgctaacgaatgctctaaagttaaatcagaaaaagaaaaaaaaaattacattgaaaaatacaatctataaacttttaaaagttcgttaccccactttataagataatatttcatttttatctttttagtttttatttcaagcaaacttattagcatttttttacaataaaattatggagtcacacaattttaactccagaccaaacccatggagtaaacaacaagtaaattgttatgtgcatagttttaaacactttatattgaaaaataatacaatttataaattttaaaaaaatttaaggtttctctcaaaaaaaaaaaattaaggttatgctaacgaatgttctaaagtcaaataaaaaatatataaattttacattgaaaaatacaatctgtaaacttttaaaaaattgttacaccactttataagataatatttcattttatctttttagtttttgtttcaaacttattagcatttttttacaataaaattatggagtcacacaattttaactccaggccaaacccatggagtaaacctcaagtaaattgttttacgtgaatgtagttaaagtaatgacttgccataactttatgatcaaattactttaataaaatcattgacaattactagtattagttacttcaaccgtaccaacattaaacaaaacaatctaaagacagacttttcaacggcatcactatttgttccgagatataaggcaaactatactagatttattattacctcaatgagttcgacctttgacttcggaattttttaaccatgtctttactttcatttttgtctttttaaccacctttgaccaatgcattccgatgcaaaagcgtgtaatactggacagggtctttacctagagacttcaaaaataaggaaagaagttaattattggtattaaagatgccactaatgttgcatcaagagaagccaaaatgctacagctattgattaacagaggtctagcattcttcattgctagaaatttaagtctccaagtcttgtatggaaaccatttaaaacgtgtttgatctgttaaaaaatagaagattagattgaacaatttttttttatatcttgttttatttagaaactgatctttgagactgaacaaaataggtaggtattaaggggctggagaaaaccaaaaattcttaaacctcactaaaccatatgacaagataaaaaataccaaaacaaacactttctctatctccccctctcactactctcgcatgacatctccctgtcttttatgtctctttcgtctctcttttatttctcttataccttctcaatctaatctctctcattcatctctttcataactttgtcttttattttttatttccctcttatgtctctagtatctctcttatttctccatttcatctctatcttctttcgctttattgtatctttcctctctttttctcctttcatctttattaatattgttgtccacgacaaagacaagtcacataaggtgcaatacaaagttatttgccatgtacatcaaccaacaaatacagtggagtataaaaagttgtcatgtatagttttgtattatgtgttgttcccgacacttactttttacgaatcaaacacattcttaatatcacttgattacgtaaatagtgttgtgggttcatgacaaaaagggaggatttgtggtatcattctctctaaaaaaaattgagagataagtttcccattttctatagattttgctatttcttctttttttcattcatcagaaaggggtgattttgggtcatttttttgcccaaaatgacctctttgcatcttccccctccctcctttaacctaaacaagtcgtttctatatagatttggtttttctcattagtttattgtcttagtgaagtcatgttttgctcgttatcttgacgcaacattttttaatttccatcttgttgtgttgtttgtttggtttagattgacatatcaacttcaatctattataaatttaattgatgatttgatcatcaacgtagtagatgtggagcatcgctttgattttgtcattttatttctaggtattttgtcataaatcggtattgataaaaaaataaaagtgtgtcttttaccctacttacaaattcatgtcctcaataaatcggtatcatctcgacgttcgatttccttatgagtcttaaaaacataccaaaccctacaccgaatattcagttcgatttatttatttaattttatctctccttcccttccccgacatacatttgaaccaatatgttggaaagaatcatggtaacggtcacaagcaaggtagttaaattgaagttgggtaaaattgaagttgaacccaaattaacatgtaataaattctctgaaatcaaacagaatcagggtaaattaactcgatttatccgagttaacatgtagtaaattctcttggtgatgttggttcttgctcaactccatatttactcccttttccctctactttgcaatcagccggtaccctaaatacatcataggtgacttaccaaccaatgaatataatgaacttaaattattttttggtagaaaatgaatgaactaaatatgtgacaagttctgatagggacgtaaaacagtacggcacatacatatactcatttcttaatttttctcaataatattcttaacatgatgattggaacatatcccctcactgtttgttaataatatcaagataagaaaatcatattcttattttcttttttgtaaaacaaaacagcttgtcaattttaggactagtatattgtttgtataaccagctaagacattgatgataatatgacatctgtgctagttattttatactaaattaatgattgagacgtgactaaatgttttattttgactttctggttttttaaatttgaaattgtatctttattcatcaacacaatatactttaaacaagatcaagaaaaaaaaattatatatactactaattaacttgtgtgctttctacgtataatatactgcagaatatatgtgtatttaatgtaacattgcagcatcacaagcaatggtacactagaccaagctttctccatttatcaagggaaaaaaagaaaaagaaaaactatgtttttttctctcttcctcttgtttttgtgttttgtgaattgagtcttacttgaacacaaccctaattaaaaaaatgtttgaacacacaaatgaaaaaaaagaaaatgtttaggattatgccagatatttctcttgttttatacttcaataattttatacaagtacctaactatcttttcaaacttttaaaatataaaataaaatatctctgaactttttttcttcagtggtgttggtgggttgcaattgcatcttatatggaccaatgaaacaaagttaacacaaattattattttcctaaccttttctagaagcattttcacaaagtgttccattttcatgtttttatttttcacaactttctcttcgttagaaattgtttcccctaataagtaataatggcatttgggtggtagaggtatgcatgatgcatcccactcctaaccttacatgaaacacataaaactaaattagttggctcaaataaaataaaaaaggtgtgcattattgatggtataaagtttttttttttgcaaattcttatgctgcaaaaaaagagaataattgatatctgaaaagatgctaaactcttttaatagatggttaaatcagtaccttactaaaagacaacatgaaaattacatggaacctattaactaacccttgggaattcatctagaagcaaccaatgtagataaagaggcccccctttagaaaacggacatattccacacttttggtatctctatatatactattttgattgatgcgttaatgaaattatttaaaaagatacttcaggtgaaaagaaaaagaatagaacctcacccacttgtgaaactcaaaatggttagaataaaattatatattatattgaaacaaggagtacattgtcattttgatagcttaaccaagatcatacgttgaattcagtcttaaatatacagtaacgttaaaattttggtagagattaatctctgcagttgtgcgtgcggtgcgaaggatattcggtttacagtttatacaaaaaaatatatgtattttgtcattttgattcttgaatatgtagattgatgtcgctataatctatgaatgcatcaaaattataaaataaaataaaataaaataaaataaaaatatgtattttgttagttaatttagtcatcttatatttcattggattgtgtaatatataaatgtgtcttctattagtcaatttaatcaataaaattaataataataaagacaaattgatacatatttttacaattttgatgcattacataactattgtaaaaaaattgtctcatacatttagagtaatgatatttagacaataatttttgtgaccatcttatttgtctctcttctcattggtaaaaaataataaagaggaaaaaaaaaggataagcataccatacaagtataagaaagaaagttgtctaaaaattatcataaaatagttgtacaaatatcttttctgtatgtatcaaatttactagaaaataatttaggtctaatatacagtaaccatctacatctaagatcgaatttaagctaagatgctgccactatcgatgaagagtcgttgttttgggaaagttgggctgcatgaaggatggtttacaatgtgacatgtcgaagttttcactttggccataaaaagtggatatggtaaatgtaggatgaccctacttcaactttgtttgtgttaaatttaaatttagatgcagtcatgaatccctcaaaaaaaaatgcagtcatgagtatatctctgctaagtggctacaataattgtcatagtgaaagtttactttcttttatctctcttgtccccatttttctttttagttattagataaacttcaagtacttcaataaagaaaaagaaattggcctaacatatgcatgttagatctacaagtgatgataaaaaaatttcctaaaaaaagttgatgcctaagtcaaactctctctaacattttaacattattgtacgcgtaaagttagattcaaaccgaaaaccttagttaagctagaagagaccatcgtcatctcacctaaacgctcttaaatatgttatatgatcatttgtcacgatgtaatttttcaattttttgaaactctcatgtagatgcaaaaatatagaattaaccctccaaaatctcttaatcaaaacatacctttaagtaattgagaagacactatgtccctttttgctcttatcacaagaagataagatatcacacaacccataaaattctgctactattctcttttctgtttttgtaggctaatgcaaatgcactactagaaagtcatatggccagctatgctgctgtcttccttcatatttaagacaaagcaaaacaaatgaaaagctgtggctagggatcctaattcttgcatagtgtgctacatcagattcagatcctatagtaacagccacaattttaatttaatttatgtttagtcaaataaataggcccttatagtttcatcactagtataaacaaaacatatataccaataagtcaattacttctttaagttattggtagctaagatttcaagtgattgagtttcatttttttaattctttagttttgttgagctaataagcaaactcccccatcaagaaaagggaaaaaatttcttcatatttttttaactttatatgtgctgaaaggtacctctaacgttggaccgaacacactatcgcaataaagtttaaagtaaagttatttatatttaaactttaatacaaaggaaaaatagtgcaagcttttcagccaaaatcaattttctttaatcaaatacaaatattttcactaatttaaacattgttgaaatcactcacatgtcatattcaaacattgttgaacatatctacatctatatcatgttatgttagtgaattaactgattgtgtttgtttgttgtgaaatgaaattttgattaaatgtctctatagtgtccaggtccttgcagtttcat

SEQ ID NO: 4538 - DNA, 4608 bp, Medicago truncatula
  Intron number 2 from transcript Medtr2g014300.1 (locus Med tr2g014300) derived from phytozome v7.0 (chr-ID MtChr2; po s 3590705 to 3595312 reverse strand)
aacgcattgattgtcctatcccttttacccctgaggtactattaattaattaaattaaataatttggattttattttattgtcctttttgttttttcccatgatgaaaaagttctaaaaagattgctttctcttttaaaattcgttaattgtttattgttttgcttatagtggttatattaccaatgtgttttctacttttgttagataaccatcatgtatcaaccaataaccactatgttttttgtgatatttaatattaaaataatatacatacttcgtcaatttccaacaaattacgaattaaaaatatactagttagtgtacaaaataaatcatgagttagtgtataaaaatatttttttattaatgattagtggtatggtaaagagaacataaaagaataggaaaaagagagggtattaagtaataaagtgtaataaagaaataaaatattaatgcgttattgttgaattggaaaaaaattattaaaataagattctagtcaagattttgccgcattcacacggttgacccatctgcgatcgttggattaagatcgaaaaattaatacaattttaaaataaaaatatatattaagttttgatttgaatcatcgtagcctgatccaacgacaaaaaatatgccaaatgcgtaactacgcaaacctttaagagcatggaaccctattctaaatttgttttggctagaataatataaacttttgagagcatggaaccctattctaaatttatttgggctagaatatgtgggacgaagtagtaattatctaaaaattattacaagaatcattacaaggatttttgtagattaaagaatcattacaaggattgatgataaagatttgtatttggtttatttatttaattaattgatttgagtaaacaatcaaattgattaatgtttttgtaaataacttacaattctgtatccatgagtttaactcagttggtagggacaaatacataatatatacaacgtctggggttcgaactccggccaccaaaaaaagaaaacaacttacaactcttaaattagttcatgactcttaaatttgtcatatgacaaaaacaaaaatttaattgaaaaacttttgacagagactaatttaaaatagggaaatattaacaacgtcaaagaataatttaaaaatagtctacacatggatcagtttaatggtttcataaaaaaaattcattgtgtgcttttccagttttttgtagtagtttttcttttttagggatttttttgtagtagtagttgatttcggcaatgtgacaatttaaaaattaatttgtttaagactttaacttttctttttagggtttaatgcaacttttctttttagggtttaatgcaatgttaacataaaataactacaaccagcaaatcacaactaattttttatgtaagactttagaaaatatataaaagttaaatatagctaatgattttctgatataatccattgacattgctaacataatttaccttacaaatctttacacgctttggtgagcttaactcacttgattggtcattctataacatatataaaggttagaattcgaattcaaattcaaaacatcctacttattcacttgaattgataaatttttagtcatcagactactaaaaaaacaaatctttgctcgtgcctatgtctaagaattaaatatgtttttgagaggaagaatataatatgttcacttagaaaaaaactaaatcctacttatttttaatctgcccgcaaagtcccggaagcttctgcgcaattatatatatatatattgaagcgtcacaaagtaagtcaaagacatatctttaaggtaatgcttacccttcatataaaggggtatgaaaggaaaccacctacatgaccttcaatatatatttttggttactcacgaccttcaatataaatataaaaaaaaaggatcaaaactaaaaggagatagccttaagaaaataaaccattcatattatctagttttttttgctttaaataattctttttacaagatacttttttataacatttgcttttaataattccgaggcatactttaatttttgacaatttttatggtacactttaaaattcgagtgttatggtgcactcaatttttaaattaatagttaaatgagttttttttttttttttaaattctataacaaattatgataattaaattttatttattgaaagtattggcgaaacaaaattttatttgtctgaattttttttagatgaatttttctgaatttattaatactcatagttgtaaatattgatttttttcacgatataatgtaaaaaaataagtattatttttataaacaatgaaacaatgttttcttgcataaatgatattttttaaaatataaaagtcaaccaatgactttttttcttttaaaaaaagtcaataaatagtgtttttttgtttgttaagtaatctagtggttataaatttatcttttaaaaattaataaatggggtcttcaggattgaaaccctaaccctgacgatgatgtctgtgcaactgagctaagcgggacaatgatctccttcaattttttttttttttgcataatcatcacaaggtagctattcctggcagtcctgtcctatacactaagcccgatttcttttgcttagaattgtttcaagggaaatgatagataagtgacaaaatttatcaagaaaatttttaaatagtatatttgctaacacctttctttaattacacatcattaccttctttgatttccgacaaataataaatttaattggttgagaccttttcttaacaaattcttaataaaaactttttaaataaatagcaatctcttattccaatcagtctacaaatgtttgtattgagaccgttttaagttaacaaaaattgtccccgttttaatcctaaacttatcatgttttatctctcttgtcaaagtatttatcctaattatttttttaaaagatatttatataaaatataaattgggttagaaattagaaatttgtagaatacgataagaaagtaacttattgatttattcctataaaaataatttaaaatataaaaaattgatttcaaaaaatatatttaattgttttgctagggtaatcttgttatttaaatatgatctatatcttatcattgtcatagataaaaacaaaaatttatatatttaaacctaaaaacgcagtaactaatttttttaatgacaaaagttagtagttgatcgttagattaatatttactccactgtatttaggaccccgacttcttaacctttaaaaaaaattgtaaataacgtaattatattttttataatgtactccctccatttctaaatatatgcaaaattgattttttagattcattcatttaatgatacatcattaaatgaatgaatctaaaaaatcaattttgcttatatttaagaactgagggagtatgtaccaaacatatgttaggataagtgtttatcatgtcactatcatatcattcttatcctacacaccgaacgggtctagtgaagatgcaacgtcagtgtaaaccaatttacacgtccgtccaatgaaaatccatcattcgacatgtcacctcactcttttaacttaatcttaaaataagtgcctatgaaatgacaaaataaaaacaatcatcgaatgttagtattataccacttttttttatcaagttgtctgatagttagactcacacattaagtgtgaagaagtgagaaatctaaggttcgaacctcaatctctatatatcaacgtccatggaacttaccaaccgagttgcaattacaggacgtatgaactagtttttactagatgtatatgtttttgttcttttttgattatatgtgtatgtcccttcatcctctattattttttttttttgaagaggctatattattaactaaactaaaagggattttagagtgacgaatcagtggacgccatgtgtcatatacagtaatgttggcatccacctggcaattgttattcacaggtgctgaccacttagttgaaatatgtcacaatgtctaatacaagatcacttgcacatggtcaattaggtggcacacttccttttgctttgtttgttctaatgataaatgataatgcccaacctctctgttataaaattggtaatcagaaatggaacatggcttagataaatcctagtaagcataggattaaaaacatgttttatttaataggtaaatttatttcaatggttaaaccttgtgttttgttgtcattcccaaaaacatatcaactaaaaaagaaaaatagaaaaaacaaatccaaacgacagcttaagttttttttgttgaaattgagcatgttttgttgatgatgcatatgctaaagtactgatgaattttattttgtttccaagttttggggtaagatatgacttatatactcaaatatgatgtgtatgattataatctcacttttctacaaaaataattgaaggaaagttagttggtgtccgttaattaaagtagagatattacttttgtaggtctgtaaagccaagtttgaagacttgcaacaacg

SEQ ID NO: 4539 - DNA, 4607 bp, Medicago truncatula
  Intron number 2 from transcript Medtr2g013770.1 (locus Med tr2g013770) derived from phytozome v7.0 (chr-ID MtChr2; po s 3208275 to 3212881 reverse strand)
aacgcattgattgtcctatcccttttacccctgaggtactattaattaattaaattaaataatttggattttattttattgtcctttttgttttttcccatgatgaaaaagttctaaaaagattgctttctcttttaaaattcgttaattgtttattgttttgcttatagtggttatattaccaatgtgttttctacttttgttagataaccatcatgtatcaaccaataaccactatgttttttgtgatatttaatattaaaataatatacatacttcgtcaatttccaacaaattacgaattaaaaatatactagttagtgtacaaaataaatcatgagttagtgtataaaaatatttttttattaatgattagtggtatggtaaagagaacataaaagaataggaaaaagagagggtattaagtaataaagtgtaataaagaaataaaatattaatgcgttattgttgaattggaaaaaaattattaaaataagattctagtcaagattttgccgcattcacacggttgacccatctgcgatcgttggattaagatcgaaaaattaatacaattttaaaataaaaatatatattaagttttgatttgaatcatcgtagcctgatccaacgacaaaaaatatgccaaatgcgtaactacgcaaacctttaagagcatggaaccctattctaaatttgttttggctagaataatataaacttttgagagcatggaaccctattctaaatttatttgggctagaatatgtgggacgaagtagtaattatctaaaaattattacaagaatcattacaaggatttttgtagattaaagaatcattacaaggattgatgataaagatttgtatttggtttatttatttaattaattgatttgagtaaacaatcaaattgattaatgtttttgtaaataacttacaattctgtatccatgagtttaactcagttggtagggacaaatacataatatatacaacgtctggggttcgaactccggccaccaaaaaaagaaaacaacttacaactcttaaattagttcatgactcttaaatttgtcatatgacaaaaacaaaaatttaattgaaaaacttttgacagagactaatttaaaatagggaaatattaacaacgtcaaagaataatttaaaaatagtctacacatggatcagtttaatggtttcataaaaaaaattcattgtgtgcttttccagttttttgtagtagtttttcttttttagggatttttttgtagtagtagttgatttcggcaatgtgacaatttaaaaattaatttgtttaagactttaacttttctttttagggtttaatgcaacttttctttttagggtttaatgcaatgttaacataaaataactacaaccagcaaatcacaactaattttttatgtaagactttagaaaatatataaaagttaaatatagctaatgattttctgatataatccattgacattgctaacataatttaccttacaaatctttacacgctttggtgagcttaactcacttgattggtcattctataacatatataaaggttagaattcgaattcaaattcaaaacatcctacttattcacttgaattgataaatttttagtcatcagactactaaaaaaacaaatctttgctcgtgcctatgtctaagaattaaatatgtttttgagaggaagaatataatatgttcacttagaaaaaaactaaatcctacttatttttaatctgcccgcaaagtcccggaagcttctgcgcaattatatatatatatattgaagcgtcacaaagtaagtcaaagacatatctttaaggtaatgcttacccttcatataaaggggtatgaaaggaaaccacctacatgaccttcaatatatatttttggttactcacgaccttcaatataaatataaaaaaaaaggatcaaaactaaaaggagatagccttaagaaaataaaccattcatattatctagttttttttgctttaaataattctttttacaagatacttttttataacatttgcttttaataattccgaggcatactttaatttttgacaatttttatggtacactttaaaattcgagtgttatggtgcactcaatttttaaattaatagttaaatgagtttttttttttttttaaattctataacaaattatgataattaaattttatttattgaaagtattggcgaaacaaaattttatttgtctgaattttttttagatgaatttttctgaatttattaatactcatagttgtaaatattgatttttttcacgatataatgtaaaaaaataagtattatttttataaacaatgaaacaatgttttcttgcataaatgatattttttaaaatataaaagtcaaccaatgactttttttcttttaaaaaaagtcaataaatagtgtttttttgtttgttaagtaatctagtggttataaatttatcttttaaaaattaataaatggggtcttcaggattgaaaccctaaccctgacgatgatgtctgtgcaactgagctaagcgggacaatgatctccttcaattttttttttttttgcataatcatcacaaggtagctattcctggcagtcctgtcctatacactaagcccgatttcttttgcttagaattgtttcaagggaaatgatagataagtgacaaaatttatcaagaaaatttttaaatagtatatttgctaacacctttctttaattacacatcattaccttctttgatttccgacaaataataaatttaattggttgagaccttttcttaacaaattcttaataaaaactttttaaataaatagcaatctcttattccaatcagtctacaaatgtttgtattgagaccgttttaagttaacaaaaattgtccccgttttaatcctaaacttatcatgttttatctctcttgtcaaagtatttatcctaattatttttttaaaagatatttatataaaatataaattgggttagaaattagaaatttgtagaatacgataagaaagtaacttattgatttattcctataaaaataatttaaaatataaaaaattgatttcaaaaaatatatttaattgttttgctagggtaatcttgttatttaaatatgatctatatcttatcattgtcatagataaaaacaaaaatttatatatttaaacctaaaaacgcagtaactaatttttttaatgacaaaagttagtagttgatcgttagattaatatttactccactgtatttaggaccccgacttcttaacctttaaaaaaaattgtaaataacgtaattatattttttataatgtactccctccatttctaaatatatgcaaaattgattttttagattcattcatttaatgatacatcattaaatgaatgaatactaaaaaatcaattttgcttatatttaagaactgagggagtatgtaccaaacatatgttaggataagtgtttatcatgtcactatcatatcattcttatcctacacaccgaacgggtctagtgaagatgcaacgtcagtgtaaaccaatttacacgtccgtccaatgaaaatccatcattcgacatgtcacctcactcttttaacttaatcttaaaataagtgcctatgaaatgacaaaataaaaacaatcatcgaatgttagtattataccacttttttttatcaagttgtctgatagttagactcacacattaagtgtgaagaagtgagaaatctaaggttcgaacctcaatctctatatatcaacgtccatggaacttaccaaccgagttgcaattacaggacgtatgaactagtttttactagatgtatatgtttttgttcttttttgattatatgtgtatgtcccttcatcctctattatttttttttttgaagaggctatattattaactaaactaaaagggattttagagtgacgaatcagtggacgccatgtgtcatatacagtaatgttggcatccacctggcaattgttattcacaggtgctgaccacttagttgaaatatgtcacaatgtctaatacaagatcacttgcacatggtcaattaggtggcacacttccttttgctttgtttgttctaatgataaatgataatgcccaacctctctgttataaaattggtaatcagaaatggaacatggcttagataaatcctagtaagcataggattaaaaacatgttttatttaataggtaaatttatttcaatggttaaaccttgtgttttgttgtcattcccaaaaacatatcaactaaaaaagaaaaatagaaaaaacaaatccaaacgacagcttaagttttttttgttgaaattgagcatgttttgttgatgatgcatatgctaaagtactgatgaattttattttgtttccaagttttggggtaagatatgacttatatactcaaatatgatgtgtatgattataatctcacttttctacaaaaataattgaaggaaagttagttggtgtccgttaattaaagtagagatattacttttgtaggtctgtaaagccaagtttgaagacttgcaacaacg

SEQ ID NO: 4540 - DNA, 332 bp, Medicago truncatula
  Intron number 1 from transcript Medtr8g016110.1 (locus Med tr8g016110) derived from phytozome v7.0 (chr-ID MtChr8; po s 3054604 to 3054935 reverse strand)
gagtcactgatttcatatatttttcttgaaacgtgatcgttgtttttcttttttatttgattctgcattcttattctgataaattctgaaagtgttcttaacttctgtaagcatcttggattaattgttctctgctaaattttaatcctgttttgacacactactttgggcagtcttcttgaactatagtgttctttattctacatttttaaaacaagtgaatggtgcactatttggtccattgattttttgttggtagtccttggtttgtacactatcgttttcttttcccctgtcaaatttaatttattttactgtttaatgttgtttag

SEQ ID NO: 4541 - DNA, 2434 bp, Medicago truncatula
  Intron number 3 from transcript Medtr5g040710.1 (locus Med tr5g040710) derived from phytozome v7.0 (chr-ID MtChr5; po s 17395246 to 17397679)
tttagttgaagagtgattttggtgaaatcatggtgacaccgagattttattaaactgcaagtatagttttatcaacatcataatgaaaaccatgattataccaaaatcactcattaattctaacatacactaaacttaattataaaagcattagaaagagtgatgctagtttttcaaacatgcacatagatgttttcaatttaattgtgttgatataggctttactatatgcctaagagattaatgttaagagaatgtgagttttgtagatcacaatatcaaaatagtatgtaagcctttgttgtaacattttttcccaagaacagttgagcttctaatgaaaaaaaattgttgtcaataaatgcaccatgctttgttaaggtagtgaaaccatgtgcttttctaaaatcatgttgcctattttttgggggcttgagcatcaatgtttcaatggtttatgaaaaataatagacatcttatgcttttctttgttgaaaaaaataaaaataattgaggcttatgatagtagaccttcaccaagattaaaggcattatgattggcatctaatataattgaggactataatagtcttaatcaatattggtcatgattgtgaggaagagtttttccacccataaggtcatacacgattcaagggattagtttatgtagttacacacatatgatatctggttcgcacaaaaaaaagattgttcatgattaaatatagacttaaatatatttttatccctataaaacttaaatatatttattacatcacccacaaattaaatctaaattaaacctaaaagacctatgtaaattaagttagtcgggcttgacatgtatatcagctatgtgaattttttttctcaccatcacacttctcaaagtaccctgatttgtctgaattttagaatttggacgtgtaaaaaggggttgtttttagaacctttttttacacgtttggattctaaatttgaacaaacgagagatctcttagaagtgtgggcccgtggaaagtgggaaaagaaattcacattttccataatctaaacttttatgttcccaatattttttttattatcaaaagtagttggtaaaaacaatctctttgcagttgtttttttaaaataaaaaaagaatttaacattataatgagttcttaaaagtttttttttaaaagataatagaataataaatatggtcaaaaacccttaaatatgacatgagtttttaaaagaatattttttttgaaagataaaagattaatgaatatgtgcaaaagcccttaaatatgactaaagtgattatatatacatcataagcaagatatataaatgagtgcatcataaggcaatcagctggcaatattcattctggtatagtgaaactgttggcatgtatatagttttgttttaagaatcttctcatggttttttgtaaaagttataagcgtttttttccttctcctaaaagctaagcttttaagaatcacttcatgcttttataacagccatgtatgcactacgcatgagtactcttaaccccttcacgtttcctacatgatccaaagaatgtatcgtaaagttgtattagagtttcacattgcgtatgtaaatgaacaattggatgtgtatatttacttagatgccctcattttatgactaacttttagaagtgagattcaagtctatttcatatactatacaaatccgattgaagattaacaagaagttagactcacaacccacactaagcgtgaatgagtgtattaaagttatattgaagttcacgttatcaagaatcatatagctttggatgtatatgtaattagacatcctcgttttatgtactaacttctaagagtgagatttaagtctgttttatatactataaaaatccgattaaagatgacaatgtagaagttagactcacaacccacactaaccgtgaaggaatgtattaaagttatattgaagttcaccttatcaagtttcaaagacaacctttccaaagtaagtttcatacaaaccatcattttcccatcctgtcaataatttattcacgcaatataacaaacacgccaataactaatgctttaatcacgtcatgtacaccccttcaccacgtgatattcacacgctccctcaccaaccttgaactctttctttctcacatatacaaaaaaaatctcaccacatcattcacgttgctaaccacattcacatgaccaatgttcactcccctcacaaatcatcacatataaacatccacccaacaatgttataaattgcgatatgcaaccacaactatatatagtcacaacattgattaatgtgttagtgtgacgtctatagttacatcggttgtatttgtctgtgattttctgtggcagatacatcggtgttgtgtggggcttgcaagcacttg

SEQ ID NO: 4542 - DNA, 2817 bp, Medicago truncatula
  Intron number 2 from transcript AC235671_3.1 (locus AC2356 71_3) derived from phytozome v7.0 (chr-ID AC235671; pos 14 367 to 17183 reverse strand)
acagcagtaagtactcagttaatttcattttcttttatgcttcatttcgattattatattataactccaagctacatacatcaatcctagaaacttgttgtctacattgatgcttttaccatgtgagtgtattatataattatgtttgataaccatattatattagttagttcagtcggctagttagtagtctgcggagttagaaaaggtaggatattacaatttatatagataatagaagagaagaaagttatttaggaattttgagagaaattatgggcctttgggatagggaggagcaaaccttaaagttatggaagtttgtagctgtatttaggggatactttccttattctttctaataaagtatcaggtttgtaatgaattcggagtggttctatcagttggaagtgaagttctacctacacgttttacattgaccttattattggataaattttattttggcttcactcaataacttaagccctctcttggttgaaaacctttataaaaatattaagggaaatgctaacaataacaagtgcccttagggcactaagggcacttgttaagaaatctaaagaggaaattttgtcttgggaatgatgcattcaacacattgaaagtttaaaaagtaactttttctacataaaacttataaattattttgtgtcagcaagtgtaatactgggttttctgtgtcagcaagtgtaatgtaaaaatgtatgatgcagtatatctgctttatcatcttacaattttgttgggtcaaaagattgaaaataacttaggagggctgctctcgctttatcgtcctatccatcgtttatgttgacttataactagcacatactccctcagtccctatttttaagaacctttggcactttatacacatattactaatttgtcttctaatagggttttataattagggacggagggagtagataaatatgtgatgtactgatgtttaccgtgctcaaatgttttagtccatcagtgggttgtacctttacataagctccattatgtgaatctatgcatcaaccatgcagaggaaacttcatgagatccatgacagtacttgatgggcattttgaagttcaatgatatcagtcttctccttgtcctcctgatccttttttattttttattttttggaattaaagatgttctaagcccgagattttgttaggattatagaataaagggaaatcagagtagttaatgtagttatgagttgttgatgaattcggcaggtcggaccagtggtgttgccaggaccctgtgtcagggggttcaaacttttagatttttttttttggtactacaaacttttgaactttaattaataatatgcaataaaattaatgtatattgaataaattatattgtattaaagataaagaaaagtgtatgtatatattctacatttgtttcatctcctatttgattactacacaacccaatcgtcacaatctgcatagcagaaaagacagtttaagtgagttgcctagtggtattggcttgggatctgggagtgtgctcctcctcaaggtctcaggttcgattccctctggtgccaatttgagggggttagtttagcttcttcaacaaaaaaaaaaagtttaagtgagttgtgagtaccaccaactcatcatgatcaagagagcactaccaatgtacttacaaattatccaccaacaaagttcttacaatggtaagtggtaacatgagttaaacttaggttattacaagatgtgaataaacttttagaccaattgacatcggcaattgtttcgtcgtttataatcatatcaatttaattttattagtaaaaaatttataattttaagtataagcaatgtcatattattatttaaattttaaagcaagcttatcaaattaatataaaatctttaaccaaaatcatgtatatatgtaataacttttcgaagatacaatcaaatgatgtgccagcctattggatatattacttttaacaagcaacaaattaacatgacatgggatccctcatttttgttctaataataataacaataatatgtcatgatagcacaattaactaaaacaaagtaacattgcaccacgttttaatggtacagaatgaaaaaacaggttcattgggaaatattgagggggttcaacatgtgaaaaagtagatttaaaggtgtaaagatttaaatccaggggattcatttgaatcccctcacataagagtggcggagtggctccgccactgggttggaccaattgttaggaacccaatatttgaatatcaaagaaagaacatgttatttaagaaataggatagagtgggagataatctctcctgcaagggtttcccattcacaacagagaatactctattaacaataacaatattcaaagatgatctctatcctttgtgttctcttatttatacacatactctctataacaacctcaactaactaacttctctagcaactcataactagttaactacttaaatttccctttattctataatcccaacagattttcttttctatcattagaaaaataatataaacatattcctgtgataataaagaagattacattacaaacttagggacgtggtaatgtaccagaaggtgcatccacaagttccagttctagtaaatcaggctcagttttttattttcttattctggatatttcctgcagttctattgtgattctattctagttcttttatagttgacatttttctatttctttgtgagaccagatcaaaccattgaaccattcacacgatttaccacc

SEQ ID NO: 4543 - DNA, 843 bp, Medicago truncatula
  Intron number 2 from transcript Medtr3g103330.1 (locus Med tr3g103330) derived from phytozome v7.0 (chr-ID MtChr3; po s 25414674 to 25415516 reverse strand)
caattgcgttagcgttaggtaaagcaggttgcaaggttagtcgttgaaaactgttagacataaactgataatgaaattattcaatattcatgtttatttctggtgaatttcgaattgtacgaatagattctagtagttacaaaaaatgaactcataattttcaaaacgattttgttaattttcctcttcatacgtagtaggctctatcgcaatttatgtaacttgttcccgaatcaccagcttctgcattgcgagttaaaaaatgtgtgttagagagtgtgttactattactcttttatttttggttgttataattgatcgtatttatgtttaaaactaaatatctaaagaatatgatcttgcggtaataatgaaatttctggtcatcttgttagaaatctagttctgttgttagttttttccccaaatttctgtcagaaattggcaatagttagaattccttgtaggtttgtagctctccttaggctcagtttggttgtcaattaaaataagatcaatttataatccttcatttccaaaaaagttctggttgatttataaatgttatagagatgttttttttggcaaattataatagagaagttaaactagagtttctgaaaaattgagaagtagaagccagcttaaattagaagttaataaaactcagttattacaaaattcttttgatattatttttacaagtggttttggagaaatttatcaaatccgtcttttagtccttgcaatgaaatcagagttgtctacattgctgtaaacgtaatgcttttggatcctgatgttcggttacatggacttaatattttcaggttttggtcaact

SEQ ID NO: 4544 - DNA, 3541 bp, Medicago truncatula
  Intron number 1 from transcript Medtr3g123100.1 (locus Med tr3g123100) derived from phytozome v7.0 (chr-ID MtChr3; po s 30785371 to 30788911)
caaaagtacttagcaacacctctctcgtttatctaactaatcaacgtttacttctgtctgcaaccattcccaatttgcaaaccgtgaattgcactccaattcacttcacttcccctcttccattccaaactctattatttcaaatctactcttacacatacacatgcatggagtgagtattatggagtaaccatgacgcttaagagcacatgaatatcgacacaaattttgttttcaccacatggaacagtacttctcttatacgtaccttccgcgtcttatacgctattgttctttattggtcactatgttgtactagaattttcgattacgatgatagattggttgtggtttccccaacctcactttggaaaggttttgaaaaatccgtttgagaattactatttagtataaataatataattcgaaaaatgcaaagaagtgttctataagattagttaaagaaataaatgtagtaacacactaagtttggagagtgttggagaagttgacacatgtgagagatgatgaacaaataaaccaaaacaataaacaatggcatgggatgcttgggacatgtgtgttcggtgttatgctatctattcttgtttgcaatggtccctctccctatcacctttgtcattttgctttgattccaaagctaccaccgccaaggaaacaccgactttgtaacctaaataaaacattttagttattttactttctagcttggattattcccttttgcctactctaattcaataatgtattgtggaactttgctttcccaaaaaaagaaggaccgtgtctatttatatcatctctacatatgggtttccacctcgttataattttttggttagaaataaagatggtggattcatgaatctcgatcgagggtccaattatacgtactcgtcgtgtattataaatattatttttttaagaaattataaatatgttgttactcattggacaaaatataaatatgttgttacgttgttacatggtaaaatttcagatgatgataacttatgaagaatcttttttttgtttacaaagtgttgtttctcattgaacattatcatagtttttttttacaaagtgttgtttctcattggacataatcatatatatgtaatatgtggctaataaatatgtagtttcttcagcaaaaaatcttttttcttcaaaatgttgtttatcaacatatggaagtattgtaaatctcgagtggatagcatggaagtattgttcatttaattcaacattaaggtttcaatacatgtaaggttgctcacacccttttttttttttttgaagaatttaatgaccacccatgtagagtgtgagcaatcttgtgttgcgtatctttagacgaattcagcatgagaactttgtaataaaaaaaaaacgacataaattttttaacggagataagtacatgtgcggaatagaactcagattataagaaaactcacggtgagggtggatcaatggaagaaatgctctctaaatggaggtgggggacgatgaaagaaagtgtctctgcaaacactctgatgcacaagtcaagtataaacttaatgtgcgtgataggttagattgaagcgtcactagtaaggttgtagcattgtgtttatatagacaattagtgtggtattggactgagaagtgatattaaacttggctctgcccaaaagtccagtctaaagtaacaccaaatttagatttatgaaagtgtgatattgatgctgtgagctaccatcctgcactctatctcaaaaatcacttttatcccactcgatagagaagttgcccattccataagaccttttttttgttaggataaaaaaataaacttgtgttgttcttggttaaaaagaatatgctaatcttgaaaataaaaatttgaggtttttcaagtaattttcatagttagattaccaagtcttcataaaaacagaatcatatataaatgtaattttatgtatttttttcgttacaaaatttttgaggtttggttgaattatgttctaaattgaggcgtccaaatcacaactgaaattgagtaccaacagctgtaaatgtgcactggcatttttcaccaaaataatgtgtaccaagtccaacggcatttgaaaataaaaaatgtgcattaacaagttgtgtttccaatttttagtttagtggacgatataaatacttcgaataatttatagtagaggtatataatctactaactatctttattaaaaaaaaaaaatctactaactatctatcaaaactcatactttatgaatttccaattttaccttcaaaagggacaatttgataaatccaataaacctttaaactttgggagagtgccacctcatcagtatttggtctatttatatgcagtattctcaatatttctctcccacattacacctatttcatcattcatagtacttggagagatatttaatccaaaaacactatttcagtttcttcttcatcacaggtaccgtttgtattttctgttttccttttgatttcgtgttaaagctttggttttcgctttttttttcttttttgattgtgattggatttcaaagaaaagattgttttgttgcatgtttgtcgaaagatgttttctttgcagaaagatacttttttgacctaaagatatcatctttcgttgtttggtgttgcaattccgattttgcattttggactttcttttcctgacctaaagaaatgcatgcatgtgaattttggtgattgaattttggaagatgcaaaagctttaaaacgcctgctatttttaatctctggtattatagttgatcctgggttggatgaatcataggtttttttccacatattcataaatttttagttttttttttactttgcagatcctgggtttttcatttatttgaatttattgttcaatttcacttcaaatatattattcgaaccaaacgaaattaagaaattgatttggaggtttttaatttacaagttgaattgcttctgaactgattcttaaaccaccatttaaaaaactgcttggttttatggtattgatttaacctgttcagaatctgattctttggtttctgaactaaatttaaccggcattttggtttctacttgaagaattcacaacctaagggtttcagaaaatcttctttgtttttatttcttattttcattttttattacaaaaatgccacgttgatttcacttgcctttaataacaacatttttaaattgcggtattttggtttctacttcctgtttcaatgttttagcaaatgaatgtgataaacacatgttcagtaaagaacaccgaaccaaatcagaattgttgatatacggtcggttgtcaacaagttcaagtcagaacatgttgaaatggtgattatggatgctcgggtttgcatctaaatatcactttttggttttgactttactcatcttatatgtctatgttaaactatttgtgaattatgcagagtgatacaattcaccttaagttgcctaaggaaat

SEQ ID NO: 4545 - DNA, 787 bp, Medicago truncatula
  Intron number 10 from transcript Medtr8g034530.1 (locus Me dtr8g034530) derived from phytozome v7.0 (chr-ID MtChr8; p os 7484700 to 7485486 reverse strand)
gatagtgaagctgtagacagattctgatcaatctcatagaatctggtacataaataatgcctaaggtgttattgaattttttttcttgatatttcaacatggctacttataaatgtatctgtagattccattttattccctcttaaataccctctggacctgatgttatatatattgttgttagaatccttaccagaatcgtgaaaaccgacgattttgcaatttcacccacccctaccaatccaaatcgtaaatagaatcttgatttcagtaatatatatgttattgttaatttttaataattactaattgtgaatcaatgcctaattttcgactagtaatcaaattttatatatttttttacagtctagcttaattttttgtttaaatactccaaaatgaagaaaaaaaaaataattttaataagctagtagtaaactacgaaattgctaggaccttgcggcttgagatttactttaaaattattgtagcaatgtcctagccaaatagttaggaaacttaaattttgaatggtatattgctaggcattagtttggaaagagctaggaatttataaatattagatgccacttagctaggaaatattaggctaggtaattttccgcccaatccaggctacggctagtatgacagctgattcccaactaaatagtagctaaatgagttttgctaggaattagctacgtgttaacgaccattagtttcgtagcaaattttatattttcttgtagtgggttaggaatttggtttggcgagcctgttgcaa

SEQ ID NO: 4546 - DNA, 1058 bp, Medicago truncatula
  Intron number 3 from transcript Medtr1g081140.2 (locus Med tr1g081140) derived from phytozome v7.0 (chr-ID MtChr1; po s 16008152 to 16009209 reverse strand)
cctgctattacttttatattggcttccattgttaggtaactaagtattatttttttcgatttaaaaattataccatctatctatgtaaatgacttttttttttgaagaggaaaaaaaacgaaatagattaaaaaaaccccttaagctcaaggtgtgcctaaaaggaagcagagcaagtacatattacaggcaaagctaaaaacaataccaaaaactaaagcaagattttataagggagtataaccaatacaaaccagatgattagaccaccatgagttgaagtcgtaaaaaagttaggaatgtgcgtctccaaccaccaccaagaataatgttgaatacgatctagtaactagtctaacgataattctttgttgttgaaaatacgagtattacgctccttccaaatacatcatatatcagctaactagaccactttaagacaaaacttttgatatccttcttgaactcgtggtaaccgccaaattgcaaacccatcactaaaattcaataaaaatctattattttaccctaaaatacataaaaataggcactactggcaccctaaaaatagggtagtggtattatattttttaaatacataaaaatcaaaataaattgcaaactaatgcacatgattttttcaaaaataaaattaaaaatgcacttcatattgttcctatctgttcgttgtttttcatcggtacgtagtgttgttgtaccatcaaactttttcctaaatgattagcttagttaaacattctctcaaagtggtctaataaaattggaaattatccgttatcttagtaagtagaagatatgtaaaatgtgtctacattgatgccgtacatattttgaataaaaaattgtacttgtaaaaaatagatatcctagcaagtacatttctaattaaacatgataacatatgttattatttttatcacgtgttaatataggggcagtaaaaatcaatgagaaactttatctaccaaaaagaaatgaagaatttaatttgttattctttctttgtgctcagacttgagaagataaagataaaaagt

SEQ ID NO: 4547 - DNA, 3899 bp, Medicago truncatula
  Intron number 1 from transcript Medtr1g028650.1 (locus Med tr1g028650) derived from phytozome v7.0 (chr-ID MtChr1; po s 7043724 to 7047622 reverse strand)
aaacagaagtatgaacacgcgcatgcttcttttttcattaaagatttgccttttccacaacttttaatcacaaccattgattttattttttccacatgttacacatctatgacttgaaatggagtaaattgaggaaacataaatggagcaaagatggactcatatttttaatgaacataaaacttttacaataaacaaattaattttttttcaaaacattgaactatttctttaaagataattgaaagacttagttttgaacaataaatttttttaattgttttttaattatatttgcaaatatttttataaaaaaaactagattaatatttttttcttcaaacttttgaattgtttttaaaaatgataaaaagtattaatgtaatacaataaatttattaatgacttttttaatttatttttcaaagacaaattttaattataacaattatattttcttgaactttgtgttaggatgatgttcaaacacaccttcatggagaaaaacaagtttcccttttttagtttgaactttgaatattttatcatatatcagtggcaataaattcagtagtccatgatgatcatccgtaaagtagcgtatccattctaaccggcacgacaccttgtacctaccaattgaagaatcaatgaataactttctttgcattagaaaaagaattacaagtcaaattaaagttctgcagaaatttaaaaactacgacttgaagttattcaccactattttttttagaccgctagctaatgttagtatttcttttgttggtaatagctaaggttagtaattaattattaatatttttatgcaaaaatggactaaagtgtatatagtaattaaactaacctctaaataagggtggcaaaactggttgaatccaaccagcttaacccatctaacctgttattttaggtggaaaattgagattttgaacctatcaatcgagcagtggctgagtggagagggttgaccaactagattagttcaaactaatctttgttttttcaattatttgttagctctttagcacattttctagttatagcccaatataaattaagagttttattgtttttgcaacaattattgaattaatatgttcaatttttttgttgtaataatcgatcaacacgtcaatttgtcaaactcgtcaattgacaaggtgagaagttcagtccagcttcctaaatcgaactatcatactttaaacatgttgaaggcaggatgaaccataagaagttgaagtgcgtgaattttagtaacataagataagataagatagaatgagctaaagtgtaattaaaaaaaaactcttttaggaggggaatataatttaactttttctaacacaaaataatttgcatatagcctacataatacatatatagacaagctaatcacctatatgtagtattttagtttgacgcgttaactagaaaattatatccatcatacaagcttttaagttattcataaaagctaacatacgtatgaattcattcttttctttcttgaggaaaaaagtccaagaaaatatatccaattcatcacctataaaaagtacatcaattggacacatttaactctaacacactagctagctactataaaaaaaactactacgtgtatacatttacctaacctttcttccacttttgaaaaatcttttcttctcttgagaaaaaaggaaaagaaaagccaaaataaggatataccataaatatggcctatgattaagtcacatgggagcaaaatcttaaaaccccacaagacaagggtatcatgaacctacaagagaacagacacccatatagaagataaaatttgtcgtgtgggaatcataaaaaaagagaattaaattaaacattagtgtagtgggtatgtatggacatatgctacacgagtgagaaaatatgggtcaacagcacatgcaaacaaagaaagtgtgatgcacaaatggggtacgaatcttctaccagctagcacaaacattacccgggaaaaatgattcaaagataaaatgatgatgatgattatttttactgtttttatacaacaattttttttttaattatttgtattgttgaatttttaagatatattttttagagatggtaaaacaagaaaatcatgttcaatacaagtttaaaaatagaccaaattgtcatgttcaactggttgaattaattatgaactgattaattcattattgtattgtaatatgattaaattagattgaggtaaagttgaataaggatttgattcaaaactcacaatgatgtgttttcaaatttcacagccaatatgaaaatctagttggtcattattgattatatgtagtaggtacctttatatcttagcatttttatttccctggtggcccaacaaacctaactcatctaaaataattataaatagttaatatatctttgacaaaatattagttttttttttgaccaaatattagttaaaacctataattttttacagaagttaaatatttgcatgtacttattgtaaagtttttaattaagaagtatatgtcaaactattgtgacatcatttaagtatattgaaagggtgacttttaaggtgcagaagtgattaattttgtgtacacgtatacaaatactcattgtaccactgatttaatagtttaaaactcaatgacttaggtttacaaagcctactagcttgcttaaaaaaaagaaacaactaacgagtctctaagaaaacgaaacaaccatatccataaaaaacacattgcattgaaaatatcatatatatattttttgttgagacactattgttccgaatatgtaaaatctacttttaactaagagcatttagatgaaataataagggatttcttacggcttgataagagatcttgaagttgaattcagatcttgaaatataatagtgtaaattatctttataaagagctttgctatctattatttacggtcatatccgacgcgagagattaatctttatagtaacatatataacatacccgattaacatgaaaataaaaacaagactatttttttatcttcacattttaataaatcaatattttttacatagaaattacggtgatatttaataaatcaatattttttacataggaattacgatgataagaaggtcattcatgagtttaatttccccgtttaataaaaataactaactacaaaattggctaatttgaacaaaaataacacttcctcttttgagccatctcatttctcaccatctatcaagacatgattagattttctcaccatctatcaagacatgattagattttatttgtattattcttttaatttaatatttctttcacatgtgcttttgacaaaaaaaaacccaaaatgactattttttagatttttggagatattggagcaacggcccatttacattattatgttataatttccctaaagaaaaagctcattcaaacttcaaagtaaagacagtgtcgaagcaccacataaattaaatttgttcaggaaaaaaaggtacaccatgtagttctaaatggatttataaaaaaatagaataaaaagaggtccccataagaaagttaaaattttcataccctacatctgttctcatttaatactatactaactattcattgtggccttaaatataaaaatactaaggtgtaaatggaccaaaaatctaaaaaatagtcattttagatttatatatctccaaaaatatataaatgtcagttgaatcaattttgtttaactaaaagtaattaaatgaggcaatatatcatactcttcctctccctctccaataagccggccctaattttctctctctaggttttctcttcccgtttcttcattggggggtggtt

SEQ ID NO: 4548 - DNA, 838 bp, Medicago truncatula
  Intron number 1 from transcript Medtr5g099420.1 (locus Med tr5g099420) derived from phytozome v7.0 (chr-ID MtChr5; po s 39751467 to 39752304 reverse strand)
tgttgggtctgtttcaaatctgcaatttctaacatgtgagtaagatacccaaaatctattttaatctttttctttatggatctataatgtgtttggttttagtattatatgaatgtgaagggtaattctgttgaattcaaagttaattcctttttccatcttgaatgtggatagtgttttggatttgattctgtttcatgatgtgtggttttgctgagatatcatgattcacagtttaatggttaaacttaaactatttgacctgcattgattttactaatgagatcaatttgaaccaagttttggtcattcttgagaagaaatgtttctttgtttgtattcctaaaatttctcgaagctaattggggatttactattttggactacttttcaaaattggtgttattctgttgttcaattgaacttgaagctatgtttcttatgttgttcaactaaactaccaattagttttttaagaaaattattactttacatttcaaaacattgcgtgtcttaggtgtggctcatagtttactcatacgcgggtaagtcgctcgagctgacgagtatttatacacaagctgtaatatgtaaaccctaagcttgaataatagaaagatattgtaaccactctgcggttggagacataggcacaatcgaccgaactctctgatcaatcatgtgtgtttttcatgtatgtttgcttttgaactagaattgctattctaactgggtgacacttatgtgcaacagatagttgattaaatctgcaaggagtttccatctcaaagactagaatatttggaccattaattggagaaaataggatcataggaac

SEQ ID NO: 4549 - DNA, 3852 bp, Medicago truncatula
  Intron number 2 from transcript Medtr4g047310.1 (locus Med tr4g047310) derived from phytozome v7.0 (chr-ID MtChr4; po s 10966545 to 10970396)
ttctttccaaacactcaccaccttctgccttcaaggtgcgtagatatagatatagatatagatcaacacatgcactattattatgattaacacataaataattaatcttactagttactataatattaagatttgaaactgagttttgtgcatctctatttgcctacttagtcttatttaaatttaaatagactatggaaatatgcaacgttttttttattattgaagaaacaagatacatttctaatttttgtgctgtactgaagaatattgattaatttattggcatctcataagaactgtgttatttaagtgatggtccagtggtttttatggccactggaccaatacctaaccctaccttcccagtttgtataatgttcagttcggattggactaaggagtttgggaaactcaccaggaaatggaatcttttttttctttcaactgtggctgtaattaattcattgagtttatttttttgattatgttatgtaacatagtaattgcaattttttttcatgcaagggtataataattggtgttgagattgagaaggtttctgtattaactagaactgttcacatctttatgtaaactacatatgtgtaaggtctaccaataaatcttgattggtatgttttttatatgcaaaaattgaattataaaattggacaacaggtacacaactaatcacttatgtggtttggagacacactaacggatcatatggacagtacaccaaacattgtctcacatttttgagttttttgaattgtgaaacattatgattaaagaaagagtcttgttaaccattacccttaggacaatggttaaggaatttacaaataaaatttttgtctttgaaatataaaatgttacttttgattaagtaatgattacataattttttcataaaaatttatttattttggatgtttaaccaatgtctttgggacactgattatcgttgtccttcaaaaaattgttaactctatgcataaatgtccatccacacgtgatatgaaaaatggatgagtaaagaacaatgaccacaatgtttaacatttttttgtgacatccacaatgtctaactgatgaaaaacatgaaaaacagaatttaggtatcctagttattggactaaaaataattttaaataaattatgttatcttgctaatattttatacaagtttgtttaatcaagacaacacttacctctgatccatgtaaacaattctacttaatgagatatgacttgatttgattgttgtttaattaagccaacacttaccctatttttttcgtctttttttttttaatatatatttttagaagttttgttttattttttaaaaaaatgaagttttaattttttataaattacttttttcttgcaagtgatcattttaaaaaggtcgttaaagttattttgaaaatataaaacctaataggtccttagtctctaaacttttaatttttaagcgtttaattttttttactttcaggttacaaagttaaaattttaccattgagttagcaccacaattgtcatccaatttaaactcttttacaatacttttaaattttcataggttgtctaaggtgcacaagtaccatactcatgcactatagaaaagtatatttttcacgcttagactaataagtctcaacaatccccgtgagcttattagctcaattggtagggatatcacattatatgtaggggtagagttcgaaccccgaatactccatttctccacaatttaattgtgtgagctctaaccactagactaattgacaaaaaaaattaaaaaaaataagtctcaacatatatcatttgcggcatattcattcaatgataaaaactaacttgtacaccatataattagccagtttcatatttaaattcataacatttgtgtacatgcttgtgcactaaaaaataatattaatgttctcttaaaaaaacagaaactatgatataatttctctcttcaaattctataatcacatcctacaaggtcctctattttttatcaaaatttaactaaactttcaacttccgaagtcttaaataatattttctatacgaaattaatcataaccctcaaatttttttgacaaaacaaagcagttaacgtaacaagaagttaatagcaagatcctctatttttttaaataatgattgactatattttcaaattgacactaattctctttggatcatgcatcttcaatttttctgttgtaagatttaatatttttccaaaatgcttcattttgtccctttcaaaatcaaaactaaacataatatttttttgaagaggaaaactaaacataatattgtctaccacaatgtcaatgggtttgatattagttatattatggtatgattttatggcaacaatgaaatattactgtgaatgaatcataatttgttccagattattgggtacataatacttgtcccattaccaagttttttttgtcttagatgaagtagtaatctactgaaattaaactcataaggtcccggatttgaatccgaatcacgacgtccggccttgcaatttcggcatttgtcattgccggttgagctagaactcctaaaaaagatctagtggccaaaatatcacatactaaatatagtaaaatgcagaatttcaaacttgcgattaaacatgtcaaatatccatccatacacatccacttcagtatttttttatttatctagctgaggtccatgttcatggtttactaatgttgtgtgttgcaggatgttatactgcacccaaacccatgatattaactaaattatcatattcttattagatcttaggcttaactaaattttgatcctcgtattttcaaccactcatggattttatctccttattttcaaatcaacccattttggccccttccactaatttatgaactaaaaaagatgatgcgacatattttgaatgatgtgatatacaacctgatgaaatggaatgatcaatatcgacgaacttgtaagaaaactcttcaaaacttcaaattcaactttagaaattattcatttttgtaatttaattaatgacatgtaaataatttatcaattgaaggattctgcatcattagatcgtatgttagtctaaaaatttgagcaatggatcaaaattggttaattttaaatagaaagaccaattccacgatgtggtaaaaataggggataaaaaaacctagatttaatcattactgatttgtttttttaccataaattaataatgaaaaaatgaatcttatagagatagcaatacttattataacactttattttccacaattactttcttatttttttttttttttgcacacttactattttattgatgaaattcataggagactcactaaaaactctctctttctaatactctatctaaacatccttatcttatttggtaaaattcttatgagtccaccactatatgtgggactcatagtcatttccaaaatgacccacaataatgtgttagaaagatagtgttaagcattcttatcaattacacttcactttggaggcatcaagagaaggacacaaataaactattttattttgaaatttcattcctatctcaattacataaaatacataatctcaaaatacataaacattcataatgtctttaggtgtttgcctaggtcaaagattcctattatgttggattcgcaaatacaaaattaactataaaaatataaataaattttaatatggttaattaattttttagtccatcctgttattaatcaagttttatattgaccagggtgtgagcaaggaagaagaagaatcattgcttgg

SEQ ID NO: 4550 - DNA, 2086 bp, Medicago truncatula
  Intron number 1 from transcript Medtr3g067700.1 (locus Med tr3g067700) derived from phytozome v7.0 (chr-ID MtChr3; po s 15595904 to 15597989)
tttctaagcttaaagaagcaagatttggccaaaaggttgaaaatatttgatccaattttgctggtatagaaccaacttcttattcttaattatgtgtaatggtttacaataatttgattgctaatagtaccctttttcttgtgcagcctatgctagttgctttcaattatagtaattagtagtagttaatcaatatgaatgtattgaacttagggttatattatagacaatggaaataataaagtgaatgaagcaaattatggatttgtagtgatgaagaacatgtgcatcataaagtatttcactttcctgttagtggactagcataatttaagcactgtttaatgaaatcaaagactagttctttgaaggtgatgaaaattgatggtgagtgaagcttgcttcggtagtttttaatgaaattttttgaacatgaacatgtgcagattcaaaaagtttttcattttttatttatacttttctgttgcagaaatccttgatatgatacttagtagcagtctatcaatcctccaatatttaaagaatatataatgaggtaaaggaaaaataatgatgaagtgaatataatcttagcaattttgaaattaaagccaatctctgtgtatcaacacttgaagtgaagcagtacctttcctgatttcatcatgataagtaattaatggagatttcatatcataagattgtggttatttatctttagtagtattgaaatttagtgctaactcactatggatatggaagtctgtagttcagtaattgtgcatttgtttcttgtacaacatgtgctataaacagctttcaacatgtgctataaatgtgaagggattgaatttgaggctatgatgcaaatcatggcaatattgaagtcaatgaagatactgattttgagattgaagttagaaagatgttacgtgaacttcttctattattaataatcaggtagttctctcagaacaaaattattcacaaattgaaaggtcattcaccaactttcaaactccatgacagaaagcacccttgtgactttcataaattctgcataatctaatcaattgtcctaatacaattcagtatctttaataataccttaacataatcttagttagcaaaggaattgaatttagatgaagaacagaaaaagagaaggaaactaagagaaaagtagatgattctcttattcaattcaactcataatgagacaacttctaattgatttgaaacttcaagtagctagttagtttgaatctgcctcgataacttgcgacagaagcaacaactactaattattcaggacaaattggtattagaaatcacagatgaaaggaatgaagattcatctcataagaaaaataagcttcagagctcaattgagagaaaaattcattagagttcatgtttgattaattgataaaagatagagaccatagcaccaactaattgatactagcagtattaagtattaacatattctctgatagatgctaaccagtctcaaaagcagcactctaccaaccactcatcaaaacaccgtccaaccccaaaaaaacaacacacgcagaagaagaaactctatgcaatatatagatcaaatacattatgcattcaatgaatttaaaaagtactttcttgcttatataaatatatatgaccggaggaagtatattgtatgagaatttcatcaaaaaggtaacaccataaacagttaggaataaaaatatctgttttggaattaaaaaattataaatgaaaaatgtggtacaaatgttaaacttaaagacttcaaaatgtatttgaccaacaaaaaaaatactatacttttgtagatttaaataaatacattctaaataattctatcatatttaaggtttctgtttttaaaatactctctagttaatgtttttatggcacaaagtttcaaaaaattaaataaatacaaataatattttaagaaatataatagtgtttttgtttttttgggtaacctaagccttgggaaaaaagaattacaaagtaattagtcgtggagtataaactctatcaacattaactagagaattgcatagta

SEQ ID NO: 4551 - DNA, 279 bp, Medicago truncatula
  Intron number 7 from transcript Medtr4g086870.1 (locus Med tr4g086870) derived from phytozome v7.0 (chr-ID MtChr4; po s 18124345 to 18124623 reverse strand)
ttgaaggtacaatcaatcactcgtcattcttttagttcttcatgtaatcttaggtaggttaaaaatgtgtatatgctaaatttattatcatatatggtagttcattggacttcaaaaaataagtagtttattggtattatgtttatgatttatggttgaatatgtgttcttatgttgttgtgatacactacttgatattcagagatgattcttagtttattctgttgaaatatttatgttgcaagaaaatgattttcaggtttcgcggcacctgtttag

SEQ ID NO: 4552 - DNA, 943 bp, Medicago truncatula
  Intron number 1 from transcript Medtr1g043160.1 (locus Med tr1g043160) derived from phytozome v7.0 (chr-ID MtChr1; po s 10125888 to 10126830 reverse strand)
atttttcataaagtttctatcttttctttgatctggtacatttcactatctgggtctgtttcattttcattctgtcggtgcttatgaaaaaaccttcattttcatgttttttcagtttgattttgtttcattgaattgttggtgattctaacttgttttattagatgctaataatgtagtttatttattactatctttgtggctaattattatcattaatatcatcagatttcaatttatagaattagattttgtatcattttcattggatccaattccatcattttcagtggattgaatgaatgtcaattttcttgatggtttgattgttactctcattattattttgtggattgagttttgaattttcattggatttgattaaatagcatagatcacattttttagtgaccttagtagttcttggattgatgtaaattgttgtacttggacatttgtttctttattgactaatgtacactttgactttgattatgtgagccgttgatcaagctttgctatgcattttcgttaatgtatcatcaaactttgttacactagaaaagtaaaaagttttaagttggtttttatatttggatatgttattcattgtaattctttttgtgcttaaattttatgaattgtcggtgtgatttttttttttacactgtcaataaatcagaatcaatcgtatttgtgactttagaagtagttatgattaaactttaaatgttactttaaagatctgatggttatgattgattgacaatgtaaaaaatctttacgagatgatatatataaattgaatccattatcttttatcgctatgatttgttcaaaaggacaaaatattaaaggatttatgtgattgtttttctgagtgctgactactgtccccttgtttgcaggttagcctttgtatcggtgtgagtcaatatcttac

SEQ ID NO: 4553 - DNA, 1250 bp, Medicago truncatula
  Intron number 2 from transcript Medtr5g050120.1 (locus Med tr5g050120) derived from phytozome v7.0 (chr-ID MtChr5; po s 21557135 to 21558384)
atacggtttaccgtgtagttctttcatcacctgtggtatgataacttaagtcatctatatatacatttgtagatttagttatgatttgctttactcatttgatcatttaatgtcaataaaaaggatttcaaacattaaaaaaaaaagaaaaattatttactatatttttttagcagctttgtataagtaggttagtttctttgttaatataatgttggtttttaaaaggagaatttccttgttgaccatatctcactgcctgtacctattaaaagccaacttcattcactttatattataaatcattgagatgtaccatagatgctacactagttgtgtaccctgggctgagttctgctgcaacacttcttatcttagaccttagatgtcactccagtctagttactataaagtagggagcctccttactgccttctggtttacatgaattgaagcagtggaagtcttcttggagatagttgcaacttgcaatactccaagatgcttgtgaagttgtgatacgctcttccaagcccagcagagggttgagttttatagtttgagagtggtatggcttgatttcaaccatatggccaattaacagtagctaaacagaactatttaagggaccccaaccagatgttatagcaatgcaacaccaaagccttaccgactccttgagctattctttgcagtagaatagcatcaagaagcaggatctgtcaatgtactatggaaaatattctcaagaaaatgcaaaatgggaactggttggccaattccgataaaggtatcttgaatttatgcttgaggataaactcaaaaccgaaagggtgatggtgtagatccctctatgggatgaaatatttgagaagggaactacgtaattagatttgttttgtttccttaactgttcattgttgtttcctttaattagtttattggttctagttcttttaaatgtttgattttaatcatgagaatctacacttcgggatctctttccttttcttattaatagtcttgaaaaaggctgtcagaatcagtcaagtattctagaatcattttcaatgtcttgataaggactcaaattgggttctatcaagtatgagtctacttctctacattcactattgatcacaagatggattcttccatatctagacctgtgaagctagacctgagactaaatctacatctaccttatagttgctttaacctaaccatgtttttcatttgtgagtggacag

SEQ ID NO: 4554 - DNA, 2059 bp, Medicago truncatula
  Intron number 4 from transcript Medtr7g009000.1 (locus Med tr7g009000) derived from phytozome v7.0 (chr-ID MtChr7; po s 1471356 to 1473414 reverse strand)
gtccttatctccaaaacggtgcgttttttcgttttttcttcgattaatcaacgatctcaatttgttattgaaatttttgatcattgattaattaagtaattgtttagttaatcagaaatgtttctgttgtttatgattatgcgaaatcgcagtattttgttttaattgtgtagatttggaatttgaaatgcgtatgaatattgaaattttgagaattttgataaaattcgttgtttgatgttgaatagagtgtagaaaatttaagtgcttagttaatcggaaatgtttatgattatatgcgaaatcgtgatctcagtatcgtggtgttttgaatgaaaaattgtagtaaaactaagtgcttagttaatcggaaatgtgtatgttgtttgtgattatatgcgaaatcatgatctatgaaactcgaacgctgacaccaacaaaattttgagaaaatgacaacttaaaatgtaattccataaaaaaaaaaacttaatgtaattacgtgtgttggtgtttgacaaatgacagacaccggtcacactttccatcaaaagtgttggttctattgggatcttctatagagattacgatgtttggtttagttggttgtagatttgaaatgctaatgactgaactgaagaattgtttctagaatttttttatgaaatttattgtttgatgttaaaaaagtgtagcaaaattaagttcttagttaatggaaaatgtttctgttctttatgattatgtgatatttgtttaaatttttgtagatttgaaatgctaataatcgaactgaaggattaattatcgaaattttgagaagtttttgataaaattcattgtttgatgttaaaattatgtgtaacaaaattaagtgcttagttaatcagaaatgtctgtgttgtttatgattatatgcaaaatcatgatgcaaaaacaccagacacattgacacataaaattttgagaaaatgacataattcaatgtaatcacacgtgtcaggtgtcggacactgacatatgtcagccagacatcgggacataccttcgagcagaagtgagactgtgatgttggtttcaattgtttgtagattttaaatgctaatgactgaactaaaggattatttctagaaattttcataattttttttttgacgttaaatgaagtgcaaaaaaaataaattaagtgctcacttaatcagaaatgttttttttttcttcatgattatgcaaaatcacgatttttgtttcaattgtttgtagatttgaaatgctagctgaagaattatttctggaaactttgagaatttttttatgaactttattttttgtgttgaaaaagtattaacagaattcagtgcttagttaatcagatatgctaacgactgaagaattatttatgcaaattttcagagggtgatgctattagtgtagtaattttctgttgataaattcattgtttgatgttaaaattgtgtaacaaaagtaactgctaaggatctctaagatatacacttttgatcgaaggggtgttcggtgtctgacacattagtgtctgacatgtaattgttgttaatgattatattcaaaatcttgttctatgaaaagcatggacaccaaagatgacacgaactctgacagattaaattttgagaaaatgacataattcaatgtaatcacatgtgatgtgtcggacactgacatgaaaacttatatatatgtttattttattgtattgtaatttagtgactgttattttagatatttgatctactttggatgaagtctatgatattattacccctttattgtgaacttcagtaagatcttgtttgtttttgttattagatttgtgtaaaagttaactgttattactgcgggttttgtttaattttctttgttgaatgaagattttgataaattattgattcaactttcaccttattattattcttattgtatacttgatgatgacatgtagtacttaaaattattgatttttactgacggattacctcttgcagaaccatctccattgcataccacaacaattgtggag

SEQ ID NO: 4555 - DNA, 1520 bp, Medicago truncatula
  Intron number 2 from transcript AC233662_17.1 (locus AC233 662_17) derived from phytozome v7.0 (chr-ID AC233662; pos 72446 to 73965)
aagaggttgagttttttaaattttgattgttttgacctaatttcaatatgctgtgagtgtagaatatatattttgtttattgttataatcatttgttatactgtgagattataattaggattttgaaaacaaaaaataaactatgatatgatgctaatttcagagttgcttgaggtgaggcatgggtcaattagagcttctgctcatagatcttgttttgcacacttaatcaaacagttagtagattaatttccattgactaacttgaagctgatataaatcaaatttagctaattagaaaatgatggtagtggagagttgtgttcaaaaagaaagagtttctaagagacgttatatggatcgggctattataaaataggagatgaactgattagaagatttttaggtttcaaaattggcattacaacatttagagcaaccgttaggattagttaaggatacttagtttgtagttggctcggttttgcattggtcatttcacactatttagccatgcattttgatttgatgagtgagttagtgagaagtaagaaaattcgaaaggggttttggctcgtatggcatatgataatttggattctttgcaagtgtagaaatgttagaattttaaagataagacagttgatgctaatgagatggtcgaggagattaaggtgttatcttggagatgtagtcttggttcccaacttgttttttctatgaatggtattggaatccaatcgtttatttaaataggtgacgtgtgcttcgtttgtttccatcatagctgttgtgtgagctgaaggtcatcgttatttcttgccttctggtgcagtggtactgttgctgttttgcttttttttttttttttgttttctggctttttttttttgtgtgttggattgttggtgtggggctctgttggatacagcgtttgtgttgtttatgttagttcctgttgtttagaatttctgttgtataaatctgctgtactgttgatttgtgcgcgcatgtacggcttgtgcacgtagtcgcgtttaatagaatttcgccatttaaaaaacaaacaaaaaatagaaatatttggttggaaaatgatgtattcaattttttggtagtttaatacaaaacttctactttctgcttgcttaaagagtgcccgccgggcacatgttagcatgaccgtttaactaattatttatttatttattatacatatgcatgtaatttatttatcagaatttcgatcattgattttttgttgaatagctatgccagcactttgcgctctaaagttctcctacacccatccctttaagcttaaaagaaataactagattatataaactagggaatttccacatgaaccaagagtaattcttgggttgagagctagttttgacgtgtgactttcatttagtaatttgaattcagttgcatattgcaatctagttgagtctttttttccaaaataaattctgttgactaaaatcatatttgtttgcagctatttgctggaa

SEQ ID NO: 4556 - DNA, 825 bp, Medicago truncatula
  Intron number 2 from transcript Medtr8g122470.1 (locus Med tr8g122470) derived from phytozome v7.0 (chr-ID MtChr8; po s 28691005 to 28691829)
atcctattttactcttgttctcaagtttcaaggtgtgctttaacttcattttattgggattgattgggaatttcaaattgtcatgatatcatctactgtggtgataagttggtgcaggagctgtaaggttattcctttatagaatggacttggtacacatcacattagcactgattcctccatcttataagcatgctttttggagtgcttacactctacacatgaaatggtacctctgccttgtctgtctatccacacgtgcggatgtacttgcctttccaacctgtcagggttgacggaggagtttgagtctcatactgaatgggtgcgcaacacaactcccatctatggtgctcttaccaggttgcttgcatgagtgtgcatatgttcattgaataggagttccatcctggaagaaaggactttgcctacatgttggacagttgaagttgtcttttaattcttagtaaatttttctgcatgggtcagatgatcgtggaaatcatgtgaacttccaaaatttcagattttgtttacagggtccattttgcgtgaattgatcttcacatgtaaagaggcttttatacaagttgggatttaacaaataagctgtaatggtgttcatgtgaattttttcaaatattctttatttttgaattgtttaattagtttcacatgatttgttcggtaatattattattatttttttaatggcatgatttgttccataataatctcgtgtcctggaggaaaaagtaatagctacgaactactagtagtttctgatgctttttcatttttgtagtgtattgtgtggtctggaga

SEQ ID NO: 4557 - DNA, 515 bp, Medicago truncatula
  Intron number 3 from transcript Medtr2g055800.1 (locus Med tr2g055800) derived from phytozome v7.0 (chr-ID MtChr2; po s 15039298 to 15039812 reverse strand)
aagggtaaggaaaattgatatgttccatgtattattcaaattgatacagaaattgttttttttttttttaccttattttggagggtatctatgatgatctatatttggttttaagataaagggtatttatgttagttgatatttgttattctgaagtaaacccacgatggttatggttttcattatttgagtttttatagatcctcaatgaataccacctataagtttttatggagttccttgacgtaatttttcaatgcgatattatttataacgtgattttttaatggcactatttttaaaaggtgtatttatgcataagctactatatatgactataatgtcttatgtaactaatatagaataacactttacctgcactaatggattctgtagatttttttttattttttttattaatgcatcgggtatttatgcatagagatatgttccattcatacatctcttttttgtactaattttatgattcccaattcacctaggtgtttcattca

SEQ ID NO: 4558 - DNA, 2465 bp, Medicago truncatula
  Intron number 5 from transcript Medtr1g093450.2 (locus Med tr1g093450) derived from phytozome v7.0 (chr-ID MtChr1; po s 18995255 to 18997719)
ttgggtgaactttttcttttctggatttgtagcaggtaattttcacacttgcttttgtccctcatagtgtcataatgttagattggtatttggtagttttctttacatgaattcatattcttcaaaatctgtttatgtctgtcatattacggtgtcacgatgccagttttaatttttgtatatatatggttgccatcctgaataagcacgtatatatcttgacttattgtccatggaagccatgtacttgctacaaaggttgagggaaaaatatcaactaatcaaactgatggtttgtattggtattgaaaagacatctaatagaatacctagtggattactttcatttagctatcaaagaaatgtaccaaggggtcacaactagtttgagattacaaggggtcacaactagtttgagattacgaggtggaaatatagaaaatttcccaacaaccattagtgtgtaccaagggtcaactttgattcttagtttttttctcttggttcaagacatacttgcttaacatatccaaaatatgttatctcgacacatgccttttgcagatgatatatagtcataaatgggagataaaataaaaggggagttgctgatttaatgataattctcaaaaacaaacaatttccaactatatagaactaaaacttagtatacaaaatgcaagtttagcgagacatacacaatgttgaagttgtgggattttagataaaaggaggatggaaaataataaatactttcaatatcattcatcattgcttgatactaacttgtagccaaagactaaacactgatccctattaatagggatacacggtctcaatcataaatcaaaaacaaatcataataaaaataggtaatatgaaatctaatcctaagagatgctttaagattacaagataatcctaggaaataacttaagacactcttttcttttttatggataataacttaagatactcaaatatgatatatcaaagatttaagatattataagatattttctaatattccaacacctaagtactacaagtctcaatttttaagtatgattactatcatagatcactgctataggtggtccatgatggaccacgtttggttgcctttggattttgaagtttcaccagatttaacaatagacctcccatactagatttttcctctttctcctagtgttgtcaaacagaggttatagcgctatagcacagagaaatttgaacaaactgctattgttccgggatacgctatttagtacgaagttttgtcaagtagaggctatatcagcagcactatagcctctatagcatagcggaattcgaacaaacggtattcttttctaatccacaattgacaacattgctttctcccctcttccttcttcccttcctgcccccctacccctttccctgaccgccgccagtctctttccagcaatctttgcatctccaatgtgtgtttagacgttggaacccagccaccctaacaaacagttcctctggcagtcgaccaggaagactccttcgttaaagacggtgcatagcccaaggctgcacctgcaccacttccctcttcccatcccccctcctctgtgccccccatttttacgaccatgaaatggcagagcatacatatttataacatttaccgaagttggaacaaacttaacaatgtgtgtggcctgaccaactctgttcttccatggccacaaaagggttggccatgatagctagtagctaccagaattaggctagaacggaggttgttattggctattgctgaaggacttagtctaagcttgagatgaagtagcagattgaggaatctaagccatgatcgaagcttattcaagccctgataccatgaagaaatctgagagttgagattatttgtgagagaatgagatcaagggcatttctcaagtttgatattcttatttcttagatgagaaagatttacatcagtcttgtatatgtaaaatgtgagtgtgcagtgcaaactaattgaaaaatctgttgctgagtaacagctaccgccagttattgaactaaaacttaattaacagaacagacaagaaaactattagagttacatgcaagctataagctacaagtaaatagtacatattccctccggtcacatttataatcaaaaaacaactttttagatacattgaataattaatgtatctaacctataaatatcaccagattcattaattattcaatgtacataaaaagtcattttttgcttataaatgtgaccggagggagtactactatcagactgaacataattcaatatcattgccttgtaggaaaaaggctttagttgttgttttattatgcagtcatctacccttgtattccctgcccctgttatctgcttctaaaatatttacaatttttttgcagccaagataccctttccattgacacaaaggtttagg

SEQ ID NO: 4559 - DNA, 4498 bp, Medicago truncatula
  Intron number 2 from transcript Medtr3g043510.1 (locus Med tr3g043510) derived from phytozome v7.0 (chr-ID MtChr3; po s 11889684 to 11894181)
tgcttcttgtagaatcttaccaagtcgcacccgtgagttagagaagtgaaatccactggattttccgcttgaatgattaactcctattcctcaatagacatagttcttcctttgatttcatatgctggagtatctatatccatatttgatgaagaaccaccagcagaacttgaagatgccattgatttgaagtagatttagggttctaaggtgttttgagaggatgagtggatgtgcttactttcgcagagggttgagaagaaaaaatagaaagtgtttgttgtgaagtgagaagtgtgtgaaatgacttagtgtttttattaaaacgtttgtaattcagaagggacaaacaaacacagcattaatgacaaattgggggcgcgtgtaagtatgttaaaaaacaaataaaacatcattgccctttttgttatactccaatacaaatagaccacgtcagagactcttcagaaaactaccttttgggtaatgggacagctgttacataaagtaactgccaacgttcccactaaccaagctattcagaagcaaagaataacacttctgaagttttagtgctgacgtcatcttcagaagcacattttcctcagatcctcagttaagagcttctgatgaaccaaaaatgcttctgaataaacttcagaaccaaacttcttattccgaggcaagcaatttttcaatcagacacaaaatgcatgttcaaatttttcttaataaattcaaatctttcaacagacaaaggttttgtaaatatatcagcccattgatgttcagtatcaatgaattgtatatctaaaatccctttttgaacatagtttctgataaaatggtgtttgatttcaatatgcttggctcttgaatgtagaattggattctttgacaaacaaatagcagcagtattatcacagtaaatgggaatactgttagcattaatctgatagtcttccaactgatgtttcatccaaagtagttgtgtgcaacaacttgcagctgaaatgtattctgcttctgccgtagacatagcaatagttgcttgtcttttgcttgcccaggatatcagattctctcccaggaattgacaatttccactggttgattttctttcaatcctatcaccagcataatcagcatcacagaatccaatcaacttataatctagggatttcctatacaggagtccaagattagttgttcctttcagatacctgaagattctcttaactgcagttaaatgagattctctaggaactgattgaaatcttgcacacaggcatacactgaataaaatatcaggtctagatgcagtgaggtataacagagaaccaatcatacctctgtatagcttctggtctactactgttccagtatcttctttgcttaaggtgcaggttggatgcattggagtgttcatcactttacaatcttctagcttgaacttcttcagaagctcctttgtatattttgtttgatgaacatatactccttctttactttggttgatttgaattccaagaaagaatttcagttctcccatcatactcatttcaaattcatcctgcattaacttagaaaattctttgcaaagagatgcattagtagaaccaaatattatatcatcaacatatatttgcacaatcaaaatatctttcttaagagtccttctgaagagtgttgtgtcaacttgtcctctttcaaaatcatttttaattaagaaattacttagtctatcataccaagctctgggagcttgtttcaagccatatagtgatttcttaagtttataaacatggtcaggatgcttaagatcctcaaacccaggaggttgtttaacatacacttcttcttcaatgacaccattaagaaaggcacttttgacatccatttgatataatattatgccatgattaattgcgtaggatagaagtaacctgattgcttccaatcttgcaactggagcaaatgtttcagtgtaatcaatgccttcttgttgactgtagccttgagcaacaagtctggctttgtttctggttacttctccttgttcattcagcttctttctgaatacccattttgttccaataatgttcttctgagaaggtttgggtaccagatcccacacatcattcctttggaattgatttagctcttcttgcatagctaatatccatccatcatctgagagagcttcttcaacagttttaggctcaattattgaaagcagtcctattaatgactcttcttgtctaaaatgtgatcttgttcttctaggactatctttgcttccaatgattagctcctcaggatgtgaagatttgtgcttgaatttaggttgaataacctgctgagtgttatcttgaaagtcctcagaagcactttcattctgtacttttgggctaggttctgcttctgaattagactcagcttctggagtgatttcagcttctgtatacttttcagaatcagaaggttgatcagattttgatacatcttcagaatcagttgttcctgcattactttcactttgctctgaagttttacttccaggctctctatcatcaaattttacatgcatagattcttcaacacattgtgtttctgaattatacactctgtatgcctttgacctttcagagtaacctaaaaagattcctctttgagccttggcatcaaatttcttcagatagtctttagtgtttaagatgtaacaggtacatccaaactgatgaaagtaagagatattgggtcttcttcctttaaagagttcatatgctgttttctccaacataggtctgatatagatcctattttgaatataacatgaagtattgactgcttctgcccaaaaatgttagtaagctgttttcatggatcatggttctggccatttcttgtaaagttctgttctttctctctacaactccattttgttgtggagttctaggagaggaaaactcatggagaatcccatgtttttcacaaaaaagttcaaatggctcattttcaaattctccaccatgatcacttctgactttcaaaattttcaattctttttcagattgtatttgagtgcagaagctgctaaacacttcacatgcatagtctttacttttaatgaattttacccaagtccatctgctgtaatcatcaacaatgactaatccatatttacttccatataaagatgcagtgttaactggaccaaaaagatcaatatggagtaattctaggggtctggaggttgatacaatgtctttagatttgaaagaacttttcacaattttccctttctgacatgcaccacaaagtgcatctgaatgataatcaatgttaggcaatcctttgaccagttgtaacttgctaattttagaaattaatctccaattagcatgtcccaaccttttatgccatacccatttttatcattcattgacagaaggcaaactaccttctgatcagccagatcagagaaatttattttatagacattctcaactctctttccattgaatgtaatggatttgtcatccttgttgactagtgtgcagttggtcttactgaacgttacatcatacccattgtcacaaaattgactaatgctcaataggttatgcttcagaccatctactagccacacattattaattaagatggaggaattaccaatagtacctgtaccaatgatctttccagtttggttgccaccaaacttcacttctcctccatctttcattgtaagggtaaggaacaaagctttctctccagtcatgtgccttgaacatccgctgtctaggtaccatgacctttgtttctctcttgcccttaagcacacctgcatttttggccaattcagatttaggtacccatatcttcatgggtccttttgggttagttttggaggttttacttttcctcccttgtaccttagggtgaatgctgagtggcttctgatcattcaatactttaggtttgacaccttttggtattgttttctcagaagcagtagctgctttgttcttctgatccttttgttttggaattttagattctggtttaatcagattctgatgaacaggttctgatcttttcagaattttaatcttttgactcttaggatcagattttgtcattaccttgatcttaagattctctggctttgatgtgatcttagcctgtgaacctgaagcttcaggttttgactgaacagcagttatagcatttgtaccttcaggcacaaaggtggatttcaatccatccttgatacaatcacagtagctcttgagactgtattctttggatttctcctcagaatatccaatccctttgcctttgttcttgtatgtgttgtagatcatagaagcaactttgcttctgtctattccagccataataaaatcatccaaggcaatctcatgtttattgcctgaacctttatcacatttttcttgtagcttctgacaaagactcttgagtctatcttcat

SEQ ID NO: 4560 - DNA, 1142 bp, Medicago truncatula
  Intron number 4 from transcript Medtr5g035330.1 (locus Med tr5g035330) derived from phytozome v7.0 (chr-ID MtChr5; po s 14585209 to 14586350 reverse strand)
tgttgaacttattgataagctactgaattacaatcgtaatttctgaaccctatacttttctttgcgattgtgtgtcaattttatgatatcattgggtttgtaatgatcgtacattcatttggttgcagctctggaaaagcacggtgccaactaagggttctaaggaactaaagacgaccaagatgtgtcagttgcgtcacaagtcctgtggccatatgtcaatggtttttttggtccttttccttcattaaattgtgttataacaagcagttttagttttagtttctgttctggatcaattatggtgtaaggtgcaacttatgttaataactttttagtttagtttgtgtgatgcaaagctgtgtcaaagggcaatgtccctaaaaaaaaactataattgacttaaaaaaattcttggtactcctatttttcttcattcatgattttaagtctctcgtattaagatttgggcttctatttttgtttgattacattattttgattcttctgttaaattcgacgtccaacttatgacactataaaacagaaagtattgacgtagcactggtaggtcactcttatttgggatccacaagatgaagtaaaatgtaatagattattaattctatttgattaaatctacataaattcaagcataatacattagaatcacaaacagacaattatccacatatatattgtaatcacatccctagagctcactttcaacgtacacataataaagaaagaatagtgatcaaatatttttcactaatgattgattgattaccaaatgaggcacaatgcctttttaaaagagtaaaattgacttaaagtaagactaatacttaaaataagctaatactttaagagagttcaacaaaaagtcttttttttttttgacaagacaaaaagtcatttgttgtcttggaggattttattcttcctcattctttttgatactatatatagatacaactcaatgcaatatatattttttaaggtaattatgcctatcaaatctactatctgtaaatgaatcttgctttaatttttttttttttttataactcatgaaatatttaattatggtaaagaattgtgcagtagctcttgctggtacgggtacctatattttggca

SEQ ID NO: 4561 - DNA, 1911 bp, Medicago truncatula
  Intron number 6 from transcript Medtr3g114270.1 (locus Med tr3g114270) derived from phytozome v7.0 (chr-ID MtChr3; po s 28870467 to 28872377)
cgcaaacacaacttgacagaatagtagtaccagtaagtggtatttctcattttattatccagactgtcattgactaggtcggtggctggactagtgagtcactagttgaaccacctgaactgatatatattacacctctgtttctttttaagtgttgttttacacaagacaatgaaatcaataagtttgatgggtatttcttttgcaattaattggatttttcctatgatgcctttgactttattatcttgttgcacatatttccctctttgcaataaatagttaaaggtattattgacaacaatagttaacgttgcattgaacatttgtgtatctatattcactatggtgaggaaacaccccaaagacgagatggtagaagtaaatgtaaatgaggaggaggacgagtgtgggttgttttgtcaattgttaagactatagagcagtaaacccgcagaattctcttgctcaaagaccattaagtttgaaggcttgctgaaggctacccaatcttacttttggtcaacagtggagctagacataacttcatagctcgagagttaatggtgtctttgggactggcggttgctgacatgaagactcatggagttagcttgtgaaatggcaataggtgttattcagagttgtctgtccagtagtagagataaaaattgggaattgggaggcacattgtgttagtggatgcttttgtcttagacttggggggagttgatattgtttgagagttgaatggttggagaccatgggtagaactactatgggttgaaggaagaacgggaatatggttagactcaaagggtatttactaggttcaagatagaaacaattgaaaatggagaggaattcctgccaagaatagtatagcaaggatatactcagttttgaagaaaaagagcttgagtaaatccttagtaagcattcatctatttcaccgcacagatgcgatgatcgtgccatcactttacaactcaataagtgtctgaccctgttgatatgcccatcaccataacaatgagattgagaaacaagaggtaaggttgctggcagagggcgaaattagatagcatccgtcctttctctcgtgtcaaaacgaaggatgggatttggaggatgtgtgtgggctattgggcattaaacaaggtaattatacccgacaaacatccgatctccaccattgatgagccgttggatgaacaacatgtgttacaagtctacaattgaaggctcaaggttatctcgtaaggcccaatgttcgtgtaggatgggaagggagtcagtgagataataagttgttatataggaagggagaaagaacgtacgggtattctgattgttgaccaaattgtcaggggctagagattattctcttagccgggacctttttctctttattattttccttccttgaacacacattgaaatacaatttgctattactgatagtagtagctcccagactatatattatagaagacaactattgtgtgatttgtttttccccctcttttgattggcagtatatatattgctggtcccactttcctatattttcctctcgtcaatcattatggctattaaatatagaatgcgtgagacttggtattttagaatgtcttttgtttagcttcgtgacagggtatcaaagcctttgtggccaaagcagtcaatagtttgatatttgcccctctcatgctttctatataaagttgaatttaacaggcctgaatactaaaaagggcattttagatgatgatttgatgcattgtttgtatatttcttcagctgataaatttgtctatactgaagattctagtagtttcaattgacatcattaaaccaatcttgtcaatttcaggtgaattacgagtttaatacatcaactggatcatt

SEQ ID NO: 4562 - DNA, 2877 bp, Medicago truncatula
  Intron number 4 from transcript Medtr7g111480.1 (locus Med tr7g111480) derived from phytozome v7.0 (chr-ID MtChr7; po s 26199193 to 26202069)
ccacaatagtcattggagcagttggaaaggtaacagctagtaactttttgtcttatatttaaatgcagcataatgagtctatacataattacatacacaaacaacaatatggaatttgtcttccttccagaatgagtaaaataatatgcaattatcttatttaatggtcagatgatatacaaggaagatgatgctgttagaatacaggaacagttaggaattagagggaataatttgtatacagaataagtagtaatagagagaggcattatgtacagttggtattgtgagtgaggagaaactcttgggtgaattccattcccgtttcttgttcaattttggtaatacactattgttattttgattcttcctattttaattcaatttcttggttcttaacaatgggtccggtttgttatgataatgttcagagggctttaagcgaaagagatttcttattcctacatctttctattagatactgtcttaccactgctaagcggcggtggaaacttcacacaaatatcatggtaacccaaaaaaaggatactgtcttaccaatggcaattgtagtataattacggtaatcgtagcttccattgtatgatggcttgattggacagattgttttttctctttccatttattcatgcactgctgataggatagtaagaagatacccatgagcgtaaggaaataaacattaagacttttaacaatataaatatatttttattttaaatcctcttcacatatatgtgcatcttattattttccttgaatatagaatattagtctagtcatgtattgtgaatcccataggaagtgacagaactctgatgaataaaatggatatgtttatgctggcaaggttggcattagtattatgtgtgtttggctttttaataagttaggtacattttttatgcgcgctcacacaaaaatattacttatgtacagtattttcatcttctctcgaagtgtacatatctctttatctatgaaaactcttaaattatggtaaagaggtaagttagttcatgtttaaattaagggtctcgctaatgagtgcccccggggcactctttaaactttccgaaataagcaattattcattaaaaaagtcatattttgatttccaattcattgaatacacctcttttcataaatagttatcacttttggttcttaaagagtgccctcgttagcatttcccttaaattaataatggaaatagaagttgtagttggttatcaatatgaaagactgtatgtttaaattaagggtagtgttaacttgtgcccttagggcacatgttaagaaacctaaaagaagaaatattctctaaaattttgtgcattcaattcattaataagttaaaaattaaatgtgttgctacaattcatttcccttaaattaataatggaaatagaaatcatgttatcataggagagttgggggtggggcatggataatagagaagattggtttcggggtagtagtaggtcgcaggaccctcatagttcttgaagtggtattttatacatagttgtcaaagcggaaacgcggcgcggcgcggccaccccaaaaattgacgcggcgcggtatgcgggcgcgactcgggcgctattacatgacgcggacactaatatatttaatattaaaataccatactatacaaaaaatatactaaaataccttaaatattactcaaaatttatgaagtattcataatttgaaatcaaataatatgaaaattaagaaaaataattaataaccaatagtattaactattaaaataatttgtcgaaaaaataactatcaaaatatatatgaagtaatatattaaatatacaatttttttttgaaagaatatcaaacataaggatcattaaggcttccttcaaaaaattaaggctaaagacaatcaaatcatttgaaaaagagagtatagttaggaaattaccgtcaaaaataaaattcttggtaaagataagccttaaaaacattgtaaccaaaaaaagcattaaaaacattaaaataatattaagaatagcaagcaattagctggcacattcattgtatgacttttcagcaagcaatatgggtcaacgaaatcataaataagcatttattttaatttttataaccaataatgaggtgaagtgagatctgaaatgaagagaagagaagagatgaagtgttgatctgagatgaagaggtgaaagagatgagatgaagtgttgttttgcgatggaatgaagagaagagaagagaagaagcggctgtgttctacgatggaatggatgaaagaaaataggactttgaaaatgacaaaattaacccttctaacgttacttaagtgagggataatttcgtaatttcgttcgacctggaaaagcgggcgatttgacccgctaccgctccatgtaaagcggccgcgaaacccggttttggaccgcttttccctaacgcgcgatgcggtcgcgatctaacgcgctaggctgttttcagccgcgatcgcgccgcgttaggccgctattgacaacagagattttattccatgccgtatttcccttttcgtgaatctgtacaatgtcactgactgtaccaatgtctggttgatatcagttctagagttcatatgcagacagtttataaatgatatggaattacttaacgttctaatttagaagatatgatattaattactcattgtgttaaaggccatggtatacattatgcatatggtgttcgctatgttgagtaagatttggtaactaggatgcattttagctggtgcttatttggaaggagagaagttgactccactttttctttgacaggctgtgagagtagaacactgtgaacgagttc

SEQ ID NO: 4563 - DNA, 2139 bp, Medicago truncatula
  Intron number 2 from transcript Medtr3g104540.1 (locus Med tr3g104540) derived from phytozome v7.0 (chr-ID MtChr3; po s 26006131 to 26008269 reverse strand)
ctcagaagcaatttcattctgtgtttttgggctaggttctgcttctgaattagactcagcttctggagtgatttcagtttctggactagattcaacttctgtatacttttcagaatcagaaggttgatcagattctgatgcatcttcagaatcagttgtacctgcattactttcactttgctctgaagttttacttccaggctctctatcatcaaattttacatgcatagattcttcaacacattgtgtttctgaattatacactctgtatgcctttgacctttcagagtaacctaaaaagattcctctttgagccttggcatcaaatttcttcagatagtctttagtgtttaagatgtaacaagtacatccaaactgatgaaagtaagagatattgggtcttcttcctttaaagagttcatatgctgttttctccaacataggtctgatatagatcctattttgaatataacatgaagtattgactgcttctgcccaaaaatgtttagctaaattgttttcatggatcatggttctggccatttcttgtaaggttctgttctttctttctacaaccccattttgttgtggagttctaggagaagaaaactcatggagaatcccatgtttttcacaaaaaagttcaaatggctcattttcaaattctccaccatgatcacttctgactttcaaaattttcaattctttttcagattgtatttgagtgcagaagctgctaaacacttcacatgcatagtctttacttttaatgaattttacccaagtccatctgctgtaatcatcaacaatgactaatccatatttacttccatataaggatgcagtgttaactggaccaaaaagatcaatatggagtaattctaagggtctggaggttgatacaatgtctttagatttgaacgaacttttcacaattttccctttctgacatgcaccacaaagtgcatctgaatgataatcaatgttaggcaatcctttgaccagttgtaacttgctaattttagaaattaatctccaattagcatgtcccaaccttttatgccatacccattttttatcattcattgacagaaggcaaactaccttctaatcagccagatcagagaaatttattttatagacattctcaactctctttcccttgaatgtaatggatttgtcatccttgttaactagtgtgcagttggtcttactgaacgttacatcatacccattgtcacaaaattgacttatgctcaataggttatgcttcagaccatctactagccacacattattaattgagatggaggaattaccaatagtacctgtaccaatgatctttccagtttggttgccaccaaacttcacttctcctccatctttcattgtaagggtaaggaacaaagctttctctccagtcatgtgccttgaacatccgctgtctaggtaccatgacctttgtttctctcttgcccttaagcacacctgcatttttggccaattcagatttaggtacccatatcttcatgggtccttttgggttagttttggaggttttacttttcctcccttgtaccttagggtgaatgctgagtggcttctgatcattcaatactttaggtttgacaccttttggtattgttttctcagaagcagtagctgctttgttcttctgatccttttgttttagaattttagattctggtttaatcagattctgatgaacagattctgatcttttcagaattttaatcttttgactcttaggatcagattttgtcattaccttgatcttaagattctctggctttgatgtgatcttagcctgtgaacctgaagcttcaggttttgactgaacagcagttatagcatttgtaccttcaggcacaaaggtggatttcaatccatccttgatacaatcacagtagctcttgagactgtattctttggatttctcctcagaatatccaatccctttgcctttgttcttgtatgtgctgtagatcatagaagcaactttgcttctgtctattccagccataataaaatcatccaaggcaatctcatgtttattgcctgaacctttatcacatttttcttgtagcttctgacaaagactcttgagtctatcttcat

SEQ ID NO: 4564 - DNA, 2740 bp, Medicago truncatula
  Intron number 1 from transcript Medtr5g102790.1 (locus Med tr5g102790) derived from phytozome v7.0 (chr-ID MtChr5; po s 41169646 to 41172385 reverse strand)
ttaaaattcgtacgtatatgtttgttatttgctcaatctttttagggaacttctatggtacacttataattttgagtgtactggtactcttgtttcacaaaatatataaattaaagatcactttaacgaaataaaaatatatttgtcaatatttatattttagaaaacatcatttcataagaaaaaccatcatttcattgtttataagaatcatattacaaaatttacattttatcgtaaaaaataatcaatattcattgttatgagtaataaaaattcttaaaaattaaattttatttcgtcgaagcttttggtatataaaatttaattatcttagttgtcaatgaaagaaaataattatttttctttaaaaaaacaacttatttattattaattttacgacttggtgtaccgatacacctaaatttattgggtgtaccataaaatttgccatctttttattcctaaatgtcatgtgtcatctttctattaatgtacataattttaaataagttcttattttcttgtatctttttctaaaagttattgattttacttgtatgattttaaaagtttaaacttaattaagaaagttgaagaatgttaaattacccctatagttaatttttttgtatagaactgatatacttgattaataagtcaaaataatgtaaatggagtttggatataaaaaagttaattgaatgtttattagatgacatttttatgttataagtgcttaaactcgataactactacaaagtccagtgcaaattattggtatgtggtaactggtgtacacgttcagcgtgtaaatgttgtaaactctatgataccgaatttgattcttttttttttttttgacaaaagaaacaaaacgatattcattcaaattaataaagaatatcagtcacagacatcgctaaaaatataaggggtgaatctgcaaaatctgtgaacaaactcacaacacctaagttaatagcatacaacgacaaaatgtctacaaataatatgataaaatctaagtcacggaaatacacatgcttctggatgtgcaacgttgacgcccaaatcattgattgaatttgtaattgactgaagtcgatcttttaataggaactaaacgaacaccgtgacaagacgcgaagtcaaacgtcgtacaagatgacaaacaacaaaacaccgcacttagacatcgaaatcacaaaaactacaaaaagaaaaactttatagatgtgaaaacggcttatttagattgaaagaaatgggaaaaagatgtagagagtgattctaggtcaaaaatgacctaaaaccaccatcttcgatgaatgagaaagaaagcttagagagaagttgaagtttctctcactgaaaaattagggtcggcttttatcgagtttgattccttatcatgcacttgattgttagtacactttaagataatttgggatttgggttgatattgttaaaaggtgtcttgacagtccacgtgaacttaattaactcaattgatagggacaatgcataatatatgcaaggttcgggattcaaaccccggtcaccacaaaaaaaaagttgtcattacagttattttaaataccaactaaatcatttaaataataaataaactcttctacaaaatgtccctgtatacaaagttgaatttaagataatttatgatttggttacgttgtaaaagatatcttgacagcgattttaaatatcaattaaatcatttagataaactcttctaaaggttcacactaaggtgaatttaataactttttttgtgagttaatttaatttttttcaccgaaaatgttaaaaataaaacctagacaatatatattactactaagaaaagaaagtttaattatcgagaaaaaaatggatattagaaagaaaaaaattgtttaattatgtttttttgaaagaatgtttaattatgttttttatgtacaaatgtttaattatgttattaaggtcaaatttaagaacacattttatttgttttatctttaattttttgggtaattcaatttttttatacaataatttaattgttttattagtgatcgatccattcatatctaaatgtgataccacttcgtagctcaagtgtcaatctcacaaaatcatttgaagtacaacgcatgccttaaatcgtaaaatatattttaatttgaggatggacttgttttgcttattgtgatgtgggatataaataagtttgttagggttcaaatttaggaagttggccagtctcacaaaatcatttgaaatagaacgtatgccctaaatcgtaaaatatattttaatttgtcgatggacttgttttgcttattgtgatgtgggagataaataataaagtttgttatggtttgaatttaggcattttcgattggtccaaccttatttaaagtacaaaaccacttgaattaataatctatttggtagagaacacgggtttttacctttttttaaaaaaaaattaaatgtaattcattaatcgataacttttatcatttttcgtttttttcttcaaaaaaaaaaaaacatttttcgtttttattttgttaactgagtatttacacaaatttgtttgatggatagtcaaatccatttaattaaaaaaaaaaactcgtaattatgttgtttgtttgtaacatgtttgcaactaaccataatggaaatcttcttatagagttgcaaatgttatgtagggaagaattctttt

SEQ ID NO: 4565 - DNA, 1008 bp, Medicago truncatula
  Intron number 4 from transcript Medtr3g064270.1 (locus Med tr3g064270) derived from phytozome v7.0 (chr-ID MtChr3; po s 14517547 to 14518554)
aagcattggaaggtaggaatactatgactttgttacttatattacatgattgcagatataggtgaaatatattttgtataaagtgtaaattccatggatctcttgccttttagttgtcatgatttgatttcctttccttcctttgcattggcatagtcgtgcttcataattgttagagattttaatgtatgagaatgataactgtcactttttcaaaacttagcatcctatgttattcgtgtaattgatcttcctgtaagtttttccttgcccttattctgtataagttttacagagactgatgtggtctaggtagatggcataactgttgtcaaatagtggctatagcatagcggaattttaacaaaccactattgttttgcgatacacaatttagttctaagtgttgttaaatagtggctatagctgagctatagcagcactgtacgtagcggaatttgaacaaaccgctattttttacggtccgctattgacaacactatatgacatccatttattcttagtatctttatctaaattttcttgaaaaatggttctagaacttgattttcttgtgaacttgaaatataaatttaggatattatcatttggcgcaaatcaaattgagaaaccagcaattaccatcttttatgtgatattgtagccaatctttagattttttttttttcttgaggattgatgggcaccaatcttcagatgcaagtgtactgcttatagatatgaatctgcagtcatatgaaatatgagttctgatgggaacatatatatataactagggaagttagaaaggttcataattttattgtattagaacacctttccaattttcatcatataaaatgtaataaaatgcatctttctttcaaaactttgtggttaaatgctaatgctgctctattataagatcctgttactctaatctaattaatgattttttttattgtatgtgcagcttttaagagagtttcgagacttgaaggcatcatt

SEQ ID NO: 4566 - DNA, 1439 bp, Medicago truncatula
  Intron number 2 from transcript Medtr4g114690.2 (locus Med tr4g114690) derived from phytozome v7.0 (chr-ID MtChr4; po s 26308693 to 26310131 reverse strand)
ggtttttatttactataattcctaacttcaggaaggtatatgtcattattatttactactccttgttcttttctgattaattagtgattattattgttacttttttcaaaactttgtaattggtattgagaatgtgtattttgaatccaatgcttttttatctgcttgtcctcatgcttatgtactttttttttttaagaattatctgctaccagtgcaagtacatgatagtgttgtactttttttagtaattatctgctaccagtgcaagtacatgatagaaatgtaccattcagattgattttgtgggatcacttagtgcatatttggaatcaaatcacggtggcactgtgattttgttgagctccatagtgtagcttttgcagaatcatggttgctcattgtgattttgttaaactctccgcatgtgtttagttttgtggtgatgcaaattgatttttgtaaaattaattccgtttaaaagtgacttgaatgtaatgtgatttatgtttgaatgcattcatgtaaaactggattgaacattaatttcaaggctatatcagccatttgacaatattttaaacaaaatagtgtatcacggaacaaatagcagtttgtctaaattctgctatgctatagcggtatagagacactatagccgctattcaacaacactaggtgccatagactttgaggttggagtagatagtgtaatagttagttacttaaaaagatttaaagttgatgggttgtcacatgattcttgatacatcattctcatatcactggatccaggattccatattgttgactccacctttttattttaatctttcgttatttaggacatggttgaaatggacactttagagggaaaattggagttgggcctaatgtggaaattttggtagattctcactccaggtggtttgggccttaatggaaaaaaattgtaaaagacccaataaaaaggaaaaacaaaatggatggtactctaatacagggtgatcaattaaaaactacgtagtaaactattaagtaggattaaatttaaatggtttgtcagaagatataacttatagtagaatgttatttcaacatttaattgatttacttgatcccgcctaatgcaattttgatagaacactatggcgtcatttgatacatgtagccaaccccacttagtgggaaaaggcttggttgttgttgttgttgatcccgcctaatgcaaaaaggcttatgttattgtcattgtaaattaatttgttacctactttgagtaaataatttcatattatcaatctacaaagcaaatgatggatcatatctcacattgttattttcatccactgtttcttttaaaatgtctgtagttttataggaataggaatataatccaatgcattgtcctttgttcagattttgctgtcggcttttga

SEQ ID NO: 4567 - DNA, 891 bp, Medicago truncatula
  Intron number 1 from transcript Medtr3g020760.1 (locus Med tr3g020760) derived from phytozome v7.0 (chr-ID MtChr3; po s 4791634 to 4792524)
caaaagttttgtcaataaattggaatcaagagaatcctttaagtgtggagacatttttctactttctagataacatgcttaaaatttatttatttttattcattctactatattgtagttcctattttatttgatgtaatcaactttcaaagggaattattttattgcagttcctatttttggtacttctatattgaatttggattagcttccatttaatgagaaaatttattttgttgtacaactattcgctattgtttagatgcattgcataaattgaagatcctttgaatttgtgcaagctattatctctagagctgagtttgtgcaaactaccaaaaaggaaagaaaatgttccatctcctcacagttttgccgactcgttgagcagcatgtggtgcaaagtgagtgtttctagcactcctcttcaattattagaaaacactaatgggttggtcatttatcttaattttccgattgagaataaaatcctttatcttttttgtttattttagtcccatattttctatactgttaatgtataggcaaactgtgttacatggtacatcagttctggtacaaattagaacccaaaaagctgcagtagaaagccagaaaagggatagttactccaactttggaatggataaaaataaaggagtgatttgaaattggaaattaagagaaagaaccaagggattaattttgtttagttattatacatattatgttgaatttttttgaggtttgcattgtattgtatgtctgaagttttcttgttatttaagttaatctgaaaataggagcgtttcagccgtttgtttcttttttgggatttgtaggtctcgtgttttcttgttttttttagcataaggatcaggtacatccgtg

SEQ ID NO: 4568 - DNA, 2107 bp, Medicago truncatula
  Intron number 1 from transcript Medtr7g139190.1 (locus Med tr7g139190) derived from phytozome v7.0 (chr-ID MtChr7; po s 33229412 to 33231518 reverse strand)
tctccaacttgtaagtgctgataaaggtgaccctggttagtattttcatcctcatactttgttctttctcttcttcttttttttccctataaatttttccccttttacaattaatcatgtttatttctctttttgtgatcatccatatgccaacccactataattaagtaattttgtccaagtcctaaggtattctcaaccacaagactatttaatttgaatttactataagattgatcatcggatcaacagcctcccgtatacttgatttaaacttagttcaaagtcgatgcaaaatgttgtcttattcttgtctttgacacgtaatatattaaaacctttgattttgaataaaaaagttaaatgaaaatagtagctaatttcatttaatttattcgatgtcataacaaattaatgtgttatgtcttatatgaaaatttatttcataaaatacgtgttattacaaaataaattttaaataaaatattttaaaaaataatactaataactataatataattaattaaaactttaaaccaccgattttttccttatattcaaaatttgattagagtagttcttctacaaacccttagaatattttatttcttcttcttcttttttgaatggatgtgaaagtttctcatgcattacttgcaggtgccatttaatttaaaaaatcacttcctaaggatgaaatagtaaaatcacttcctaccccaacctatacgcttcagtaccctattcgcagccccaccctattctgtattctgaaaattcaacgagttcttctttttggttgggattgggaggttaattaaggtttctcatgggttaggaaaaactaatttctttattagataatattaatgtaagttatattctttaaaaatggatcttacatcttgttaaagaatagatctcaaataaaattataaaaatctatatttgtttcttccaataacaaaatgagcattgaaattgaaagtgagtgttcttaatagtgtgcaacacaatgatgagttggtttattatgtgacttcggttagtcaaatattacaaaaacgatgatatggtagaaagaataaataaaaaacgtttgcaaatttaaaggacttatgtgttattaaaataatttaaatgactaatttattacaaacttcaaacttaaagacttatgtatgaccaaaataacttaaataactaatctattacaaacctcaaatttaaagaccttatggtgtaattaagtctatattttaaagagtaatattatgatataattaataagatggtgaaatacttattgcatctcttttagaaaatagccaaggctctagctagagtaaagctgcaaattaacttattataattatccatgaggtatcaactcaataagagcttggcattatactcaaagaaagaagttcaaatctcaactaaaacatctataaaatgacaattagtgacactgttatttataataatttacaattacaattccccacttgatttttaaaattgttattataattttctgcgtaggcaatttagactctagcaatttagactcagatatttcaccctgttttaaatgcaatcgtataaaaataaaaattagtcattaaattgaatgaaatttgcactgtagtccctggggttaagttgttgtagactacatgagacaatatttcatatacttgagattaaaatgacatattttgtaaccattaattgtagtaatcattttttttttagggaattaactgtagtagtaatcattatcatttagcaaaataactaccaatattatgtaaattctgggttatgtgagtattaaattattaccttgatggaattagatatgctcataataataatataatttttgtaaaaggagtttctcttacaagtcacagactaaagagttcactttagatataaaaaaaaaaaaaaaaaatacaactttaatttaccaaacttaatttttctatactgttaattaaatttaatataacccttaaaaaaattaatataaatataatagttaccaagaaaactatctttgaatgatgttttaagcttatgatgataaattttgaaggca

SEQ ID NO: 4569 - DNA, 1780 bp, Medicago truncatula
  Intron number 4 from transcript Medtr6g030520.1 (locus Med tr6g030520) derived from phytozome v7.0 (chr-ID MtChr6; po s 6736817 to 6738596)
taacaggtacatccaaactgatgaaagtaagagatattgggtcttcttcctttaaagagttcatatgctgttttctccaacataggtctgatatagatcctattttgaatataacatgaagtattgactgcttctgcccaaaaatgtttagctaagttgttttcatggatcatggttctggccatttcttgtaaggttctgttctttctctctacaaccccattttgttgtggagttctaggagaagaaaactcatggagaatcccatgtttttcacaaaaaagttcaaatggctcattttcaaattctccaccatgatcacttctgactttcaaaattttcaattctttttcagattgtatttgagtgcagaagctgctaaacacttcacatgcatagtctttacttttaatgaattttacccaagtccatctgctgtaatcatcaacaatgactaatccatatttacttccatataaggatgcagtgttaactggaccaaaaagatcaatatggagtaattctaagggtctggaggttgatacaatgtctttagatttgaacgaacttttcacaattttccctttctgacatgcaccacaaagtgcatctgaatgataatcaatgttaggcaatcctttgaccagttgtaacttgctaattttagaaattaatctccaattagcatgtcccaaccttttatgccatacccatttttatcattcattgacagaaggcaaactaccttctgatcagccagatcagagaaatttattttatagacattctcaactctctttcccttgaatgtaatggatttgtcatccttgttaactagtgtgcagttggtcttactgaacgttacatcatacccattgtcacaaaattgacttatgctcaataggttatgcttcagaccatctactagccacacattattaattgagatggaggaattaccaatagtacctgtaccaatgatctttccagtttggttgccaccaaacttcacttctcctccatctttcattgtaagggtaaggaacaaagctttctctccagtcatgtgccttgaacatccgctgtctaggtaccatgacctttgtttctctcttgcccttaagcacacctgcatttttggccaattcagatttaggtacccatatcttcatgggtccttttgggttagctttggaggttttacttttcctcccttgtaccttagggtgaatgctgagtggcttctgatcattcaatactttaagtttgacaccttttggtattgttttctcagaagcagtagctgctttgttcttctgatccttttgttttggaattttagattctggtttaatcagattctgatgaacaggttctgatcttttcagaattttaatcttttgactcttaggatcagattttgtcattaccttgatcttaagattctctggctttgatgtgatcttagcctgtgaacctgaagcttcaggttttgactgaacagcagttttagcatttgtaccttcaggcacaaaggtggatttcaatccatccttgatacaatcacagtagctcttgagactgtattctttggatttctcctcagaatatccaatccctttgcctttgttcttgtatgtgctgtagatcatagaagcaactttgcttctgtctattccagccataataaaatcatccaaggcaatctcatgtttattgcctgaacctttatcacatttttcttgtagcttctgacaaagactcttgagtctatcttcat

SEQ ID NO: 4570 - DNA, 2631 bp, Medicago truncatula
  Intron number 2 from transcript Medtr3g008490.1 (locus Med tr3g008490) derived from phytozome v7.0 (chr-ID MtChr3; po s 1004361 to 1006991)
ttccctggcacctgctgtagcgggaaagtgtaatgacactaaaatgataacagaatttgttactgttttattgaaccatcaacaatgatgaatgaccaactcctagtgtattaattaggaagaatagaaaccaaatacaacgtagggactgttgaagaagtgggaaacaagatgctaggtagaagaataagcaggggaaagaagaattcagatccagagggaggaggtttacctcacacatattccacacacttcttccgtacacgcattcggctatatagtctcaaacacattcggctatatagtctcaaactcattcgttgtgtgtattgttaaatagttttattgtatatgtaaaatgaaaataaatgtttttctgtgtctagaacagtacccaacttgccgacttggtcacttgggttttttaactgatatcataacagagggctttagcctttaagtttacatgtgtgtcttatatccatgtctagctggatttttaaaggttagggttgtgcttataattatcaacttctttagctgcatagcaaagcagctatacaatgctccttaatgaattcgtctagcgggatgaaatattaaccatagaagctaccaactactattgtataagatgtcatcttcattgttgtaacctctttattaccaatattcagccacgaaataagggcccgattgcttgtgtttttaaaaaataatgttaaaaattattataataaaatgtaggttttctactaacaaaatggcaaaacttcgaatgagtttgttttaatgcttttctcataagctaaatataacaggttcacaaaaaaaaaagctcaaatggtaagctatatgacaaaatttctttttgttatcttaaacaaatggactctatttaggaatcaaaaataacttttctgacttgttccaacttgtggtcaccataatatatttcatattgatctgattgttttaatattcctagaattatctaatctatgagtttacaaggttatgaagattttcattgcatttgcttagcagaaaggaagcacaaatgttagtaatcaaatgatgtgagggatagaggtaatagggtaagggcaattagagatcatagccatgatgtagtattttgtattgattaaaagatatgaaattatacactcctactcaaatattagcaacaaaatgcatgaatttgttggactcaatataggcaaatgtcaattgatctatccatatttaatgctattgtttcaaaaatacccttaattaattccttaatgttataaagagatatgactagttataattagggttaggttagtaaatcatttacatgaaagaaattacttctgctgataattgagtctgaagtgagtacatgattcccttattatagaattcctatgcatcaattatgtgacaaactcccactagaattgtaactactaacttcttcactcaaacttctattaaactttgaaacagtagccgcatcttattgaatcctgttgtgtttgaaagttcactgacatctagtggtaatttatgatttttttattcaacttttttgaatttttatattttattatgtctaaaataactgatgctgctaacttttaaaatgccatattatagctgtgtcatgtccgaaatatttttttaatttagtttatcaatgtgtcgtatccttttgcacccatgtaatatgttgtatacctgctttcaaggtgtctggccactggcactgcactccgctattaactattatgttttatataaatctttggtgtttggtttctgattgggtcatcgaaaacttacaatgccttattctgatctttgaagtaacgagtacgatattaaatttgtaaaatctactattacacctgtaattttgatgttatcgtccatgtccaaaatcaggatgatagttcttttgagatcactaaatgatcatgatgatattaacttgaaagtaattttgagattactaaatgatcatataatgatattaacgtgaaagttcttgatttcataatttctttggctccctggtttcatcaatataggagctaatgttaatttagtctaaaatctgtttagctcttatgtgtcatttacttgtgtctctgtatgctaggtattaaaattgtatttgcttcatggctttatttgttgtttgtgttggtccgttggagaatgatgcatttacctttcaattttttgtccttgatggtaatctgattatgattgaaatgcatttgctgaatctataaacagtagacatttttcattctaaagtatattttgaagaactctttcggtctgaggttcttgtatagagttttatatggaatgtataaagtgtgaagttttacaatctttttagacttcctttaatgttatttgttcgattatgaatgtatatgtcattgcatctttctctatacatctctttgtagaatggataatactgtagcaatattttatcgtgatataaatgaatgaaaagtcggaaaatctttcaagtattatcctagcatacttttgttacttctttttattactcacttttctttctttaccttgaggagagtttattttcatttgtgtagaatc

SEQ ID NO: 4571 - DNA, 1406 bp, Medicago truncatula
  Intron number 1 from transcript Medtr6g093310.1 (locus Med tr6g093310) derived from phytozome v7.0 (chr-ID MtChr6; po s 19962789 to 19964194)
aagctttcgccatctctctcttctccttcatcttggtttgttctcttcttcccattacccttttcaatttttcccaatttgattttaactaaaccctagattaatgaatcaatcctaatctgttttttaatttttatttcatatggttaaaaatagctaattgattggttgaattgaatcaattgatgaactttacaatttcaatttcactgttaaaccctacatttgccttatttgcttagtttgttgaaattatatatgcattgtttgttattgttatgcaattaatataaaggattgttttttcttcattttttaagtggctaatatatactaagcttatgattaatctgtcctggttttgtagtgttcttattttctttgttgcttctgacaaaaaaattgattggcgttgattagaatcctattaggagaaatgtataatcacttaaatcttgtccctctcctcacattatcaatattcaaaaacaatccctgaaactggatttttttttttatcaaatttgtctctatgttagaatttttagggactaggatgacattgagttggtactattgaggatgaattcaaaactaagtgaaaaatatcgagaatgcatttgaaatttcatggattagtttgggataatgataatgtaggggactaggttgatatagccctacaatttcaaggagtaacttgggtatttagttgattatatatgattaagtgatttatgcatttctcctaacagtaaactcaaatagtggatttatattcataaatatctgactacatatactattagtattaggtttttggtatgtgtctgtctagaggggtttcgatgtttgttatttatatcctttggttcaagaaggatcaaggttaacttgtaggtaaatttcattctgttaaattcgattaggcaacaaaagtcgaactttggaatttaaccaaaacattggctagtcttgtgcttatgacattatgtattctttgagattatatagttcttttccttgtatctgttcttgaatgttatattgattttaatcgataactcatcttgatttgtctctttctttaagttgttatatacatgtactataaatcgagagcatctaatcaaaaaaataaattgaaagatggagtattttctgccttttttttggatgaacagaagtatttactgctattgttattaattatgttagattcatttatcagagctaagttcaatattggtagctaaaaagcaaaacggaattgttggaattaggcatctttttgagaagttggtttaaatcggaatacatattgtagatctttttcctatgcatgattataattataatttttttaaatagtttgcacccgctgactctgaagccaagacgcacta

SEQ ID NO: 4572 - DNA, 1377 bp, Medicago truncatula
  Intron number 1 from transcript Medtr7g077520.1 (locus Med tr7g077520) derived from phytozome v7.0 (chr-ID MtChr7; po s 16371255 to 16372631 reverse strand)
tttgggaagcactgcttcttaactcagaatctaaggttacctattcagaaaccacatttgctggattgttgagcccataataatctgttatcaactgggccaggcccatctgagcttgacctgtgcgccacatatgcaaatgcgatatgcgcggagcataatcttagtgataaaatgagagacctgattttgaagtgtattggctctcattctttagagtgtttggatgagggaatgtgattttttgaagtaattgaaatgacttgcatctaaataccttgtttggataaaatattctctctctgtctcttgagctttcttgagcttctctctccagtaacacactctccttcgtcattcatgtgtatgcttcatttttttaccttcactctgattttacgaatgattcctgttttattctttaattttacttctttgactattttactgtgattcagctttgtttttacttgttttactgtttgaattgatttcataatgttcaattgaaattgaacctcagcatgtttgatttgaaggaacagagacacggttacaaacttatcgtattggatttccgtttttcgaatttttggattgtttgagtatttagtgtggaacatgaatgaattcactttgattgatgttcattacttctgtgtgaatcatgaatatgaattcactgtagctgcagttgctacttcactaatagtgtaaccctttatcgttaactaaaccagtagtgtcatttgtcattgccagagctactgtttgcttgttaccaaagaaactacaatttcaatagtgtaggaaacaccatttaaatcaaattgaaacatatatactcatagagcaatcacttgaggctactttggttgaattaagagcacaatcgaaacagtttttagcagatatgtaagtacttaatgcttgtaattgttaagataaatgtgtttcttgtacttgtaaaattctgcatattgggaaaaatgagatgattatcatgatattatgagcttctaaattcatgtgttggttagttaatgtctaagatattttatgattttggtaccttgtttttcttgtctatgacacacaaaatgcttgttttgaaatgaggtaaacaatataagaagaaattagtggttggttttgaagcaacttctgcccctcttgttctttcaggttttgtagttgcttctgctaatggccttgcagtttctctgtcttatgctttcttcttggttttccgttcatacactcatgatttaacgagtaagttgctgcctaagcctaggcctactcctcagggacagggtcccctgctacttgaagcagagaaagacaagacaatggagtggttgttgttttacagga

SEQ ID NO: 4573 - DNA, 1871 bp, Medicago truncatula
  Intron number 3 from transcript Medtr5g005530.1 (locus Med tr5g005530) derived from phytozome v7.0 (chr-ID MtChr5; po s 230323 to 232193 reverse strand)
aacaagtgcacaacttgtgttggaaaccactttaggtctgtaatcatgacttcacattcattctaactttcttatttttagttatttcgatgtgcttcaacctgggtcaattttggcatgtatggtatccgataatctatgggtatggggatactgcaatctctgagaattgaggtgatatttattgcacggtatgcattttgatcttgaagtgtggacaatgcataggcagattgggtagttaattagtcagtcctttaggtagattgctaggagaattaagatgtttcctacaaatatggggatgtgcagacccttgaagttctgcaattcattctgtaatttgggaattcttccctagttatttccatcaaagatactaaactctatcaaactgtaggcgacttagtagtagagtctttcataccatgtcttgaactaaccattcaaaaattgactagtatctctcatacttttccttaccgtgcgagacgcttccagacatgcgactacaaatagttgctcagaagaatacacatgagagatgtgctgcttgagaatgtgtgatggggccttttaggctggtatttgggtagatcggcttgtcgttagtttattggtgcgggtgggtgctagaaatgtcactggaaaacaaagtggctgccagaaaaacaagtgaaaatggtttcggaaagtggtcacaccactgaaggagcaaatcagatttgaaacacagttttacgaaaagttttcttaccggacagtgggtccactgaataaactcggttttagggttgcctctctttaggctctatattccatgttgaatgagggaaaaaagaggcattatatggtgtgaatctgtctttaaactacaccatggagactctattatgttggctctgaggaatcaatacagaatcacagccctaacgatataataactatgatatcatgtctatcctaaatatgaaatattcatgttaacgtaatatattaattacataattatcaaaaccctataaaatatctctctttgctgtttcctaaaaaaattgaatgtagaaaatgaccaaggaattttatgcgctgaactatttaagaataatttagattttcaatggtttatctttaattgagatttttgatgagatattatgacatcttttaatcagtgtagcacatggttgttaagagcgcgatcttaatcgtgagatcgtaagatctcatgtttttctccctccaccgtgttggagcggtacggaaatcgtaggagaggtgagcgtgcagaggaaaattgtaggatctcattctggtttcacacgattctggcccggtttagcacattttgacctgatcgaactgttttgacttgggataagtacctttacaaaccagttccacacgtttttgactcagaattcgacccacttttgattggaaagagggatacaccgaacatacacatttttttcgggacttggtgggtttaattgagaaattatattccaacttggaacctctcttttttgcaattactattccgctgtggaaattaataaaaaatttatataatttatgtttaggtcaaactctctcatcattatgatcaaatcaataaaaaaataagtttttttaggataattatgttaaggttatatttttttagttatttctataattttgtctatcttgtgggatcttataatccatgttaggattctatgatttacactctttctatactaaaacgatttttggcgggatcctgagtttgacaaccatggtgtagctcacttcacctagtgggaaaggatttttgttgtttggtttgaaaaacgtgtgagctaggagcttgttttgcaggtagg

SEQ ID NO: 4574 - DNA, 3273 bp, Medicago truncatula
  Intron number 3 from transcript Medtr2g107420.1 (locus Med tr2g107420) derived from phytozome v7.0 (chr-ID MtChr2; po s 25260501 to 25263773 reverse strand)
ctgaagaaactgttaaagagaaggtttttcagttttttcttatctcttatttatgtttagtttatgaattaatgataaatatctctgttttcgagtgtttagttgatataattggtaggtttagttgaattaatggtaggtttggtttgtgactgcaaccccaatagcttagattgtctcttgcatattgttattgttataggctctgtttggataaacaacttattttcagtttataacataagtgcttatcatgataagtgcttgtgtataatgtatttctatagcaactaatgaagtaaagatagattatttttgtataagctatataggagaattaatgaaaataagctgaaaatagattatgaacaattttataagctgttttcataagttatcccaaacagtctcacaaaacttatgaaagcatataagctcaaataagccaatctaaataggcccaatgtattgtatcactatgtaagggactcatttacaagattgtgcacatagcaatataacatagtttgggaatatcaacacccaaaacaaatctaaattttaaacattagcataaatctcatcttgcacttggcttatatctcagggtggagtccagtcaagcgttatttataccgtgtcatttcatctgaatattttttccggaaaaacaattgcttgactaaattattcgcataggataccgacaaaaaaaccatcaaactcactgcccagggaactgaaacccattagcaacaaaaacccatattccctgaattttttaccgccctttaacagcaaaaggaccaatataattccctgtactaacaaaaatgtctttgatttcaaaatccacgtatggttaacttcaaaccttagaatagtatagaaatgacagaaccttgaatgataaacatattttgtaatctcttcttcatattgaagatctgtattcttgggccttcacttttgtggcattataatgatggatttaaagaaagggaaatgctaacaagagccctagtgccctgagggcacttgatggatttaaaaattagattttattttttttcaataaccattttattcctatggaacaagttcccgtgatgggcaatttgaggaatacaattacctttctgattactttaagaaaaataatgaaaataactatatttactaaagtgtgtgattgggttttaatctgattggttgcttccttaacaaaatgattaaaaatggcaatggggtagcaatttgttatgaatttcctttgcacatcttaccaattcttaaccatttagaacggatatattactttatatggtaacttggagcttttgcttggggagttgcattttttttagcccttttggtattcattggcattttgttggggaattgtgtgcacgcacataagtgtttataaaattcatcagcaatgctcaagttctgttcaataatgaagcacaaatatgtttgtttccttcacattacggcaaattttaaaataatctctttacccgtcctctcttattttcagccttctctctcatttcctaattctagaattttctcacccactactctctgcaacttgttccatctgttagtcgcagcccattttgagtgggtattttcaatatttcctatcctcctaaccaatgtagtcagaatcgagatcctacgtaggattggtcggccagtgaaagaaagtaaacacaaggcacgtaacacggtttgtaagtaggatcggtaggttgttgatagagttgagaggaatagatagagaaaatagaggaaaaacagaggaaccaagcataaaaacagagataatagaggaaaaacagaggaaccaagcaacaaaatagagaaaaacagaggaaaaacggcaaaaaacagaggaaacagaggaaaatggcaaaaaaacagaggaaacatagcaaaaacgaaccggagtaaagtcgaaggatggtcgaggttctgtggaacgtagaatcgtactctcctacgagccagcactcgatcctgactacactgctcctaactactgaggatctaacatactccccctcacccccaaaagattcacagatttgataaatttgaccgatttgtgcaaggaaacacaaatgtgtgcaatcaatgaaatcttatgaaaaacaaatatgagtttccttctcatattagtaaggagtacaactccaatccattgcccttctcatattaataatatatttccatactctatttccagagtagcactagtaatattcaatattccattctattttgcttggttcgtatctacttatcatatatttttcaagcatatttgtcttatcaaattggataccctgcttctattttgtttatcttatactgtaattctttcgagttaaaacatttcatttgagtgaattttggcgatgcaatttaaatgttgtctcactgggaatagtgatgcatttatgggtttagatttgaatgtctctttttaagaacatttgcacttgtagaagatatatacaatgttcaatggaacatcacattcgttggaaaattgcatcctatcctctgtatgattcaatgtttatcagtcattatatgaaaatattgttctaaattttggagcctgagccataaactctctcggtgctaaagacaaaatgtgtcacaccaaaaacgagataagagtcagttcagatagaatattctccaaatacttgtgttagaaaagttgaaatagtctaacaatgattatggagttttctaaacaacaattgtgtgcataagttaagatcagcttcgacacaatctccataaatggttttatcatgaattagaaatcaaatacttatatcagcggaaaaactcttgtacattgctccttgcggtcctaaataagagaaagttaggtcaataaccagtcctaaataagagaaagcgaggtcaacaaaagtcaatgtgtttggtctctgacaaaatacgtcgacttttgttgacccaattttctcttacatttaggaccatagggagtaaaatctatttcaagttggcccatgtattatgattcttgtcatcattgtatataacttagtgctatatctttgtataattgttacatgtttcacgtgtaagctttctaactccaaattttataacagataaatatctgttgtggccatgctattttaattttactgaagttctctttaaatgatggtgctctctgcagattattttagtacaggagaagaatattcgaagact

SEQ ID NO: 4575 - DNA, 3295 bp, Medicago truncatula
  Intron number 2 from transcript Medtr2g071440.1 (locus Med tr2g071440) derived from phytozome v7.0 (chr-ID MtChr2; po s 16419614 to 16422908 reverse strand)
tttcattgtttgagcgccgtcttgaaaaaaaccaggtactctaaattttcattgcatactttttgtgtggataaaatcggtatttcagggtctttcaaatatttgaaagaaaatttagttttactattcacgtcgtaatatttctattaactgtgtgtgctaagtgctaaccattctattcttttaattactactaattgtgttacttagaatttaaaattataaaaaatcataaaatatttacaagtgagaattgcatacgatcttaacaaaaagggaccactatcttttctgttgagatagatagattttttatgcgtacgaagtttgaggactattgaatttgaattgtaaaaacttatcaatttttgtggacaaaatatatttttagttcttataaatattcaaaattttgtttttaattgttataaaacaaaattatttaatataactttattttttaaggattaaaaataaaattttaaatatctataggcatttaattattattttttattttacaaaaatgagcaagtttattctctaaaaatataccgcatctgtctcaacttcatatgggtccaaaaaaagattatatgggtccaacgagagttgtatatttgatagccttatatcgtgttctgtgtttgtttctgttgattgctccctgttgtttttgtagtcctatgtattcacggttgatatcactagcaatccttagctatctcaacaagttttatttttaccatataatatatagtatatttttttttttgttacaatagtatgtgtcaataagttcattaatatcctcccaattttttttcttcataaatatcctcttctaaactattaaaaagaaatatctttttctaatatttattattacttcatattatacattagaatatattttttaatgcattattaataagagtataattgaattgatgtataatgtactgtcacgtaaaagtgttttacacaagacattaattcagatcttatcacattgatatttggaagatatttttagaaattaacttattgataacatataataaaaaaatttacatcgacaaataatttatattttaccttaacttgttagtcgcaattcacaaaatttaagcatactttttatatgatcagagggagtatattataagaggagtgttaataatactctttaatgaagtggtttctttcaaaaaaaaagaaaaactctttaataaagggattttaatattttctcctgtataacaacaacattatattttttaggcaagtgataacttgtgccctgaaggacaaaagttgtgcagtcaattttttaaaagttaaattatcatgtttttcaaagttgtgccctcgggtagtttagtggctagaattcacttcataaggtgaataagtggggtgggtgtccgggtttcgaccccgacccttgcatataataatgcattgtcttactatgtgaaatatgctcacgggacaaaaaaaaaacactatactttattggtttaattcatgaattcatgagttctatcaaaattaaatgagattcaatatttgatcggattcatgaatttcaattaataaaagagaataaagaatgtgttgattgcaaatgttatgcatatttacattattgttcttggaagaaaaatgtttaaaatttttttcttcctaattttgggaaataaaatgagaaaaattatactttagctgaacacgtgcatcttctgaacccagattgggtgcatctccatgcaacgtgcctaaagatgatttcaggctgatatttagtccaatagctagtttattattgggctacgcccaaaatagtatattttttacaataaattcaaaataatatatttttgacaatagaaccaatataatttttttttttttaaaattagacccaaatattaaaaaaaaattacgaaaaagacccaaaataatcctaatgaccagtattttatggttacatgcttgttgaaccagccaaaaaatcagtactaccctttaataaggtggtgacttattttttggtcataagtcgtaatcatccaattgtgtctttaaagttgaacgcctactacttttgaaagtagatttatttgttacttattgtccaaaaaatatatttgttgctcccttttttttttccgagggaaatttgttactccttttgtcccgtaaaatttgtcatattaaattattatttcacacataataaagagaaatttcataaataaaaatgtatataacacaattttgctaaattaatagaaactaaaattacattaaaattcaaaattcacacgctttttgaaacatttttccttcaaatttgacaattatcaagggacagggagcatatattatttttggggtggatatcaccaaatttttgtataaccctttgtttagatagatagatttggaaaggggagaacatacttaacacttttttcgatatttagagaaatgggaaaggataaaaaaaaagaaaaaaaaaagagtaaagattggaaaccaaaaaaatgtgaaatatcaccttttgtttggtcgtgtatagagactgtttttattgtcgaaaaaattacgagtcttaaaaaaaaaatatataaattatcttctacaactttggatgtggggatgggaccctctttataaactttctctttttagtaaggcgagacttgtgctatgtgaaggatcagtaaccggtaattatgtaaaagttatttctttgaattaaaataattgggaaatgtacggcttgtcattcaatgtttttagactatttttcacttccaaaaaactactaaattaccaccatatttttaattttacttaacattttccatttaaaaaattgaaatgttaggttaatgctcaaatttcatttaaaaaaaaaaaagaacgatagtggaattgaaaatgggcactatcttttttgagctcattcctttgcacgtcctttctcgtttaaactacaaaaagcgacgttttagatgtgttccttttttggcatggtaaataggataggatatatccaaagtataattgatccctgaaatcaatcacaaaaggtaaccaaataatggtagtagtatattttcattatcggagaatatgtttttttactctcttctaatttaatcaaagaatttgtatttagatatgagaatgcaataatattagataaaagacttttaagtcttagcattctttatataaaaataaagtttggtcccaactaggtggagtaaataatcaattt

SEQ ID NO: 4576 - DNA, 1178 bp, Medicago truncatula
  Intron number 1 from transcript Medtr1g046250.1 (locus Med tr1g046250) derived from phytozome v7.0 (chr-ID MtChr1; po s 10710490 to 10711667)
gaaaaggcttccaagtattctaaggttagtgcatgtctctggtttccctttgacaaggccaaaagtaattatgaaaacttaaaattgattttagtaagttttttgaacgttcctattagaattgattttgtctccagaatttattcaaacttgaagttgatgtttggattcatattttgtcttaaaatgtggatttttattcaaatttattgttcaagttacttttcacatgaatgtacttttaactaaaattaattttacaatatcaattcaatcaaacaattgttgccactgtacgtaaaaccaagaatggctataagaatttttctttattattcttcttaattgtatttgtttacacaattggcagttgaagagaagaagaaaaaacagaaattgaaaaggagaaaaagtaacagttcaatttcaatttctctacagattcaatatttgtaccaaagttgaagagttttatggctatttatgcactcataatgaaaagcattttaacattgtcatccatgcaaataccaatatacaaatatttataacaaaataacattatggtaagaacaaattagatgattgtgtagagtctagttggatggatcgattttagtgcaaaatctctcacaactcaaatccaagaacattatacacataaatcctctaaattttgatgcaaaagttggattcctgacctcttatgttgataagattaccgagagaaagaacagagttaccaatgaaaattatttgtctttctttattatgagctaataattaaatgtgctaataatttgttccttatatctctattattgagttgagaagatataccttggactgcaatgttacattcgttgaatgataacaaagtgcatgacacatcaaaacacttacacataaattgaaccgtccttttatgtttgtttggctaagcatattaattaaactcttaaagtaaatacttacggaataagtgcttaaatatatataagttataatcatacaattttcatgaaagctacaaacagttatcataagctaatatatagagtttatggaaatgttgtcaacttataaacatgttataaattatttcactaaattcgatctctggatttggtgtggcacaaacaggtttttttgaaggtttttgttttcgcgtggaggct

SEQ ID NO: 4577 - DNA, 1244 bp, Medicago truncatula
  Intron number 2 from transcript Medtr3g064560.1 (locus Med tr3g064560) derived from phytozome v7.0 (chr-ID MtChr3; po s 14760180 to 14761423)
gatagaagttatcataaaattctataatgcaggaatttaagaatcagaaatgcaataaaatacactgtcagtggagtcaaccctggctacattcattatattctgcttaattcattatttctcctttcattctgtacataaggtagaaaataataagacagcttccttgaaaataacagttgtatacaattgcctatgatttaatggtctctgactctaacagaaccgagatctagctttcgcatcatgaaataacttgcttcaaagatctatcgctttacgcatgcaggtttgatctattctgatattgtcacatatgtttagactgtcgtgcaattgacaatagtttaggttctgttagttgacatatcctttttgcatttgattgggtcataagttaaatatgcatgagagttctaatggtgagctcacttaaatttgtccaattgtatggtaaggttatgatgaacaacttagcaatttgaaaaggcaaggatttcccgtctctcgtctgtcaagatagttttgctataaagatgtttaggggaagtgtaagttgtgttgaactaatctcttttttacaacattatggctaagcgtttaagtagctgtgaaaacaaacaattatttttgctactatatataactttgatgaaagaacgtgagtttaaagcttgattctgttgtcgtgtataccattgattcatgaaggtacaaattttgtcaagtatagcttgagtttagtagtgtttagatttgatataagttatcgaaattgagagaacactcataaccatagctgctagtcctttcaatgcatttcttttaaaatcattgtccttgctcaaactcttgttgttctcggtagatgaataaattagttttcttttcaaataattggtattgttattggaaggataaaatggtagaaagtctatgctaattggtctaccattctgttcttgaaaactattatttgaaaataaccatattttggtagttgtaatgttagttgcaggctatcgttgattgtcgtaacatattttaaattacataaactgctcatcttattacttaatttataatttaaaatcagcttagcttgattttaatatgatgcaaatgtttttaaatatcatttcttttgttcttaatctcatttatggacatgtcctctctcatttcctatttgtttcaataaacaagaaggaagaaggtttggagtatccataaagtgagagaaa

SEQ ID NO: 4578 - DNA, 1462 bp, Medicago truncatula
  Intron number 1 from transcript Medtr8g089620.1 (locus Med tr8g089620) derived from phytozome v7.0 (chr-ID MtChr8; po s 19311631 to 19313092)
gcatttcaaaattgggtaactaccttttacatatttgtttctatataattatgttttgttatagtggaaacacatttagggtgggttgatttggatttaaaatagtttgaaagaacttaggttctgattggacaagttaaaactaatggagcggaatagaacaaaagtggaatagaacggaatatttcattttattgtttggaaagttgacgaaacataacgatttataacttttttattctaattttatcctttgttgttatccttttttattctgtactcaattcaatcaatatgttgttattttagcagcatttgtaagtagcaacaaaggatgaaagtgatgaaaggatacaattagaataaaaaaggggaaggatacaattagaaaaggatacaaaataattctccaaaatccaacatatataaagccagcaattttattgtagatttgaagtacagtttgaaagaagagtatgttaagtcacatattagttattacagcgtcggaacaatagttttcaatattaattaaggtgtaaagcaaattttaatgtgtggggtcttttttgcctttctatgtgacctttttgtttatagtatctaatgaaaaagaattttttgttgatgtatttaaggcgagagcttcagtagccttacccataaattaccctgactacaaaattagaactaataaccggtggggtaaattgtgcttgctcgtgactcataaatgaaagagattgcctagatgctactatataatggttatgaaaaatcatttcttgaaatcacaatgtacaattgattacttgctaatcatgagatcaacaacaatatcacaaacaatacaataccagttactttcatccttttgctcaggagtttgcttgtggcaaactttgtatagatactttaggagggagtagttctttgcggctcttatagttaactttcatctttatcgtagtagtttagtaaataataaagattaaaaagctaacattgttgatgtttttaaacatagaagaagtagcttgatgacgattaaaagacttgtattgtatggcacttcaaatttaattaatgggcttcagatgtagttttagttttgtcatcattataagttctaacatgaaattatgtctgtctcataatgagtgtcacttttttaaaaaccaaactcaaaatggatgtcatttttaatgtaatactaattattatttttttgtcaagtattggtgcatttatcagtgtcaagttattatattttgctttatatttataataatgtcggtgaatacattgatactttaataacacaatatgataaaatcactattttgtttattccatttgaatattttttgtaatatatgttgaaatgtgatacccacattgtgggacatagtaagtaaaatctttgataagtctcaataaaacttgctttgatttgtcaggg

SEQ ID NO: 4579 - DNA, 3536 bp, Medicago truncatula
  Intron number 2 from transcript Medtr1g099110.1 (locus Med tr1g099110) derived from phytozome v7.0 (chr-ID MtChr1; po s 20175209 to 20178744)
acggtggcggtggaggagagtgagacgactctgaggtgaagggagaggaagagaaaatgttgattttgtttgatctgtttttatttttttttacaagatttatatgagctttgacaaaactgccctcaattaagtgttgaaatatcaaaattgccatatcatttgggggtgtacaagggtatgttgccagctatgtgtgtatagccatcaggactcaatctcttttcatgtacgatgtttaaaggacgatggactgcataaagaaaataaaatgaaatttactacaacaccctttataaatctcaaaatttatagaggagagagaatgtttaaggaacaaatatctaaacttttgtttagtctctaattgctccccattttatcatatgattcaaaccccaacctagaaaaaaaaaaaaagagttgttcggtctctcatttttctgctaacccactcataaacattatttgacacgtgtatcattttgtttaatttaatctttatatcattagagaaaaaattgcattctcaagcaagacaacaattaagctgtcatgcgtacgcatatgttgggcagttacctcgcacagatgctgaagtcttggtttggttcactagctagggttctgttgggatattatttatatatatacacgatatgatatgatgtactataagattaatttcgaacaaatgcatgcatgctgctgagtctacacgatggagtgggtaagatatatcaaatttcggctcggttaattcaaattaaatctcactcttgattacccacctagatatatagactgaagaagaatcaatgaaatgtttggaattggctcaatattagttgtatctagctgaacttaccggaaaatttgtctgtatcaggttatatattgaacggaaacaaacaaaggtttaatttcaaggtttgagattttgttgtttcctatatatatgtatatatagtattaattatatatgcatattctaaagttgcatgcatggtcgtctatatataaataaattaatggcaaatctcatatatttaatctcactgttaccatttatctgttagtataacagctcatccttgagaaattttatcatggtcacaaatataaattagtagtgtttggacacacatacaataaaagagttttactaataataaaaagaaatttataacaaaataatttagtattttgaagaaaaaacctttttttatgtgtgtgagaaaacactactattcatttatgtttgtaaccatagaataatacctactcatctttatcactttatgtcatggcttatgagataggaccatgataatttttttttttttttgaaagaagataggaccatgatatttgaacactggatttttttttatacattcatctaacaccttattttatttctttttcttttaaagagtctcattttatttctatatatctcttcttattttatttttttgacaaatatatatctcttcttatctcatcatcaatttatctcatttatcatattagtctttttttctcttcattcaaggtctatacactcgcacagtggtatgaattgtttgaaaatgagttcgaatcccatcaaaaacgttatttttaatacagattgtaagagtaaaagataaatatgtaaaaaaagaagaagtcatgggggtgtcaaacccacgacctttagcatattgtagcaccccctatccactgcaacagtcagaatttgatcaataaaatacatctaatatagtatataagcaaaactttagggatgccgtggcccccgtcggtctctgaagagatccgccactgcactcgcatgtggtgtacactaaacattttgctatgatataattaatactattactttttttttttttagaaaattaatactattacttattaaggttttcatcaatacagcatatattatttcaaaaaaaaaaaaaaaaacaatgccgcatatatgtattaaaaaaattgaacattgccagaaaaaaaggatgtagattaaaccaaaacacaacttgtattaattatatttgagctttgagatacattgatctaagtttttttttttatcaatcagtatttaaatcaaacttatgatttttttaaagaaaatcaagcttatgattgaattgttttccaggattttgggatctagtcggtacaatcttctctctgaataattagtgtgacaattactctgcctctaacatttcttgtggggataacttcacatatatttttatttttttttatgtacaatcttcgcatatatattaccacattaattaaaaagtacaagatgcgcccagctggctagagcctctatgagagggagtactaattaaaaagtataaccgatcaggtttacttcctctggtattgaatataagaaaagatttatatttttcattcattgaagaaagattgtatgaatcttaaaaataaatcttttcatatatttgagatcggaggaggtatttaagaaataaattccaatattaatgcacttcatacttaattttctagagttctaaaagattggatgattgtgattttaagtgtgttgtaaatcataatttagattgaaatttaaacacaaattgtctaacctgtctattagagaccaacttcctatttaaatgacatattataatgttgggtctaataaatttagtttataatcggagcattagttccatcaagaaaaaaaaagacggagcattaattactttagaatcatcactatataaatggattttctagatttaaaaagaatggatttttctttatattttttaaaatggattttttttttaaatttactcaaaaatagtaaaagttatttcaaactcatttgatataagttaaaaaagagattttgacattcactaatttaaatattcattgttcgagattttacatagtaaaaatcacatattttttcaatctttcaaaaataattttcatgaaaaactatttaaaataattttttttttagagattttttcaaaattttagtatctaaaaataattataaccaaatgatgaaatacttagaatgacattttaagataaactatttaaacggatttttcatttgaatttttccttaaaaatttctttaataaattataacaaaaatacattacactaataaaatctattttaaaaaaaagtataacaaacgggcccaaagtatattccatacatattgcgatcatcaatttctatctaccaatcctgaaatcaatatttctctcgttttatttcctcttgtgggattgtaccatgcttttctcaaccgatatcgaagtgaattccccttaatttgtccaatatagctgtcaatattattgcatagaataaagtgaggagtgcctccaaaataacaacttattattgaaagtcattagggctttattctaatttcactaactagttactgtgtcggtatgaagtgtgaaccagtactgtgaagtgtggaagcagaaaagctaaaattt

SEQ ID NO: 4580 - DNA, 2027 bp, Medicago truncatula
  Intron number 1 from transcript Medtr6g013950.1 (locus Med tr6g013950) derived from phytozome v7.0 (chr-ID MtChr6; po s 3160575 to 3162601)
ggatcatactttctcttttttctagaaaaaaaaaggtatgttattattttatttttttaatcttttcattattttcaacaaaaataatcatctgggttgttgttattttttcataaatgctcataaatgcaaatgggtttgttgaaaaatttgatttttattgattttgatgagttttaagaatcaccctttcatttttctgttttatttgatttgtttcatctgagttttccaaagttttgatttttattttatttgggggtggtgggtttgtatgatttttattttattttatttttctggatttgaattcgaatttgtgatattattgcaaatttgttgtttatggtgttgtaagaaaagttttcttggctattaagttttgttatggattttgtgatgtgatgttgttgatttttgttcaataatgatcaatgttatataaggtgatgttttgtttttggatgaattttggattgatcttatgattctcatctcatagattgcatttctcaatcttcattgattttcatggatgattggttttatgaagctctgacacggataccagacacaacacttacaggataagaaaatgacataattgaatgtaatcacatatgccagtgtccagcgccttcagcgtcggtggtatggaggtcattggttgcatgattaatgtgattgataatgataagtgcctttttatttgttactaaaaaaagttacatcagattcagttaaaggcaaagctaactgtttcacaattatgacaaataattttacagtacaagtgttttcatgacattagaatgttgttaattgaagtatgattactgctttttcttttgaatgtatgatgatttcgtttccatggtacatttctggattaatgatagctgtttcttgtgttgcattaatttgttctatgtctgttatttttgcaataacatgagagtttattgatctagattaaatctagaagaatcaattattgaaaacaagttggacattttgtgcaaatttttttgttattgcatttactcttttcagtttcaaattataattttattatcttttttttgtctaagtaaattgaggtttttgtttttttttttttagtaaaaaaaggaaacacgagaaggaggggtcgcacctctgaccttgtgatagtattctgaaattattttttttctaaattgaggctagtttcgaagattatgattttatatttcgatgattttttgttgaataatgatcaatataatgtgatgttttgtttttggattgatcttatgattctcacctcccaggcatgataagttaaatgattggttgcatgaaaagtgcctttttactatttgttaaaaaatttacatcagattcagttaaaggcaaagcttactgtttcacaattatgacagataacttttctgtacaagtgttttccaagacattaggatgttgtttattgcagtatgttttctgatttttgttttttgttttttgatctttgatttttttcctttcgtagttggtacatttgttgtttaattatggctgattcttgtttcattatttttttttccatgtatgttatgattataagaatgacaagaaaatgtattgatgtggattgaagttttgaagttttatcagattagaatcagatgtaataaacaagttaggcattttttttgtgcaatggagattcttgttacaattcattttgagtttcaaagattatgattttataggtgatcaatttctaatttttttttccaccataaatttttattatttcaatgattttgtgctgatttctgttttttgagattatttttgaatatgctttttgtattgtatttattttttattttttttttttttgaagaaattgtattatttgattttagaatcagtcattacttaaatgtctgtccgttttaattatttgatgtatttagaatcggctttctttttgaatttcaggattgtcattcttaatcgtgttctgcacatctcat

SEQ ID NO: 4581 - DNA, 1189 bp, Medicago truncatula
  Intron number 21 from transcript Medtr5g014010.1 (locus Me dtr5g014010) derived from phytozome v7.0 (chr-ID MtChr5; p os 4376328 to 4377516 reverse strand)
ttaagaggtaatcaacttcttaatggcatcatttcctttcaaacaatgacattttacaactggcataaattctgtttaaatttacccgtgtctgatggttacgttaagaaatcaaatctgaagaattattgcatcattttatccttactgcatagaggttttggtaagacttgtctgagggaaagtgtcatttataatattcaaaaagccgaaatatggatttatttggtgtgggtagttagttatctttgcattttcaatgctacagaaatggttatttcttatttcatttttattctgtgctttcactactgctttaattgggccacacagatacacgccagtggcgtgtatctgtgttaaggagctcatgttgaaatatcacaatttctcctgcgtattttctttgtactactctgccgtgtttggtcatcaggtctcacttcctttacaccctctcagattcaatcttgtcacaatcttccaccacaaatataaaagtttgattttgcaaaaggatgtatttcgctgtgaaaatattttagtcgcgaaaatatggaaggtagaaagattatagagttctggaataggccactaacaaaaaggcattttctacagcgatgtcctcccagagcttgatacaagtgccaaaaacccccgaccaagggtatgtagtgctctgaaaaaatatgaccctaatagatgcacttccaggacctgacataacaagcagtgatcacctgacattacacctgtttcaatctaaaccatgcactaaatagtttgttacaatgggcatccagtgaccagatccattttgccactagagccaatactttagatggccaatttctgacacccaatccttacttagttctgtagctcctaacaatttcttttccagattgcccactacttttccttagccataggtaatcccctcatatttccccattctttttgagccatcaacaaagtggaagcaatgtcttctatcaaatgtgggctagtcattattgttacatggatccaaggagtcctttgccactaaattggttttagttagttttgatgattttgctttgcttactataatttttatcgcgtacgttcttttagaacttcttggtgtacgtattttttaacgtggtactcttttaagttttgatggaatgctcttgcagggaag

SEQ ID NO: 4582 - DNA, 725 bp, Medicago truncatula
  Intron number 17 from transcript Medtr3g117540.1 (locus Me dtr3g117540) derived from phytozome v7.0 (chr-ID MtChr3; p os 29634562 to 29635286 reverse strand)
ggcccgagcttttctgcaaggggcagttaaccaaggtttttttctacagattgacctacattgtactgttttactgctatgtgttgtttaacagttcaagtcagatattgttattattgttctttccccttccttctcttttactattattattctgttgagtttataatgcttttgaggggaagttgtgtttctgagtggggaatacaaacagaaatgcgataaatttgagctaaattgcaatacctttttatttgtagtctgtggttgtgtttgatttgctgaaaattaaaggaactacaacacatatttcttgttctacgtttggttctaaaattgccatggtacaaaacaaaatacaaattgccatggtacaaaacaaaatacgcatttgcaatatacaattggttctgaaagctggtttatgtagcaaaaaaattaatccaaaaaatttcaataaatctttttcattttggggacatcctagttttacaaatcttatgccatgtggggtaaagtccattgcaggtctatatataggcagtagaacaacatattacaatatactgtcatacaaaggcttttatatcactaggtagttcttgtgcttgcagcaactctctaattgcagcttcaatgctactgttcattttgattcatcaaggtcatactcccctcttcaaaatgttgctcatttaactgtgtgaattacgtattgtgcagcc

SEQ ID NO: 4583 - DNA, 1752 bp, Medicago truncatula
  Intron number 2 from transcript Medtr4g092720.1 (locus Med tr4g092720) derived from phytozome v7.0 (chr-ID MtChr4; po s 19453896 to 19455647 reverse strand)
caaataataatattttattttacttcacttttaatgttagtatactcttttttatttattttttaaatgcaaatgatatatacaatttggttccagataatataacatatttacttatataatataaaatgtgatgcacatttgcctggtaagagattaatacatggtttccacgtttgaaaatgtcaaagtttgctaaagtctaaagttgaatatgttgatatcagaagtgcaaattctggagggtagctttggctgatagtattaacaaagtaatgatgaaattttttttgaggaaagtaatgatgaaaatatagtacgtttgattttatgtaatgtttatagtcgcgattacaagtcagaaaaattgaattgactaccaactctttttttcatacttgactctgtctgagaaagtgaaaatgataggttacctaacaaatacgtagtacgtgcaattaatttatcacttaaactttgtgttggtttatattctgaaattaattacaaatgtattttttgaagaaaaaaatcaaatacaaatgttagttttttaaggcttacaaatgttagtagttacacctaacctatttgtaagtttgttggggaattcaatcacaactttgtctttgagtttccttccatgttttaaagtcactaaactactcacctttactttactaaaacctaagtgtgtttgcttttttttttttaaaggtttattacaattttgatcttctatttttattattctgtagagttgattgactctctattttaaaatttaataattttgatctctctatcttatttttagcaaaaaaaattaatgatgtgatatgtttcaaatgatgttgtatgtgatttatactagatataaattgatcgtaattcaaattttaatgaaataatccaaaacttaaaaacatgctttggattgtataatttgatttgtactattatatatgcaatgctcggttactttcgctcacttcacattttcgaaatttacctaaaaacttccataaaaacacttcaaatctaaatctcttctcattgtctcaattttctactaaacttggtcgaattcttcaaactagagacatttcttgcaacgacacaagatgtaaagtccacattttctcaaatatttgtagtttgattgaattattgtttcttcttctggttttttgatgcccttcagaaaatagaatctgaattggagaattcatcaatattgtgtttaattggttttttaatgttaactcatgaattttatttgatcgtaggtatattacatttttttatgatattatgtgctaacacttacgtattacgtttagataatattatgtgttatatgttttctattttattatattgtgatctattttattatatggtgttatgttgttatattatgttcagaaaatatatatcttgtgtaactttgtgcattgattcaaattatataaatcaaaacagtattttactcgttcagtttatagaatctgaaacttatcaatgtattgatgcccatactaagaaaaaatgtgtggataaggggtttggtacaattcaaatcatgtaaattaaatatacatgattttcctatgattaacaacgcacaaaactttttataaattaatgtgtttggttcatttgcactccataccactaaaccatgaacatttatccattagaaatgaacattaacctacctattgtttaccacaacagagggagaccaat

SEQ ID NO: 4584 - DNA, 2091 bp, Medicago truncatula
  Intron number 6 from transcript Medtr4g092710.2 (locus Med tr4g092710) derived from phytozome v7.0 (chr-ID MtChr4; po s 19448272 to 19450362)
agggtgtagttgacagtcttgtctcaaatacacgggtaagctaaatctgtctctttctcagtagagtcactgccttaaagcacctaaatgccatgtttttcacaaaacaatgttcttgaaacgttgggctgaattgccgaactgactctttttatggagccacataatggtgactcagtaatatcaatcaaggaagtgcaagttgaaagttcaatttagcttaactttttggattagttgactcttgattatgttgtggttgtattattaaaaccttacgaggtcataattatattttcagttcttagaatgagttcacatttacttgagctcatcttacactctcccctaggtttgttttagtaattttaatcacccctgataatgaactattgtttgatctgcatttatgtatggtttttttttttttttttttttttttgatttccaagttttacttttagggttggttgatgtaagaagcacctttctgcattgtgtagaaaattgggtgttcattctcaatctgttgaagtgtattgcaacattttaatgcaatcttttagattaatcatttttaggaggtattgtagaaattgccacacatttggttgcacggtgaaatccaaattctaggtatgatgccttaggaaggaactataggtgtatttgaagcctaggctattttgcttctttttttatcttcagcttctttctttcaaactgtcaggttttaattgtctacttcaaaagtctttatgttccatctatgattatccctagaacccataaaccatggttttcaagggtgcggttatcatgcataaggaatctttatgcaccctgcataaatcccagcccattaaccggtagcccaacataattgcttcgtacacccccaagcgaaaccaaacaaaacaaaacgaaacaacaccgtcattcaccatcatcatcaccgtaccggaatcatcatcatcatcaccattcaccgaaaccatcatcaccgtaccggaaccatcatcaccattcaccgaaaccatcatcaccgtaccggaatcatcaccattcaccgaaatcaactcaaataaatagtttaaaaattgtatatgttagttggaaatggtttcagagtgttgatttggttcaatagtcacaaatgtccttattatagtatgttttgtataaaattatgccaaaaccattttgctgtggaaatggtttctgtgagttggactccaaaaccattttgttgtggaaatggtttctgtgagttgtactcctaaaccattttgttgtggaaatggtttttgtgagttgtactccaaaatcattagatgtacttaatggttttctttaatccagcagggtgcatatgacaatcaaaaataaaaaacatatggaattttctaaccataacaaaacattttcaaaacaaagaaaaaacatattgcattttcaaacttagtacgtatcctctgtttccaatggtaatttggtagatgattacaattgatatatcatgtcaaagaataaactccacaaacatatcgaagctattctgcaaggttaaaaatcccgcagcggtgccggcaccgaccaaagttatgacttatgatgcgtttcttagttttggttaaagacatttgcgtttttaggagttatggcagagacgcgtggagaaaggaagaaagttgcgtttctgatcggtgaaacatattccaaatctgatggttgtgaagtgtttatgcagggtgcataaggaaatgacttatgcataataacttttgccggttttcaatgcttgtatgttttttcattgtaaaatacatcaatttatttacctcacctttatttatgcaactttttccacctacacatacaataatatttctgtccactaggcttttgggagaagaagtatatatgatatccgtttagaaacgattaaattggttgaacaattttagctcactgttctaatacaggcatttttaattagaagcagttcatatttattatttacctcaattctgaatgtaagctgttcaatttgtagcttttggagagtaaaattcaggaggcgaggtcgaa

SEQ ID NO: 4585 - DNA, 1876 bp, Medicago truncatula
  Intron number 1 from transcript Medtr5g064900.1 (locus Med tr5g064900) derived from phytozome v7.0 (chr-ID MtChr5; po s 22620331 to 22622206 reverse strand)
cccattagcaccttccactttaaatcacttgtcaggtcaatattaacaaaaccctaacaagtgtcctaatgtacgatcaaatataggcttactagttacaacatcggtacatatagggctttcaacactactagctatagcaaacaatatttttgtacctggtttttgtgctatcattggttcatattttccagcaagacaaggacagggggttattgttagaacaaaatatgtttaacaatgtctctttaagttttgatgataataagatattaaaagttttgatgatagcaagatattaaaagttcatcaaggtctctttcgccttggaaacaaaccttacccctagtacccccatcagtttgcgccactggtttagttttaggtttctgataaattagctttaggtgtttgaatattctatgtaataagctttaagcttcaactctattgtaaatgtatcaattatattaataaaatgagattttatgtgtattatttttgtttatatttgcctttattttatgattttggcatctaaataatataaaataaagcaaactgtatttaaattatggtaaaagtgattttcggattatataatccaaaaatttatggaaaattcatttcggatttcataatccgaagggtatttttgaaattttatagggcgcgcgagaacatagaagggtgagaaaattaatagtctaatttccaaattgcattatgatccatgaggcttctccacaaccatttagacaataaagacatactgaacactcaacaatactttttgaacacacatttttgacgatgacactgtattatttttgaacacacattcccctttctgaagtgaaacatagatttgttttgcattggttataatcctatttctttccttgttgtggaagtcgttatcaatccaagaagaggtccatcaatcaaaattcaaatgcacgccacataaatacagaaaagatgtatacacttgagtagtagacaaagaaatgtcgtaattcaaagaataatgtctttcaagctgagtacaaagaaacaccactttaggacctaactatttttatttttaagccaacagaaacaaatgatccacacattatccaaacgccctcatgtgatatttaggtttttagtcccatatgtggccaataatgttgacttgcatgtggtagatggttgttttggagatttttgaaagggtcaaatccaaagcattatcgttggccaacctcacatgctagaatatatatatttttgcatgtacttgctagattttaatcttacaaagaaactttttatgtggtccttgtttatgattgagaactacgggctaacaatgagccaaaaatgagtttgtctcatttagaattttaaacttgaccctgacttgccctcaatacatttaacccccaagaattacaaagctgaaaataactatagtttcctctgcatcatataataatattaaaatactatcataaacaaataaaaaataattaagttctaccaaccctagttttctatcaaggttctctcttccattttcttcattgatggggtgttttgggtcattttttttacctgaagttactcatcttcatcttttcctctcaatttcaatccaaataaccgattttcacaaagatttaaatttttaccttcatagttttgtgtctagtccgacgttgtgttgtttgtaatcttgtgcagtgttgtttgatatctgtcttgttgtcatttgattcttattaaaagaacaactacttaattaaatgatttgggcatcatctttccagccacgttaattttatcatattatatgtaggcattttatctttgtatactgttaacttag

SEQ ID NO: 4586 - DNA, 2588 bp, Medicago truncatula
  Intron number 3 from transcript Medtr7g009000.1 (locus Med tr7g009000) derived from phytozome v7.0 (chr-ID MtChr7; po s 1473667 to 1476254 reverse strand)
aatctctgagaattgtgaaaggtcttgttgattctctgttgatttgcactgatttgtgatgttttgtgttgatttgtgttgattctggtggaatttggaaacggttagggtttgagtgttcttggtgttcttcgtgatttctggaaattgttgagttttgatctttgggagcagaaagagaaagttggaaagtgtttgtgagttggcactgattgaatgggtctgtgtggcactgtgcaccttttataggctgccatgtgtgatcttggaccaatgaggtggtgacatctgtttgggacctttttggctcggccttggacttgaaatgaatttgggacctttctgcaaaataagaaacttgaaggactaaacagcaatatgaaaaaaggactaaaaagtaattttaagaatttttggactaaaatgcaatttataaactgtttgggactgaaatgcaattaaaaaataaaattggactaaaattggcaatttgaaaaaaacgtaaagtgaaaccaaaaaataaaattaacaaaaggactaaaatgaaccagctacaaaaatgaggtattttaaaatacctctctgccgaaattttgacaggaaaagaccaaaatgcccctagggactaaactgactcagatgcaatttttgaaatgatttttaaacaaagactcaacaatgatttgtacagacaaattgaaacggctcagaggcaaacacagggactaaaatgggttccactgcaggaaatgaccaaaatacccttttgtatgattttttgaaataaaatgcaagaaaagtaaagcaacgtttcagagagttcttaaatgacttgtaatgcaagaaaaacactttggatagctttatgcaagaaaatcatgattgaacatactttgagacagagacagtaaaatatgcagatgaaaagagagtaaaggttcggagtaaaacaacagcaaattgacaaatatcagtggtagaaaataaatttgaatgagtatttttaggtccaaaatcagggtataacacgttgtaatcaacgtaaaatgaaaaaacatttgatatgatgcgaacattcaaattagtataagaaaaaattcacaaaaataaataaaaatgcccttttttttaaggataataaaaatgcatctgaaattcgcaagtttagcaaaataaaatgagaaaggataaaatgagatgtttataataaaaatgcccttttttttcgtctctatcaatatattaaattttagttttcgtccctaaaaaataaaatgagatgtttatatccacacaaaaaacttttcgttttatttttggtccctaatggatatagttttaacatgtttttgatatttttgaacataatatgaatatataaatgttgaacatactttgaacataaaatgacaattaaggatcaaaaacaaaagagtaaattacactcccctcccctcaaagatgcttgaattacactccccttccctcttaagttaaaatatacactttactccctcaatatttttttttatgttaaaatttatactcccctcccttataagatgcttgaattacaaacctctcccttaataattaaatatgcactacactttttttttttggtcttagatgaagtggtaatccactgaaaataaacccacacacaactgtgaggtcttgggttcgaacccgggtcacaacgtccggccttgcaatttcggcattttccagttgagctaggacttctagacaaatatgcactacactttaatcaatttgaacataaataaatattcttataatatatattaattttgaatcaccatttaagaaaaattaattcatttctttatagtttaaatttcaatgataattaaatttaaatatattgctattgattttataaattagagtataaaattaacttttaaataatcatgctttaatgattttagtaatttttcacatattttaattttattttgggttgtttcatattttataatagagtttaaaactacatgttaatgaaattgtgaataaaaaatagcgaaaaatatgtatttaattttttattatattaaaatagacccgcaatactattttttttaagtgtgttaaattattatttttttgctagattattagaaataataaaaaagaatattgaaggagtaaagtgtagattttaacataagaggggaggggaatgtaattcaagcttctcttaggggaggggagtgaaattttttctaatatgatttgaataagaggagaggagagtgtatattttaacttaagaggggaggggagtgtaattcaagcatctttgaagggaggggagtgtaatttactcaaaacaaaataatttttttttgtgaggataaaaacattcaatttaattttttaaggattaaaataaaaattcgctatatttataaagacgaaaaacttatttaacctattaaccataataatagaaaaataataacaagaatttaataaaatttccataaattattttttcctgattattattgttgtgtcgtgtagaagaactacaaccaggcactttcatcatcatctcc

SEQ ID NO: 4587 - DNA, 906 bp, Medicago truncatula
  Intron number 5 from transcript Medtr3g029560.1 (locus Med tr3g029560) derived from phytozome v7.0 (chr-ID MtChr3; po s 7791834 to 7792739 reverse strand)
gacaggtctgccttttgattcatcttttattggttatgatttattatggtaattgcttatttacctgttcccgactttatgtttgatcagttcttcaataaagtttgtgctcctcgaatctgataatcgtgaattaaaattggttactgaagagggaggcaaataaaaatgaaagacgggataagttgaatcaattaggcgatagcagggtttattttattttttattgttgttcttgatttaaacaaagcttgagcagaagagaggagttggccgacgtttgttgccatggaaacattctgttttattcattatcaacgtgaaacattatgtttttggctggtgatatgatgttttctttcattcgaatgtgtctgagctggattttttctatggcctttacaagttctctccaaaaattttatcagaaaacatctgattgatttgattgaggttatttaagattctattttagatatttgaattgtgaaatatgaaactatctcaaattggaagtttcaaatctcaacattttttcttattttacgtctagatgtgttggagagattatcatttaggaaattaaattgaagattacttatggtctatatctatttcttctttatatggaagtaatttaatatggatgccccatgcatagttatattttagttctcataaagtttgacgggctctagtagatttgtccctatatccattccagtggaagaatgtggttaatctgacctgatacatgtgattttctttgttttattaatttccgtaggttattggtttcatgtatgttgaacattatgatcatagagatgatctggatggtgatagacctttgactaactttcttgggcaggtgataacaattggaagagaaagatatacagttgg

SEQ ID NO: 4588 - DNA, 4022 bp, Medicago truncatula
  Intron number 1 from transcript Medtr3g156130.1 (locus Med tr3g156130) derived from phytozome v7.0 (chr-ID MtChr3; po s 40910509 to 40914530 reverse strand)
aaaactagtttaaatacaatccaacaaaccataacatcggtggtgtaagttaatcataaaataatcttacattggtcctgcatataatacaagtgatgacgttggatttttcacaagaatgattatcttatgtaattctatttctaataataatcactgcgatcttaactggttcttatccaatacgacaggaaaatagaacagtggaaaataaatggaaagaaaaaaattccagatctgaacaaaaatataagagtgtaaaagagaaaggaaaaaaaaaatatgatgtaggtagtccatgataaaattaatactcccctttaatccaacggttgaaaaaaacttttttataatgggaaacaattctcctttctcatgctaaacctcacctgcacgacttgctacactacaagcaatttactttattattaaacttattgctagcttattggtgcttttgtgttcttatatataacatatagtaaaaaaaaattgttaccaaagagatctcatacacatctaaggatatccacctttccacatgtcaatggtgagatgagacaaagacatacatgatttggaaaatacacaacatggaaacgtgtctttgcacttcaaaggcatatttagccaccttgactcaaattaaaattaagataaaataccaaactacaattatatgttgatttgtgcaaatttgacgacataatttatcgtgtaccgtagcattttccttataataatacatatgcgttttaaaattgcacactaacaatatttaactttattcaggtatgtaattttaatacattataataacaaaacaatcaaagtttatcatgttggagtatgctaggtatccccattaaaatcgataatcaacacatcgtcgacaatgagttagtccaagtagtgagggattaagtctatgaaataagtggttagaagaagtttgatcactaattcttactatagaaaaaaaatttgttggaatgatagaatttatcttacttgtcacacacattctgtgataaagattaatccctgttaaatgatggtagaaatttaatactgataacatgttaaaaataaaaagaaatagctaataggtaggtttattggacataagaggtcatttgggtgatccaaccttaaaaaagactattcaaattgtcgattttttattttattttattttttataattttttttatatgatttatctaactagcaagcatgtccgttttaacttaaacttgatattgaatatatcataacctggagaaatagtgtgatctattatgcacatctataggtcagtttcaagcagtggcggttcttggtgggagctcatggtggccatggctccacccactaaaaaataaataatttatatagaggaaatgaccaaaatacccctaatatatttggatattttctctctggcaccctcggtctcacataacacccccaccccagtagtctcttctcaattaggttggttttgattctctaaggctaggatagactatctagttggtagataataatttgaagttttagtcttatattggagttgttgtggtgatgtttttttggatgaaattgtatgtggctttcatgaatttcaattgtaatatatagttaatattaaccgcttcccccaatattttgagcaagacccgccactgatttcaataatgaatttagtttattaaaaaaaaagaatgactttagttaccatttatcctcggtgaaattttacatggttataaaagatttttttattagaaataaaaaaatcacagcatcaatttttctttccttctaacaatacaaataaaaataataaatagaagggaccaagattaatgattggtctaagtgataaaggatttgagatcattaagcatgtggtcagagttcgatttctgactcatgcatatgagaaaattcaattagaagatgacaactcattttgtgtgttttacaagtttttgacgaagacttcaagtaaaaacttcgttttaatatatcactatatctttaaaaaaaaatagtattttacttcttctctgtatttttctatcaactatgtaattattattttttataaatttctttggtattattttaatttttttaggtggtattattttatatattcacttcaattgacgtaatcttattcgaaataccttcgaatacaaatatggatatttctcggttgatattcaacattgattcattgtattatagatgactaatccaatttgatcgactaaggtctggtttggataaacaacttatatagatgtttatagcattagggcttataacattagagtttacgtcataagctcttatacttgataagctatttatgtttggatatgtatactaaaaagtacttacataaattgaagtgtttggatatgacattacataagcaattatcaaaattttaaatatttttaatttaacaaaaaatcgaagaatcgaactacaatatcaagatttttttttataaaattaacaaaaaattaaaagaatcgaaccacaatatcaagattttttaagatataaaaaaaaattataatatattacttataattatattcgtccttaaaaaatatcaatattcatataagacaaaattaacattagataagtatatagttatgtaacaaaaaaatattcatataggaaaaaaatattaatattcagtttcaaaaaaaaaaaaaaaaaatctttcttaaaaaaaaaatcttagttatgtgtgttaatttagtaatataagtatataagaattttgttactcatgcactgccaaagataactaacattataattaaaatatatgttttgaaaaagtggattcagagagaatcgaaggaggttacataaattcataagctccttgttaagccggagggtaagctgaaaatttaggcttattaaaatatgacataagcagtttatgaaaatatgataagctatttttatttatttacctctaaaaagacttatgggaatagataagcccacataagctcaaaataagtcaatccaaacagggcctaaacctttataatcgactagtatacatttttttttacaagagtacgtatacatgttttttttatcattcaaatagtttaaatggacaaattcaaaattgtcatcaatggttgggaataaaaaattgatttcttatttattttaaaagttcgatcaaacatagatgtacctattaatttaagtatgaacttgaggataaacgtgataagcacagctgtaatgattgttgcactaattaccggaccagcttactgggcctgctaattgcccatcaactttaataaaacaaaaaactgagaaatgatgatactaatgccaagaaaaaggacgtctcaaatcatacttatcatacttatatctaatccttcttaacactgctaataactttacaaaccctaaacctaaatggttttgactccaaaatgatgctgaccgttggatctcatcatttggctcagcatgcatctcatcctttgatctaatttgacttcaaacttttatttcccatgcttgatacattaaattctcttagttatggctttccacctttcatgagtgcattaaatgttgttattgtttcccaaaatccttcttctcacgtttttgtgtgtggcttccccccttccatgattgcatttaatgttgttagtatttccaatgtttttgtgttattccaatgtataggtatgatacatgatgaatgaatatgaacgtgtatatatactatggaatcacatcactcatatcttattctttttcaaattcaatcgaatccaatggcaaacactggcatctagacgttgctttccaaccatgctttgattggtatgaatcttcaatcgtttttgttgtgatttccagttttgtacagattaaagatgattgttttttgttgttttttaccagcacctctgaaccctaatcccaactctgaattggaa

SEQ ID NO: 4589 - DNA, 8753 bp, Medicago truncatula
  Intron number 4 from transcript Medtr1g108470.1 (locus Med tr1g108470) derived from phytozome v7.0 (chr-ID MtChr1; po s 23156889 to 23165641)
taggttttccatttcttggtcaagattgataccaagtatttaactgaacttaaaactttagtacatatcgatgaatgatgaaatttaacgttctttaattaatttttcagtaaagactgactccctttgaaaatgcttttatttcttcccagatggtagaggacccatcaacccgaagggattgcagtactataacaatctcatcaatgaactcattagaaatggttagatacgagtttcttcatttgttgcaagataagacatgccttaattaagatttcaaaaacagtagaatgaaatcaattctgtttcttcaagtgatataataagtctttcccatatgcaggaatccaaccacatgtcacactgcacaactatgacctcccacaagcacttgaggatgaatacggaggatggcttagtcgtgaggtcatgtatgttcttatctcctatagctgcaccagtttgctgtcacaattagttcttacaattcttattgcatgaaataaggcacaatacaccataaatctagagagagaaaaagaaccatatacacaccaagtagttgatgcgtgaaacaagacacttttgttcttgcctcacttgctcatatgatcaatggtcaaacgcactttaatgacgtgaagatttcatattctaaaaaaagtacttgttgtgcttaggaagaaatgtccttatattgcattttttgtcagaattgagaattaagacttgaattttgatgcagaaaagacttcacaaactatgcagatgtgtgttttagagagttcggggatagagtcaagtattggactactgtgaacgagcccaatatcttcgctgtaggtagttatgatcaaggaatctccccacctcagcgatgttctccaccattttgccttatagagagcaccaagggtaactcaacatttgaaccgtacttggtagttcatcatattttgctagcgcattcttcagctgtgagattgtatagaagaaagtacagggtatatcgcctaattttttttcatactgtgtacttctctttgtactttttgttttgttttgttactgttacactactctctagagacttgttacattgcaggaggaacaaaatggatttgttggtatctcactctatacatttgggtcagttccacaaacaaatacagagaaagacagggcagcatgtcaacgacttcgcgatttttatttgggttggtgagttaccgactctaaaattggttataatattttatcttcttcttcttactgcctattttatttaaggattatggaacccttattgcatggagactatccctattccatgaaggcaaatgcgggcacgagaattcctgccttcacaagtcgcgaatccaaacaagttaagggttcctatgactttgttggcataattcactacatgaaatttaatgtcacagacaattctgatgtgctgaacacagaacttagagatttcagtgcagacgcggctgcaaagctacttggtatgtgttgtgtttaatcatgggattttaaagcttagagctatataagcttgctgtactaattgcattttttttcatatgattctgttgttttcaactagttgaactctttacatcatttagtatctgactccccttttcatcacttgttgaataaccatgtgcatcacttgttgaataattggtggagtaaaatgaactatttctttgttttctgtggttttgcaggtttagaggaagtacttggagagaatgaggtaacggttaaaaaactaattaaaattatcatcttaattgatttgttcaatcacagattacttcacagtaaaattatctggtttgatttggctcagtacccattcacaccatgggctttaggacaagtactggacacattcaagaccctttatggcaatccacctatattcattcatgaaaatggtatgcttacctctcgttcaagattaaattgattgcaatgaatctcttttaggaaatcgtcattggatgctgattgaggttgaataataagttgcggcgctaaggttttcctgtcatagacggccaaataacattttgactaggttattgcatattatggttttcatgtattttccatcctcaattgtatggaattgtaaacttaagcatcaagggatttgacaatgatttggtggaccattcataacgcttgtaattatcgtttttaaacaaatgttgcataagatgagttccaattgtttgaattgttaggccaacggacactaagcaatgcatcactccatgatgaatcaaggttgaaatacttgcatggatacattggtgccgtgcttgattccttaaggtatgtgattgctactccatactattatattttgaaaaattagatttagaaaatgtctttgaaagaagttacttatccaataaatgaaaacagtcctaaacacgcaacattcataaaagcaatcacacctgaaataaacacctatgctttgatatggtatgtgatcttccgtctcattttttttatccttcagaaatggatcaaatatgaagggatatttcgtgtggtctttcatggatgcattcgagttgttggatggatatgaatcgatctatgggctgtactatgtcgataggaatgatccagagttgagaagatacccaaagctatctgcaaaatggtacgcccaatttttgaagggtacaagatcctccctagttggtgcaattgaactcaataacgattcatcacttgtttcggttggacatttacttcagtagtgggttctataatttgtatgcattaaagtgttgttacatttggtgtttctgttgagagactttcagttttgtcggttagctggttagtggtttagatgtttaagaaatctgtttgcatattatttagttaatctatctaaaatcactattccatcgaccatctgtgtatgcaatcatcataaagtgagtgatctcacattaacaatggtatctagttctttgatttgggacacgtgcatacgagaatgtgaggttgtttgcgaaatctgaggtagtcatgactaactctaatggttcttcgttggccaacctgtcttttctttatggcaaaaacttataatagagaagtggttccagatgcaagtcatctttggtttctgggatgtgtttgaaattttgcaaggctctcttattgatccatctatgtgtgaactatacgaattttagaagatagctgcaaaggatgcctgagacatgttaaaaaattcttatgttgttgcaaaggttgccaaagtaagactatagttcatggacaaaaaatattaaccagaactgtacgtcttgttttgctcaaaaaccacaaaggagctgatcagcagacaaatgtggcttgcctctcttaaatttccttgtgttttattagaactaagagagagattagcaccaaaacgtgtctcactctaaatatgtatttgcttatatttcaggctggatagagtattatcttttccattcaatttgttttattcagccattaacaaaattatttttcaaacaaaataaacaagagaaagctattgccattttcataaagtatatcaaggcagaaacagtaatttttcaggaaaaatagttattagagacacattaatctaagaattttcatatacagaataaaataaggcccccgggtaggaggcaacaacaatccacacaattgcatattttctatcataaactacaaaccaaacatgccataggataaactaagtcacaaactttctgagaacattgctatttcacttctgctgaaaggattatatatttattcttgcaggatatgccaatatagatcagtgcttggtttttggcttcttcacaatcatcacagtgcaatgagcatgatgagcacagtagtcactcacactacctaaaaccgccctgcaaattaaaagtgtcgagtatagtgagtgaattaggaaattatgaaatgaagtgtttgcttcaagcaacaatgtatatacatgttctcccccagtataaataaaatgaaaagtcaaataaacttagaaaggagaaaccacattgtattgaacacattttgagtaatgaaatgcaataagtttattcctctcaaaaaatataaacttagaaagcaaaaggaaggtttgattgttgattaaaatagaaaagatcatagagactttataatcggtaagttgtagaaaactatgtgaatcatacaaaaaaccactgctgcctatcttctacaggttaaaaagattttagtggatggcaaattacattttattcttgtttttggccatttaattgtgtttgtgatcgtggtggcattcacttaagttaaaatgttagaactaaatgcagcatattcatggtatatcccaatcacaattacctatcactccaaaccaaggatgataatcgtaacaacaatgaaatcatacctttttatagccccataaccgtgactacccacaaccaagattgaagcacggtacttttccactgtatcacagagaacatttctagcatcaccttccaccacctctactattacatcatttacctgaagaaaattcagttatcagatagtttttccacatatgacataagtacttaaacatcataatgtatacgtttttccttaggctcgaaagtagaaaaataaattcacgatgatattaatacacacgagttttgttggccctaactaatagggatatggatatggaaactcaataatttcactcgaaaagcataacaattaacagacatacaaagatgatggtaagtttgtttaaaccagttgaagcaatttaagtgaaatacaacacgaaattgaaacatgataaatcttaacatcacgaagaaacaatgataaattaagggttttttctagattacctatgaagaatggtgggtaatttacccaccaataaaaatgagcaatttgttggtggggtcaagatagttcaatggataccaacatacaagtgtgggagatggccgcacgaggcaccgacacacccccaaaaccaaactgctagctgacaaaaaaccaccaacatacaaacagcaacaacagcattgctgttcctgtcaccaaacagcagctaaaagtaccgcgcagagaccccaacagcaccaaaatacatattttctctttcaacttttttccatttttgtaagagtgtccaaattttatgtctaaagtctcgtgatcacacaaaaagttctccagatctagacactaaagatgggaatttttttttttctgcccttatttaattccaaaaatacaaaaatgccccacttttgaaaaaaattgcataaatgccctacttttcagaattttcgggtaccttgcaacccccacttgcggggtaccttaaaaaaaatttaaaaattaagtacattgctacccccacttgcggggtatgaatttttttttttattttttatttttttaaataaatagattgctacccccacttgcggggtatgcttaatttttttaaaatgtttttaatacaccccgcaagccccacttgcgggttagtttatgtgattttttttttaattttttctcgtaattattaataataataataataataataatattaataataataataatattaatcactagacatcctataaacaaaataaagactaaatttctactgatgtctaatattaatgcaatctttgcgggaatgaccaggcatcctccaaacaccgcatctttctctcagtttccacatcgtccatctcggtcctaatgcgagtaattggtggacgacctttctttgccctacgcattgacttgttgggaaccaccttcggtccttcataattaggccaatatgtctggtggtgaaccacgtcgaagtggatgttgtatacggcgtatacacactcatttgtgaatttgttatcgacaaaagtcttgtagtcgtgacaaaagctagaacatgcggcaatgacatgtgagcatggtaggtgtaacgctctaaaccgtccacagtcacaccatttattttgcaggtccactttgtattctccctttggcaatccttctttatgatcgatggtttcacggacggaaaaggtatatcgatcccggtcaaactgagtgacatgatgactgttggatttaatcacctcattcctggcgcatccaacaacaactacttctcctataatgacccaaaccaagctggaccgtccaacaccaattaccccccctacagcaacccacaatacccaatgtacaccaaccaaaactacaaccacccaccaacaccaacaaacctattatctcacttttctccggcttcgttgaactctagtgatcaatttctggatatgggatggccaacaagggaacacgatgtgtcattgtcattgggttatggtagtcaaatacaatcagctgcagataacaacgacgaagaccaacatgaccctcaagtaaatcgcggaagaaatcgtcgaagacgagggtgtgggacagccgggcatttataataattgtagatatcatgatatttaatatgtttattattttttttccttcttttttttattatttttttttattttaaaaataaaaaaaaaaaaaaacaaaaaacaaacccgcaagtggggcttgcggggtattaaaaaaatttaaaaaaaaattaaataccccgcaagttggggtagcaagttatttaatttaaaaaaaaaaaaaatataggccgcaagtggtagttatttaattttaaaaaaataaaaaataaaaatgtagcccgcaagtcccacttgcgggggtagttaattttttaaatttttttaaggtaccccgcaagtgggggttgcaaggtaccagaatttctgaaaagtagggcatttatgcaatttttttcaaaactagggcatttttgtatttttggaattaaataagggcaaaaaaaaaaaaaaattcctaaagatggatttacattaatcacaaattttttgtttgttgagaaattacatcaatcacaatgaatatggcaaaaccataatacacaaatatcggattttgtgaaaaaaaattcaataaacatattaacgcgttgtgattttgtcacattcattgtggagcgatttgtggaaactttaaaaaaaatgaaagtgggtcaattatgtcattaactctcataggggtcagaagtgaaattattttgggaaaccgggtcaaaaaaaaattcgataatagaatatgcttattacttattactccctccttaagtctatttggaaaagaaaattgtcctaaattatacgtcgcttaacaataccaatgaaatattaatgttattttttctattatatccttaattattaattactatctcttctttcaattatttcatttatcttttccataccatttattagggataattttgtaaaattttaatacgtgtgaaatggccaaaacgtcgtgcaatttgggacggaggaaatagtatctttatcagagcaagattagaaaatgagtcagaatcaccaattcggtgttgtcttttactcacacacacttctaaaaaatggaacacggaaatgtttgaggaatatagagaaagaaaaaaaaaacataaaacatagaagatggaagcaaatacatgtttgactcttgttttctttttgcttctaaacttggctcttggggtgttgagtactgataattatggcagacatgatttccctgttgactttgtttttgggtcaggtacctctgcatatcaggttctcttttactttacctcaaaaagaagtaaccatgcaatttcattattgtagaataattaaattatgattatattttattgttgtacttgtgattatgatgaataggtggaaggagctgctaatgaagatggaagaactcctagcatttgggatacctttgcacatgctggttagtcaattcattctatcatccatcttatcatttttgagtcatagttcaaatcaattttttttagagactatggtaactgtaataatcatttttaaatatttttactttagaaaacgtgttcaataaaaaagtcatgctttgatgagccttcactcactttaatcaagttatttgataattggatcacaacaaaattatcattttaattccaacatataatctaaaataaatttcttgtaattggagcaaagccaagcccaaaagtttgttatcaattatttgcactataaaccaacctttttctgaagcgaaaatcaatgagaaactgggaatatgttaagtatttacaatttaacttttcagtttttacttcttcatttgctttgagcattataaaccaattctaacgactagcatttttatacaaaaagggtttgcgcgtggaggaaatggagatgtagcctgcgacacgtaccacaaatacaaggtaaacaagacacaaggcttctatctttctaattttgtctagtaatgcattctttatgattcatcttttaatgcaggaagatgtgcagctcatggttgaaacaggtcttgaagcctatagattttccatttcttggtcaagattgataccaagtattccactgaacttaaactttaatacagatcgatgaatggtgaaatttgacgttctttaattattttttcagtgaagactaactcccttcgaaaatgtttgtatttcttcccag

SEQ ID NO: 4590 - DNA, 3290 bp, Medicago truncatula
  Intron number 2 from transcript Medtr8g012870.1 (locus Med tr8g012870) derived from phytozome v7.0 (chr-ID MtChr8; po s 2286220 to 2289509)
tgggagcagcaaacattcggttacctgaccctatagtttcatatcaaattatccattgatcgcacagtttctaggataacttgtttgattaaaatcttcaaatcattctttgagagttttggcataaacacatttgaagcaatgaccttctcagtggtggtcttctgcctggacaaggtgtgcattgaaatgtgaccatctacaaaagcttttgtattttagaagcatttcataatttaaatttttcaactgtgatttacttggtcaatcagatacatggatttgttgtcgatggcagccacctaagaataacttttattgcttgatctgtccatgcactatgaaaatgccaaatatgttatcttgctcagattttaattaccatttagaccgatcaaagtgactcttagtttcttaccttctttttgtactataatctttcatgaccaagtaacctatgatttgcagagaagagatggcttttaatttttgaaatgttcatcaatcttgatttactttctggaaatcttcatcttgtttactaataaatgaactacattaattaaaaagaaaatatctacccatacagcgggataaatccttctatatacttaaatggtaaaactatgcaagtgttgaacattaagatcttatttgaactgtcacaaatgttttgcacaaatcaaattagcagagaatcataatggtacaaggacaatcctatatcatgattaatgtcttagtttttggtttatggcatcctagattcattttgaactaatttgctaatcttttatttgaagatttgaagaatcataaactgtcatcttagattccatagcaaacaatatgatgcagcaacttcttgaccagatcctatgcgtcgtgatatcatcagatattatgaaaaatcgttttgcctaatgtagatgcctatgtttatgtaatttctgcattggccggatcctatatgctaaacactagtttttaatatgctaaaagctttctgtttaattcctattcaacttgcatgtagacgttcaccttttctttttatttgatactaactgcttatttttttgtgtcatctagatttttggacgttattatctctcgatcagaacggagttaacaacatgacagagacttcattatcattgcatttgggcagtcgtattttcaacctttgcagcctaacatacagcaccatttttttacatcgtcttctccattccagcgcgagcattgcctttgaatgattgtttgcactttgaacaattctgcaagatcttggatcttgatatcaaacagtattatttgtacactcacttaagtattaaaaatagtttcacattaccgtaaatatatatgtcattaccaaaattattataagcatatttgatcttatttgattttgtaattttaacaactgttttatggcgttaatataattcaaacgagaatttaaattaaacctaaatataaagggtgctactttcccctcccttgatgcagaaaactctccatgtttctgaaagtgtatatagtgatttttctggatgtgtacattggactcatatctggtgctatgacagtagccccaaagggattactgcaccagttgatgaatatacttttaagatggtgtgtcaaaaaaaaagaaaattactttgaagatggtaactgcgaggcccaacttgtagggaaaacttaacgagtgccacaatttgcatctcctattttactctcaaattaccttttaatcctagtactttgttttatttttgccacatgtcacacatctaagaaatagacatggaaaaatggaggccttaaatggagggaagccacactttgcttaggtgcttctaagttgggtctttcgcatctgtcttttattgttggtgttgggtgttctttctttagttggtgttggtgatatgatgttggtattctttatctttttacattcttccccttttcagtatttatatatagatacatgtcataaaaaaaaaccatatactcctttgcaaatatcatccatatactttttttgggtcatcatgcgataatcaatccattgtacgtcgagtactaaatgcaaaaagtaaaatctataatgatcaaatgcaagtgttgataaaattttaatttagaaagaaattaagatgaagttttaaaaagagcgaagatccaatttatagttcatgacaattttcttgcagcttaatttagtttccaaaaaaatttaatatttatacaaaactattacctaatattttcaaattggaggatgagtaactcacttggttgagctaagagattaaagaagttaagtttttttatttttatttttaaaatgaagtttagaagttaaaggttcatgattcaaatcttgatataagagagaaaacactaacataataattaacatacgaaaatgtataaacattctatcaaggtttgaagattagaaatgtaacaactcatgaaatgcttggttgaagataagtacgtgtataccatctaataaagtctaaatttaaattggattaacataatatttttttttggtggattaacataatatatcatatacaaagataaatttaaaaatatatacatttttttttatgaaatatagaaaattcctttcataaaaaaaaatgtactattaattattataggcccatttaattttataggaggagcccaacattgtcataagaaaccctagtttctttcagctgcggcgactgcgacattgacaaccctttttcttcatctatatatgctatgctatgcccaccagtgacactcaaactaaatctcccgtcatctttttatttctcaaacattaagaagcaattcaaatacgtttcagaaatatataacacacttgatttgagtctttgataaccctaatttcacattttgtatttctcacgtcatccagctctgtcacccactaccctagggttacttcaacacaggatccagactcaactttagcgaaaatttgaagatccaatgcttgatgatgaggatgacgatttcaacaatatcctttgtttggtcattcctccgtcatgtatatttacaagtgtgatttctttgattaatccgattcataaattcgaaggttagaattttctatctatcttttttgtttttcatcagacgtttctatctatcttaattgtaatatgatttttattttgagaaaaattgaagcaccctttcatttaatagatagcacaagacatagatctcaaagctgcgtgtac

SEQ ID NO: 4591 - DNA, 3218 bp, Medicago truncatula
  Intron number 1 from transcript Medtr8g109610.1 (locus Med tr8g109610) derived from phytozome v7.0 (chr-ID MtChr8; po s 24629753 to 24632970)
ttggtggctgaaattcattttcttagatatatatatatttttttagaatagactcctaagttgataaacaaattaataggtgatattatttgtttgttagccacatgtgtgtggggcgctgtttgttttcgcctctttgccttgttagtcttggtgcttttgttttggttcggtggcctgggtgtatctcatagcatcccttgggtgagtgctatgatttttgtgttctaagtattttaccaaaatctcttgctcatcttgtgctagaggttgtttattagtgaaattagcagttaaaaaagttgatgttgtacggacatgtgtaatgtaaaattaatcatggttgtttaaactattattactctattttctcattagtcgttattgtcaaatccttttttaaaggtctagattataaacttttggaaaaatttgaacaaactatccaaatcgagcaacaacaaaagaacaaaatgataaaatcagtgataagagattcaatctatacaaattaaatttgaacagaacacttgaaaataacacttcaaccctggaatcaaatcaaccatcattgagatttggggttgtttggtttctatgttaaggtttgatgaaggtagaaaatctaatgagtctagactggctatagccacatcatatatatatatatatttaaaatagaaattgcttatttagcaaccgaattttcagtagttagagtatgaaaatttgtcgataataggtttatcggcggaagtagtaatcgaaaatccggccactaatatgaaaaatattaaaaatcaattactaatatgtttagcgaatgaaatggtgaccgatattttagtctctaaaatataatttttttttttgtactatttgtttagctatagtgaaaatgtatttatagatccgtagttgcttactagtgtgttacaatagtaatatattaaagagtgtgttgataatcattcttagaaataattttctttttttttaaaaaaaaaatggtcgattatactcctcatatatatatatatatatatatatatatatattgtaaccaaaaacaatactcctcatatatttactaaatataatttcaagaacttgatgagcatcaagccatcaactattgtgatatatattatacacaataaaatatgtattgtaaataaaactaggatggtaaaatacaataatagccccttcaaaaaatacaataatagccattaaagataataaaaaaatagcctatcatctttttttttgcatggcacttgtgaggagcttctagaacatgcatttcctgtttaagatagataacaaaaagataccaacccctatacacaactaagcccctattagttcatgctaacctctgcctaataccacaattaaagaaattttttccatagtagcacggttaagctacatgtggggaagcattaaaaaaactacatgtgggaaaaatccaaccaagttagtagccaaatcattgttaagaataagacttagcacccatatttagaataggatcccccatgacataccacttatatcatgatcttgcaaaatctatctacaagattctagttactttagtgtgtcgaaacttggttggcttcaaatgctctaataattatatatggagtgaaaccttcccatgtgtctaaatataacaagcaatacactgtagataatcagcatgttgtctgcatcaatttttattattctgtttccttcaaatgtaaacaacaaggacattgtcaatgactcgatgtctttatcttatagatcgcatgcaactttgcgttgtatatttaagattttgtgtaatttatctaattgattattggactcatcaaacgacgcctttcaacttttgaaagagactctctttgacgaattactactataacaaattaacaatatagtagaagtatagaccatgaaataaaaactcactttgtgagcacatggtatctgctgtgttggtttctggtaacttagatgtggtccattagcctacatgttccatagtggttggattggactccttaatgtgtagatgattgtcgattaaactctacagataataatttactcgcaaaaaatgtcgatttagagttacgacttgagccatttaaaggacttattgaacaaaaacctaatgtgtagtctaataacaataacctaccaaacagaagaagatcaattctcgtacagccaaatttctcatgctagagtaggttgaaacatagcaaacccattaaattaagatattcccattgtgatgttgttgtagacgggataaaataatatgaaatagagatgagggatcaagagaaacttgtgtatgatcacacaattttggacacgagatttggatgcactcatattttattttttaaaagttcaaatcaattccttgcttttatattttattcctcaaaacaacctaaagcttagagtgtatttaattttgatagagtaattgaaaatttctagtttaattttcttagaatttccaattactctatccaaattgaaatgtaggttgatttgataaatatgcctaactttttatggttttagatattaatcatttatcttgggacctttttgaaacttgatattattaaattttccttttcataaactaaaagtattttccgtgcataactataaagattaatttatataatcgtaatttatttaaggatgtattcttctatgattataagactgagttaatagtatttgaacacacgtataaaaagattatccttaaaatattcaatctttttttttatcaattttatctttattattaaaaaaatacttatttatgtgtgtaaccaaacactatttatttgatcccgtgactgttctatatttgtgtctattgaagacttactctcattaaagaggttgacgtcttctggtaaatgttttttcatatgaatcaattaattaaggattgaaccatggaccaaacaagtatggagctacttctacttttatcaatgtataaatatagtaagaaaagaaatgaaggtaatatgagaaccacaaaaaataaaaagtggtttctgattcccagacagttttatgtgaacactgtactacgttgttcaataatggcaccatgtgactatagtatagtttcatttcatccactcgaaacctaatcatacattacctaggtaagctcg

SEQ ID NO: 4592 - DNA, 1400 bp, Medicago truncatula
  Intron number 1 from transcript Medtr3g068490.1 (locus Med tr3g068490) derived from phytozome v7.0 (chr-ID MtChr3; po s 16019972 to 16021371 reverse strand)
attcaatcttcttcgtttgtttctcacaccacttggtacgtgtttttactatgttcttatcaagtttatttattttttgtcgtccatttattagttttcatcatttttttagagtttgattcggatcatttgttgaaaatgttggtgtttggttcactttcattattttgcctctaaaccttcaatttcgtccttaaactattattagtttagttatgaattaaggagagtggtaatttagaagctaacttgataaattgagagttcttttatttgcataagctattattcataagcttgtcaaagtactttatgaaaaagcagtttatgaagatataatttttgttaataagaagaacttatgaattgacacaaaaagttatttatttgcataagctattttgcataagctaatccaaatggaccctttattgcaatatcctttcactttttgtatattagcttgccagggacatattgatttaaagcacttgaacatttagttgataattgaaatagtagacgagcttaaaaattaaatttttattggtaggacccatatttttgaatttttgaaaaggtgggtcttacttatatcagacttatgtgtatctctctgatcaatagtgttctccatttcttttgggaaatgaagaggatctcaacttctttttgatgatgatgttttttgattttctgataatacgcgaacatactgattcgcacacatactcgtatgatataagatactgagaagtttgttaaaatatgggataagaggagttagtacaatagaggatattttgaacagaccgctattgttctgtgatatactacaaagtgtgttattaaatagccgctatagtgttcgagcatagcagaatttaaataatctggttttttcacaacttagggttgacaacactgacatgtataaaagtaatgcatttagattttagaaaatagtttagcatcctcaatctagattgaagttacaccagttatggtaggtgtgtgtaattctgcaaattacagtctctattttttgattcactggattatgaatttcaatttcctgcgaagtgatactagtttatgttaccttgcagtatttagtgaataaagtattcgtcaatcgttttaacttgtatgaaattctatctttcttttagtctcattcacttgcgataaaagcttttacttccttttaattagattccaccatatgattcattggtgcaattttttcttttataaattaaaattagtctttatgaaaccttccagttgtagttatttcagcttctcacacgtttttctagtcatattaatttaaggcgcgcctgtgttgttgtttctcctcagaaacttgtcttcatattgctgtcaacaatcactcc

SEQ ID NO: 4593 - DNA, 699 bp, Medicago truncatula
  Intron number 2 from transcript Medtr5g096040.1 (locus Med tr5g096040) derived from phytozome v7.0 (chr-ID MtChr5; po s 38131871 to 38132569 reverse strand)
tgtcattgctccaaccgaacaaaaccaacccagaggtttgtttttttcttttcttttcttgtgtttgatttgattctgaaaaattgaagattaagggtgatttagtacttttgcttatcagggtttatgtgattgattaattctcttgaacatgttgattttttatttactaaaatttgaatctttctgtgattatctgttcacagtttaaatgtgttacctttattgttttctaaagtttgaatctttcagtgattgtttgtttatgatatctttgatttgattctgagatgaaatatgagggtgatttgttaattttggttattagggttcatttgattttctgaaaagttttggtttttagtttgtttattttctaaagtttgaatctttttgggacgatttgttttctgagatgaaatatgagggtgatttggtagtttttattaaggatttacgaattatataattttctagaaaatgttgattttttatttatcaatcaaagtttgaatctttttgtgattatttgttcagtgtgtaaatgggtctatcaaattttcattgattttgaaatgaaatctgagggtggtttagttaagtattagggtttacgtgattctctggaaaatgttcagtgaattaatgtctgatctatgatttttgttaatggaattaggtgagaataagcagaagaat

SEQ ID NO: 4594 - DNA, 1240 bp, Medicago truncatula
  Intron number 4 from transcript Medtr4g095430.1 (locus Med tr4g095430) derived from phytozome v7.0 (chr-ID MtChr4; po s 19848283 to 19849522)
ctctcaaaatttattgaagtcaacgtaagagtttaatgttactgaaggtgttgttttaggtaccttaaatttctttttctacaatttatttattattattgttgttgatcgatttttttgttatttgataagagaagttaattaaggatcgaccatttggtgttaggaagcagttgtaggtgttgtgtcatccacttaatcacaaccggattgtgattgagtgaaattataattatgttttgtaagtagattacaacttactcttttgtctttaaaattttagtatggttgattattattttctaattatgttattatcaattcatatgcagtttgaatctttttttttagtcacatatgtctcgcactacataacatataccctccttatttaagattaattttaaaatgacatttatgttggttgcttggttgtactgttatctctatctagtatgtttcataattagttgtttgataatgtagtttaaaatttgtgatgattttttttattatgtgcttgcaattgaaaatattgaggaatagagaaatttggcaaaagttgaaaagaccttcattttatgaaaaatggtgagcactattgccttttcataattagttgctacatacacaaaaaaacaaaaatggatattttgttgttttattttttcagacgcagcttcaaatgtcatcatattgaagcatgagcaagttgtagatttaattttttttacaatgagaattaaatgttaaagtttaactgttggctatgttgtggtagtttgtgatatgttttgatttaatgcaagcatattacagtagtattaattacattagacccaaaatgatgttctaaaattgtgacgtaataaccttagattaatgacatcagttttaagttgaaatttacttttattttagcatgtgatatttgattacccctcaaataaatatgaatgtgcttaatattaatctcaacttaggtccattttttaaattattattatcctaaaccataattattttctcagtcaaatattaaaataaaaattaatggggttttaagttggtctttttttggttgtcaaaaaaaaaagttggttttttttttttcttccgaattaaccaattgaacctacccgattatcctccttaaccgactaaaccaatacttaatttgggtggaattgattctatgtattgaaatcaaggggtagtgagattttaggatttccgaccg

SEQ ID NO: 4595 - DNA, 1210 bp, Medicago truncatula
  Intron number 1 from transcript Medtr3g020190.3 (locus Med tr3g020190) derived from phytozome v7.0 (chr-ID MtChr3; po s 4461466 to 4462675 reverse strand)
catatctttagtttcctttctcctattccaggtataaccttttttttcaattttttgtgtaaaaatttaatctttttgcttaattcaacaatacccagatttttgttttgtcaaattttgttactttgattggttattttgggatttgtaacatgggcttggttttgaaattgtttttttctttctttattggaatgaattattgtgtttagcatttatttgtatttccttttgttttgatataaatgaaaacactagatttagtgcatgtatggattcactttggaagagctgaagtgattctgaagacttgaaattgattttaatatgtttgggattctcaattagaattgattttgcctctagaattaattgatttgtagcttttggctctacaaaattgatttctatacttaaatttattgttcaatttactttcaccttaatgtatctaaatattttgtatgtttggttccacttttggaggagctaatgttgattctagaggtgtaaaattgattttgatatgtttgatttctttagagtagagttgattttgcctccttgattatacttgaagctagaaattgtagagtcatatttcataattgatttttacagtcaagtttattgttcaagttacttgtacatgaatgtatccaaacataacataacataatagacacgtttaactaaaatcaattttgtaaaaatcaattcaatcaaaaacaatttccgccaccacaaaaccaaacacacattaggcttgagacatgttttgatgttgaatttttgttgttgttcagttcctttgattggtagtttcttaggctatttccttagtccatgatccacgattgatagcattgatactgcgcacctaaaatatgtagattgatagctttggttgttggtccttttggctatttcctttgtcttttgattgtatcgaccgtgttgctgaacattataaattcaaattgttttcagatttttaggtttcaaactgcattgttagttttatcttgttttatatacaagatattttatcctcaatctccttgtatttatacatcccttgtgcatacacatagatcctcaatattgttttatacaaaaaataaaagaaataagatagcgtgaagtgtttttatcacaaagctgctattgagtttgcagatcgctttaataccgccctcgtttgccacag

SEQ ID NO: 4596 - DNA, 3315 bp, Medicago truncatula
  Intron number 1 from transcript Medtr4g033440.1 (locus Med tr4g033440) derived from phytozome v7.0 (chr-ID MtChr4; po s 8260807 to 8264121)
ccactctctcaccctcaaactccaacaatcccaaagtacgttctaacccactctcctatctcttcttttttcaattattcgctttcaaattctgcttaattattcattctgttgattttgatttctgagtgttgaaactatgagtacgtggtagaaatgtggaaactcgttaagaccctgtttggataaaccatttttattttgcagcttatggcataagcacttatcacttaagtatttttataaaacaaaattaaatattgtcaaactgttttagggtaatctgtgaaaaatagtttatgcaaataaataagcttttatgttaattcataagttctcgctaactaaaattgtatcttcataagctgtttttcataaactaagctaaaaaaataagtcaatccaaacggccccatgtcatgagttcccccaaacagtgtcacaagtgcttatgtcagcggataaactaaaatatacaatccaattcaaacagattctaattacatcattggacaataaggagaaataagagaatttgagggtatgggttttgattgatataaatctttatgcataggatttgatatatttattgaaattgaaatgtgtcctacaaaattatgcgggactcgtcccgaaatacaatgtgggactcattcccaaaactgatttgagtgacaattgttagaagacaatgtgtagaaaagggagtgtattttagaaattttagaagacaatgtgtggaaaacagagtgtattgttgacattactcatatgtgagtaaacaattattttgatttttaaatgtgtgagacactagcattatagtctatgcatccactctaatattaaaacagaccctcaagtctggaccaagtttgctaaaggaagacaggtttgaggataaaactgactaatgatagacacgttcctagatgtgtttgcagttttgatgtattcagagagattatactgatagtgttgtcaaatatcgaccatggtgactccatatcagtggcaaattttggaaaaccgtatggccaatttgtgaaggatggcagtgccacggtgccatattttagatatttggcattccaccatggtctgcaatctgtcatcgctaacactgtatgctgatagcgactcacaaatttaaggaccaaaatgagtagttactcgtagaataactaacttgtttctgtcataatagattaatagataccagaatgattagataaatgggcttgagattggaggatgaggggttttttcagtgaagtcagcttataaaaaactggtttcgagggagagctttacgactatggttggagagggagagaagaaggttttcggctaaatttggaagagtccagctccttccaatgtggtggccttctcttggaaggtactccttaagcgtatccctactcgccttaaccttgctcgtaggaatgtcttgccggcggatgtctctctggactgtgttctttgtggtgcggtggtggaatcagaaagtcatctgttcctgcactgttgtgttgtcgggaagatttgggaagagttgcttgcgtgggtgtaggggaggtttattacgcctccgaacatgtttatacactgggcatgttgggatggtttgtcaacaaataagaaggttcgagagggtttgcggctaatttggacggctagaaaaaattgtattttaaaaaatacgcttattaggtgggaagagatcgtggaggaggtaaaggttttgtcttggcggtggagtctaactcatctgaaaatcccggggtgcctttattatgaatggtgctggaatccgaaggaatgttttcggagatagagatggtggagcgcagctgcagaggtgttgtgacccatttgttatggatgctgtttttttactggttttttggcagtaacagcaagctgttttgctgtcaaaacaactcagcaggccttttttggtgtttagcgcggcagtttttgtgcctgtccgctgttgccgggctttggtagttgttatattagcagaggcgtgttgcttgtttggctgttttagggaatcgccgtgtttttaccggttgtatatgttttgttccttgcgttcttaggtgtgtctgacacctagttcagcttaatcaattttagcagtttcaaaaaaaaatataccagaatatgacaggtatttacctaataacaacaactaatataaatactctaactatactcacaatcccataactctgtgtctcagtaaagtgtgccataaagttatagattggagcagtatgtgctatgtagcatctgtaacactgacatgttatttattatattttttttagtaaaagaaataattggcactgaacttttcataggggctatgaatggtgaaatctgaacattttggatgttgatatttaatataaagattatgggtatggtccaatttggataaacttccaggcttctagcttacaagagtttttcaactgaaataagtatttggtttctaaatcatgaaaatacgctatgagtttgtagttgtttaaagaagacaattttctggaaaaattgagatgtaaaagttgaatttaacttatgaaggaagttgttagttacaatacttgtgattatataggataagtagctgacttaacagattaattatcagatacctgaatgataattactgtacctaataataagtactgttttcaataatctaatttttcttggcttaatctcttcaattaccagattcttaattacataatcctgcctcatgaattttggtttcatacagtgtgttttatgttgcatttgtgacaatatcatgttggttatcattctaattctgaattgtctgtaattatgagaactggttaatcttttgacttcatttttctagtttattattagtttttgaaaaagaaattgtttgcacttcagtcactttaatatcttatagaagttcttcaactgaaatggtatttaatatctaatccatgaaaaataccttttaagcttgaggttgtttaaagaagataaatgggtgtttctgtagcacatattgattttacttatgagggagatgttagttagaaaactcatgattattgcaagattatttgaattattattacttgtctattattagtactcgtgtaaaagttaatttaaactaactttatatggaaaacagttccaatactaaataatgcctgcttctcttgtgctgacttgaatgaagaaaagtaattcagtttaacatctgtagggtactttcattcgagctgcttggactcgaagatc

SEQ ID NO: 4597 - DNA, 884 bp, Medicago truncatula
  Intron number 1 from transcript Medtr2g111400.1 (locus Med tr2g111400) derived from phytozome v7.0 (chr-ID MtChr2; po s 26412343 to 26413226)
aattactacagaaaaatgtgggtatactagcccgtctttccgctagtaaacataatagcattcaccctatttctttcaacacctttcggggcaaagtgtacgtttcccttttgcattttttttaactagtttccctgtacaattattcaaagttttacacatattggtccacatttttattctttttaaaatggttagatttgactgctcttgcggcccctatttggtgggaacataacctccgtatctccccttacagctttgcatttaaaccaacagtaggtttaggtaacaaatgaattatttgctaaaatgccatctaggctataaatcttgtggttgaagcaggtggattttgggcatagtgatcataggttcatgttgtaagaatccttattgaccaaagaagctagtttccaaagacagattagttcaaataattgtgcttctcttacagtaagctatgaactaccataatgagatgaatgtatacttggaaaccatcaattgaacttggtgatagttctgggagtgttttcttaatttctttgtattatggtggatagatagtgaattccccatatgcatatgttactgactgacttgtattttccttagtccctttcctaggactaatgattcacatttcactcggatttatttaacttcatatttatgtcatctggaattgtttagccataatctctttcacgattacactatttgttttgctttatgcatttatatttctttttttatttgaattgttccgattttggctgtctgtattggccaagaatgcaatcaagttccttttgtttctaaagcaggaagttttaactttggtgcttttgatttttcataactttcaccttttatcagcg

SEQ ID NO: 4598 - DNA, 1520 bp, Medicago truncatula
  Intron number 1 from transcript AC233677_19.1 (locus AC233 677_19) derived from phytozome v7.0 (chr-ID AC233677; pos 111286 to 112805 reverse strand)
gcgtagaaaagagggttaaatcaatattaacaaatcaaattgaaagagatttaataagttttgtcatttacaaaaggattaaaatttaaagaattccttaccttgattttttatgatggagatgcaaactcgacagagaaatgaagaaatgaggaaaccattaggaacaatctgtatctatacgatttttgtcttgcaaacaaaataggaagaatttgttaataggagtgattttttttatttttttatgtttatctgtttagtaggaaacgcttttttttttcttttttaaaataggagatttctgcaatttgatattttaaacaggggtaatacagtaaaagcaagcactgaatttaggttaaaattagggcaacaattagcatatgggttaactttaataaataaaagatttttattttttgtggtgaaatataatatattgttttagttcatgtatgatagttttatgcttgtgtgtgtaaatgcatatatattagtgtccacatcgctgaaatagcgcccacaccattttttgggttggccgcgctgcactgcaatctcgcattgataactatgtgtgttgaagatagatatgcctccactctttgaatgttggtgttttatagttataaaaaactggaggcatatcccgataataggaagaaagaatcggatttccaacatagtgaatgttcacaacttaggaaatagattattcattcatctttcattaagtgcaggttgacttgatgctaaacatatacttatgcacgataaaatcccagtttgctcttctaattttttttattttaccgtattatgttatatacaagcagaacttaaactttatcttctgtttctatcactttgtttcacaaaccaataatggcatttaaagaaatataagacgtttgttcacttgtctgaacatcattctggatgttatccaatgcactcttcaaggccatgttgagcattatttaagttttaattgcttgtttgataattatttcaaagatttatactgatggattttactttctcaggtaatttgaatggattgtatctaaacaaaactctcttaaacaattacttttagacttttgtaaccattccccagacatgaaattcatttttcttagtaatcattggaaatatatatattctactaaataccaaaataaacattaactggcatattaaaagaatttgattgtcctttcagaactgtagagaaacagggtttgtgtccagttatgtggttctcatagaggacagcttgcacaatagtccttttaaaattttaaaccagcactggacatttcatagacaccaattaaccaagaaagtctagcccatttacttcttattttgtgtgtcgttatctcattatgcatcctgcattctatcttctatcttaaatactttttgttgaaagttaatgagtggtccgttaaagtataaccattgtttctgctgcagtttgatttactggttgcatcacttccaatatctga

SEQ ID NO: 4599 - DNA, 3447 bp, Medicago truncatula
  Intron number 1 from transcript Medtr7g093240.1 (locus Med tr7g093240) derived from phytozome v7.0 (chr-ID MtChr7; po s 20786340 to 20789786)
ccttttagatctactgccaggaggttccttcagctgtaactttttgaaagaatataaattttgaacatagaaagatgatagtacatatacacattcgtgtgtatagagagattttgtcacagagggataaatttttgtcatgtaaatgtgggtgtatatgaattgttgagattgaaagttattccactaagttcagattgattagtgatacgtcatttttttataagtgttgttttttactcattagttttaaaagtgattattgccaaaaaaagattattaaaagtgtactcaatcattattgttattctcttaactataaggaaaaagtttagacgagttagactaaaagaacgcttacataaatatttataaattatttatcaacgaggttctaatgttggcaacaagagttgaacttacacctttgtggaatatgagtcaactccctactaacttgaccaatcttcaattgtcaagacgggtttatgtggtttttatctaacttaatttaaattctaatatggtgctaaaatgagtctagtttagattccttaacaacctctaatttctaagatattcaacatggttacataatcatttaaacaaggttaacttgaatttatgttttaattttgatcatacatgattcgatttaatgaactgttttacttcttatcaatctaatataaaaagtttccctcgcttaatacgtctctcatatatgagaggatattgaacttaaattcccacaatagttgcatagacataattattgtagatcaaatcattaaatggatgtgtcaaaattacgattagatatgaattgtgattttctcaaattcaccacgaatgtaaacatgcagtagataagataaaacagggaaacattttgcacgaatacaacttgacatagaacccaagctgaatacagcttcacatgtctttgtctatacatgtaagaaagaaaaccaaggtaattagttacatgtaattaagtataaataaacgctagatcttgtccaaaataaataaacaaaaaactttagatatgacagtttccagattccatgatattatcaccctggaaagcatgattcaatgacttgattgttgatgatagtcttgtgcttttgtcctttttatgctactaacttttcaaaaattgattgaataaaactctagttttgaaccgtagaaaagcaaagcattgattcatgtatcatgatgtatttgaataataattttattatctaatgtaatgaaagaacattgccccaaaatatcaaagaatgattcgcaataaatattggctcaaaaaagaaaaagcttgtatgagcaattaatataggagttttacaaaagggaggttgtaagtaaatgcagaatgggtaagaaataggtcccatttaaatggaccccaatgggtctttttggagctttcttaagtaaagtgtatgggtactttccataatctaaaattctcattgcctatatcaagttactaatgagaggttgaaagcagcttccaatattccgagattaattatgcagacatgtttcaatctaggttattagggttacctaaaccatgtcttatgtacatcttaaagtctcgtattgtttgagaattaagattaagggtagtttatataaacattcacactcctcaacccaatgagacactttttataaaagagaaaaccgtgaaggacttacgcccaaagtaaacaataccttgaaacgcgatttgatgtgcttgagggcggaacggatggtaaatttatagaggagtgctctcccatagtctcaactagggggcaaatgttccagtacatcttaaagtaccacattgcttgggaatcgaggctaatggtaatttatatacaacactcgcatttctcaattcaatgacgtgcctttttataaaagacaaaaccatgacagacttacacacatacagtacctcgaaacatgtgtggcgtaattgaggaataaaggtagcactatctaatgtgataatgattaaatatttaaatggattagtggtacatatgaacctcttattgaacataataatatgatccaatatatcaaaattcatttaaaaacaaagttcaacacacacttgtcaactaataattactaagaattgaccataatttttattcttaagaatttataataactaattattgtcaatccaatgatacattaattaaataatttatctaacccaaatccatttaaatgtgccctcatgagtctttttagagttctctaagtagagtgaatgggtactttccacaatctaaaatttccattgtccacatcaagttactaacgaaaggttgaaagccacttccaatatgccaagattaataatgcaaacatgtttccgtgtaaggaaaatatttggatgatttttgctaagaaaataatagttcttacctataaggaaatcaatgaaccaaaacattgccaaattttttacaacattttacaatttgcattctagatactatatttgatcccaatatctttctttattcatgatcacgccgttgccaccataagtgtcttctcaatcatgtccaacttgagcaaaaaattatgtgttgctattggacaattttcattttggtcctagttgaaatttttgtgaccatgtcatttttggtaactttggttttcataagaaacaaagaacaaatggaaatgattaaaacttatgattagaaaccatcctttcctttcgtatatgatcaaatcatacttctccaaaggtagtgcgcaagaaatcaaagcatgagatacatagcaatcaatcatcattgggtattaaaaggtgggtcaattatttaacaggtcaaaaacgatatatgtgaatggatttctaactatatgatatcaacatattattggtatagctcaatgatcacatatattgcgtatatacatatatatgaagaaattggggtccaagggttgttgaaaattagttagaaaggaaattagttttcattgttaacaagcagatagatcagtcggtcacttccttgataataactttttttcttttcagactggaccttgataataacttattttcttttcagactggacctagatagtaactttttttttagctggaccttgataataacttgtgaaaacgattttaggttaatacaaaaaattaattttataacaagtactctacaggtaatagttaaggaaaaaaaatacaaattttagattggaaatggcaatttaaaaaataaataaatagatacatcacttttaaacgtaaaatttctatttttattcctttaataaatgtcataaaacaaagaacaaaaatataaatcatactatttatttgtaaactctgattcttctagcaatttttttcaatataaatcatactattttgaatataggtga

SEQ ID NO: 4600 - DNA, 1956 bp, Medicago truncatula
  Intron number 3 from transcript Medtr5g029920.1 (locus Med tr5g029920) derived from phytozome v7.0 (chr-ID MtChr5; po s 12498275 to 12500230 reverse strand)
tttcttcttactaagtgtctggtgtattgcaggttgtatgtttcaatcatcttctgactctttcctttgatttatccttttgttgaggtaaagtgatttcctatttcacagctccatatatgttcttatccttttttcatttaatgagcagatttttcatagcttatgtttttcatatatgttgtatggagttgataaatcagttttgatttatcaaaaacaaaaacaaaagtttgagagttgtagtatgtttttcatttcctgattcttgatatatgtatcttgattcttgagagtgctttgaagacattagagtccaaaattaatatcataagttactaaagcatatttcaaatcatttcagattcctattgatgtaatgcagtgagctacaaaaaaaaaggtaatgagtatactgttttgcctctgaaaaataaagtttagttaaaaatttctttttttgcataaatttttagcataaatttttcttaaccattttgaaagtccataattgtatgtttaaccctcaagttttggagttgttcgtttacaatgtttatatataattgtcttattattatcaaactcaaattactatatataatttttcttagactcattttgaaagtatctaaccaataataattcataaactttttcccagataggaataatcaattaagaaagaagatgacatatatgaataatcaattactatgaaaaagatgaaaagttcaagaaatgcatggatagacacttatgagtaaaggcaaatagaaactttcatgaactacaaaaatactaggacatgaatgatcttcattgtctttcatccaagggcggttgtaaggctagaaagtagcttacgaaatatgttatctgccaaaaccgttcctaagaagcttgcaaaatatgcatgtaagagtctatcttaattcaacaatgaaggctccgtttgtgctctctgttcacttattttttctactataattatgcttattcactagattcaaaacattgctttacaattttgttttctcactaatgcattgatttggtgaactcttcaacgagatttattttggttttttattttctactttgcctttatgctgatacaaagtattttcaacgttcctttatggatatactttttgtacctattatttaggataatttctcaatctacccaaaaacacaggacggttaccaaaaccgtacttctctacttatttcaattatttaaacaacaaatactataacaaggtgcacccaataacaatatgttattcactgtttttttttacataacacattgatgatagttaagttttttccctctggatagtgtattttcagtcttccactctcattaataatatacaaacactctatatttcaatgctaacctcaaacaaatcaatatgtctgtcttatacatgggggctatataagtatttgaggataatttaaaattttatattccctaaacatggggggctataagtatacgatttaagtccaaaatttcatattcttcaaacatgggggctataggtatttagtttatgtttctatttatattgtaggtataaatattgtgattaacaattgtattaatgttaaagtcacaaactccactcaattaaatgttatgattaacaattgtattaatgtgtctatttgtagaaaataacttatcaggtatgaatatgtatatttaagcttcatggtcaatttgaattattcaatatacattaatcacacacaaaaacctttgtttaattttgtagataacttttttgtgttcttgcttcatcgttcagagtaataatttgttaacaccacaaaaaatatttgttcgccagtgcgttgcacgggtagaaatactagtttttgtacatttatgttattgtcaggcacatgctagtatcaatacactcgagatagtcgaaa

SEQ ID NO: 4601 - DNA, 780 bp, Medicago truncatula
  Intron number 11 from transcript Medtr5g025460.2 (locus Me dtr5g025460) derived from phytozome v7.0 (chr-ID MtChr5; p os 10168089 to 10168868 reverse strand)
tcttgtcaaatagccgcactgcttcatcatcactggtctgttcttcctctcttttctaaaaggaacacttgtttttccttctcttttgggttgttatacatttttgctttttgtaggattttaatattttattatttaatgcatttcagcttttgatacgaccattatttgtgtgcattttagtaatttattattcccactttatcaacaaaagatgttgcaatgaactgcaatatatatggtatttggctgcatgagtccaggtcccactttaaaattagtcatgctagaaattaagtaaaaaaattaatttggaatcaagagaataaaattgaaatagatctataattttattgttttttttttttaaagaaacaatacaccaaaatggtgggaccccttcccggaccctgcgtatgcgggagctttacggtgtattatggtgtaaatgtaaaatcatgttgatcaacatataaagttcgttgatccatgtccaaataaaacataagaccacaataattaatgatgtgtaattggactgacaaataaagtggaacaaattaatggaaaaacttacagcatgtgggaacatgacatgatcaatctctgaagtttactgatttgttcctgtaagaactttttgcttctgtaagactagtgagacaccctcaaagatttttgcagactagtgagacaccctcatagattttgcagacctgtcttaacctatgacgtgtttttgcagactagtgagacaccctcaaagatttttctcattaa

SEQ ID NO: 4602 - DNA, 3185 bp, Medicago truncatula
  Intron number 1 from transcript Medtr3g092080.1 (locus Med tr3g092080) derived from phytozome v7.0 (chr-ID MtChr3; po s 21578446 to 21581630)
tttatcaaccagggagacccttcattgtttaggtataagtcagattgtctacattattgtatttctttacttacgactttgcaaatatctaaatgcagaacaaataccgtgaggattatcaaaataaaaaatatactgtaatcttataaaacgttaatattatacatataaaataaggtgtgataagatagttatttgatttcctataaaaagaaggcaaaattacatctgttgcccttaaagtttttcgaatacgtcctttaaatttacattttttaaaattggtttttaatgttacattatacttttatatgttgatatcatttctcctttcacttcttcttatttaaatttaaattctcaaattcaaaaactttaaaaccaatgcatcttattgttcgcagcaatgtcttcgttttgcaagaatggttaaaatctaggaacttaaaacactgagtcattatttatcccagtgtgagacatgatgaatggatacttgaatgttattaatctctaattgtgcaacaaagctcgttgttcgcataatcacaaaatataatataaaagactacaataaaacaagaagataacttagaggcaaataaaacttaaatgacctataaacaaaggttaaacttaaagcaacatatgtgtaatttttccaaaaaagaaaaacagtttggttgttgagaaagaattattttaaccaataatttcacgtatatatcattactggtagagcaacaactagtaatagaagattaaataaacgaaagttaaaaacaacaaatacgatcgatccttactagatagaattattttaaccaataatttcatgtatatatcattactggtagatcaacaactagtaatagaagattaaagaaacgaaagtaaaaaacaacaaatatgatcgatccttactagatttcttaaactatagagttttgatccttcatagagagagtttgagagagactcttgaactcaagatgatttaaattttgtttcttactagttttctattagctgccaaaattgttatgaattcagttttggacagttacaaggtagttagttgtttaataactgaatcccaactaactgaaggttagttaagctaagtctaataatattatattttgtggagagcttgtaggaattgtttgtccactcaaattaagcttcacagttaggattaggatgttaaatatccaatgcatttgtcatgtacaatgaaaatcttgaaatttcaagtttaaaggttcaaattgaaattaaaagattcctttttacattctcacattgtgtaaccaaaatttaattatctcacatttatttatttccaccttatcaccattgcgtatgtttttaataaatcaaatataataattatgcacaactataaaaattaatctttgttttggtgttgtgttttcgggttaagtatccctttgtactcatcttttaattgaaatgctgctttgttgttttaaaaatataaaaaactaaaactatatcacaaaagttgaggctactgcattcacaagacaaagatcatattgaatttcagattacaaattaagttgaaaaatactagctaataccatatcattatacaagcttatattggattattacatgcatgcatgcatacattatgcagcagaatgatcaggctagtgacttgctattcagtcaaaggaaaagccaaaagtcaacgtgtagtttggttaatactagtacatgcatttaaatatatcaaccgctgatggctttgactgcaatctaaagtgtaaacacaaaggtaaaagaatattcttagctcagctgaccaatatctttttttgtttacaaagccttgctattataattttaattcttattaaacccacagatttcttttgtagtttgttggcataaagtaatgtgaaataatgtatcaagtccattttctccgtctgaatgatctaccaaattgcaataattcaataatcatatattatttgaatggttcaggttaacttgtatctctgggcattagttattaaacaactaaaaatagaaagaaatgacaaaattaacattaaaaataatactttttcaaatttcaaaaagtaaaatacacaatttttaaaaaaatatttcttttcataattccttacataatgttccggggatattagttaatattttcctatttgaatttaattgatatggtatgaaaaagttagtctaattattttaggtacatagataattgtgaaacatgtaataactatgaactcgtttttctattgtttttcgatggtcattttgttttttgtccaaaaaaactctcataaattaaataagagaatatctaaacatatctcgaagaaaaagagaaaatataaaatttttaatttgactttcaaactgtttggaatgtcatatttttgagcttataaaaaatagattatcaaataaataagtctatatgtaaattcataaatactcactaccgaaaattatattttataagttgttttttttataaacaaccttaataattttataaataatacataaaaatttatttatttgcataaattgttttacttaaactaaaaaataaatcaatttaagcggattatgagcctgtttattacggataaaagtgattttgtcataaaataatttatagattattttatagagattttatgaaaaattaaaatctattttccgtttgtttatcctaataaaaatcattttcttttatataatttagtttgtttggatatatctatataaaagcgattttttttaaagatataaaagcgattttttgttacaaatttaatttaatattttgatccatattttctcttattctaaaaaaatctaatttaaagctgtttttagattttttttttttagattctaatttttttaaaaagctgtaacaaacaaattcaatactcttacaaatgttttttttttcaaataatcttttcttaaaaaactataacaaacatgctctatatcatatacataatgacaatattttttagttttttatttgatcttttatttttactaaaagatgaataattcaaaagaatcgagtttgattcataagagaacaattattaattaatcatgagaagtaaagtagccaacccacaattccgaggctagca

SEQ ID NO: 4603 - DNA, 1362 bp, Medicago truncatula
  Intron number 6 from transcript Medtr5g075050.1 (locus Med tr5g075050) derived from phytozome v7.0 (chr-ID MtChr5; po s 27253385 to 27254746 reverse strand)
cctttccattggaagaagcgagggaccaatctccggtatcttttttcagttcttttagtttttaattttcacaattgaagattcatgcttaaatatctggcctggtactgttaaaattatgaatctttagatattcccttaattgtacaacttcctagattgattgttattactcctagaatatacaacttcctaggctagtgctttcttattaagcattcaatgcatttattgtaaaaccattataaatagtgttctcagtttggacatacatacatttatacagatctttacataattttacattgtatcagagcaagttccgattctgtgaccttttctctgtgcttcaccaccgctggcagcaccacctattagaagtgtttcagtaggtgtttatcagcgtgctcatcccttgaagtgaccttcacacgcgttcctgttgtgtttatcactgtgctcatcccttccagtgaccttcacacccttttctgctgtgcaagtaccagcttccattgaggtgtttatcactatgcttatccctttcagtgaccttcagactaatgcttcgcagttaacaccctttctttagctgtgcaaataccaattgccacttttccggtgtgacccaacaccaagcaccaccaccaattgcttaggaatcctccagcgagtatggtggttcttttatcaatgccaccagctaccacacgcgcagctaccttctccgtacgtggccccacacgtcgcctctaggttcgtgcatgaaagcgcgtgcagccttctctggccaccagcttccagtgatgtccgtctcagaaaccgtcttccatattacgaggtggttttagtagtttgatgactcctttcccacatatggttcatattggtggtgccttttccttcccatcgacgctcaatccggtggtgactcggggatattcccttaattgtacaacttcctagattggttgttataactcctagagtatacaacttcctaggctagtgcttacttattaagcaagcattcaatttgtttattgtaaaaccattataaatacaaggtgtgtgatctcattacggacacaaattttttcacagaacttcctagattgattgttcttacacctagagtatacaacttcctaggctagtgcttacttattaagcaagcactcaattcgttcattgaaaaatcattataaatacaaggtgtgtgatttcattacgtacacaaaatttatacagctttacatcattttacaaaacaattgtctccagtggtctacccataaaacttatttttgaaatgtttctagagcaggttataggagttcctctggctcaggagcagtggta

SEQ ID NO: 4604 - DNA, 2229 bp, Medicago truncatula
  Intron number 1 from transcript Medtr1g020680.1 (locus Med tr1g020680) derived from phytozome v7.0 (chr-ID MtChr1; po s 4586428 to 4588656 reverse strand)
ttggtatatatagtttctgacttttgatcaatttctaaattgttactactaaatatattggcggggtaattatttggaatcttaaatagccatataaccattatgtggctccctgcagaaacattttcctattgggatctgtaatgactaatgagtaatgtagctctgtccttgagcatatgaaaccatgtgcttcgagttaggattcatatagccatagctaatcctggtctgtctcctagagattttcctattaaaatcctcttaaatgttgagtcaagagagatattgaaggaaaatggggtaaggaatatgcattacaaggagttccatattgctggggccatattagacctcagattttttttttttctcttttccctctagttttgtagatggaacatgtaaaatttatcacacatctttagataggatccaatcttgctgttttttctcaagccatgcaagttattctatcccttaaacattgaaatgctctttcgattctctactgatttttgttagacttttcatccattttgttatttttgtattttttttagacaacttttgtattttcatatgttagagtttctttcttcatttagtaaaggtctgtaatgatattggttcaaatagcacaaacagacccaagaggaaaatataattggaagatttggatggtcctattataattgaatcatgaatgatgtctgtgctattagttcttgcagcaactgattatgtaattttaatgatgtctcaaattctgtttatgggaatatttaagataagatgattctattttcatttatataccaaaatagttattctattttctagttcttattttaattgaatcatatagatgatgtcatgtttttgaattgcagcaaaattttctgagatttcattattaaatggtgacttttttgtcatatattcattatttttatatttattttttatggatgaattattttcctgcactgtggatatgttaattttacttttgatgggactaaacgaaataagccaccattttatttattttaatttacttttttttaacaagcttttaatttactttttgaatgatcagctttaagtagttactgatattcaagactaaacatgattatttcctgaccatagttatttagagttgtaactggttaggattgatgagtgatcaactgttttgagattgaaggatattagaatgtcccttttatctcctagcctctcaagatgagtgattttttcttagttttttttttgaaacagcaaattttattaaacaaacatatctctgctcaagacgaatagagaccggtgaaattgagaatacaaacaaaaggcgccgtataaaggcgggaacacctaaaaataacaccctaaaaacacccttgagtacacgtcaccacctagaacaaactccttcgcaaaaaacaaccaccgtaaaaacgatatccaaaaccatccgtcgtcgctactcaccccaaagaaaaacacccctccaaattaaactccctggcctgagcaccaaagcttccgttgatattaagtgattttttcttagtgatattaatgattttactttgcttctgttggatggaggatatgtgatgttgcttattttcatgtttggtgaagtgatatagttgagaattgaaacatgacttcggcaggaccatgttatgaatcttttgtttttaaatgctattccatgggaagtttttgtgcgtttttggttggtttaggattagtcatagattatttttatggattcaatttcactagctttggatggttcttctctcagaattatcttgtaaagtagatacatatttggatgctagaaagctctttgatagtagtactattttttgtgccatgacttttcctaaattttctttgcatattgtctttcctccaagaaacattttgatttcatctaacagaaaatttaattgcacaatcagtctctttgatacagtatagacatagagttgttgattttagttggcataatgccatgatatgatgtactttgtagccacaaattacctatgtgtattcataaggcatttgactcggtcccgaagccagaaataccaatactcattggacttattatagttgaatatagtttttatcctattaaatatttgattattttattttgttttagttcggtattagagggttaatcttggcgcagctggt

SEQ ID NO: 4605 - DNA, 2074 bp, Medicago truncatula
  Intron number 4 from transcript Medtr4g086980.1 (locus Med tr4g086980) derived from phytozome v7.0 (chr-ID MtChr4; po s 18171245 to 18173318)
gagtgatttcagcttctggacaagattcaacttctgtatacttttcagaatcagaaggttgatcagattctgatgcatcttcagaatcagttgtacctgcattactttcactttgctctgaagttttacttccaggctctctatcatcaaattttacatgcatagattcttcaacacattgtgtttctgaattatacactctgtatgcctttgacctttcagagtaacctaaaaagattcctctttgagccttggcatcaaatttcttcagatagtctttagtgtttaagatgtaacaagtacatccaaactgatgaaagtaagagatattgggtcttcttcctttaaagagttcatatgctgttttctccaacataggtctgatatagatcctattttgaatataacatgaagtattgactgcttctgcccaaaaatgtttagctaagttgttttcatggatcatggttctggccatttcttgtaaggttctgttctttctctctacaaccccattttgttgtggagttctaggagaagaaaactcatggagaatcccatatttttcacaaaaaagttcaaatgactcattttcaaattctccaccatgatcacttctgactttcaaaattttcaattctttttcagattgtatttgagtgcagaagctgctaaacacttcacatgcatagtctttacttttaatgaattttacccaagtccatctgctgtaatcatcaacaatgactaatccatatttacttccatataaggatgcagtgttaactggaccaaaaagatcaatatggagtaattctaagggtctggaggttgatacaatgtctttagatttgaaggaacttttcacaattttccctttctgacatgcaccacaaagtgcatctgaatgataatcaatgttaggcaatcctttgaccagttgtaacttgctaattttagaaattaatctccaattagcatgtcccaaccttttatgccatacccattttttatcattcattgacagaaggcaaactaccttctgatcagccagatcagagaaatttattttatagacattctcaactctctttcccttgaatgtaatggatttgtcatccttgttaactagtgtgcagttggtcttactgaacgttacatcatacccattgtcacaaaattgacttatgctcaataggttatgcttcagaccatctactagccacacattattaattgagatggaggaattaccaatagtacctgtaccaatgatctttccagtttggttgccaccaaacttcacttctcctccatctttcattgtaagggtaaggaacaaagctttctctccagtcatgtgccttgaacatccgctgtctaggtaccatgacctttgtttctctcttgcccttaagcacacctgcatttttggccaattcagatttaggtacccatatcttcatgggtccttttgggttagctttggaggttttacttttcctcccttgtaccttagggtgaatgctgagtggcttctgatcattcaatactttaggtttgacaccttttggtattgttttctcagaagcagtagctgctttgttcttctgatccttttgttttggaattttagattctggtttaatcagattctgatgaacaggttctgatcttttcagaattttaatcttttgactcttaggatcagattttgtcattaccttgatcttaagattctctggctttgatgtgatcttagcctgtgaacctgaagcttcaggttttgactgaacagcagttttagcatttgtaccttcaggcacaaaggtggatttcaatccatccttgatacaatcacagtagctcttgagactgtattctttggatttctcctcagaatatccaatccctttgcctttgttcttgtatgtgctgtagatcatagaagcaactttgcttctgtctattccagccataataaaatcatccaaggcaatctcatgtttattgcctgaacctttatcacatttttcttgtagcttctgacaaagactcttgagtctatcttcat

SEQ ID NO: 4606 - DNA, 3232 bp, Medicago truncatula
  Intron number 3 from transcript Medtr2g049530.1 (locus Med tr2g049530) derived from phytozome v7.0 (chr-ID MtChr2; po s 13556294 to 13559525)
gttctcaattaatgtgagtcctaaacaaataattcatctctacattgctttgttctgttcaattcttacatgctttgagacaatttatttgcacatattcctctttattgtcacaacgccattctaggtagtatacttccctgaagcaatctctaacagaaaatagaaaaaagttatcaatttaattcttggcaataacttttcctctatctttaaatcaaactaacacttgcttttgacgtatttctgtacgactcttctatagttatcaatattttggttgttcaaatattcttacttagaaagaaaaaaatatgcacacttttgaagattttgttgttcaaatattgttacttagaaagaaaaaaaatatacacacttttgaagataaaaatgatgccgacaaacgtttcacaacttgctgaaagttggtgtcaaaaatgacttcattccaacaagatctgagaataaatatcgcatcatattaaaaaaaaaattgaacaaaactaaaacattaatttatatacaaaaaacaaacttacttttttggtgaaaaaataaacttaattttttataaaagaaaatgccaatgaatatccttgaaacattctttaactattttagatggcctgtaatgtattcaatacattaaaaaaaaaacgtaatatttaattttagagaataaattttaaattttgagtttttaaagagtgctccaaaaaatttatttagtagatccacatttataaaactgaggttatgttaatgagtgttttaaagatattaaggatttaaaaacaaaaataactaataaatttttatgcagaaaaaattactttaggtatttaaatattttgaatgcataatttttaagataaatttacactttaaacttctaaatttgttagtattctcgtaaaactaagatatacagaaatcttgtgaagagtcttgcttaaggtgggaccagagagtaggcactgaccatgaaagatatttggtcttttccgaaatgcatgcaaaaaccgatcggtgctttcagagtttttgttttctcttgcatggtgcattttacggtttcagatagaatcttttcaaattagtctttaaccctctctcatttaaattaccgttttatatttttttttaagtggctagaatgaaatatatttatttttttgaagaaactaaaatggaatatattaacaataattgagacgcctctgaagcacaaggtgtactagagaggacgctcaaaaaacaatatgttcgtcaaaaaacaaagggtcagaccgccattgctcacagccatacacaaaagaggcgttattcgcctttagccacaaataggagtggaatttaactttttccgtaagctccgtaatggaagaataaacattgttaaaaattctattattgcgttctttccagatgagccacacacacagcagccacacaagttgaagaaaagattgacgacttctcctgacacctaagtaattagtaaattgagtgaagtgaacgtgaagagcattatgatcaacacctgaaataccaagccataacctgacatgttgccacaaatagccaaaaaaatcacaagtaatgaacaaatgttggctgctctcaataagactgcagcccgccacacacgaggagtcatctgcttgaataatgtcgcggtgcaagaggttggattttgttggcaacttgtctcgaagtaacctccaagctaagatagagacctttgagggaacctggttgtgccaaataagattgtcggattcatccaacaactgaggaacctgagaagaaagcaactgagcgcacagtgtattctgcagtaatgtcggggtgccacttccaagaatctgaaacattaatctgcaaaataacattagcaggtaacaacctacactcctctactaattcctcctcccacgcccacaacctccgcctccactgccacgcctcacctcccctctccccaacctaatgagaacatcgatgctactgaaatcgacttgttcaccgtcaagtcaaacaaccgagaaaaacactaacaaagagggacctcccctatccaacggccgcgccaaaacatcgtggcttccccatcacccacctttctcgtcacctttcctgagaaccaactctcaccgtcctcgcctacgccacctctaatcctagccaacctcctcaccataccttgcagccaacaccctattccacaacccacctctaatcctagccaacccacctccaacccattagcaaattgaagatgagaaacgaccatggcattagtcgaacccaccgaataaccctaaaaattattagtggtcaccatctccgacatcataacgttgagaccctcggcggccaagaggaacaaaaaaggagagagcgggtccccctattgaaggcccatctccaaaggaaactcatcttttggactaccatcgacaagcactgaggtggtagctgtagtcatacattcattgatccacttccgccactagaccgaaaacgacattttgcacattaccgcgtctaagtatgcccagtccaccgaatcataagccttttcgaagtccactttaaataaaagaagctcatttttcaactttcgagcttcgtcgacaacctcattagcaatgagaaccccatctagaatttgtctatctttgacaaacgcggtttgagtctctgaaataacctttcccatatccactctcaaccggttcgctaaaaccttagccataattttgtataaacatcccagtaaagaaatagaccgaaaatcattaagcttctatgggctttcgactttacacaataagtgtcaattagtacaataagtgcttagaaagacatcaaagatcgaaaacaattaggaagccactaactacaattcctatgaatgatttaataaatgatattaattttattatccttaaaggctaattataattagacgaatgaagtacaacgaacattaataaaaggggattaaaaaatttcttcaaacaatattattttaattgttttttgtcaataaatttggtagccttaagaaaaggtaccctgctcaaatgttgcaaacattcactagctatgaaactcataagtttgtaaaaaaatatgaaaatcataagctattataacttctttttttttaataaaaaacaaactatgaattttataattttttagtgaaccaggtttgcag

SEQ ID NO: 4607 - DNA, 4000 bp, Medicago truncatula
  Intron number 1 from transcript Medtr6g080760.1 (locus Med tr6g080760) derived from phytozome v7.0 (chr-ID MtChr6; po s 16277315 to 16281314)
attctagctgtgaaattacgttgatttttgttgttgttacatgtcctaattttagtgtacatttgtattgatttgagttgtttgtagcttgtaatattttgttacatggatcccaacaatctatcactttcatatatatccaaaaagaccaatcactacttctcttgatgttagcttctaaccaagtgagtagttctatggtgaagaattaacttgcagcaaaagatacctcccaaatttatcaatgtctcatttttaggatagcacccaatagtgaccaattaaacatgagattcgtagagaacatgtgcaccgttggttttaacttttgatgtgtaccatcaatgattatgctagaccaccacgtaactagttgcctccacctcgttacgcaacatagtcacttgtcacatgcaaatatgtcatggacacaacaatttcggtgaatttggttacatactttttatgttgtttgttatttgtttaaaatgcatttttgcgttataacgaacttagaagaaaaaaaatgttggttatttatgaatctttttggttaaaaataattgaggaatggtaaaaagttacttattgaaaagacacaaattatcattttattgaaatgaacgcgccaacttaaaattacaaatataagctcttactaccgagctatatttaaagtgtggtcaagttatggtacacaagaatgataagatacacaagattgtttttaccattgaattaataaattttatcatgaaatgaaatatgatgagatttattgaattaatagtacaaaaataatagtttacatatgcatgcatgttggacgaaactttaaagcgaagaacgttatagaaagcaactaaagaaatgtagtatggttgcaacatattttaccaaggcaaagaagaaatgtactctggttgaagaaatgtactattattctccataattgtcattttcttctttgcgttggtaaaatatgaaaatgaaatttgctagatcgttttaatgcttttatttttttatatttttggaatgataatgctgccattatttgttttttttttctggtacaaaaacccctgctattattaacctcatattatttgtttgaaacattattctcttttctacaacacgaatctggaatctcaagtagtatattgttcggtttaggggtgtgtgtccatttaggtcggctttgaacataaaaaattcatcaaccaatcacatgtattttcagttttatattgaaaaaaaaaaaaacccaagccccctattaaataaagataagacttaattatttaaagtttataaagagaacaccttttgccttataaattgattttgtaagaataagttaaaaaaaaaattgacaaaaaacaactaattaatttcacttataactgcaatcataataaaaaatgatatatgctcttgaatttagaaacatgtgtaccacgatatctctttgactaatagatcaacaacattaattatttgtttttcttcgaataaaactgttgagttttaaatgtgagtggttaagttccacatcgtcttccttcaacaaaagagtctcacatcgtctgtgaacatgcaatgttgaatttatatgagagatgacacattaaccaaatgaattaaggtttttgataaagatgtagtgtctctctcttgtggtcatgaaatatttgggtctgttgtttcttccttgatttctagactctccaacaaatggtgtcatagcccctagtttggcttagtggggggattagaatggatcctatgttgcatccttttataggatgatggactcacacacgtggaagatattgttgtatttcaagtgtgtgattaaatgtcacatcgtctctgaataaaaataaaaataaaaacatgaatctccttcgttcaattagacggatcttatcgttgtaaacatttcacaaataaacaacacatgatatattttttatgaattccaccttggtgttaccattctttcccgagagtgctaccgtcgacaccgcaaacaacatcacgacaatcgttcttccaccaacacacactttccggcgagcagtcatttgtgatgaattgtctgactcctattttttttaatctaaatttgcatctttgttttcgtttttacataatttttatgtaggactcatttttaaaatgtaggacacacatgttttacacaataacaaagtgtatgttagagagtgttgtttatccaaatacgagtcctacaataagcatcattcaatatatatactttttttagaaagtatatgtctagattaattaatttcatgggaattgttatgactctaagctcataaaagatactagatagagttccaaatatgactatgactctcttgttaggtttgccatactcatcagcatgaccattaatgtaaatgttgtaattttaattgcttgtgttgtgttttcaacttgaaatttaattatgggatccggttcctctaaagttagcaactcattttggagatatgtgcataagatcccctgatgggagtggtgtgtgtgatgatatatgaattggtacttatctgtatacctgtttataaaattttggtggtttgagggcgaatctacaatttaaatcataatttataagtatgtaaaaaattgaattataaaatgtgaaaataatttgtttgtcgcagtttttattacgttgaaaaataatctcataataccatcaaacttcataaaaaaaaacattaatttttttatttaatattcaaatacctctacaaaacaattcctgtgaacatttctagatgtaaagttactaataattgtgtctacaaatatgttccatcatttctttctcaatatataaaacagctagaatatttaatctttcttatgacatcggtgatctcatgtagtttttcaatatagtaatatgcttaacattattctcaagttatttgtgtttctcatttgttaaaagactcttgtgtctactattttcaaaagtgaacaatttacaacaaaaataatataccttatgcacatgtttagagtaaatcaaccattttctttaataagtctctccattattcaactttttgaaaaaataagaatataaaaatgcctagaaagtctatctataagaaatgtgagattcaattttctaatcgaccatttttcaattaaaatttctttgtttcagcatcaatgataccccaatttttaggatcataaatatatctaaaggagtgttgaactgatcatcgatgtctacataaatatttaacgcatcaaaaacattatcattatctttttttttaaaaagccaaaatgaaatatataacaaagcagtctcaaaatgaaatatatatcaagaacattatcattatcattgatgagattgtcatcattcaaaattttattcgattgttcagattatcttattttgtggctaatccataatattcgaacaaatttattttattctactagtttacgaacaaatttatctattgctcctttttttttattctgttaattttaatacttgtttttttcttccttttttcactatgagatgaatgttttctcgacaattatacgataaaataataatggattggccctggaacccactttcttctttcttttaagctgtcgacgcaacgctttttctcattcttttaagcggccgctgcaactttctctttaaaccgccgctgcaactttgtcttttactcgtgtgtctttttattgttgtttcaaattagggatttgaactccctttagtgacatcacgtgataaattctaaatgggccaacaaagaactaaacctttaatatatttttaagcttttgtaaaaaaaaaatgaatttttagcttaatgacctccaatttaatttaatttttatattttgggacctcaatttttgacttattttttaaggttaaggacggtcgccttcttcaccttacctcaga

SEQ ID NO: 4608 - DNA, 1004 bp, Medicago truncatula
  Intron number 4 from transcript Medtr7g026510.1 (locus Med tr7g026510) derived from phytozome v7.0 (chr-ID MtChr7; po s 6822640 to 6823643)
taggtaccgaaaacactcgaccttttctctatctggtacacccttcatgttcatgttgttgttgtttttgcatgcatcttcatgttatgaactttgtgaactttttgcttgtgtttcatcaaatttttactttttgtgttctcttctcttgtgtccaatgtttaaggttgtttttattttttttggctttctgagaataagatcatgatttcgttgtgttttgagatttcagctttatgtttatcacttttagggtgggtttgtttcaactacaaaaaactttatattagtagaatctgaatttttttttagagatttaagaaaaatgatctaaaacgaacaccttttactcacctttttgtgtttatcacttttagggtttatcaccttttgtgttcttttctcttgtgccctatatttgtaaacctatttttttttggttccatgttattaaaacaaactctttatctataaggcataatgaaaaggaattaagtgggggtgaaatgactttagagagtaaatgcatttgatttcagtttcgtttggtccctttaactgtttttcatttttagaatgatttaaaatgaaaaaaacaaaaacaacaaagaaacgaaagaaaaaaaaatgagataagactgttcgccaaatgatttatagaatataaactgattagaaaagatagattcatgttctaagtttggatgtttaaaaaaaaactatatatctaaattttgatttttctttttgtggatttaaggatgaggcacttgcttaccaaggcggaggtcacttaacacataagacaaaacttcagcggggttcgagctagtttccttgcaatggatgtaggagatcgcattgttggttcacgacgacgattttgaaaaacctattaggtaaatactgccgtttatttgaataacacccttgttttttttatagctcatgtatgttttttttttccaggccgatctaccgcattacagagtctaagaagcctg

SEQ ID NO: 4609 - DNA, 871 bp, Medicago truncatula
  Intron number 1 from transcript Medtr6g044070.1 (locus Med tr6g044070) derived from phytozome v7.0 (chr-ID MtChr6; po s 9327071 to 9327941)
gtgaatctctctctctttctcgattctatcagcaggtgatctctgggttttctttgctctgttcctcttgattttgtgggttttggttatgttcccttgttagttgttttctacgtttttgttgtttgtttgttgcttcagttgggttctgattatacaaagagctaatatgtttgttgttcctattgtttcgtggccctttttgggctatccacaacctccgaatccgctgaacaacaaccttcacaccttcgcacaagctttatccaatagcgacaaccaaaatttttttccctacctctagtaatcaaaggggaagttctccgagtatcaagatttcgcatgatgaatatgagaaaagagtttaaggttgctaacataatcttcgtggaagactgagcctgagcaaaggggacaaaccaattactggtcgtaacctttatgaaaagcttcttgctttatggaagcctttagataatctgaagatcatctctttggggaaaggtttttactgttttcaattttcttcaatggaagacatgaagaaaattttgactcctagttcttggaatcttaaactacgaattctccgactttcaaaatgatctctagattttagcattcacaatccgaagcagtcacatgttcaagtctggattagattgttaaatctcctacaagaatattggagacctaaaacgttatttgaaattgctaatggagtgggaaccactctagatttagacgttgcgactaagaatcacacttttggaatcaaggatttcagttgacattgacctttccaaataaatttttgatgagattttggttgagcctgaagggtttcctttaacgttgaaatttcttctga

SEQ ID NO: 4610 - DNA, 1520 bp, Medicago truncatula
  Intron number 7 from transcript Medtr5g095900.1 (locus Med tr5g095900) derived from phytozome v7.0 (chr-ID MtChr5; po s 38062037 to 38063556)
gaagaggtgcggttgacttccaactcactacacaggtaattggttttcaaatacactgtctttgtttgttctagatttgaataataaatctgtatacaacctccatgcagtaatatctttttagcataatcgtttaccagtttgctatatatatgttagtaatgctattaatgtatacaccttataagagttcattatcttgagcttgtatggctgatctttttaatataagggttaattaaataaatggtccctataaatgttcagaatttcatttttagaacctacaaaataaaactacacatttttgtccctgtaaaattttccgtcagcatttttagtccctgtagaattttccgtcagcatttttagtccctgtaaaattttccatcaacatttttagtccctgccaaaattttccgtcagcatttttggtccctaaaatgctaaaggaaaatgtcacatggactaaaagtgtgattttattttgtagagactaaaaacaatattctgaatatttatagggaccatttacttaattaaccctttaaaaattatctcttatttatcattagttactttttattttaaaaatttgatcgaatcatcaatattttatctttgcggtcaaatatacatagatatcataaataataatgaacaattttgcataaaagtgactgaaaataactgacagaagaatgacatacttaaattggaaaaggcaacagcaatttaataattgaatttacatgattcaaaagcactttgccattaagaaaatccagtatacaatcaatgtatgttatagtgactattatgcagaaacttgtgaatcatggaagttggaacattgtttctgggttaatatgttactatgcaaatccagacttcattcataacagaataggcattcgtgcaagttgataaatcgtgtttgaaaggttaattatgcttgtgaaacttttggcacctggaaatttctaatgagttacatcaagtttcttctgtggtttaattgtagagactgattctatgtaaagaaaatttaatctaaaaaagttaattgaaaaatgcatcaactatttgtcagtaaaagaatttcattagaaaaaggtttcatattgaaagttatacaatgaatgcaggatgcaaaattttctaatcttgggcatgtaatgtactacagttacctactgtgatcattttagaatgttttcaaccatttatttttaccgtgagtgggaatataattcaatatctgtgtctgaagaattttcaattcgtaaggaatgatatacatatgtttgttaagtcaccagcagcaaggacactttggggataaattgccttctaagtatcaattattgagttattcctgtacggctaaaacttgtattagcacctaatcgtggatatcacattctgaccaaagtactttatgtacatgatattattcaatggcatgctagttacttggatattgctttctttgtaacttttaaagatttttgtgcaga

SEQ ID NO: 4611 - DNA, 1128 bp, Medicago truncatula
  Intron number 1 from transcript AC235677_5.1 (locus AC2356 77_5) derived from phytozome v7.0 (chr-ID AC235677; pos 23 949 to 25076)
cattgatcttttggctaagttaggagctttttcagattctgcgttgtctatccacctgtctgcgcctgagggaattagcgtactgcttagatatgacgcttggagaaccttcttccctatgtattatttgtaggtttgtttagattgttgtcttttttcttttgttcctgccttatttcttcatttctttattttatcccctgtaacaaaaaatataaaataccacaaattttttttaacttatattgaagggtcattctaactaatgcccccaaaagacactaattaaagaagttaaaaagtagttttatattgaaaacatagattttaaaactttaataaacctttttcttaaagaaattttttttaacatattattttaatatttgtttctttaacaaatgtcttatatccactatgtaacatttttctatatttaaaagcctaaaaaaagccttagtaaacaaaagttttggaaatactatgaagactttttcatcataaaaaatcactaaaatccttccaaatcccaatagaatacatccaatggtagttaaggaagtcacatctaatctaaaaggtgggtgatgcatgtttgtttagtattttttttgctttgttttgaccaagcatttcagtgcactgcacgatggtcacacaaaacaccagggaacgcagccacttagccaacaaaaatcccttaaaaagatccaattcaatctataataatttcatctaattcagccattaatatatttcaatagatgtatacatcgatccatctataataatgtattctttttattttggacaaaaatgtattctcttttattatttacatataagaaatcttattctcttgttgggattttttttttttcttttcagtttgatcatataatattaaccaatattacttatgctaaaatctatttattggactttggaccgatccccattgtctttttgttttggtggcggtttgattcgaagctcacgagaattgatcctcatagtctttattgggcttatatattatgagggcttaaaaatttataaataattgtttggaataataaataatagaatagttataaaggagtggtggcagctggtagtgtacggcgg

SEQ ID NO: 4612 - DNA, 700 bp, Medicago truncatula
  Intron number 1 from transcript Medtr3g135980.1 (locus Med tr3g135980) derived from phytozome v7.0 (chr-ID MtChr3; po s 34167739 to 34168438)
aaacaacagtagaagcgaatcgaaacgaaatcgacgtatgttattcacaatattttcttgaatgtttttttgccacgtgtcctgcattcatgcaaccgaaatagagtgaatagatgaaaagggaaattaaactctacttctatctataactctcatattttattttctctcgcatcctttctctccatatttttctacactctcattttttagcctaaaatcgtaacaaatcgcaaaaagataaagacccgtttgttttgatatttttttgagaaaaaaaaaagtattttcttaaccaaaaaatcactttatttttatttttatagtgtttgtttcaaatttaaaaaaaaaatacattttattaaaaaaatcatttttagaatcaaaatgaaaattttatttttagtagcttttccaaaatatatatatattttttcttctaaaaacaaggaactcacgtgtaagaacttcaaatcttaaccaaaggacctttaaaaatctctaaaacaaaatctttaaattttttaacccaaaatctatttatggtttaagctgaaacaaacacattcaaagaatcattgcgttttgagaaccatagtagtagttgtatgtactacgtagtgcttacacatttttttctttccatatactgattgatgtctctgggttaataccactttgaagaatatatctttccatt

SEQ ID NO: 4613 - DNA, 7192 bp, Medicago truncatula
  Intron number 1 from transcript Medtr3g103840.1 (locus Med tr3g103840) derived from phytozome v7.0 (chr-ID MtChr3; po s 25652858 to 25660049 reverse strand)
caattgggggtattaatgtaattttggtgtgtggcaatttcagtttgttggatgatgtctaaaatggagcccaagatgaaatctctttgtatcctaaaaattagagtcatccaaactttgctccctaattcaaattttaaaatctaataaaagaagaagttttaaatatttttacacattttctttcaatttttttttttttacacattttagattatataatccaaaagtgtcgtagacatggaataagcttgaaagatgggaaaagaaactctctaaaaattatacttctacacttcatctccattccgaactctataaacaatatatattacatctttgcctcccaaatgatgcgaacatttttttttctttaatatgaaaattttatgttttggatgttttactttttaaaaaattaaatttctattttttttaaaacagaaagaaaaataaactatattttttcaaaatccacatgtccgtttaaagtaaaataaactaattttatgcttagcctacgctaaggctgacactacaaaaacaattttttcatttttattaagtgtgagatttttatgttttttacgtaatgtttagaatttttaaaaacatgaaaaatccatatcggtttttcaaaaagtgaaaaattaattcagaacattaaaatcaacacttattttttcaaaaggtgtagcaattctctaaagagtacaaaatttaggaaatttgttggtcgccaccaactaagagttggatttggcctaacacagggtatgtgggctgtcttaaggtggtatactattggttagtaggtttatggcttctgaaaatatttgggggtgtatagtgcttaagtggcagagttgtaagtgatgtcaaaacttggaaggtttgaagttggctcaatgttgaggaggcttcaagttgattcaagcatcgtcgtgtgtactcttttagcctgtaaaggtggatcattggcgagttgagtatgttgtcgataaaagtaactagatcttcttaattgagaggtctgaattacacattcatacagagaagctaattcatttgcaagtactttggtaaacttttttttttttttttttttttgaagaagctaaattagctcatccaaattaacacagaagagaattgaacctcagacctcaaggaggagcacactcccaaaccctaagtcaataccaacaggccaacccaaatcgatttttttagtactttggtaaacttgatttgtgaaggtgactattctttgattttagatgagcaattttcagttcaagttagatcatttaactgagctgactttgttggagtatttattccttgctcaatcaagtgttagattgtctttcgtacgagcttcgtccctcttataatccaaaaagaaaaagttcagtttgatatgtacaagaagacatccgaccaaacatattactgaggtaaaatgcaaattttaagatgaggcatcttaataatcgtgtattttttaatcccccagaatattttacaatgcagtacgtttctcaatttatcgtaattgcttttgtttaattttaatcaataataacgtccattgatttaatcttttgttaaaataatactctctccgtccaaaattgtatgtcgctttaggaaaaaaaattgtcctaaattatatgtcgctttataataccaatgcaatattaatgttatttttcctattataaccttaactgtttattactctctcttctttcaattttttcatttatttttcccatataatttattaaggattattttgtaaaacaactcataatatctcttttttacacaatattaattgcatttcttaatacgtatgaaatgcccaaaacgtcatgcaatttcgaacggagcgagtatttctcaaaattgaatatgattttgagtttcaaacctttgaaaagtagtaataaaaatttatttctgtaatatctctgttattgatacccctcccttttgtcctttccatttttcctctttattcttgggtacaatactaagcccaagttgttactcccggttcctcatttttctacgtaagaactaggtgggacccatgatctcaaaaatgtctaggcccatctttaattataaatgacatatgaattaatttttgtactaaaatgaaaaaaagaataggaataaatcaaaagaaaggagcactaaactgaaatttgatcctctttttgtgggaggaatacatttttttttagagaaacacaaatgataaaatgctattcttattttgaggtaatcttattgagataattctattcaaaatgtgtcggacaataaatatgtgtatccttttagtgagtgagtatcaatatgtattaaaattattataattttggtttctcatatcgtgctcgtgtgagtatctaacccctcttcttgacccaacctctattagttctttcttgattaagaagttcagtaaacaaataaaagaaaatagaaactcgaaaatagaaacttcagactttttcagtcataatacttagcaccaaaagctaccaatattagtgcatcatcatactaaaatagtggtagggaatgttgtaaagatctgccacaaactcattcttatctatatgtttgaggcaaaatcatatcttccatagatatcactgtaaagtgggttaaaaatcaggtccacacccacacattccttgtccttctttatccattgtgccatactagagaatcacattctagcctctttgttttactatgcaaatccgtatactttcgaatccgtacatcgtccatgggaattaagatattttttttgtatgatttggttttaaaatgttacacatagcctttatccacaccacataatgaaatatttgaaatgagaaaaaataatcaatgacaaatccaacatagggtccaatttgataagaattatcaaccacaaatttgcttagctgtaaagaaccgaccaggagaagtgttttggaggaaaaatagtccttttaaggaagcaaatggtggttaacaatgatagataaatctctctattgcaattagtaaatgtttgaggtctaccaacattatcaaagccgtcatgattatagattgtatttagctaacaatccttataaagagatcatgattttgatttttctttgttttgcctttttcatgcaagcatgtgctagcaattagtgcggctattatgacttaaaagaactatgttaccaatctcctaattatgtctcttgtgaattatagcataaatctcaaaatctccttcacttacactttatctcaattatggataaccacttatatagtgatcaatttggggtatctaagttttccacaaacatatccattctattggaataggattctctgcatggagctgtaatgagtaatagctgtccaatcacacttggatgacaaagattattttaactaaaaatacaccgtttttgatatcaatcattcgatttcagataaacggttgagataaaaaactatgttgtttttacagcagcaaaacctggttccattctattccactaatgcatatattgattagttctattcttttccttgttagttgcggagtcaacaagcgaaggagtagtcctttgaaatcgaaatcattgacttgtgtgtgataaagaaagaacaatactatcacttagtaatagtgaaccatttatttgattctgaaagtactaaaattatgcaacattcaccaatagggcatccaaacctcttaaaaagctgatattattttgttggcttgttggtagtttgggaccctcaaaaaattatcattctgttttttcagtttgtgtttttacggtacataacaatgtcacatgcttgtaggggcaaaattgcaaccaaagattagtaaagattttatggctattaagatgtgatagtgaggtcaattccaattccaataatgaaaatattccaagttagtgagtacaatgcaaggatgtcgaaaattggatactaagactttgtaatttgttcctcaatttgtggacacagttgctctgatctgattacaccaacaataacctctgtcatacacttggttcatttgttttggatgtgggagcaatttttggtagtgttagtggttctctgtgaaaaaaaatcattaaattaaggttagactaaccaaatttttagatagacaatgtgagaagtcgatgtaattttcctctctatttaatacattcttttcaagttcaagactagacatatgatacatgactcaagtggttcgacaacggatgattaaatagatataaaatacttatgatgccattttaaaatttgaattaaaaccaacacaatttattttaaaagttcataatagcacaatattttttactggattaagagcactgtttaaagctaatatatctagtcaaaattgctaaagaaacccctccccgaatttactcatcaaatcaattaaaaagatgagaaatgttgaaattcaaatatgattggttagtttcacatcgaatataaacgcattgaagagagatgatatatactcgatgtttaaatgttttgtgggtgatagaaacaaaatcgtagatattgtctcgacacacaatcctcgccatttcaaacataacatttttttaaaaaaaaaatatttgtatacgttgaaacagtaggtgaaagaagagctaaaaattatagaaacattttacaattttatttcaataaatgcatgacaattgctcacgttaatagtcatatttctccttaaaactacctctcaataaacaagtaaaactaacacaaaccttaataaataaaaaatcgattttctttttacaaagtaaacagacttaagcatatagttttccacttgtttatgatcccaaattctagcatgacattgaggtgaaaacagattagtgcggctgcttataaacttttcaattattgaggtccaaaacagaaaaaataaaattcaatcattagcacaaatgcaacttttgccacaagtattggggtccaataaaagagaatccaaactcaagtgatcatcttccttacacatcaagcaggcaaccgattcaatcaaataatgaaataatgtttgaagtcaactctagcaattaccttcaaagcatttaaaaaactttttattctgtatttatgcattacctattctctatatatttttatggcatgacattaccctgattccttttttgataattataatatcatataatatggctcctatacatgtaagttattagaaatttttaagacccgtttgataacaaaacattcatttttagaaatttatcattaatattgaagttaactcaaagatgatttagataagatggtaaactgatataggaaaagagaaatagagataaaatgatgtgtaaaatagattttttttcaataacatgtagaataaatttttaaaaatatgagatgttcaaatatttgttgatagaataattaattttttcttagtgggtgtattttatgccatacgccatagaagaccgaggttacttatatgcatatgcatcattttgtaattatgatgattacctaatagcatacatcattattagacgaatgacccagatgagcttattataaaggtaaagaatatgcagaaatcatatgagttgaaatattttttattgacaaaatatgaggtggaatattttttttttttttgtcaggtagtctggtggctagaaattcacttttaaagtgaataagtgaggtgtttgaggttcgaacccgacccctgcatataataatgcattgtctctgccaactgaactatgctcacggggactgagttggaatatttatactaacgatctattactttagcaaatgtacatataatacctccttttttttgttttttttttttgcaaagacttacaatacctctcttttttgttgttgagggaaatacctcatttcatatttgtctgaacatagaaggaacgtgtgtaattgcaacatcacattcatagctaaataaagaagaaaaatttataagttttttttttttttatataagttataacaatagctgaataataatcacaatgttgaaggaaactgtggaagaccaaattaatttgaaggaaatttttgtagagagcaaaaatgaatttatattcccttaaaaaaatatgttgttatgttttaaaggacaaaatcatattattaaccctaataattttaataaaaactgtatattattataatttaacttattatcacaagccattaacaaattataaataaatatggctttaggaaccgaaatttgaaattgtctttgattgctagtgactgatgtatatataattaggataagataccgaccaaacatcataattttgattgtctatatgaagctaaagatgcaactattgtttacaaagaaaacgtaatcctcccatctaattttatctcttctacggtgtaaaggtatgttggtcttttggacggccatgtatcatcgtcatttgtttaaaggacgaaatcgtcatgtttattgtctgttatttgatgtctacattcatacaccattacggaattttggattattaattgatatcttaaacaagtttgttataccattcaaaacttaattattattattttgagataacattacttaattaattagcaaaaaacatacgatatttgttttttaattgcacttcattttcttttgacatatactttggagtttggaggcataattaaatagaatgcattgcgtataacttgtgagtaaaaatgcatgcatatacactattggtattttaagtatgagcaaagtcttacttacattggatgaaaaatagatgttgagcacaataaaagtgaggagactaatgccttatggactcgtatagatgaccataccacatgaactttattatacattgactattcaacatatccagctcaacttgagtgttcaggtcacgaaagctccacccttcaacatgtccaactcagctatacccttcaacatgtccagctcagctcgtcccttcaacatgcttagcttagctcgtcccttcaccatgctcagctcagctcttcccttcagcatgtagagctcagctcagctcgtcccttcagc

SEQ ID NO: 4614 - DNA, 1120 bp, Medicago truncatula
  Intron number 1 from transcript Medtr4g079060.1 (locus Med tr4g079060) derived from phytozome v7.0 (chr-ID MtChr4; po s 15647848 to 15648967)
gcgtcttgcaggtaacctttacacatcaaaccctcttaaacaaacgtttctgttttcttcctgtcatcatgcaaactcagtttgaaagaaacgttaatgagatgccagtagtaatactcttgtttagtaattagctatgtatgcatgcacataagatggtccaacgttttaaagaatgtcacccgcgattaaggcttttcatcgagttaggtaacactcacactttagattgaaggtgtgtctggtctccaaacatgtatgtgtcggatatcaacactttcttaaattaggtgtcccttttgagtttacaccatgattagtagtgttatttttaatggtacaatgtgcttcatttactaacacattgtagttattatagttagtggagtagttaggagattgaaatgcaataaataatgatatgttaaaggaaaataataataatatatgttgtgttgttattataaaagggacaaataatttgacacaaagaaaaatagtcaagagacaccaatttgagacggagggagtattatctacatctatgtgtcagtgtcatgtttggttaacatcacctgactccgattctcttcaatatcaagtattgtttattgttatcagaatcatgtaaacccactgatccatattgtaaatagaatactgagttgagtaaagtccctgcgaaatttcatggaaatgtgaaatcgtgggtgaaatcctggctttgagttgtttatgtttatccttcgtaactaggttgttctatgcttatgatttgagactaatcttttatgttctagatttgagacttggttgtttcatgcttgtttaagatcttaaactttgagtagtttatatataaaatatatagtaaatatgatttttgttttggtaggatccttcgatcttggttgcgattttatgttttacaatcttactatcacacttcgatccgacaaaattaattgagtagaatcatccgatcttggttgtgatcttatgttttacaatcttactatccccttttgatctgatgcaagatctcgattctgacaacctttagacctacacttgtccaacgaattatatagacagttgttttttgtttcaggaaaagatc

SEQ ID NO: 4615 - DNA, 2312 bp, Medicago truncatula
  Intron number 1 from transcript Medtr6g036230.1 (locus Med tr6g036230) derived from phytozome v7.0 (chr-ID MtChr6; po s 7936722 to 7939033 reverse strand)
ttcattcggatactgtcatcaaagccacaacagtatgtgcaatactattacattcagagtacttctttttccatcctatgagtttcttgcttgctctatgcagtttggattatagaatccgaacaacataaatgtcccataaaaactttcaaaagcaagttaaaatattttggaattataatctaaataggacgcgcgaaaaattatctgatgacaaaaataatagccttactcgtatattatatgtttaatttcagtttcgagccttacttttatatgcttgctctattggtccaccatttaaaaatttcttaacattggttattcctcagtagaaatacctagttgatcataatcacaaataaaatatggttaaatacacacacataaattgaaaaaattaaaagaaaaaataattaaatgaagtgactaaattctttttcatttattttactacatttatgaaaatatagctaaacatttttcatttatatatgtgtccaagtaaaacttgctctattcttcgaacattatgattaaaaaatgatgtgacatgttttgaatcacacaacatatgtcatatattagaatcatccaatttaagtttagattatctagattctggaaaaccttatcccatgatacagtaaaatatggcaccgtccccaataccatttattggatgctaatcatagaaaactttatctcatttagaataaagaattatgagtcatgtgatacgacacatcttgagatattagtgggtcgcttttcagtaacatagaataagtgatattgataatattgatcaatcacaatatcaattcttataaaagagagagaaaaaaaccatttgtacgagcaatatcatctattctatgtcactcaaataccatctgatattattatattagaatgtgaaatctaaatttataaaagatttttaagttaaatatgtttttaattcttacattttgcgctcttttgaagaatagtccttacatttcattaaatgttttagaaatgctcatattttatctctgttatcaaaattagtctctgctgttaattctctaacgggttaatgctgatgtggtagttagtgggtcccaattagtccttattattttagggattttaaaaacatttattgaaatgtaaggactatttttcaaagtgacgcaaaatgtagggaccaaaaacatatttaaccttaaaataatttggacccactaactgctacatccgcattccgttggagaattaacaataggaactaatttttataacgcatataaaatataaggatttaaaaaacatttaataaaatataggattattcttcaaagaggcgtaaaatgtaaggactaaaacatatttaacctaagtttttttaaattgcttaaaaaaatgatttaatttagattagtaccaacatttcaatgtatgatttatatgttcttttcaatgacgaaaatactcataaattataggtaaaattactcttgtggtcttgagacttaattgtaattatcttgtttgtttttatctctttttttcatattattttcggcattcaaccatttttgcatatggttaagatttaaatctatggtttcttttcttgagttctctcaattttaaatacaagttatactctaaaagaaaatcatcgagttagaagcttgaaaatccatatgcaaacatgagtaaatgatgtgaaaaaaatattaaagttcaaatcattataacaaattgagttaagggggtgttggaataagttagtgttcaatggttaattgggctcaaatgtgattactgatgatgagaagttgatgttttatttttgagtttttatcggttgaatgatttttagaggggttatggtgaaccactgatgataggcgattcgatttctttcggtggtcataggaagtgtgggggtttagctttgtgtttaggtgttgaatttggttttggatgttagattttcttatcgggtttggaggtgctcctcaatttaggaggtgtttgtattgatgttgttatgatttttcttttgagtgtatgttagtgcttatgttatatatgacgtttttgttttgtagttttagtcttccagtctctttcattttgggcagggacgtgatttttaataaattttgtggttcaaacaaaaattgagtcaatggagcaggagagtaattttgtctatattatattagatgtatgcaaataaattttacaaatactgaaaatattatgcttaacttgcaggcactagttctgggagcaacagacactagcagtgt

SEQ ID NO: 4616 - DNA, 1617 bp, Medicago truncatula
  Intron number 1 from transcript Medtr1g008390.1 (locus Med tr1g008390) derived from phytozome v7.0 (chr-ID MtChr1; po s 714167 to 715783 reverse strand)
tactagtattttacattttcattctcattctttcttacttatttcacaagtttttttttttttttttttttttttgtttaattaaaatgttaattattatgtgggtcatgcattatgttggtcaattttgattataaatttattggttgatgattatggttagagttatttactggttgatgatatttcatgttcggttcccggtccaagaacctactaatcaattaatctaggggatcaaccccacccagagcaaagctctatatggactaacccacataagttggcagattggaactaagaccgaggagcacgctctaaggtcacaagcctagactaggccaacccgtgtgggtttgttggttgatgattattgctccacttttgcatgttgttgttattacaatgtgggtcattataaattttttgttaggattttggtgattaatttatgaatttttggttatgtaccagggttgaaaaaaatttgaactgctgcatttggtttgtggatcaccaaatgattttttgggatatatttccgtatattagataaatgtgttatattgaatttaacaaaggaaatggcttcttgtttaaaaaaaaaaaaaaggaaatgaccttcattgattgaggaggaattgtaaggttttgcttgcgagatgtttgaatgttgtaaatttgtaatgttgagtgaagtgaaatggatgttgattgaatgaatggtgtgtcatgattctttggatatttttattatgaatcgaaagaaaaaaaacttggattatggaatggaataaaatggttctaccattcagaagaaatgagaaggaggagggagagagggaggtattggttggaatggactatcagatgcctttcatttccatattattttaatttttaaacaatccaagctgttgaggtccctcatcgagtagagctatgtctaaagttgcccatagattggacaatcctcctctcttaagctagctttgtagttgaattaggtctaaagtccaaattataatatgggggtattagagtctattatatgtatgttattggtcacttgtatttcttgagctagcttttggagttgtgttgggcctagaacccaaattcccttttgttcctgtaggaaaataattcttgaatggtgatatagaactattatttgtttacttttctgctgattggcaaaatcaatgttaactttattggactagcttaaggtaatgcatattttgtatggactatgtagcaccaacacttcagattgaaggcatgtccgttgtccaacacgatactgacacttgtggttacattcaattactttcattttctcaaattctcgctatggtcgtgtccggtgtccatgtttgtgtcggtgcttcataattggtcatacaccaaataaatgccggtatcgctgtctcctagattttcatttttatcaatagagcagggcatatgtaaaccacatgttatttaacattgttatgataacctgtcaaagggtgctagatatcatgagaaatatgaattatatatccttacgctttagccttttcttgaaatgcagaaggtgtgcgtgctggattcaaggcagctgccgtt

SEQ ID NO: 4617 - DNA, 2014 bp, Medicago truncatula
  Intron number 1 from transcript Medtr5g014640.1 (locus Med tr5g014640) derived from phytozome v7.0 (chr-ID MtChr5; po s 4729458 to 4731471)
ttgctgataagtttattgcggcatcattagtaaaggtattgttctcaaatgatagataatttatgtagattttttaaatgtgcaatgtgaatgtaagttcttgtgtgttgattgtattttttgcaagaaggattagtcaaacattattgcattaattttataactttttaagaattttaaaattttaagaatcatttccaggtcatagtgggtagttttacattggatggcaaaaagaatggcctgaataacctgaaatatgaaccttcttcagcatcattgtcccaacttgttgcttttggaactccaaccaatgcgaccactcacgggccttcatctgagtccttaggtgtcaatgagaataatcttttttgccaacggcctgaaatctacaataagattatccaacccattcctaccatgtcgatgtaccagcaaccataagctcaccaaactcaacagtgaggacaggcttttaagctcaccaatgtagaagcaagttatttacatgatgatagttcaaagttgtgctgcatgttggatttggaaatggtaacataaataattgggaaaaactttaagagactttatcaattagttgttttatatatgtttttcttcgttttctgttgattatggttttcaaataatttatgaaacattgccagcaagggtcgcttttgctaaattatataattgcggatttggatctgtttgtgattatatttgaaattagattttattctccttctcatttgatctgcatattttcaaatttcattcatatggagttctccatttttaccctttttatttttattctttcaagtgcgtaagaaattatttgaccagcaaaaaatagaaaataagacgtgatatttgactcagatgaaggattattcttattacttaaatataaatattactatatttgactgcttaatccgtgctccgaagagaccggttagcatgacccttttttatttaactttgttcaatttcgtagaaggatggcattggtattcaatatgatgtaagttctagaagatcttaactttaatgtaagattagaaatatactccattacgcaacacaggccacataatctccccaacataaggataatgtgattacggaaaaaccttagcttgttagctagttatgttagattgagagaagtgtttttaagagagaaatgacttatgattttcatagtaaaaaaattcaagtacaagcagtatttatagatatatttagacaactctagattttgatgttatgaacttatgatattccatatttaaacccctcttcaagttattttctatgttttatgtagttcaaaatatttatatagatactttaagaagttttatatttatcatatttcaaagtatatataacttgtttctcttttattgtcaaatcttattgttcacgcaaagtcttgcactaattcattcaaatctctagtctaatggtgattcaatgtagacatcttcttcaagataattgtttagcaaatgttgacttcaaatctaattggtagatttgttacttcattctgaatcaagcaaagtctaatttatgcttttacatcagattggtgttttggcaataagtcttgttttgtatatttctacgtcgctataagcatttttcttaccttgtactctcatttgatttataaacatatattcaaacacacccgaccaattgttaatgaaagatccataaacattacgaggaagagaggaagagaattccgcgactgcatgccaatggtttgaaaacccaatgaaacaatgatatcgtcacaatgagaaatgatgaaatacctcaatttggcatgagacgaacctctagttacacctacaacattgcatttgatctaacggtcaatggaaggatcgatgtcaaaataatttccttaatcaaaacgactttctaaataactttaaatgttgaacttcatgaaggaggaagagccagaagcattggagaaattaccaat

SEQ ID NO: 4618 - DNA, 3388 bp, Medicago truncatula
  Intron number 5 from transcript Medtr7g089920.1 (locus Med tr7g089920) derived from phytozome v7.0 (chr-ID MtChr7; po s 19918851 to 19922238 reverse strand)
aaattgaagtaagtttaaagtttttatgttatttttatggtaactgctgtctaaaattttgaattctacataccatgactctataacggttaagatcatctccatttctcaaatgaaatgcagagcttcattactatagtattgtgtataaagccacataaatgcgtaatataatgtcacatgttttagaaatgtgtgcgattatacacacaaaactatagaatggagctcttcatttcttttgagaaatggagaggatttccactcctctgtaagatgcacttgttcgctgcctctcattctttctctttgctgagttaggattctctccatttaatggaaagtgccatttggagagagataaactcattgagtatagtaatattattttatatggagagagataaaaataatattattatattcaatgagtctgtctccctctaaatggcactttccattaaacggataggatcccaactcctctttgctttatttaaatgttgattttggtgctctatataatgcaccacatggtattttctttcacatgatttagatttttcactcttctatgctcatatttgtatttttctttccctcggtaaagatttatattactttaatatatgttattgtcaagaaaatttaattagtttatgacatcaaagtatataggtgcttgtttttgcaaaggaaaatcataattactggatagcagcagtgttatcaatggtggattatggcagttagccaaaaacctgcaatataaacatgggcgttgcggcctatggaggaaacacagcagatataataggtgttagggccaataacgactgacacaaaatccaccatgctaaaacgccacggaagaaatttgacaaaatggaaatgaaaaataaaagatgttcaaaagtggagtagaatggtcattgtattttgattgtggatttctgttttccatttaccgcttcaagcctgttttcaaatcttattgtgttagtttattaggagggtcttgtagcatgagctgcataatgactactaggaacatgttaggtagacaattagggaccctcaactcagcaagtgatgtttggatttaagaatatcattggaacgaaagaagaggcatcaaggaggttaaggtattctccgttgttaaaacaacaaccaaaactaaagtgaggcagagacaacattaatacaagagaaatgctagcaacatactctttgaccctcttcattgttgagcaaagttttgtattggcctcatgaataaagagagttctgaaaaggtgttgatagcattcctcataacacaaatgttttactatccctttgtttgaataactaaggaaaacttgaaagaaccatgtgaagagcactagagtgaagccataaaacaagccttacacaaaacaagtctaggggtgaagatttttcccaaaatatctaaaattccacctcaaccgaagatgccgcagaacaacatatgaaacacactgccataacatcttgctctccttggaacttgttcaacaagaattactgcaagctctctgggaaaaccattttttcaccaacaattctacaaaattcaaacgtgagggctaggtaaaaataactatttagctgttccttaactagagcagcacacatcacatgactttcagttctatgaatctgtgggacatcagtgcattatgagcgcaacaaaactgactcataaacatacattcggatttatgccacagtggttttcctggtatgcctcgctctattttgttttcctgaatattttgtttttcggagaccctgtctcctcagtagtgtgtaagcctataaggcttagctgttgtttgttggtagtcctacctggtgatatattctgaatatcttggcctgaacatccaaataaatcactagctttctgatgatccgacatatgggaaaaaccaagtcccacctatattaaagataaggtcttactagagtttataaagagtggcacccttcaccttgaaatccggttttaaaggatgagttagaccctatataaaaacctaatatggcatcagagcctaccgattcgggccacccatcgtttatataaacttaccaagcccaatagtgctgggcatgagagggtgtattggaaaagccaagtcccacatagattaaggataagacctgactagagtttataaagagtgacactcaacttgaacacttgttttgtaaggatgacttagacccaatataaaaacctaatatacaaacatagcttggaagcttcggtacattttagtttagcatcatcgtactcgcttttttttttttgaacaaacatcatcgtactcgcttgttactgagaaatgatttgaagtagcttttatgtttggtaagtgccttaaacacaacctgcaagttgctttcggatgctttcaccatctatactacattactcattttgttttgttggtattttaggattatgtgttacactttaaaagtatctaggattttcaatttattatgttgttttatatattttgacaatacccctcaaaaaattttgacaataaaaccatgattaaagtgatgcctttaaccatgaaacaataacttactaagaaaatgtgacgtccaagtaatcaaatattgggaaaagctgaatgagacacataaaggaggaaagagaaagcatataggtggatttattcctctggatgattgttctttttgttttcttttttggtaggctttgttcctattctcttaaatggtttctttctgcactagtccatatttcataatatgtgaacaggttttgttagtatttaaataaggattcagagtagttttaagttttcacaagtttgttaacacgtgtgtaggtttttttgttaaagtgttcttcacatatgtataaagaatttgtaacaatgaagttcattcaagcagaatagataaagcaaagaatccttctaatagttgtattcttgtgtcattcataaggaggaaatagcttgtgttcaactagttatcatatcttgtacttaaaaatagtaccgattctttactaaaatcaattgggcaaattgcatttattattttagttcagaataggcacgcttcacttcactgtttttgtggattatggttagacatctccatacaataaacattgcatcaaaaaaaaatgcataaatatgcttaaatttgatttctaacttggtttgtaactacaaaatgcaaataaaaaagtcaatcaaagatgtgcgagttgtagtaagttttgttgtctgatgttcatgtcgcatctaagactatatttgtgtactatgcaggctgataagtcagggactatagttgaaataatcgc

SEQ ID NO: 4619 - DNA, 5100 bp, Medicago truncatula
  Intron number 3 from transcript Medtr3g093470.1 (locus Med tr3g093470) derived from phytozome v7.0 (chr-ID MtChr3; po s 22226057 to 22231156 reverse strand)
catttgggaatcctttcttctgactcagtttttaggtaagttttttatatttaaattcttttatctatgcaaatgttggtgcgtgatattgtttatttactgtgtgcctatggcgtgacgtgtgaagcatggatgctggttgttcaatgggtcttgttggttagggtttgactaggaattatattggaataggtttagaagcaatagttttcttgctaagaactttgggtgacctagtctggcattgtgccaagactcagatccgagatggtatagtggaaggagagacttcgtccccttagggaatagttgaacttacttgtataggcaagcatgtaacctcttcttctattatgtggggagcctgtagctaggaaaccgcttcccctacccagtcaatgcccagaccgagttctggaatgcatttgctgagttaatagggcacgtgcccgagatggtagagttcatgggaaacgtggccgagttgacctcatctgtggccgagattatctcatctgcgggccgagttaatctcctacatgggctgagatgatctcataaaccgggctaaactcacggtagaaatatgacagttcacaaccccacaagcatgaaacctgttcacaaccccacaagcatgaaacctgtaagggtgaaatgcttaagagtaatggcttatgagcttttgttgcctacttttcctgatggttgcattattgtgttggtttcaccactatgatgtatgtttagcatcgatgtgatattcgatcttgtcttaaatcattaaataattacttatagtttgttttacttcgacctgttttagtaatatcgaggccttttcaaaatccttttgtgcttaaaatttttcaaaaacttttcaaaaacctttttgtgagtgttcttgctagaacaggtatacctttcccgacggtatgccgataccaagaactgagatgtatatggtagaatcaacggcctactccaaatgacccctaaactgctcaagtacgaggcctgtaagggacaagggctcaagacaataagctgagataataacccacattaatgaactttattttgatgtttctctatgttgcctttgttcatagttgcttaaaaagagacaattgtgctagaagaattttcgcctattgtattcgaaacatacaatttgagaagtcatgttgtagcctatagccccataaattaagataccgagttaattttcctggatggcttgtagcaaagtgatttagtctcttgagactcagatgggtttaatacgatcaatgttgaattgatcttgttttggcaatttattctggcgggataacctaatcctgccaaagccggtcccaagcccgggtaaaaggagagggttgtgttaggcctcgacagccaacgtagaactttgtagaatctctatgacatggaccaaatacgaattagtatggtttttgatagaacactatggtgtcatttgatccatgtagccgaccccacttagtgggataaggcttggttgttgttgtattctggcgagataacctcattttgacgatttatttatatacatgcactcttttgagggcggaacccattcgattgcagaacactcctttgggggcaaaacccatcggaacacttgtttaggggtggaacctattcgagcaattttgttttatatacatgcattcctccaggggcggagtccattggattgcagaacactcctttgggggcgaaacccatcggaacacttgtttaggggcggaacctattcaagcacaagggcattctcaaaagacagtcaacccaatttaggggagtttattgttgttgtatctgtcgcgcattttcctgaaaaagtagagacccgagaggacaaacttgtagtaagtggggtaaggtatatagaaaatttcatattatcacaatattatgaccatcgtcagtgtagagtgtagctttaattcctcaaggcacattgttgccgagttgtcaagtcggtgtaggtttgatattttgtcttttattgatgattcattagctctcggctcttcgtgttgtaacttggttgtatttgatcattctgacttgtcatctgtttgtagttcctgcactatgatcaacttgatgctctggttagttataaaagcatcgagtaataagtcggtatatatttaaacgaatgcaatattggacttcctttgtgcttccatgccctatgtagccatacttaagtctcacacgaataaggcttagtactccttgttttcaaaagctagatagaagttgtatataaagtagaatatcagcgaagttataagaacatgtatgataattatatctcttacttaattgatgtatggaaacaacgagcaacactgtaactagcaaacttcacggtgaggcttacgctgatacttgttcatggaggcaccaggcatcgccaatcattcattcaatttgcttgtacaagatacgaaacttctatgtccttaaagctgatcactcaacacatgtgaaactatgtaagtaccgaattagaagttccataattgtaaacaaactacaataagttgaactctaaagaaaaagtataaaaatagaaataactagatagcttcatgattttttaccgggtaacatacattgataataatgagagaaaaactaatgtattagtgccataaaaactaatgctttagtgacactagtgcaataatgcattactatcgccaataaaatattccactcaaatctcaactaacctgctcaaccgagaatcttaaactaatacgagttttctaggaataattcaaaaagaaattaccatgagaactctggtaattagtggtcagatcgcgtgacctattgctcgttgatacttaagaatgttaggtaattctcaattctaatgtaacttcccctataattatggaaccattttgtacacttataactctgactggtttatggatgaaatttcgacaactgttttcccaaaaaagtctcaaaaatacatcgaagtaacacactacgtcagatttaaaaacaaggaacacatgatggctgtagatactctgctaagggacacatttataaaataatttttgtgcatatcccattgatccaatttctgcaataaccgttccttgattttaattatatattttttaaaactggacatgttatttcgtttctaaattgtttcataaggtttagccattctcctttgggttatatgcatgtagatcagtataacatcatttacataacatcatttggtttcgctcttccctatgaattaaaagcaatctaggtgatcggcatttcatgtaaagcatgcttgatattaagtagcgatactaaatataatgataggaatagaataaaagaacacaatcacccgcttataaatcatccatgagcttttaaccaacattggaaaatgaaatcgcaatgttgtacacatatatcctgttggaaatctcaccttaattgcgataggaggtgtgttggtaattccaccttaattgcgatctgcccctagttgccttatgttggcttgtctttgagggggtggatttagtcccacatcagttagataggaagcttgatcagagtttataaagaggaggcactcctcaccttacaagccggttttgtaaagttgagttaggccccaaatttctacatggtatcagagcctatccaagatctaccgttgtcgggattccgcattgccacgctacatgtccattgggtctgagcatgagggggtgtgttggaaatcccaccttaattgcgataggaggtgtgttggtaattccaccttaattgcgatctgcccctagttgccttatgttggcttgtctttgagggggtggatttagtcccacatcagttagataggaagcttgatcagagtttataaagaggaggcactcctcaccttagaagccggttttgtaaggttgagttagcccccaaatttctacatatccaaaaagcaattaaaactaaatcatgataaccaaaaaacgaatgaaaatagcggaactcaaacacctgtttctttcttccaatgatgttgctgaccgagtcttgaggcctaggtcagttttaccggaccccacggtgggagccaaatgttcttgcaaagaactgagtgacctagtctggcagtgtgccaagactcagatccgaggtggtatattggaaggagagacttcttccccttggggaatagttgaacttatttatataggcaagaacgtaacctcttctcctattaataatatgtagggagcctctaggtaggaaaccgcttcttctacccagtggatgcccagaccgagctctggaatgcatttgcctagttaatagggcatgtggccgagatggtagggttcatgggaaaactgccgagataatctcatctgtgggctgagttaatctcctacatgggccgagatgatatcataaagctggttgaactcatggtaaaaatatgacggtccaaatagggccctggtaaaaatatgacggtccgaatagggagttaagatatgcctgaatttaatacctgagacaccacacatacgaggaaggaaagatcagtttcatgtaatacttcatatgtgacaaaatattcaaattactgtcctacacatgtatttgaagtcttttaatgtgttagtataagaggataacaagactacctgacatgctctctaattatatgaatatgaatatattctgaaaaatattctacccaaaagttagccagtatgtctgactgctaaagattctttatgcttatatctactagttaaattttatcatgacatattaacataatatttttttggcttttgattggatttttctcatgcataaaatgtccattaacaaaaataatgtttaaaccccaagtccccaacattccatagacagatgtcttttgttttgtttacatctcttgattggataggaagatatttgattgagacttacgttttcacgtttctctctaatttcaaactcgtctctgcaggcttttcaatctggctgtggatcttttggaaccag

SEQ ID NO: 4620 - DNA, 2601 bp, Medicago truncatula
  Intron number 2 from transcript Medtr5g020580.1 (locus Med tr5g020580) derived from phytozome v7.0 (chr-ID MtChr5; po s 7785705 to 7788305 reverse strand)
ttgattctggaggggctgagccttttaatcctcaggttctaagaatttgattttataagcatttttggttgttgaaaaagatagtttttgaaactcagttgttactttgtgtgtctttcatatttggtctgtagttataaaaattgattttggttcaattggctctgattaaaagtgagttgaatgttgaatgatctatgtttgaatatatttatgtaaaagtgggtcgaacaataatttcgagatttatttgatcaagaagaatataaaatcaaacggaaaaagagagaagaaactaaggcctgtgagttaagactaccattgtattgtatctggaagcaacaacaaggagaggtcagttggagaagtgtgaagagatgtaccctcacagtagacatcgcaccctatttagcgaaccaatctgcacaactattcccttcacataagctcgagtgaatgtaaaattccaatccaaagagacaagcttcttgatctgagacacaagtggtgcatgaggatgagtagaatccactgaaatagtgacgagcttcccaaacaaaatgcagaccatgatatgtagttgatatctcagcattcatgttaattatatagccagagtaacccatgaagcccagcagccatttgcctttgttgtttggcagaatgccaccgtaatctgattgcctttggttacctagagaactaccattaacattgagtttaatggctggagcagtagggggtgccaactaacccgtctcggctgacaaataattttgtggtttaaaattaattgtagaggcaaaagctccaaattacgtatgtgtttttgttctacggtgataaaaattgattttgaatgtgaattcattaatgtttggttacattcccgtaaagtgagttgaacaataaatttgagtgtaaaaatcatgtttagggtatttctaattgacatcacccaaatatatcaaaatcaactttgtgtttggaatcacttttggccctccctactataaaaccaaacacgcaagcttcaagttaaaatcaattatggaggcaaacatatcaaaatcaatgataattttatctcctctaaaagtgaaacaaaacgtacactttgtgactgtggttgttactttgtgattgtggattttacttttgaaatttggagtacaattatgattgtggttgacaaaacctttgctttgattactactcttgggtttgttagaatttaggagaattttgttgctgtctaaaaaaaatgtggattttcactcacggttcacaccatttgtattgagcatatttgtgcgtgtttggtttcactgtggaaatctcaattgattttgcatgtgattttaggaaaaatatcaatgtttggttatagtcagacaaccgatttgacttttcctccaattctcggattgtttataagtgataagaagtagttcgtgtcttgattaaaactgttgagattgttgagatattttcccattgatttcttaatttaattagttatgtaaatgtaaatatgctgaatatccttttatttttatttcttttaatttatttggtagattaggttcttattcgtatctcttgtttttggtacattacttatccgtatctctataattaaagggttctgattgtaattcatagttaaaagtgtagggattgttgagatatttccccattgatttcttgctttaactagttctgtaaatatgctgaatatcctattgattttatttttataattaattagatttattcgcatcactataattaaaggattctgattgtaattcatgcttataaatacacaaggctgaggggtattctcctcaagcaattcaaatctcaagcatcatttcacttcaaactcaattttaaccagatcaattttgcaaatcaagtttactcaaaatgtcatctatgatgaacttgcttttgtaaaattgatttggttaaaaataagtttaaagtgaaatgttttatgcttgaatattttttcaggagcaattcaaatctcaagcatcatttcacttcaaactcaattttaagcaaaccaattttgctaatcaagtttactctaaatgcgatttttggtgaatttgattttataaaattgttttggttaaaattgagtttaaattgaaatgttttatggttgaatatttttactggagaaaacaagttcgatgataactcaatgcaagtttttacaggtgttaccttttatcacttctagtcaagcaaaatcatttttttctgagagcaatcaaacatgtatttctcctaaattcacatttggtaggagcgaaaatcaattctgaatttctgatactccatttcaaatactccactctaataccaaacacacattttcacaatcaattctgcttttttggttctgcttatttggatcttatgcaaggctttcatttctcaagtcaagtttttaatcgaccttgatttgttgtttgttcttcctttgcctttggtaatttgtttgattatgaaccatcaatttctgtttcattgtatgtttatgttgtaggtctgggctgctggttttgctactgctatattgca

SEQ ID NO: 4621 - DNA, 1342 bp, Medicago truncatula
  Intron number 2 from transcript Medtr1g089770.1 (locus Med tr1g089770) derived from phytozome v7.0 (chr-ID MtChr1; po s 17969781 to 17971122 reverse strand)
ttggtatgtaatgtttcacttttttggggattcttgcaagctagtatactgtgactgtcctttctttttcaatctcactgtgacaaagactatcacaaatattttacaacacaaacaatgttgttatgctaaatgctagtagtagataagataagatgtgcttcaccaaaatgattgtctcaaaactcaagtggtgtattagtcaaaagaggagaagaagaaaaaaaatagtgtaaggaaaaaattgaataagaaaacagaaccataaaaagtttcgcaaaaataaaataaaatcttcaaaaggaaattctcatattatggggcgtgagttcaactcgcattaacaccgaattttattagtggataatctataaatatttatgttaacgttttttaggctttaaaatctacccttgttcatatgagtttcaaaactccacccacataaaatgttatatttaaaaaaaaaaatacaagaatgaaagaaagaaagaaaacatttaatttaactatatttttttaaaaaataactattgaaagaaagataattcacatcatttaaattaactaaatgcaaattggattaggtaggtttaggtagatttgttaaaaaaattaattaacttttttcctcaaaaaaaaaaaaaaaactttaaatcgaacaaatcccaatcaaatttacgtcagataagcgactcgacctaataataaattgttttgaattcctaaaaaaaagttgttttaaagaattttttattaaatatatttttagttcctatcaaatattcaaagcttgactgtgtcctatataatataagttttattcaactttagtctataaaaattaggtgagactaaataaatatttaaaatgtaaggtctctattcaccaagatagtcttaattaagttacatattttttttgcagtatgtaatactttgataaaaatattgactaattctcgattctttagagtaaatttgtaaacaatatcaattgtcatcgaatttaatatgacaagcaactatttttaattctttgtgattcaatcagcatgatcttatatttcgtgacgaatgtaataacaaataattctttgtgcatatctattgccatctttagtaaagattaaagaatgaccttgtcagtgtttttgttcttaggatttttgccatattctagtaggtaggcttctggccctccctacaatgagatattaaaattgcatattctagaaaatcagaaagatgaaatgcagctgaatatttatttgatcaaattcagaattttaattttttttgtgtgtttgtgtgttggtagctaggcaaataggatttgaag

SEQ ID NO: 4622 - DNA, 1593 bp, Medicago truncatula
  Intron number 3 from transcript Medtr6g006510.1 (locus Med tr6g006510) derived from phytozome v7.0 (chr-ID MtChr6; po s 928581 to 930173 reverse strand)
acatcacaggaatcactaaaggaaaaggttttcaggtatttttctttacctcacactatttatttctcatctccttttccttataaataataatctctctcttacattgagtatgtagtatttgttcctgcatgtgtctgtataataatagttgagttgaatgcattgtgttctttgtttgtttgttgacatgattagttattattccgtcgaagaatttattaaatttgtatttgtaagattaaaatgaattacaccaattggtcagaacaataataagttggtagattcaaacatgtattatatgtcattgtttaaaattgggttagtgcttgtttggttacccgttttgtgggtacaaacgtgagtctggagcactcaaaagcagttttgctatttttgtggtgtttgggtaactgcaaaagtgattcaacaaaacgtgatttaaccccccaaactcacgtctaccagaaaccacaaattggagcttttgcagcaactcaaaagcaattttggaattcaatttttggtggctgatgtattttcccaaattacccatgatattctttttcattttcctacaaagttgtatacaacacagccaaagtgatgaattttttcgttgctcaaattcttttctcaaccctgtttcagccttcatgttaccctgcaaacctcaacgttctctctctttctttgagaagaagatggaattggatttgtatttaattatttcaagaaaaaaccgtttgaaaacatttgttattattttattttttaatatgtttaagaaaatttgttaattaatatgtttaagaaaattaatataatatacctaactcaaattaaactatcaacttaatctgcattttattttagaagttttactaatctacaaataattaaattgataatgcaacataaatttgaataattatataatatagaaatgaaatctaattttaaatagatattaatacccattttggtaattatgcattcaaaatcaattttgggtcaaactatccaaacaacattaatttttaagaatcaattctaagtcaatgtatccgaacataaatcaattcgcattcaactcacttttaaccaaaatcaattttatcaaactcgattctatcaaaatcaattttctccaccgctgaaccaaacacacacttaattgttttgtttcacaatttatttatttctgcacaatcatcggtgttcagtagtttcaactttcatcttgcatgtacaagttaaggcaatggtgcagctttattcttttctctcgtcccattttacttgacctctctggaaatttgaaaaactaaatgtacgtttgcatgctttctaaggggtgctttattgtttatttttctgtttctgttttcttattttaattgtaaaatccatgtatgactgcggatacttctctgtttgatgttgaaaccttccattgaattaatcaggcaataacatgatactaccattttttacagatctatgtcttttcagttacacgggtgttaatttaaattatcttttctgttttcagggtgtgatagatcggcacaattttaaaggaggtcc

SEQ ID NO: 4623 - DNA, 2839 bp, Medicago truncatula
  Intron number 3 from transcript Medtr1g108580.4 (locus Med tr1g108580) derived from phytozome v7.0 (chr-ID MtChr1; po s 23228350 to 23231188 reverse strand)
cagcttgggggaagctcatttctcaattttctgaggtttacttctaatcttagttaagtttttgttttgttttgcaatttgcagggttgtttctttgtcttattaagaagggagaggatgcaatactggttctgaaactagtgattttgacaaatcagaaaccattttactgactagttttggtttatagatttatactattttctgaattcggggttctgagtttgtctagtatggctgagattttctacatgcatcatgttgtgcattgtgcaatgttggttaatttacagcctcaacttagtgtatattatggactgtccatgttagcaaaagttacacacaccaaagatagaatacgtgaacactacataacgacaaaatgcagactttttgaggtttaacactaattaattgtctatgactctacgtctatcaaaaaatgcattttatggaagtatcactatgtcgaacaagatttaaggttttgtgtaaacgtacaaacttattccaattaacatatctacctacaagaaacaccctacactatacaattgatcattcacattttcttggggattcacttcgcttggacatgggatgccttcattcttcataaaactcccttgatgtagtggtgatgagtggcttcttactaaaatgaataagtgtaaattataaattgttcctcacattttcaacttctatcaaacttgaggtctattcaaacgatgcaatggaaccttttttttgttcagctccactccgtcccactccattccatttcatatcaccaattcaaacttaccctaggagtcaacgttgaattccaagagagtttcactttaattttgggaaactccaataattctcccttctaattattgtatttggaaatttcaactactatgcaacaatttctcattcagttaaattttctaaacttttatgtcatcgtttggcttaaccttcttttctcttttgctacacaactgttcacacttttcatgacttatcttttgatgtatcaaacacctttcctagagaacttgtatccttgcaaaggcatcttttccaaagagatgatattagcaatgctataagttagaagccttactacggaaagcttgaattgcaccattacgaagagcttcattctcactttcccaatgctttcagccttcatttttctcatcatatcctaactataaatgacctaacacaccactaggtttctaggtgtcaaatatcacacaatctcgtcaaatatgcattgagttaaccaaatccattacccattttgacttaaatgaaattctcatttgttgctaagcacacatcatcatcttcaatggtgctattagctacattggtttggagtttcataattctttgttcatttcttttagtctctctaactgtaccctcatttgtgtacaccttggttgatgtggctcttgtcacaatagtaacacttcacattactatcatctcaggatttttttttgtagtgcattaccatcaagaaaaggaaatgctttgtactatatcatacatagaaattaattactatttcagattataggacgtgtcatcatctatttgtagacgatttattgatacctgcttttttgggggatgggggggttaatgttgtagcttttggaattttttttattgtgcattaccaacaagagaagataatgatggacccatttatgagggaaaggctctcctaacaccttgtcccccctatacactagagttgaatacaatattttattgaaggggaaatgttgttaatctcggatagcgacgcagagcatcaaccccaaatctgggacaacggtatagcatactgcaggatgaccactattctaatgttttcttatctttattaaataatcagttgtatggaatttctatttattttcgtcttcatagttaacaaataaggaaaaagaggtcatcgaggcaaaggcccaaagagggaaacaattcttcattcaagagatttaggcccatcattggattttccaaaaaggccaatatgccaaaccctaggaaagcgcaatataaataagcgcattataaataaagcccaattcatattactgcaacctacttgccgccgttgtacatctccatatctaagaacacataagcctgcttaccggaaacaccaaagacaacttcatcacctccacttaaaataaggcgggatttcttcccttacgtctttccgttaactttcacagcacctttactcccctatgattcctagtgatgcaaccaatgaacctccatgttgtgcagaattacacatgacaatggtggtagaggatggatgagcagtttcctcagcagaaaaaactccatccggttcgttattaccgatgttgtgcttcatgtcaatgtttgccttatcatccccattgccgccaggtaatgatgaaatactctgctgcatgttcttgccagtgttagcagaaggtggaatgatagataaatctccattaagtttagaaaaagaggccaatattgaatctccagcaatagccgacaggtctccagatctagcatcattcttcgtttttttttttccttcaaagtaaagtatagcattgatgttagtcatgacgttgactcatgagagtaaaatttgcatttaattcaaagaatcatcaatttattgtgagtgtgaaacgggaagagtttttatctaatttatggttctgtcttttcatttaatcttcgattttttttttcggattacactcttataggtttggaattaatctttttattgttcatgcttttccagaaccctcacctgccc

SEQ ID NO: 4624 - DNA, 1154 bp, Medicago truncatula; identical to SEQ ID NO: 4091
  Intron number 2 from transcript Medtr4g009030.1 (locus Med tr4g009030) derived from phytozome v7.0 (chr-ID MtChr4; po s 1356239 to 1357392)

SEQ ID NO: 4625 - DNA, 935 bp, Medicago truncatula
  Intron number 1 from transcript Medtr8g037300.1 (locus Med tr8g037300) derived from phytozome v7.0 (chr-ID MtChr8; po s 8043426 to 8044360 reverse strand)
aaattcttgttgtacgtgttcattcacattatctttaagattcttgattggttttgttataatgtttagtgttgcatagatgagtttcatttttatacatgattattagggtaaatttttctacattaccaacctatgaatcacaaacacggaccctggttccgacactgacactaacatgttgacaccgataataatttgaaatgtcgtaattgaatgtaattacacgtgttagacaccggagatgcctttgttcagaagtgccggtgctaaaagtaattgtgattaaagtcaaacattttttatgatttgatgattattttttattggtagtgaaaaaaactttacactgacggtgtatatggattaagtccttcataggttgcatataggagctatatatggatcatggttctatgaatttcactaattgttgaaacaaatttcttcccctatagtaacatgtttttttttttgttggtgagagtgactaaggagatgaactgaagtcactacaaccatgtttggatttgagtgtagttaattcttctgcttttgatatgattgataaataagtaagcaagttgccagagaaggttgttttagatgaactaggtgtctgtttgattttgaatttgattctctattttgtttgtttttaaccttcaattacaaaaatatcatattacaaccttctctttattctttttatttaatttttggtacatgtcagacttagttgaatgagtatgacatttctcctgtttgtttaattttttaatattatacatgtggtatttgtaattggttagctaaagggaatttactgtgggatattatgattcccatacgatggatctttactttattgatgtaaagtatttgttattacaaatgagaattgaagttcacttacctaatgcactggcagaatt

SEQ ID NO: 4626 - DNA, 8068 bp, Medicago truncatula
  Intron number 4 from transcript Medtr3g025540.1 (locus Med tr3g025540) derived from phytozome v7.0 (chr-ID MtChr3; po s 6626149 to 6634216)
aaaactcaccttgcttagttgtggagtttccacaggtatgtttcctttataaccatggagtttttgagaaaattttgtttaatttattcttattactatgtaaactttattgagtggagaagttgcgaaaacacatgatgatatacacgatgcagtaatccctttatatacagtgactaactatgtttacttgactaccaagtaaatcctacgatcggattaatctctgactaactaactcaattttatatacacgacgtagtaacccctttatatacagtgaactataccgactaaccatgtttacttgactaccaagtaaatcctacgatcgggttaatctttgactaactaaatcaattttatctaactaacttattataacaaacttgtgataatctaaaattatacatcataacaactatatactagacattttgaaaagatagtgttcctaatactcttttactaaaaaacgaccaaccaatttttttactaaagattcatcatcaaaatcaatggatcgcaccaattacatcgttaatcttaatctaggtatgattaaaattcatatattttcaatattttgacagtttataatttatattgacggtaagaaaaccactatgctaaatattttttctcttccttataataaatgtcataatcgcaaaactttatcttttaaagagtgtcacattaaattttcaattttgttttaatataatttttcaagtgtaacatctaataatatacacttatcaatcaataattattatttttcactttatgtttatgataataatcaaatgccatgataattttgggacggtgagagtacataacttaaagaatgtatacacattacatccatgttatgtttttttgaacaacgttacatccatgttatttttttttttttattatgttctctattattagcaacatgtttcgtgctacctgtttttattcctgctacctgtttttataatggtgtaggacatggttcagttatcgtattccaaagggtagttgtgcgtcttgctttcaaatttcaatcttacaccaaaccaacctggtcattaattaaaaaacgatatcatcatatttataatatatgtattttaaaaaattataatgtaccataaaattataaaggcaaaattacaattagtcctttaattttattttaggtaacactttcgtcctttattttttttttgtcacgatttagtcctttatgttataaaataacaacatagttatcctttagttatatttatttgatttgattaaagattaaataatggaccactagccttgactagcacgtgtgtcttcattttcctttgcgtatgggatgactcaattttcatattccaaatcaacatttaatgttgcctgttgtattctgtgtgtatctaccctctccttatcttatgatcccttgactgttaagttttgcgcaacaagtgatgcattgcattcaactgtaaaccttgttcggtcaataacgaaacccatatcttcatttactataataataaagggtgggagttttttatttttatttttttggtctcatatacgggtattatagtgatatagaaaggaaaaataataaaaaaaagaaagagattcatattgtaaaaaaaaaaaaaaaaaaaaggagaaagagatacactagaaaaaagtgaggtaaagagaacatgggaataaataaaatatgatataatttccgagtcttgttaaaagaatcaaatatacatttttttttttacaaaagctttctgtatcttgctaaaaggattataatttcttaataaatggtcttaaaagttcttttaagggaaatggtcttaaaaatatttattacattttgctaatttttggtaaaaagaaaagagtttgatataatttattagtacataatttccgatttccctaaaaaaaaaaaaaaaaatttaaaatgttttgttttatgatacaaaaataaatatggcataacaatctttataattttttttgaggtaacattctttataatttaaaaatcagtaacttccgcatatacttttagaagcaaatgaaaaattcaaacatcaatatcattattaccacctgattgaaaaacaattattcagtattcaatactactacaaaacaaatctgcaaagaacacatgatagaagagaagttgtcgaagaaaacatataagataatttttctataaagagaaacacgatagcagagacgcaaaactagtttttaatggaatattatagtaagacttggaattttatttccactaaacaaaagactaagaattttataacttgaaaagacctattccattccactcatgtctaagagcgacaagtcggtttctgaaaatttggtggaactatataatattgccgtctaggttgtccataaaagaggggaagtaaaaccatgagaaaatgaagttttgtcatcttgcatgctacctgttgtatttgtatttttactacttttccctgcagagaggaaaagtctcttttgtcttaatattttttttttatggtcaatgtatgtattttttttttgacaaaaggaaacaatattcattcatttaaattgatagaatacatcgatataatacaaatccaaattcgctaaaaacaaaaatgatgaatatatgaacaaaatcacaacatctatgttaatagtataaaacgacaaagtatttatgcctacaaatgttatctccggaatactcatgtatccggatctgcaacgttgacaacaccaaagtcattgtcattgatcggatctacacttgctcaaagctaatctttcaacctgaatcaaataaacaccgcactaagacgggaaaccaaaaacaactcggaggggtgattttgggtcaaaattgaccctgaatcacccctctgacaagaagaagaagaagaaaaaaaaaggttacggctagggtttgagaagtcaatgtatgtatctgaatatgtcatttttttagtccgtccatatgagtatattatcttaaaagaataaggataatgttattaattaattccttcaaaacaaaaatgttattaattaatgatttactgtatagtaataaaaaaaatagtaatataagtttctttttacaaaggatgttggatatagcgtaaattattggactcttacgctgtaatgaaccaatgttttgttgaaagagatgtccacatctcccataattattgtccgataatgtctcaattcggattagcaaaataaaaaagagttataaattgctataccgtaatttttagcggataaacccaatttagatttaatagtactacatcctgataggggatattcatatttgtttaatttatctctctcaacttcgatttgtgaggaggactttggaaagttttaaaatttttaatgctccttttttgtgtgaaaagtttgcagaatctttgacatctcttttacgaatctttgtttaaagaaaagacaacactaattgagttgctaaggataagtttgtctaagaaaatgtccttccctgcatttaactttagagttgtattttatataatgttataaattactgtttttattattgtatatgttgaaaaatgcaagaggtgcttatagtacttgaccgagtgattagtcattttttaatgacatgttagtggttaattgtttgattaatatatactctcttttccgcatttgaatccagggtatcaaactccttatatggattttgacgaatttataaaaacagcagtaatgttaaatagatgtgatgtcattgttaatgcctgaaactcaaataaatgtaggaataggagctgcttggaataatgctaatgtgcatgctggttcatctgtagcaatctttggtttaggtgcagttggcctcgctgtaagttttctcattttctgacatcgtctaatcgtatataatacctattttttgtaaggttgtcaaaatcgggactttactttaggtcgaaagggaataacaaaatcgggactcgtaaaatggcaatcaaaatcgaaggattttactaaggacttttgtagaatcgatataggaaattataaaatcgcaatcaaaatcgatggattttaccaaaaaataatactccctccggtcctttttattagaaacaaaagtgagaatttttttggtcctttttattagaagattgatcaagtttcaagtatgtttgaagctaaatttcatttgtgcccttattgattatgagagagaatattaaaagtaagtaagttgatggaataaagagtaattaatttaagggtattcatagaatttttttaaatgtagaagtgtattaaatgaagatgactattttaaatgtattttcttggtattaatgttttatgtcttttgtttcttgtataaaagaccggaaggagtaatactaaatatatgttataaatagtatatagtcataaatgatttagtttataagaaatcgtaaaattgcaatcaaaatcgatggattttgcctattttaggattctactatggatttgagtcgttggaggtaaagaaagtcacaaaatcctaaatttttggatttaagtcggaattttgacaacaattttcttgatgtgtatgttcatcttttcaatgattttaacttacaatgtctttgttttcacaatcacctttgatcttattcaatacctaataatatatgaaccaaaaacaaattcataagaatcttggtaagaccctgattttatattgaacttgggctaggttgcagaaggggcacgagcaagaggtgcatcaaaaataataggtgtggatattaacccagacaaattcaataacacaggtagcttcaaacactttttaatttgatttcaagagttaggacttcataatttgcctaagacttgaacataaatgtatcttctttgtgctcaaagccgaaacaatgggaatcacagaattcataaatccaaaggatgaagaaaagccagtatacgaggtttgtgttttctctctactcatttcacaaaagaaaatatcatctactcgtgcattttcgccggcaaagtgacaaattcatttgcagataatcagagaaatgactgatggaggtgtagactatagttttgaatgtaccggaaatttgaacgttctaagagatagcttcttatctgttcatgaggtatatttatattcatatagtagcaaaaaattaccagtaattttgttggcatagttttatatttttctttgaaaactcggtatttggtcaaagaataaagctaatccggaccaccaaaaatatcttatcaaaccaaaaaacaattactagttaaaaattgtgcactatcaaatttcatgtaaaattttgtataatgtagggttggggattgactgtactattgggaattcatggatcaccaaagttgcttcccatccacccaatggagctctttgatggtcgcagaatcgaaggttcagtgttcggaggtttcaaaggcaaaagtcaattgcctaatcttgccacagaatgcatgaaaggggtaaatgatcatcactacttgcaaaaactcaaattatgcgacgcattttaatgtgcaaataattatattcttctattatttttaggcgataaagttggataatttcatcactcacgagcttccctttgatgagataaaccaagccttcaatcttttgattgccgggaagtcattgagatgtgttcttacactctaagagaagacatacttttttttcttcattcagatagagagcactctccagttttatgatatctgagttcttgattagaagtatatataaatataaatatgtaataaagtttgtgaacagttattacacagcattatcttactgtgaagtgtgttacaagttaccacggccaaggaagaaaagtagaagtgtattcaagtttgttcatcttccaacatttggtgatagagaatgctggggatttctatttctatttctttttctttattttttgcaccctgtaaataaatgtttatgtcgaaggaattctagtaaaatgtagcaaccattatgtatttatgtcactactaaatgtaaaaatgtaaaaaatatggtttgcaatggagagttaaataaatgcttttgttattttcatatcataaaataaaccttttacatttttgtccctgtgagcttagctcagttggtaaggacaatgcataatatatgcaagatacgggattcgaactccggacaccaacaataaaaaccttttacattttaaatgtttccctaaaaattaatgtaaacaaaaaatacagcctaagaatcatgatttctacatgaaaagtggcacaatacacatgcaagttgcaacacctcataaatggctattcttttttttggtaatgatatctcatccatccattttacacattttacacattttacacaataggtgagcctcatattcccacaatccaatgaacaaaaaacaagtagagaggaggaaaataaggaaagagaggaggtgtaagttaggtaaacaagtgtccacaaacttttccctcactttttatggtaaggactgaatatagcaacttcaagtgattctttatttataaatacatagtttctgtatcatcttactttgtttttgtattggtggtacattattaatttttatttcccttttgttgcatgcaattcattcaagtaagtctttggttttaggcctttgttcattagtttcatcaaacgatcaatttgttttcacaagctgctagaattaaaagaagatggcaacttcagaaagtgagagcaagggaaagatcattacttgcaaaggtaggtaactcacaacttttacgtctcaatcatgtctttgtctaacatgcacaagcaaaaatgtcatgcatcacgcatgtcatatttcatttaatttagtggtgtgatttattgatccgatgatagaaactaacttgtgtatgatgcaagatatttctcgcttgtgcatcatataattggcctctcaattcttacattaatcaatttgcatttgcaaaactttctcacctgcttgagcttattgaatcttaactaattaatcatgattaattaattatcatgttattgtattagcctttgtggcaaatgctccaggagaacccttggtaatgcaacaaattcttgtacaacctcctcagaaaatggaggttagaatcaagatcctatatacttccatttgtcacactgatctcagtggttggaaaggcgaggtaatcacaattacacatttatttatatctacatttatatgcaaagtctcagttgttttcttcatcgtttttcgtcaatcaaagtctgaacctcaacgtgcttttcctcggatttttggccatgaagcttccgggtatgaatattttcacaccatgaatttcctttcattggtgaaatacaccattgcagagttacatatctcaattgttcactgaaaatcataattaattcgacttaaccaaatcaactttaaagtacaaaccttaggataatacttattttactcaattattgaacatattgttttttgtaggattgtggagagtgtaggggaaggagtgaaagacttaaacgaaaatgacaaagtggtgatagtattcaacggggagtgtggtgagtgtaactactgcaagtgtgagaaaaccaacatgtgtgagaagtatggtgtaaacccaatgaagagactaatgtgtgatggtacaagtagattctctacaatagatggcaaactcatttaccatttcttgaactcttcaactttcacggagtacacagtggtcgattcaggttgtgctcttaagctcaacactgaagacattcttagtctcaaaaaactcaccttgcttagttgtggagtttccacaggtaagttactctctcttttatttttaatatagattgttttatagaaaagtttgtttaatttatttttggttttcaaaactaaaataaatgcaggaattggagctgcttggaata

SEQ ID NO: 4627 - DNA, 2577 bp, Medicago truncatula
  Intron number 4 from transcript Medtr2g110910.1 (locus Med tr2g110910) derived from phytozome v7.0 (chr-ID MtChr2; po s 26176652 to 26179228 reverse strand)
ccgaggaggaggcaccagcaggatcaggaccagtagtagtattttcatttttaggacttgttttgtagttttggtattttgatgttattgatttgtatatttgtactcctgatgacattatttttaatttcatgggatttttttactttgtttaatgtacaaaaatgtttgtttaattaagttgtgcatttgcgtcaatatttttttgttatttgaaccgttatgatgaattttaaacgtttgtgtaatttgaaccaaatgtcggtttgatttaattatggacaattgtaaaagatattgtatttatcttgtttatgtccgagtttcaatgttgtatgaattgttttgcctttcgaaatgctctggtttaattacagataaaaactggtcgaaaaaaggcttggaaatgttttagaatgatgcagagctcactgcttgcaatcagatttcctcgacaattaactaccgaggttttaatcggcagtttttcttctgcagttaactgccgaggagcatttgagtaatttactcgtgtgacacagccaaaccaaatgtgggaacagcaattctcactttttataaccacgaaaaatgtattttaggttaagagccttgagaaaaaaacactcaagaaagtaggcacaagtttttttttttaaggaagtaggcacaagttttgttcattatattattaggtgaaattaatgtgaaatctattaaatcatgtaactctcattttcaaagtaataaaatctacatgaattttatctatatactataccgataatcaaggggatcacaattttttgtggtctattttctctaagataactttacttttaactcattatgttggtttattaaattatgcctttgtttattgtcggttgttaatcctcaaaaattaaatcctactattcttactgtcatttattaaaaatatatctttgcttccgctcttaattgaagggaacacaaacttttttgactttttcctttcaaagtttacctttgtataaacgattttatttttatttacttaattaaataatcaatttctaaataaataaaaatatgtgtaacatttttctttcaattttaccctaagttatttttctaaccattttatcattctctaccaatcaaataatttattttttgtctaaataattggatgaaaattttgaacttctattactttcgtcttaagagtaagaacggatccgacatgttaatttttgtcttgatgttaatctactaataaagaaagtgctataaggcatgtgctaaataaatagtttgtagctcttctcgaagttggttttggcccgtttgttgtaactttttttaaaatagatttttatagtgtaatatgtttttgttatatttttttaatgaagaaatttttaaggaaagcttcaaataaaaaatttatttgaataatttatcttaaaatgtcattctaagtatttcatcattttgttataattttttttatattaaaattttgaaaaaaatctctaaaaaaagctatttcaaatagtttttcataaaaatcatttttgaaagatctcattttgaaaaaatatatgatttttaatatgtaaaatctcgaacaatgaatatttaagttggtgaatgtcaaaatctcttttttaacttataccaaatgaatttgaaataagttctactatttttgagtaaatttccaaaaaaatcatttttaaaaatagaaagaaaaatctatttttcttaaatctcaaataaacaggctcataatcattataacttagtgtcatctgatttgtctcacctctaaatatgataaaagatgtcattgagtttttcctgtgacaacacatatttgaattggatttggacaaattaattatacattgctgactaatttgttagatatcatcccttaatggagaggtatggcaacagggcaatgactagttcccgaatcattgtaaaaagaaataaaaataaaaaatcctccttcgtacttgaacttcatgggttgaatactagttctggttgctgatataattcacgttgttatgacctacatatatgaaagtggtttcgtagcatgtgcaaaaatatttttttttttgaacagggtgcaaaaatataattataaatttgtgaatatctaagtttaataattagaaatctcaatttagatacccattgcaaaaatccatcagaagaaaataccatcaatcatcccattttgaagtttgaaactcaaacaagaaaagaaaagctttgatttccatcgtttcgtagaagaataaataaaagaaagctcttgaatattttgtatttattttggggtttcgtagaagaataaataaaagaaagctcttgaatgttttgtatttacttttggggtccggttattaagttctaaatgtttaatataatatttgtttaacctttgtaatgtttatttattctttatttttttcttttaattttttttttaccaaaatctttccatcccatgttcatattttcacatctaattaacatattttttatcagcttcgacttgtttcttgttggtga

SEQ ID NO: 4628 - DNA, 986 bp, Medicago truncatula
  Intron number 6 from transcript Medtr3g100650.1 (locus Med tr3g100650) derived from phytozome v7.0 (chr-ID MtChr3; po s 24146227 to 24147212 reverse strand)
gcactctcttgcttttgagtctgcagaggtttggggtaatgtagctttttgcagtaattatgaaatatgaacaattataaaatatctttgaataagatgttaaaatcaaatgatgatgtttgaattttctctcatttatctcttttagattttatttgtcatggtttgcaagttttaaaccgaagaatttgaacttatcctcaaattagatttgactctcgatcaacctttaattacctctcagtggaaccgcagatctcaacttaccgggacccttttcccctaagaaccggagggttaagattaaaaaaagaaattgactcctctagttcactgctaccactcccactattactatctttatgtaactagtatatttattaatgtggacatgcatgctgagttttgaatagtggtcacgatgacagttgcagtcacgatccttgatttttatttgaatggcaaatattcgtattttctcctttgtcaggattcgatccctagactatttacttctttaatcccttagctcaaccaagtgagctaccctcccaacatccttgatattgaggttaaatgccggagatgtgacctaaaacgcagtcacgttgcagttccacaaccataacgtgacttaaaacgcagtcacgggagatgtgatccttatttaaaaccctgcttgtatgcccctcaatgagatatcatggcctcctaccaaattatatttttaatttcaatatatctatgataaatattacagtaagtccatgaactactaaaattggatgatgttctctgattatcccctacgatttgtgtaattttgaacaacgagaagaaaatgtggatttcatggtttttgaaattatctagttcctatattttctcaacagcattttagttgaactctagaaactgtaaattctcttaatatgtacctattttgtacaggtgaggaagttggaactactgataacaatcctagt

SEQ ID NO: 4629 - DNA, 2563 bp, Medicago truncatula
  Intron number 1 from transcript Medtr4g033520.3 (locus Med tr4g033520) derived from phytozome v7.0 (chr-ID MtChr4; po s 8305640 to 8308202)
gtttgtcaagaacgcttcaggaaggtatctctctctctctctctctctctctctctctctgtttctgtttttttttttgttttggaatttgattttcatgtgaaattgtttatgcgtgaaatagcttgaaaatttgtgtattttagtttctttctatttttttgtcctttgagggactctaaagttgatagaaaaatcaatttggggtgatgtaaatggaattgaagagcgtgagtttgtatttgagaatttgaacatgttaggatgctgaaaaatctaggtgtttcaatgatttttttggtacatacttttggattgatctttttactaagaaatattgaatgtttcaaatagccttacatttcacatattattctttggtctctatgtagcttattatttcttatgttatgtcattttggcatgtgttattttgttactaaacaagatataaatgcagcctataacaccagacacgacactgacacctagaacctgtagtgatttgagaaaatggaagcgattgaatgtaaccacgtataatggtgtcggacactgcacatataaagtgttaatgctacatagcagactgcatactaccttgccctcattttaagataagactgcatcccttgtgttgagtttgtggaaagtggggtggttgctttcagttgaaccttaatctttctggattataagtttggtgaatcattgatagtttgttagcttgtatttgaaatcatttaaaaatgagtaccagggtagtcgctctcatagcaatcctttccgttgtgagaatcatcaagaatactgttgtttaagaagggggctgggaaatggaatgagtgagactatctgaagataaaaagaggttgaaattttggaagaagcgtgagattgagcaaaatgtgaaaaataaaagggaaacttatgagaggaacaattggtaaaattgacaaaactatggtaaaatagtccattttaaataattaaaatttcaataaaaataaatctagtcaaagttgaaaggatgtctaatgcataaatcacttagatggatttccaaataaaatcaattcccaatcccatgttataatctccaaacaatgaatttcacttgcaaagttattcatttttgttttagcatatgtttggtttcaattttggagagtcaaaattgattctagaagttgtagaattgatttatcatgtttggatgatttaatgaagatttggttttgcttgtggaattgattctacttgaagctagaatttttgtagcttttggcttctacacttgattttagcattaaatttatcgtcaaattcacttttacacaaatacatccaaacaaatcattttacattcatctcacttttattcataatcaattttacagaaacaatccaacattgttagtctgaaattatttacacttgatgtatgatgttggtctctgtaagtgtatgccaaacaaatttttgtttaaaatttttcttgccaaaaccttgttaatattttaacaatctttgtaaatattttgaaacaaaattgggatctaagtaaagagatgcaacttataattctgtgttgttaaatggcgtccatggcgtggtggatttttcgacaactgccataggcaatttgtgaagggattcccgccatggctgcgccatatgctgtaatggtatatttatatgttagatttttggccttctgctatcgacaacactgaatcaattcccaatttcgtgttatgttacaactctccaaacaatgaatttcatttatgaagtacttcattcttcttttaaaattcctcatgccaaacagactgaaaatgcttttggaataattcaaattattagtctagaaagatttactggtgatggggtggtttttctttcttcaatatgttttttaagaaaatttgttgtcccttgtgattaacaactttttcgcaaagctaacatacgcagtaacagcacttagacaggaaatttggtctttggtattggtgtcttgttccttgcactcccttcgggtgttccgcctacatacggagcccgtgttgtattgcgtcttttttccctttagctagcttgtgcgccttgtgcaggctttgcttgaataaaatttttgctgtttcaaaacaaaaaatcttgaaagttattgttttgaagtttggatatcggatgcatagtagtttgtcatcgcaatacagatacttgtttttttttttatgttttttttaccttgtatcttaactatgtttgattttagtttacttttcaatttgttaattttagtcacccacttattacatccattcttgtcctcatggtgatcatccagattacatttctattttattaatatcacattatttttcataacagatattgcttactaaaatttttgtttcttttttattggtttttgttctatgatttgctttatttatgagaatttagtcattgtttgtttgcttgtttcattatatgcctttaaagttttgaattttgatatttatgttcttattcttataaccagttcccccat

SEQ ID NO: 4630 - DNA, 7228 bp, Medicago truncatula
  Intron number 1 from transcript Medtr1g024990.1 (locus Med tr1g024990) derived from phytozome v7.0 (chr-ID MtChr1; po s 6056322 to 6063549)
cctctcaccgtcgctgctcattctctctctctcctgtgagttctctctctctctctctctctctctctctctctctctctcttcggtgacttttcaatcgtgaaaacctaacccctttgctgttaaaaaaagaatcttgaaaccctaacccttttcaaaatcgtgatgttatacttataattatgtgtttacttgttatggaatttgtgtttaattaagtttatagtaagttctggagatattattgatttcatactttgactccaattccagattcatactttgactctagttccagagacttgattttcttcttaaattgaaaagaaaaaactacaagattactgaaattgaaaagaaaaactacaagattcataatgcaactttttgtaaattaactatgttatttcttgcagtgtgatattataatcattggaactaaagctatgtttatttggggacattagtgatattacaggttgtcaagattccttatccttctttccttctaaatttgttacacaacctgctctatctgtcttatgatttgtttgggtgcactttactctatggagccaaacccactttactcattgctgcacttcatgggtggtagtaccgttcatgccagtgctttgtggtgattaatattacatcttttaagttagataaagtagaagtctttttggggttaatttgtgacctgatataattaattggtgtttgatggctctaacagtagcttgtataaaatgtcataatttatgtaagttatgaattacaatgaaaatccttataatataactcgactcttaatagtatgttactattatagatcttaacactatcaaatgcttcagatcttattatttagcaaataaactttgtattattgatataattcatagtattatgaaattgaaagtaagcatactgaaacaaatatatgatgaatattcccaacatcgtaatatgattaatttgattgcttgtgtttgtattttatcactttattcatatgttccatttcgttagggaatcgccgtatttttaccggttgtatctgcttggttccttgcgttcttaggtgtatcttacacccagttcagcttaataaattatagcagtttttgcgtgtcctctaagagatttctagctagtagtaatctcgtacctccgcataagtatttacgttgcttaagcaccaagttttttacttggtcaaactccaagtcttctaagttctaatagttatgtaggcatcacaattctttgattcagcgtgtgttcatttttagtgcgtcaatatgaatcgtagttggatgagagctaatcgattaagtgaagagtttgataatggaatgaatgaatttctacagtttgctgaacaaaatcttccgaacaaagatggacttttcccgtgtccttgtgtttcttgtgggaaccgggagccaaacattactaaggaagaaataaggggccatctagtttggaacgggatttgtcaaacttatacacaatggatatggcatggtgaagcaatactgccaagtgtatcccaaagagagaacgttagtgcagatatggatgatcgactggaagacatgatacacgatattggagaagaatcttttaagagagcgcatatgtacgatacactatgtaaagacaaggaagaacctttgtacccgggatgcacaaagtttacacgtttgtcagttgttttaaaattgtttaatttgaaggcaaaaaatggatggagtgataaaagtttcacataattgcttcaactgttgacaactatacttccagaaggtaacacaatgccgaatcgttattacgaggccaaaaaaatattgtgtccgatgggtatggagtatgtaaaaatacatgcatgccctaatgactgcatcttatatagaaaagagtttgaaaaacatgatcattgtccgaagtgcaaggtgtcacgctacaaaaagaaagacgttgattctagagatgatgcgagcacaaagggtcctcctgccaaagtgttttggtacctaccaataatttcaaggttcaagagattgttctctaatccaaaggacgcaaagaaccttagatggcacgcagatgagagaaaacgtgatggaaaaatttgccatgtagctgattctttgcaatggaagaaaatcgattctttgtttccatattttggcaaagagaaaagaaaccttagacttggactttctactgatggaatgaatccatatggtaatctaagtagtaaacatacttcatggcccgttctcttgataatttacaacctacctccttggttgtgcatgaagcgtaaatatattatgttatcgatgatgatttcgggcccatatcaaccaggtaacgacatagatgtttatctaagtccattgattgatgatttaagattgttgtgggaagaaggagttgatgttcttgacgcgtactccggggaacatttcaatatgcgtgccatgttgttttgcaccatcaacgactttccggcatacgataatttgagtgggtacacagttaaagggcataaagcgtgccctatatgtgaggctaaaacatgttatcatcaactgaaacatggaagcaagactgtttatcttgggcatcgaaaatttctaaatcgttatcatccatatcgtaagatgaggaaagctttcaatggtgaaccggagattggttttgctccaaagcccttgaccggagaggaagtttatcaacgacaacaaaatgtggaggttacctttggaaagaaaaaaaagaagtctgttgtgaaaaatatatggaaaaagaggtcggtgttctttgagcttgcatattggtctagtcttgatgtaagacattgtattgatgtgatgcatgtagagaaaaatgtttgtgatagtatagttggaacacttctcgacattaaaggcaacacaaaagatggtttaaatgctcgtctagatttgaaggagatgggtataaggcagcagttaactccacaacaaaaaggtaacagaacatttttacctccagcatgtcacactttgtccaagaaagagagaagaagtttttgtgagtgtttacaaggtatcaaagtgccgcaaggttactcatcaaatatcaagaggcttgtatcaatggatgatctcaaggtaattggcttaaaatctcatgactctcatgttttgatgcagcaattactaccggtagctattcgtggaatattgcctaacaaagttagaataactataactaagttgtgtttattcttcaatgtaatatgtagtaaagtcattgatccgttgaagttagacgagttggaacatgaggctgcagttatcttgtgtcaattggagatgtattttcctccttcattttttgatattatggaacacttgattgttcatttggtgagggagattagacagtgtggtccagtttatttaagatggatgtatccagttgagcgatacatgaagatcttgaaagggtatacgatgaatctacaccatccagaagcatcaattgttaaaaggtacattgcagaagaaggtattgagcattgttcagactatttgtcagatgtggattctataggagttcccaagtctcgtcatgatgaaagttttgaaggtacgggacaaggtttaaatgttaagaccatgttttgggatgtgatccatccagcacatttgtttatattgaataacactgatgaagttcaaccttacttatctactcacaaaaatattgtaaagagaaattaccccaagatgaatgagaaagggttgttaagagagcataataagagtttttccgatgggtttacagaaagatttgctaatgatgaaagtgcctctaatacaattaaatggttggcacgtacgcctaagtttaacattataacttggagtgcatatgatattaataaaactacattttatacaaaagcaaaggatgataaaagtaccatgcaaaatagtggggttatggttgtggctgagtcgatgcacttctctagttcgaaagataaaaaccctataatggcatctacaccatactatgggataattgaagagatttgggagcttgattatactacatttacagtgcctatatttaaatgcaaatggattgatattaacaatggtgtaagaattgatgaattaggatatacactagtcgatctttccaagccagcttatagggacgaacccttcattatggcatcccaagcaaaacaagtgttttatgtcacggatccttctaacaaaaggtggtcagtggttctacaaacaaaaaatactcatggtagtgatgaaactcttgatatccctgagattccttcttgctcaacaaatgttactacatctattgatgagaacgaagtagacgatgtgcacgctactcgttcggatcatgaagaagggatatgggaggactaataaggttttaatttttattaatagtcacatttgtaatatgagatgttttaaaatttgtgtatgtgtacatgtaaattatatttggtaaatgaattcaatgaattgagttaaatagatatatggttgattcaactaactttcatcctttttatatgttatgaaaaagttttcttgttttgtcaacagatacatggctgatttaaccaactttcctccttcgtctagtgaacttccaaaaagaaatgttagaggtgccaccaagatgaaaaaaatgaccaaagttctgaaatcgggtgtgaaaccattggtcaactttaatccagaaactgggaggtgttatggtccaaattctgcagagtttaagagttatgcagcatatcttgctcgaagtaagtgtagtattttaatagatgaatggaaacaggtagatgcaagcacaaaagatgcaatttgggttgatcttcaggtattatagctgtatttttaattcagcatttactatttaattattgtatctattaatctttaggtactaactccaaatttttgatgtatatagaagcattttgttatgctagaaagtgatgatccaaaaaatgatccattgaagaaaaaatggatggtgtatttgggggtgcggtggaatgggtttaaggcacaactcacatcggaatatattgcatatcccaaccccgaacgccctcctccgtatgttaggtatccttttattaaagaacatatatggaagaggttcattgagtctcgaaatacagatgatgaatttaaggtttgtagtaattatatttgatttttattgtacattttttttatttaatcaaatcaatttagtaatgatttttatttataataggaaaaaagtcaaaagggtagggactgtgtggctaaaaatatttatagacatacattatctcgtggaggatatgaactgcttcaggagaaaatgatgaaggaaaagagaaaattgctagaagaatcaggagatgtagatgatatattaaatgatgatctaagtctatctcctccatcacgtcatgatacatggaagagagcaagacaaaagaaagggggagagtatacatcagaggctgcaaaagttgttgctgagaaaattgtaagttggtgattttagtgttctctaatatttatgtcacagttcatatgtagtgttctctctgtctgtctctacctctatcaattagttggcagaagttgcatatgatgttgctcatagtttgttgacatgttcacactgtccttttaaaatgtaaatattttaaattggactgaaataaaacatgtatatagattaaagggttaaactaaatgttcattattcaaattctgctaaacactgatgaattaccagctacatatatctaatattgtttgatgattaaagcagatatttctgatatatggcttgacacatctagtttagattctcttggtgcaacttactacagtgtaggtgatgatgtggtgttcatctagattatctatttgatatgacttgttattaattaaaccatcaattttttacaaaatatgtaccgatgctctagttgaagagactgccaaaggcacctttgttccacaaggacgtgacgatatcttaacaagggcaattgggacaaaagagcatggtggtcgtgttcgtggtgttggaccaggttatactctgagcaattactttggaaggtcttcacgtcttacccaaaccatagatgttaaccaacatctctcacaacttcaaacaaatctcgaaagacagattaaagaaaaatttgatgcagagtttgaacaaaagatggccgttgaacgtgagttgatgcaacaagcatttctggataaacttaagactatgggtttcacccaaaccttgcaaataaatgaagaaattgagcatagtagtcctcaaaaagttgatgtgcatggaagcacaaaaggttcttgtaccgctgcacaagaaaattacaaggaggacttaaccatcgacaatgttcaaaaattgctatgcatggttttgagaagtgaagaagatatacgcatagcattagaacatgagccaaataccgcaaggttttttattccagcaaagtgtattagagagttgttggtgggtaatgcttggcttgacttttctattctacaactgtggtgcacgtaagtacatttttcttttttactattatcaatatggattagtagtatatccacaattcaatatttaagtgttaattttaaatttgtctaggtgtatgcatcgtctctgtatctcaagaaatagattgaaagtgtttggcattttggacccagtatgcttggattttaatccaactgatcctagtactaaatctaaagttcagggacacatacaaactaggttgcgtgatttgaacaaagtgtgttacttagcaccatatctatttaagtaagtacatatttaaattaatatttttcttatttatctttgatagcttaaaccttaataatcgctcttctacgtgtgcagaggacactggcagttaataattatttgtcccaaggacaatagtttagttgtcctttgttcaatgcactgagatcttaatgaaggaatgattaagattgtttcaaagtaagtgtatattttacgttgtatttgatatattacttcctacaacactaaaatgtataactttgatgatttttttaatttggttgacacagagctttagaggttcatcaactttgtcagggaaata

SEQ ID NO: 4631 - DNA, 1594 bp, Medicago truncatula; identical to SEQ ID NO: 4470
  Intron number 1 from transcript Medtr8g120490.1 (locus Med tr8g120490) derived from phytozome v7.0 (chr-ID MtChr8; po s 27559075 to 27560668)

SEQ ID NO: 4632 - DNA, 1801 bp, Medicago truncatula
  Intron number 1 from transcript AC233657_33.1 (locus AC233 657_33) derived from phytozome v7.0 (chr-ID AC233657; pos 169378 to 171178)
tccgcttcaccaaactctctctccctctctctaaggtatgctcaattctctcttccttttcttctactcgcacctcactgtacttcactataagctaattttcttgtatgcatgttaattgtgtgatgtgatgataaagttttaatatttttgagtataaaataatgggtttctgtggaaattgataggggaagtgtatatcaatcagatttctggttctgtgggaatttactaaactgtatatatgtgtgtatgcgttttcttgtttgttgattatgtatttaattgtctattagagagaattaagtttaattactgataaaaatttaatcttttttattagaaaaaaatgggtttgtgtggaaattgatgggggaagtgtatatgaatcagatttctggttctgagggaatttactacactatatatgtttgtgtgtgttttcttgttttttgattatgtatttaattgcgtattagagagaattaagtttaattagtgataaaaatttaatctttttgagtagtaaaaaaatgggtttgtctagaaattgataggagaagagtatatgaatcagatttttcattctgtgggaatttacctatactgtatatatgcgtgtgtgttttcttgatgttgattatgtatttaattgtgtatttgagagaattaagtgtaatcactgataaaaaattattgtatattttggttccatttatagagggatcagaattgatttgattctggcggtgtataattgattttgacttgtttggttgctgtcaagtagaattgattctgcctctataattgattctatgatttgaaggtaggattcatagcacttttgattctagaattgagtttcacatgcaaatttatagtttaactcacttttacatatgattgtatccaaacacaaatcacttttagccaaaatcaattctccagaatcaagtctatcaaaaccaattcttcccgccgcacaaccaaagaaaaagggtttgtttggttatgcggtgacaataattgaattgattatgacgaaaagtgtagttaaagataaagtgatttgtgtttggattcgtttatgtagaagtggtttgaactataaatttctgtgtgaaaatcaaatctagaattaaaagctacaaatcctagcttcaagtagaattaattctgaaggaaaaatcaattctactcaatagcaaccaaacatgacataatcaattctgtaaaaaagactcttttggaatagatagaaaaagggtttgtttagaaatggatggagaagagcatatgcgcgtgtgttttcttgtacgttatttatgcatgtaattgtgtattagagtttagtgtgatatactgataaattttaatcttttggaaaagggtttgtgtagaaatggatggggaaatgcatacaaattgttgggaatgatatctcatcataaatgaggtttctggttctgtgggaatttactacactatggtcctgttcagataaccagcttaatttgcagcttatagcattaacgcttatcaatataagggcttatgtataagttatttctataacaaataataaaattaagtcaaattgtttttgtttaaactttaagctgttttaatatgctatcttggagagcttatggaagtaagctgaaattcttatgaacatatgtcatatgttgttttcataagttcagataagctcaaataagccaatccaaacaagcccatatgtctgtgttttcttgtttgtcatgtatgaatataattgtgtgttaaagatagttca

SEQ ID NO: 4633 - DNA, 1842 bp, Medicago truncatula
  Intron number 1 from transcript Medtr4g049490.1 (locus Med tr4g049490) derived from phytozome v7.0 (chr-ID MtChr4; po s 11347713 to 11349554)
aactattttgttagtttttagatatcatttttttaatttttcatcttaaatttttgttattggatgtcattcactttcatgctattttttttactcaacctccattttttacgcttgtttgaaattttaaaatgacgtgacgtttttttaattgagcctaattttttataaaataattatctcaaaatcttcaaatcattcaacaaaaaaaatactacaaaattatcatcaactcatttcattccttatactccggttaaaacacaattttttttcttatcatttctctcatgttaaatttgatttttttatcgtttttctttttttaatttaatttgtttactctcatgaaagaaagaaacataaacccaccaccttaaaaccaccaccaaccaccttttttaccatatggtgactcatctttactttatttagcaatatccccatatgaagagaaatgtgttacatgtcatatgtgaggtaaagttctacattggatgcaattgtagatggtgagaaaaatataagagaaataactcatatatctaatgtcttaatgttttgatgaaaaaaaaaaaacttctttttataaattgtttgtgaaaataaactattgaattttggattgaaaataaattggtttaaaaaaatcacttctttttatatatgtgtaaagaaaaaacttgttattcaaatcaacaacattgaatttggattgaataacatcttggtataattacatttccataactcgatctttccaagaaaaaccaccacacgtgaattgtcaaaagatccatagtataaaatcggtcaagtcatctacaaaatggtcatgaagaatacacttgaatcgataactaaatataccataaacattttcgtgtttctattctgtgagaatatagattttataagtttatatcgacaaagattaatgaagtaaacaaacccattatttttgtgtttattattgacaaataattgttccattttttttatatatttatcgatgataaaaacttcacataaataaattgtgttaagtacatgtctcatactttttttattcaccaattacaaatatttgtgtccttttttttaaatgcagtattcataaatatttgtatagtcttttcatgatatttattaatgactaatatttgtcccgtgatttttgtttttgcatgagtgattaatagttgttctatttctttaatatttatcaatggaaatatttttctcatgttttttatgtatcgatgacaaatacgtgtctcttgtttttatgtatcattgataaatatgtttcccgtgatttttcttaatttattagtggtaaatatttgtcatgtttttcatttttattttttataaatcaatgacaaatacttgtattgtgttttttcactcaactcttttgaataatgtgacattttttccttaaaaaaaataacatgtcatttttattttataatacgaccatttcattgtttctagttttttaatactttgtttgtaagataatttcaattttagttttaaattttcacaaaaaaaaaaaactaaggcaaaaaaaaagtttatatgcaagatgcaatatgcaatgtaatcaattgagattatgattcttcgaccaatgcaaaatatatcctataaataaatagatattatataatttgaagaaaaaaaactatatttttgcaaatttaataaattataattctaagtttttattttgaaatcatgtcattttatataatttgactaccaatcaaaacaattgagttaaacttttccttttatcttaaatggtgtcattaaaaacaaagtttgtcataa

SEQ ID NO: 4634 - DNA, 1258 bp, Medicago truncatula
  Intron number 1 from transcript Medtr5g047390.1 (locus Med tr5g047390) derived from phytozome v7.0 (chr-ID MtChr5; po s 19994422 to 19995679)
ctgatcatcctaacttcttgtctcaactttctcaggtaggttttaatattatcttttctatgtttattctaaatggaaagagggagcatatcatgcacttgatgatatttttaggtcatgggagaactagtatatatacaaacataaagaataggtgtgtattgatgttgaagattttgtagttgaagatcttttagtttcaagtagctttaaacatggaaatcagcttataataccaaagagaggaagaactctttgttcagagtgagagtccttcatccaactattttttgccacaaattataaccaaataagagtctgtttttttgaatcagccaaatttattaagccaaaaaatgtgtaaagaaaccacaaatttagacggaaaaataataaatagaggtaccatatatatgcggaacactcaacggtgacaacccctaccgtatatacgtggaacctcaaaacaccttcctacaaaccaaataagagtttgaatgcaaattaaaaacagagagaaaaaataagctggcaaagagaatccaaaacaggtttttccactttcttctctgtgggacatgttttcccccaacccatttcttttatatttttcaatatttgaaaataagaacctatttgtattaaaatattttaaacgataaaaagaggatagtatgaaatgtatcattttgatgttttcaaacttacttttaatgtaacaacttgatgttttcagacttttccctaagtgagacccaccatattgattaaattacagcaatgataggttgacactatgtgtacatcctttctactatttggaaaatttaacttaaccaaatatattgtcagtgtaaccacatttttgtagttgcgtaatcactatttttccagaatttatttggttaactaagtggaaaaatagtggtcacgcacattttagttgcgtgaccacgttttttctggaaaaatagtggtcacgcaaatggaaaaatgtggtcacacataccatatatttggttaactgaaatttttcagaatggtacaaaggagtgtacaccataaagatgtcgacatatctttattcattaaattatatcataatgttttgtttttctagggaatcataatgttttgttataaaccatatttcgatctggtcattaatttttacatttttttaatactttctctgtaattgtttgatgtgaatatgtgatgtttgatgcaggataacttgccttctgttctatttgcc

SEQ ID NO: 4635 - DNA, 3922 bp, Medicago truncatula
  Intron number 4 from transcript Medtr3g143270.1 (locus Med tr3g143270) derived from phytozome v7.0 (chr-ID MtChr3; po s 36917124 to 36921045 reverse strand)
ggtgagtttcatttctttatatgttgatctattatttgtgatgaatcttagaatttcacttcaatcttattgtgagtgttgaaacccatttgtgtagctctttataacttaactatacaattaatgattgtttggaacctggagaaattggcatgagagaaatatagaaaggataaaagaaaataaaaccgcgttatagaaaatacagaataggttctccccaagcgtttccgtccacaaagaactctaataatgtttaaatcaaatacatcattctctgggcattattgtagctttaggagaataacttaatgatgcctcccaaaatttccttacattccattgtttgtaactttgcatagatttgacttgtgtaatttccacaacaggatccaaataggttacaatggcaatagctttgtgattatccctggtttatgttgttgcaggcatagtctaagaatgaccatcttcccctccttgtactccatagacttcgttgattaagttcaacaataagttaggttggtaggcgttgctagttatccttctctcatggatctcattatcgacatgcatttgggtatggcccattaggtcaagcatggaatgccgatccctcccatttgtttttttgctcattaaaatcaaattaacaatgacctaactgctatcataactgggctagcatcttgtagcttcgacaggatgtgtatattactagactcagtgttacctggatctctttgggcactgtaagtgaatcaactcctgatagttctagtggaggcagtgggtttacctggattgtccgagactcaaatttcaaggttttcactcctcttttctcataccataccctcacagtatccatatattgagtttccttccctgttttacctctcacctctgtatggttacatctttcttccgttctcttttctccttgtttcttccttgccacaatttccatattattccttgttgcatcaacatgaataatcgacttggcttctaatcggttgtggtcagtgccttctccaccatcgccatccaacttaaatacaagtatctttaccactaggtaaagctccgattctatccttgtgtttgcttgttcctgtggcttcatctattgagaacctttcagtgacacaggctgatggattggtcctatatcacccatctttcttgcccacacacggtcttgtcgctgccacactcagactactatgatcatttgaggtttctttggtcctcttcattccacctagaatttgtaggttgaacccatcatcctcccttgtcaatccctatttttacattagacgacaaagagctgtgttgatttcatctatttcactgagtctcgccttgatctccaacagctgagcctgagaccaatgttcattggtcacctcattcgatttttccattgtatgctccacagtttttgttcggttacgaattccctttcgtcttcttactctcaaaattccaccctttcccttcaacatcaagtttctgtttctccgtctcttgaccattgtattttttggttactccaatccctttgacattctttttgatcatagtggttcctaccactcccattttttcatcacaattgattccttgcatctcaatgaactaatacgacgtcttcttggttcaagaaatgctagacttcagtgacaagggtaatccatgattgttggtctcctctttcaatgaaactgtcaccttcatttctcctccaacaacagttttacaagttggatcactttgtttttagtttttttttggggtgggggtgggataaagatcattttgttttaaattcagagaaactataatgaaagaaagatagaaatgataaaaaaatatagaagtgtattattgaaaagtgaacagaaagcgaagaatggaattcttctcaagggttccccttcacattcctttgacaacaactatcagatgtacaaaatgaccccttctatcctaacttaccttatttataatcccttctaacttactaacaaacctaacttatcccaacctttttaacttatcattattgatacaacatctttttgatttcataaatgttagactccgacagacatggctgcaatccattatcattgcctccttcaatgacactgcttccaccttcatttctccctcagccaaagatttggcaggttggaccaatttattgggaaccagaaaaagttgtaatggaagcaagatagattcaaattagtagaactgtgttattgaaaaataagctggagatggagactattatttttttcaaagggtttcccctccgcaaaggatttctcttttcacagcaactattcctatttataatcccttcaaacttaagtatttccaacggcgactccactctattattctaaggggggtgtattggattaagattttaagagactattttgtcaaacaagattctgaagattttaaaagattttgcgagattatattgattttgttggattttagaagactttttttaaatgactctttacaatcaggattttgaaaatggatttataatagagtttttttttaagatttcaatggactttatgagattttaggatttgaaaggattgtatgaattttaagaaaaattcaaaatgaacggtggtggatgacaaaagattataaacttataatatgaaattgactaataacaaatcatgcacagtaatcgtaaggtattaggtatctaacaacaacaaaataatctgctggcattggttaacattctccaataaacaagggtcttgttaaccagtaaccagtgccccggggggcactggttaatgaatctataaatagaattttctgtcttggtaatataaactgtcactttttattaagtaataattacattactttttaatataaactctcttggaatctataatgttaataaatttagatgaaaaagatggcttgaaaaaaacctaaaaatcttgaacatgaacaattttttttggttacaggaacatgaacatatgagaagcaacaatataatgataataaatatgtaacgtgcacaaggacaatatttattttactgtaacatgaacaacaacgtccataaacaacgccagtaaaaaaaaaaaaaaaagacacaacaataaaatgtactgtgaacaaggaataatatcattttttttttcaaaaagtagaaaaggaataatatcaaaaaggggcttatgaataataacaagaagtgtgtatgagagtggtataaacaagaaatgttacgaccctgctaaaaaaattatgaaagtctcagaaagtctcatggttttctttgagattgttgaaagagtatgttatgtgtattttcaactaaaaagtctcatgaaatccattccacaaaagaatctattaaaatctacatacttttcaataccaagagacattttataagtctggggaaatctcatttggataccaccagatttcgttgccttgaacaaacaatcttgattgtcttaattgaataccacaagatttatttatattctataaaagtcttgattgaataccattgaataccacaaaacttttttatttttaaaatcccatgaaatctcaattcaatacaccctcataaatatgatattgacaggtgtgcactattaaatatactttcttacatatatcatgctatggcatgttaagtaagtgctctttcatctaacggagctgtggcggcaattcaataactaactaaaattttcattgaatttattaactgaattcacctggaaatttgcattatgctgactgtctgtgaaatttaggaaactgtagatgaactgttgaaattgttttgtttaactgcaattcattccttaaactgctgcagcttacg

SEQ ID NO: 4636 - DNA, 1752 bp, Medicago truncatula
  Intron number 3 from transcript Medtr5g082040.1 (locus Med tr5g082040) derived from phytozome v7.0 (chr-ID MtChr5; po s 30859967 to 30861718 reverse strand)
tcaaattgtcatcacaaaaaggcaaacgtgataatgtatacaacaaagccttgacgattgtaacgtggagctagttcagatgaatcagaaacttaattgtgttatttggcagctgcttacaaagacgaggcaaaaagtcattcccaacatcaaatatttgggagattatcatcatggacaaggggatgagcaacattaacaacgacctactcaaaacagttaaaaaaatgatggaaactggtttcagactgagtatttcaacatgtacagcatttttaggagcgaattccagaacaaatatcgtgtatcagaaacaaatgaatgagttgatcttaaatgtcaaatattccatccatgacatactcatttcaatttttacaaatgatattatgaaacatagcataattgttttagaattattatgtttccttcgcttctcatcgaaaacacgccttataaactgaatttcacacgtctccctgaacttcagatttaacagaattgttttagaattgggcacaactaattcttttccattcatattcaaaaaacatatcaccttaattcatgagatttaacaatagagttcaaagtttctctaggttttgtcttgaccaaaaagccatagtgatgtaatcaatggtatcgcaagtaattggatgaaccccaccatcatctcaacaatctaataactccgcatcctatgaaagaaagatcgaattttcaaattccatgaaaatgtctttacttatttcacccatctattcttgatttttattgcttcgttcaccaacgaataaggaaagtcattgaaagtcatgaatcatatcacacatcgtctcgaacaagttgatgaaacaaacgccatgttgaaagcataacaaagaaatccaaaacaatggttgtcatgttattttgaaacgagtaataattagtttgataagcaacttctctataaataattagtagttatttattctctaatttttcataaactaattatttaagaaaaccgcgcaacgatcttatatctagatttttacaatagcatccctcttgttttcgtctgactttttaagcttgtatttgagtccaactatggcctaaattaaaaggggtcataaggaatcaaattttgccatcatttgtatatagcatgatgctgagatacttgagtgatattggaatagcctttggcgacagttacatatggcaggctcttttaatgttgactgttgggagactaagaagggtaggaagcattcaaataaataaacaaatgagaagtgtttcccttttttcccgatgaaatttcaaggaaagtaagctgacaaacataaactttcctcacccccaacaaattgactttttctttgacatataaaaaattgaaatgaaaagaaggtttttagtcagaagaagttgtggggaaaacgaccaaacacctacttcccactgacttaagagcatgagtaatgctatttggacacaactttttgataataatacgacacatgcactgtttaccttatttatacgtgaatagtgcctttttatctcgattttttttattttttatttttattttttatttttaaatttggaaaacgatatttgtaatacaaaatatgtgttgtgtcattaaccaattttacaacttcattttttaagcaacaattttacaactttgttaacaacaaagatgtatgtttgatagcacattagatttaaggaggcaccaaagagcaatta

SEQ ID NO: 4637 - DNA, 1403 bp, Medicago truncatula
  Intron number 2 from transcript Medtr3g029580.1 (locus Med tr3g029580) derived from phytozome v7.0 (chr-ID MtChr3; po s 7799769 to 7801171 reverse strand)
actgttcgttctctgctaaagcttcagatttgcaggttcgaagtgggaattctgtggtctacaatatatctgctgacttcagcaatcttgataaaatacaatctggaatgcgtatttttcgcttggatcaaggtcgggtctccaagttgtctggttatcacaattacatcaggttattttggccacctccagagtggatcgtcaggctgcattcacatccagagtatgttctcttgcatttaaatgtttataatgtgatagtggtggtagtgcattattgtgcttagtttctgtagttagattgtttaaactttgcaactattactcatggaaatatgaatattgaaataatattacattttgactcaatttttttaactccttggataagttaaaattggtacctggacttcaattttcttttgtgagctccttaatttaacttttccatatatacagttagaattgcggtaataatcctgaattctaagttcaatttactgttaaatgaacatgcttataaaagtgaagtttaatgaaggaacttataagcataattctagctgtatatgaaaatgttagacgaacatagcataataatcatgtgatatacgttgtatgacactacattgcttactactatcattgtttcaaatttctggtagatttggaacttactaatagtgtataacgaattgaatttatattataacaacaacactctgagaataaatttctttacagttgcttacaataactgctagcaactaacacaacctctggcaattggagagcctagcctctctcttcaacctaatcaacataagaacaagggaatccccatcacattcctacccttattctaaattaaaacatgcaattaagttaaattgggacctgtaaattgagatgcacctaacacaacatttgtaactgaagacctactaacaaatttcttcctacgagtgtcggtaaatattcccaattagttatgctattgaatttaaattgcagatgaaacaattttttgtagttggatgagtgctcttaatattgattgtccttgtgatagtcatgtacaatggtgttatacttatgctaatagtggtggattgaaaatagagcttagttaaaagaatgtagactaggtaaactctttttaaatcttttttttctatttgtcatgttttattgcttagactaggcgttggcatgttgcccttacaataactttgcatccaaaagtttgagttttataatctttgtatacattgttggttatcactaagcacatgtttgcagcgtttatcggttatatttgcgagttactacctgttcatatttaacctttccattcttcttgtgtaggtattgaagaattctaatccatcatttcattggtt

SEQ ID NO: 4638 - DNA, 1097 bp, Medicago truncatula
  Intron number 1 from transcript Medtr4g012200.1 (locus Med tr4g012200) derived from phytozome v7.0 (chr-ID MtChr4; po s 1984459 to 1985555 reverse strand)
tccttgctgctagggttttagcgcatccttcaaaggtaattcaatatctcctttttcgtttctaattcacatatccatttcgccgattcatttctgattacgcagaatcgttaaaaattagtttctttttgttttcatttctgattatggtatgataatcatgatgaaatttatgtgcctgtttaattgttattctaaattttgataacgtgttaatcgtttatgattttggtattcgattatgctgtgataatctggtgaaatttatgtgcttgtttaattgttattctgaatttagatattgtgatgatcgtttatgattttgaatcggtagttttttatttgatatgaaaatttttgggatcgttattttgacctaaagttttctgttgtgctgattgatacatatatgaatatacatgtatataatgttattttagcatcgtttatgcttgttactcttattttattttaattttgttgttgaattctgttttctatttagtctccttcaaacttgaacgttagaaattttgttgttgctcttattttgtactcatgtatggtcttcatgtgttgatttggctcatcgtttgtgattttaacttgaaggaccaagggttttgtattttcaaacgtgggtttcttttatatgttgttattttgtttgattattctgctgaaatcttcattgctttgattttggtatgaatgttatctgttgtgatgaagatgtatacagaaatgcgtgtgtgatgaagatgttctttttgaattgctttatgaatgtttgtgtttagaatattatcttactgaatgtattatgctctttaaacttgaattgttgacctggatatcatgaagtatgtatcagaatgttgctgttgttgctcttatttaataaattaatttattgtttgaaactctgaatggctgatcatttgtgattttaagacacatgtctttatccttgtgtcttgatcaattgatagtttaccgttaatttccttactttttctttcttttgaagtatatacttatgttgttttctttgttgaatttgcagaactttttgtggttttaaacttttaaggaca

SEQ ID NO: 4639 - DNA, 2036 bp, Medicago truncatula
  Intron number 1 from transcript Medtr5g044610.1 (locus Med tr5g044610) derived from phytozome v7.0 (chr-ID MtChr5; po s 18554192 to 18556227)
ccatttgtttgggtgtaaggttgatctgtctaggtgtaaggttgatcatcaaagtctcttttgccctagacatgaaacaaacctttactcatcttcctcccccctccgtcatcttgtaccacatgtttagtattaggtgtttaataaactagcattaggtgtttaacaattttctgtataagcttcaattttaatataaatgtattatgaaagtatttatatatttataaaatgataatttgtatcatgtttttgtccttactttcctatttatttacatttttttgtcattttcaattatgtcatcttaataacatacgtcacggttgttatgaaaatatggacaatacaaagattcagattatataactgaaaaattcctataaagtggtttggattatctgagcaaatgatattttagggaaaaaataaggcgcgtgcgaaacaactagggtggaaaaagtaatattcgaaataaatactaatgaagtcattccatgatcctaagattgggcccaagagggccatttaagagaatttctttttaggacccctgaatatcgcttaggctccccaaaattccatttttattcattatatatatatatatatatatatatatatatatatatccggtagagcgtcccgaagggttagacagttatctctcggagggttagggagttctctccagatggttagagttatctcccatatgactttgttttatgagaaaacaatgagcaaattgtcagttacattattttgatgtttcaaagtttccaaacgaccatatatgctctctaaacctacttttcacccaattcttgacgttaagctatgagatttatttagtagtgaacttatgtatttggtttaagtaatttatgacaaacatttgtactttgtttaagttcttagtttgttaacataatttgttcatttaagttcttttttttcccagttgttatataacatatagcaatattaatttgttgacaataaagaattgggtgaaaagtaggtttggagagcaaatggggtggtttgaaaacttagaaaccaaaataatgtaatagacagttttgctcctgttctgtcatataaaatagttattcgaaagataactccctaactctccggaagataactccttaaccctctgggacatgtctacggaactatatattaggagtgaaaactgaattttgaggggcctaaaagatatattagggggcgtaaaaagaaattcttgtcatttaaagataattctttgaagtctggtgactccaggggtggatctatatcatgttcatgtgtggctatagctacacatgatttttttttttttttttaaattaattaatttttttagtgaccaaattttagtcggtaaggcatgaaaatcggtcgttaattactttagcgacaaaaatagtgattgaaaattcattcgctaaggtaaaaatcggtctctaattcgcaagcgacaaaaatagtgatcgaaaatttaatcgctaaagtataaaatattaaaaatggatcgttatttcagttgcatttaaccacacttaagatgtattggtagatccttccctgggtgactcgggtccaaacttataagtttttgtgtaagcagatgttatatttacatatgatataaactccttaatttgttatatttacatattattaagctgggttgtataatttgatctctcatagacatttatctttttaaggtgttttcgaatgtgtgggtcaaaattttttttgaactgttgtttgttgccgtaaatgttataaaaatctaggtccttaatgaaagaaaattactcatgcctatattaatgatgtgagtaaaccttcttagttgaattttctgaagtaacattagttcgttataaaaatgtgtcctgcaaaacatctaatagtaaatatgaaaataattacgtacttttgttagcaaataattacgttttcatccaatagtgctgtttataagaatattgatatttggtcattttcagtggtga

SEQ ID NO: 4640 - DNA, 2629 bp, Medicago truncatula
  Intron number 1 from transcript Medtr8g101580.1 (locus Med tr8g101580) derived from phytozome v7.0 (chr-ID MtChr8; po s 22071279 to 22073907)
tgtcgtggaaggataagccggtggtgtgggccagtgtatggaggccttgaggtggcgctgacgtggcatgggtgattcacacgtgctctaaattttattggcacgtgcgtttgggattcatcattggttacttgagagtaattttcactgttatatgggttcctttttctttgatcaaaatatataagtttggtaattaatttaggggagtataagaggattgattaaagggagtttgcttgtattaaaaaaggaattaacggagtaaaatatttttttgggttacattctatgatttatttttatttttgtttacataagcattctatgatttatttttatttttgtttagataagaatagggtgtggagtttgatatttaatttgtatggattatgtatattataaatgaattttgcatcttaattttccgcgtcataaatattaaattttattttttgaaggtgaatgtcatgtcgaggaatgctaagaacaatctacactctctcctatctactctctcaatattaatttggtgaggaatgtcatgtcataaatattaatttgtttttgtcaataagaaaaagtttatgtgagttgagtttgatactcggtagtaaaaatgttgtgtcatgaatgtttgactcacattccttaaaaaaaaaatgaatatttgactcacatgattatcacgtaattttttttttttaatttttgccaagattatcacgtattaacatccaaaatcaaactaacaaattataagcacattatcaattgatctgaaattataagcacattatcaattgatctggcatatgataagcttaaaattttggatgaaattctatcatttagtattgttactttgattttagttattatattttttattaaaaattgaagtaagattaatctagttttgatttcttctaaaaaaaatatttttttatttgttaagattgaatttaagaatcggatctgatttgaaatttaaattagaactatcaaatatgaaattataggattaaattaattatttgatcggataaaaaaattgaaatttaaaataaaagattttaaatgaaggttaacatttgaaggaaaaaaactacaccaaaacttaagattcacttaatttattagaccaaccttcttgaatctctcataaccataaatattagtgcatgcaacatattatttcttttcaaaatttagtccatgcaacacttttaacctaaaacactatatccaccaaccttgacaaagtgtatttattttcacaccatgataaaatacgattgattatattaatttaattattttcacaatagcagttattaaattatagtccattcaaaaaaaaaaagttattaaattatagtaaatatggtttgattttcaatgtgtagtaaataaataacaaaaatatatggatataccctctcaaaaaccaaaagatatacagaatacatacataaaatcttatctttaaggttaatgtgagtttaataaataaataacaaagttttgatgaaatattaaggttttgagtttgagcctcacctcaccacacgaatcttagtacggtaaccgagtgggtttatgattgtggggaatccatagaaaaggcattagtccttagtgggcagcacgttatatgtttgagatggactgttttattagttgccaaaccaagaaaaagtgatgctctttaaaaaaaaaaaatctttcctttctttcttttcgattcttcccatcctctccaagtctaaaagtctatcatcttttatatattaccacataattttagttaccctcttcatgcccccacaataggccctaacgtttcattgaagcaagaattttatatattatatatgttggccatggagtcccttttgctcatgaaagccaaacaattgtaattaagtacatacaattttaaaaaaattattaatagtgggtacatcttttaaggggttgttgcatatctaaaaattgtgatggtatttgcctcctctaacataacatatcaactcttcacttttgcaccttttcccaccctcaagttataaaacaatataattgctttgctttagtgtatttttaaagttagttttatgcatgctggcccataccttctacatgtgtaagctttagtctctttttccataaaattgacaacgaccagcttatgccttttatgtttctatgggaccatattcttgtagaaagcttactctatgtgtttattttccaacgcataagtacttcagggttttgtctctctgtctattttttccattttgaaacaaaatccccacatcctcaatccgacaataatagaatactttcattttgtaaatttcttttttactttttaataacccatggtaattaggtttttaacacccaatatggtctcacatgtatccccataacttaaatcacttgaactcgctatgaaactaatgagcaagtcgaactcaaattatttttgtggatgaatgtcattttaccaattctcccaacactatattggtagtttcattttattattttaataatataaatttaagcaatacttgtagttatttgttgagggaagaggtggaacctggagggt

SEQ ID NO: 4641 - DNA, 1072 bp, Medicago truncatula
  Intron number 1 from transcript Medtr5g076640.1 (locus Med tr5g076640) derived from phytozome v7.0 (chr-ID MtChr5; po s 28062045 to 28063116)
tccaaatccaaacatttcatcattacctctctcatgtgagattgagtttgtgatcaatttgtattatgttacctaatggtcaatgatttctctatagatctactcaaagatgcaatagtttttattcatccttatgtctgatccttatgtgcagatctgttttgtggttaatcacgcgcctgatctatatgtttcaatcacatcctaccagatctgtttctatacattttatgtttaaaatttaaacccatatctgcagatcttgtttatgatgaatctgaggaagaagagaagtacgattaagattctgaaactttttttctttgtaaactcataaccaaaccaacccacatgcaaacccacacaaccgcataaatcgccatccggccaatccaatgccataaacagtcaggattggttttgagatttttcacccaaaatcgaccgaatccgtctgatgctctaccgtagctgcaagtgtcaattcacctggtaatattttttctcttatattttaagtgtcgttttgaaatagtttcacataatatatttaatattttttcttaaaccaaatataaaattgtttagtttgtttatttaaactttttttttaaactcaacttaaccctaagaaaactaagttatttgtgcacttggtccttgatattttgggtgatttttggttcactctctttttatttttttatttttttatttttttcgggtaggtccgtataatttaagattttaattgttttaattcttactaacttattttctctaaatttgccgggttatatagatcttattatagattgagttatatgtataatattcattgggattacacctccaatagttggtcattgaactagattccgatttttgaaaaagaaattaaaatattcattaaaaattcacatatctcataaataataaaagaaaaaagattactccaattataacccaccatttattaaatgaattatcaacatctacttaaaatataaaatcaataaattatagttgtgtaagttaaaatattaaaacacaatcacaaatcttaggttcc

SEQ ID NO: 4642 - DNA, 1123 bp, Medicago truncatula
  Intron number 1 from transcript Medtr4g125430.1 (locus Med tr4g125430) derived from phytozome v7.0 (chr-ID MtChr4; po s 29576866 to 29577988)
acataaacccttctactgcaaatcaaaatcaaaaggttacgtttcttttctttaccataaaaatgtaataatgtcattcattcataattactattattcattcttgtgatttggtctctgttgtcattgaaacttgatatttcaatcgcctgattttgaatctaagatcacgactttccataaattgcaccatttttttcactctgtaaatgattttgaaaaccacaattttctggtttatgatcgtcctttagcctttaacacgctcgacatgtccggctcaataattttgcgaggtttaaagcaagatttaatatgaccttttttgttaagagatctttttaatgaaaagtatttttttgtaggtaggcctaaagttagggatttagtagccttacccatgagtattattcaacaacggcagtttttttttttttttttttacataaaacatgttaacattactaaatttgaaatgtactactattacattggtccgagtgaaaaattaggcttggatcctttaagcaaagtttgagctttttggatgaaaaaatgtggttgggaggggagatcccacgatgggtggccagccagattcctcgctagagagtactcagcaaagttggttgatatttcgcatcaataacattgttaacaaaaaaaaaaatactaaatttcaaatttaagggttttgtgacaaactcattttttagtagtcacttttccctaaaaagtgaacatgtttcaaacctgtgtcaaattcaatgtgtcatttacattgtctagagtttataaattttagtggaactcattctttgtaactgtcaataactgctgatcaaagctatattaccttttgtttttcttgtcctatattcttggaaatgatggctgccaacttgtcagcaaccaatttgattttcttgctttcctcaatcctcaattgtcttttcttgtctgtgctcatgttctgaagcaaccaatttgcaactcactttttgtatatataaagtttgctatttcttgttaaaaaatctcattctttttgtagcactaacacttttgaattttgattttgatttcagaaattttagaaagtagtataaagcattgtgactag

SEQ ID NO: 4643 - DNA, 1911 bp, Medicago truncatula
  Intron number 3 from transcript Medtr5g093050.1 (locus Med tr5g093050) derived from phytozome v7.0 (chr-ID MtChr5; po s 36532430 to 36534340)
cgcgtgtggggcttctcttgttcccgtattctgttgtgtgtggcttctctgtttttcttgttctgctgcgtttttgttgtgtttttctttgttgtgcaggtctctatttatagagtgagtttgaggctagaatttgttactgatgagcacaaaatcagtggcttgtggaggagaaaaaaggaaatgcgtctgtttttttactggatttgtttcagatgaggcatgaactggattttggattgggatggaaaaggaacagaacgtgtataaggattgagatgaactcggactatttttggacttattttggacaattttgggattttaattaaaaggaaaaaaaattaaataaaaataaaaggataatgtttaaaaaagaaaaatgaataaaagaaatttaatctaatcttggactaaaattaaaattagagttctaaattaaaagatggaaataaataattaaagactgagagaagagggcccgattcggaatttttatgaggtatttcaaaatacctccctgccgaatttttcactgaaatgcgagtctggtccgagttcggagacgtgtgttagtgggaccttaggtcaaaatttggggtatgacaggttggttataattttaattaggggctattgtcatatccttctgtgtataaattttggtggtattgttttggttttggatcaccattatcactttcttcaaccaacttttggattatattcttcaattttgtatcattatatattgaaagagcacattattttcttaacaagattgttgctgtgttttatttttagagagagcacattattatttttaacaagattgacgttgtttttcttttaattttgtttttaggttctatacataacaatacgagagaacattttagagctttgttataacaaagtcatataaagaaatttaagcaattagtttgattggcaacaatatggtgcatttaaaatattagaaacaatattatattttaaggtgggatggataatgtaggaaaattggtagatccaattaaaaatattgtttgggtatggttcttgggcaaattgcaagcagtattttgatcaaacccgtgcaacgcacgggttatatacctagtgtaaatatgtaattgagatgtgataatgatcatgagatttattttgctatcttacttggaatatgagaatgcttgaattggtgaaactatatgatatagttgatgttgagtgacattgttgattattgataatatgttgatgtgtgatgacgaatactatgatttatttgtgtgggcatgttttcttgataatgcaatgttgtggagataatcaatataattgggtgttgtcctatatattgagttgagattgtgatttgttgtcgcattatcgagtccttacacatgtccatgcatcatagtcgttgttgctgtaaaagggatgaatcttttacttcgagattattgtaaggcagaggtgagctttacatgcgatgttgacttgtccatcggaggtgacgaccttgttgagatttggtaccacatgcatttatgtgtcaataagtgcatatcatagcatgagtcctatgtgaaatatgtgattggtgatgaatagagaagaatgaaagttgataatgattgttcgtgattgatgttgtgaatgaacatttatgattggataattattcatgtgattgatatctgtggatatgaactatcaagttgtgatataagtatttatgtatgactattattattcaagtacatgatattatttgatttgattattatctggattatgataatgtaatgcttacccccagtggttttaaccgcctacttgcctgtatgggtgagtagacgttgtgcaggagtagtctcggtgagtctttgcttgggatatcgg

SEQ ID NO: 4644 - DNA, 1516 bp, Medicago truncatula
  Intron number 1 from transcript Medtr6g093660.1 (locus Med tr6g093660) derived from phytozome v7.0 (chr-ID MtChr6; po s 20252096 to 20253611)
ttcccaccaaaggcatttgcagttccttcatcattgtaaccattcccgtggcctgttatccattatcaatgaaacgtgtaatattgttcaaaaatattaggattaataaaacaaagggggaaatgcgcaacacagtccagcataagatgtgacataacctattccaaatacatgatagatggattctcaatgacaatcccaaacatgttcacaaaataggacaataagtaagaagaaatctactgcaacaacaaaaatttactgttcaagaccttaaaaccaaatctaagagacaagaccataccatttaatctccagaatatagaccttaaatttattttagatcagaaaaaaacactcaaattaatccacgagatgtgacagaattccgttcaaccatttacccaacgtttctataaccctatgaattctaaatattgagagaacttaccctcctattataaaagttcagatagatatctttgagattaatccactccataaaataggggggaacctttatccttgacacttcacactgttgagggacctttgtttttaaatcccaatttccactgtaaaaccgaaaaggttttatttaaaagaaaaaattatgttattctagatgtacaaggcaggaaatgaatgtaatattgtaaactacaaaaagaaaaagtatgagagttacaccatgaaatagtggacatttaccaagttacaaatgctgcccggtcaaggttgcctccagtccatagcttttgttgcactaaccaagcttcaaattcttcaataacttccttgaatggtatggcggtgtcatgccaaactctgacaaaaaaaaccattatgataaatcttagtagtattgttatactggttgggtagcagtggcactgttggggacaacagctgataatcccttggtaacccatcatacataataaatgaattttgatgtactatttactcattgtttttttaaaccaaaaattacaaataaccaatcttatttcacaagtctaatgctttcttcaataaaaaaaaagtctaatgcatagatcaaacgcatgcatggagttatactttactaaaagcaaccttaaattacaaatattacatcagaactttacacgaaggaagtaatatggaaaagagttgtatccgcacattagaatctttttgggtttaaattgaaaatgaagactgtgaagattgtttacagttcagcatgtatgaagaagtaaggttctaaagaaaattaagctgcatacctgtcaactccaattttcccgtattttccttctatgtattcatttattctttgttcgctcatatttgagggcctcacgaacctgttagacagttaaaggaacaatgaaaaagtaatacaataagatatgcaaacattgatgattttcacaagtaatttatatttttgaaatcataagaaaataacctaagaaatcacaacatattaatctcaaatatttgagggttcaaaactgaagagcctgct

SEQ ID NO: 4645 - DNA, 2354 bp, Medicago truncatula
  Intron number 2 from transcript Medtr7g009920.1 (locus Med tr7g009920) derived from phytozome v7.0 (chr-ID MtChr7; po s 1990656 to 1993009 reverse strand)
cttttgccaccgttaagcattttccttggaaacaggtttgtctttttattttggaaaattctaatttttacttctttggattaaattatacgcgacatacccaagaacgtttagatgagatacatgaatcttttctagcttaatcaagattctgggttcaaatccaatcttgaatacagtagcagccttaaaactcttaggaagagtttgccatccatttaggtctaataaaacttgagagactaatctaccgagttttgcacgcggaggataccgaatttacaccaaaaacattatactccactttaacaatttaatttaatatgttgttttagtatgagaaagaaaaaatatgaattgctaatttacttcgttaatcgtctaaaagaagagaaattaaaataattagaaaaagatagactaatattaaacattaaggtataatagaaaattaaacattttctacttcattgaattgtaaatatttttttttttttggtacaattgaattgtaaaattatattcagataaaaatgtgacaaattgttttaaattgaatgacatttagtatatgactgggggaacatagcatttagagtttctttggatgggaatttaaatgcttttcaatcaaaatttaattttcaaaatataaataaaaataaacttaaatgtgaaccacaaatcaatttaaataatttattccttattttcttcacaattaattggaaaaatattctttttctatccaacaaatttctttaatttaatttaattttctcttcattttgtccatacaatgtgatgcaaaaccagccaacatgagtcaatttccaatggatcaagtccatatcaaacttgtccagccaagaaataaattgttgtgagtcaacttcaaatatcactctggacccacagaaatgtgtttgcatttaattggatggcatttatttaataaagaaatgaccctatataaatccttgcatgtgatggaggtttatattattggtgtcacctttaattagtttatttattggtgtactttcttcttgctcttttagtggggtgttttatgtcacttttggtattctttatctttgtacattatttccctttttcatcgattgctattccttatctttgagtgtgtctatttgtaaatttaaaagaaaaaatagtttttatttaaaaaaaggaatagtttatattaaataggatatgctaacatgtgctcttaggacatattatgacactttttatattaaaaacacaactattcttcatttacaactattttatttttataaaattattttctttgaaccttatctaaaaataaatatactatatatcactcattaaaagttggaattagtcatgagattgttcttttaaaatatttggtgggctttttctacctattgcggttctattcaacttaaaatattaatatgtttagttgtgtgcagatcatattcaatttacacataaaataaataaaattatttcactcaattgttttacattcaacttatatattacagaacaatatatgtcaaaaaataggaaaatcaacgtacacaatttaacacatgaccataaagaaactaccaaacccaaatacacaacaacgcttcccaaactaaaaacaaaaagttgaaacactactaaccacaaaatatagcacaataaattaagcataaacaaaattcaaacactaacgattggaaacaccacggatgaaaatcctaatataaactacatacattatttatggaatggatctaaaaaataacatcatcttataatagagaccacaatattattcttttattatttataggggtgggagtataattatagaggtatatcgtaaatttttctaatgaaccattttgtatagcctacttattttttgaattaagtttctcataatacgtttttgggcttgataacctaactcccgaaaccttttaaacacaaaaatgttgttcattaaatatctctaaaatgatttctgcatattttcgaggggtaaccttggcgcaactagtaaagttgttgttatgtgactggagtcataggttcaagtcctggaaacagcctcttgtgtaaaatagggtaaggctgcgtacaatacaccaaatggtgggacccttttcagaccctgcatatgcgggagctctagcgcaccggattccttttttatttgtgcatattttgggggtcaaaagagcaactatcacttttttgggactagttgtatatttagaccctttctacataaacccataacgagttcacaacctttctttgcaggtcccattttacattgcagctcaactcacaggagc

SEQ ID NO: 4646 - DNA, 1177 bp, Medicago truncatula
  Intron number 2 from transcript Medtr7g140930.1 (locus Med tr7g140930) derived from phytozome v7.0 (chr-ID MtChr7; po s 34027757 to 34028933)
ggagttcctcctttctcaggttcactttatttttgagtttgaagtttttttttttttttgtcgttctggttcgttcttgtttccaactgaatcggcaagcaatagataccttatgtttgttttgtgtgatgccgtgcagtgttgcctattcatatcattattattgataatttgatattctgtttctatgatcctcaagactgtgatgtaaagcatcaaagttcactgattcctgtttcatcttgattaatatgtactttttgcctttttgttttcttcagagttgaaaatttaatctttaatctgatggatgtagtttagacaaataaatatcaaagactgtttggattggcttatttttgagcttatgcaaataaataagcttttatgtattattcataagcttgttaaggaagtctatgaaaaaacagcttatgaagatacaattttcattggggtgagaacttatgaattaacataaaaaattatttaactgcataagctatttttcataacctcaaaaataaaccaatccaaacggagtttgttttgttcatggaatttttttcttgtcttgaacaactggtttctgctctgttttcactctttcttcctttaggaaactaaaatattaaatcctgaaagcaaaataaattatgtttgattgtatgatgcctaccagtagtgattgttttgatctctcttttcattcccaacacatcatggataagccaacttccaaattttaaatagaacaccaaaaagttggtcgttcctttgaattgccttgaaatttctataattgagatctggcttctgcttgttttgctcccaaaatgaacgaggctttcatatcctcataactcataagtgctatgttattagaaatatgggtgtaactttatgtgttttgtgctgattgtccatcatatgtgctattgtcttatttgccgttgtctatgttgcaattggtttaattaacagtgttgagatgcacaaatttatatctgtacaaaggaaactttgacttatattttccattgtttgaaactggctgctattagtgctgtattgtgaatagtaggatttgtttaatttaaaattactatgcatgcaattatcttggtctgatgaaactgacctttttaacataaataagcagaatatcctcagttaa

SEQ ID NO: 4647 - DNA, 761 bp, Medicago truncatula
  Intron number 2 from transcript Medtr2g085680.1 (locus Med tr2g085680) derived from phytozome v7.0 (chr-ID MtChr2; po s 19371879 to 19372639)
aatctttggaatttggtgatcctctacgagtaaaggtattatgcgaagaattaacaaatttcatatttaagagtattcattcatagtgtttctgtaacatatgcagtcctttaaatttatattgatttttacttctgcgaatgtttcgattgataagattttggaccgttctaatgggtaacaatttagctacttcatggagtcctttaaattgtatatcattgttgatttgagattaagaaatttctttcttatatgattgattcctcttctcattgaaattcctcatattcattgaaactactttgaattaatattgaatttcatctgatagtttatcccatgaattaattaaagttggatgtatgttttccaactacatgaattccaaagaatctaacaacttaggtgcttcactgagtaatttcatctgatttgggacttacacattccataatttccctattgatataaggggttacatcccttgccgagacattgtatagcatcatgcagttccttctttgatgactgatcgctttttggtatatgtaccttgatttctgtttctcaattgttactgtaaccacaattctgtttgtcttgtttggttgcatacatttatatgctttcttgtgttgactttgttgaaaagttgcaccttgatgggccagctttctagttgctatatcttgtttttgtagtctcttcatttatcgatattgtttctgatttggttttgttggatggctgtaatacag

SEQ ID NO: 4648 - DNA, 810 bp, Medicago truncatula
  Intron number 2 from transcript Medtr7g096590.1 (locus Med tr7g096590) derived from phytozome v7.0 (chr-ID MtChr7; po s 21641207 to 21642016 reverse strand)
caccctccggccaagtgacttggagctattacaaggtactctatttattatatttacgaacattccttgtcaaaatttgtttaacttttctaagagcgagagggtcaattagagggataactacatagagtttaatgattatatacagagcgttgataagtaggtagacactcgagcatagtataacggaacaagaggagctgaaagtgtaacagagatttgtactttgtatctctagttcaatgcataataataaaggacaaaagtcaatttgttgttgataaacataatttgccgaattcagtgattaatcccgttctcttgtgtgttcattttctaacttcaaaactggatttgctattgtaattgtatcttaccagcaatattgttagcagaaaatgcaaatcgcaacaatgaaacacgaccatttgtttatgcaattcagccaattgtgcctacctctgccactatagagcagttatagttccgtatattacttgagtgaattagggtttaccatcttacaagtcatatattcactgcagtccacattacaaatttacaacaatagtacaatattaactagttctagtttcgcaacgctatgctagctcagctcccccgtcccttgtccctcttttgtgtctatatatgagtcatactcaacaaatatctataaaataaaacataaatacatgattctgtaaaatttctattacaactttctgtaaatagtcttaaactatgaaaattgaaatgaatgtttgatatggtgtatgaaatttgacttgttatgttgtgtaataggtg

SEQ ID NO: 4649 - DNA, 2203 bp, Medicago truncatula
  Intron number 4 from transcript Medtr5g098320.1 (locus Med tr5g098320) derived from phytozome v7.0 (chr-ID MtChr5; po s 39197236 to 39199438 reverse strand)
gaaggatagagtatacgaacttcattcttttcacagtaagtttaatatcttatttacatgggatattctgttgctggtttcgcccaaactgattattgtagtttttccatcatcccttcacattttgcaattatgattttgtgttaaaccaattttgagtacttctgcaattttacagattactaatcctcttaaaattgtatttttttttttttttttgacaaaaaaattgtattcttttttatttctttctttttagtatatataccattgtttatttcaatatatgtttttttttattgtttcagtcttgtggttgctctaaactggtaagagagtaaagtctggtttagttatattttatgtttctttggcttcagatgaatttgcttgattcttatgaagtttcacttgtatgatatgatgagccaagccatgcatttagcataacattctgttagcaataggactcctaagggcagaagttacagaatattagtagattgtttatttaaaattagtaactgttacttatgtgcagtatttgctgtctactaaacttctatgtaactgctataggagagagtttgtattataaataagttgcaaaggaaaagaaaggcattcagggattgggataaaggatcggtagggagagaccaagctctcgaatacttggaggggagagaaccaagactctcgaatttcttgggattatattgtaatcttactattagtttatattttgatatcagttcctatcaactggtatcagagcaattctgatccggagcaagaaattctcaatagagggataatggacatgccaacatttgacggcagcagtgatgcctattggtggttgatttgtattgagaaacattttgatgttgtgggaacaccggagggtgagaaattgctggaggcggtgaaagtattgtgaaaccgtgctctcatatggtggaagtggtggagtcgatgccatctacatgcgagttggcgaacgtttcatgttgcactactttggcattttaagccagagtatagagacattctacctatatctgatgaagatgaggaatctgcattggtatgggagtcattgacgtctcacacgttcagccttcatccagaagaatctgaccaaggaaattctgctctcattcagacaacagaagaggaaatcgaggaaaaggtagagaacttagaagaaagttcctctgtgaatgtcatcaatgtggaaaagcaacaagagaccaaagtagatttgtgcaaatttcttggtatcaacaaactatttgatgaacatggcgtgagtattgtgttcgaattgagggtgggattgcctagaacaactaccggagagggatgggtttcacttgagttggacggccttccagcaccgccgtcaccagatccaaacgcgtttgcggtgaagggtggattgtcctctggtttgattgaactggcactattcttattgctgccactttcttttggatcaaaaataccaccccaaaatagagtgtttgatccatgcattagttatcaggtttcacgccttgctctgtcattgtacttcaagttttgggaccctggtggacacttatattatccttcaccttgaggacaaggtgaaccttgtatgatatgatgagccaagccatgcatttagcataacattctgttagcaataggactcctaagggcagaagttacagaatattagtagattgtttatttaaaattagtaactgttacttatgtgcagtaattgctgtctactaaacttctatgtaactgctataggagagagttagtattataaataagatgcagaggaaaagaaaggcattcagggattgggataaaggattggtagggagagaccaagctctcgaatacttggaggggagagaaccaagactctcgaatttcttgggattatattgtaatcttactattagtttatattttgatatcagttcctatcacattcttttttattttgtttcctaataagtttgtgcgagtgaagcaacatcttgtttcctaaactcaatatgtttactctgcatttagaagacttcattctgtttattttagcatactttggttcatttccttcgtagcaacatctttgccttctgtattcgagtccatgcgtatgcctacgctaatattatttcctttggttttccag

SEQ ID NO: 4650 - DNA, 6613 bp, Medicago truncatula
  Intron number 2 from transcript Medtr2g113720.1 (locus Med tr2g113720) derived from phytozome v7.0 (chr-ID MtChr2; po s 26713942 to 26720554 reverse strand)
ggacgtacctattaaattattctctgttttgtttttctttttccactttatttctcactcatatatgatcatcttgcaataatgacatgtttggattgacttatttgcgcttaattgctgacataaacaattgtgagactgtttgagaatttttttggaaacaacttatgacatatctgtaggttttttttgagaggtcatatctataagtggttttcagtttattttcataagctccaaactaaagcttatgaaactgtttgactttatttaccttttattgtaaaaatagctaatgcataagcattaacatgacaagcgcttatgatataagtacttaattaagttgtttatccaaacatagattttccctgttttgctatgtttaatcaatgtagagtgtcaacaacaacaaaaaaaagtaatgatatttatgcatataccagtccacacaaacaaactcaaacaatcaagttattgtttattagcattgaggttgtttttaattagtgtcaatacatattttcttgtttgtaggcatcaaatattatatttgtagaccaacccactggaacaggtttcagctataccactgatgatagtgacgttcgacatgatgaagacggtgttagcaatgatctatatgatttcttgcaggtaacttgatctgttaagtgaataaagaaaataatatcacaataatatttgaaatgattactttatttattgaattattcacttgtattaagtggttaaacttgattcacattacataaactctaaattgcaaattttatgttaaactctaatgttgtgcatacataagattctctaaatttcacaatgacaggcatttttcaaggaacaccctcagttcacaaagaatgatttttatattaccggagagtcatacgctggacattacattccagcttttgcatctagagttcaccaaggaaacaaagcaaaagaaggaattcacataaatctaaaggtattattattacattgtcatataatgtaactttatattcatgcaaaggtaaacttttgccaaaacagtatcaatgcaatgtaaactaatttgtaaacctttataataaacagggttttgctattggtaacggattaaccaatccggaaattcagtacaaggcatatccagattttgcattagacaatggactaattaataagaatgaacatgccaacatcaacaagttgttcccacgatgccaaaaggctatagaatcttgtggtatgacattttaataagttttctcccttctcggtcataaatagaacattttaccaatttgttgtgccatttacttgttatttttccttattgacactaatagtttgtatttgatttgttaggcactaaaggtggagacgcatgcatgacttcaagaagcatttgcagtgaaatatttgatcagataatggacatagccggcaacattaatgtatgatatcaaaaaagaaaagaactaaaagtatttgacaaagattgtatgataattatgttgtttcgattcactaatgcattatgtttattcctaatgcagtactatgacattagaaagcaatgtgagggaagtctttgttatgacttctcaaatgcggaaacattcttgaacatgaagtcagtaagggaagctttaggtgttggggacttggaatttgtttcttgcagtagcacagtatacagtgccatgttgcaggattggatgaaaaatcttgaagttggtattcctgctcttctggaggatggaatcaaggtgcttgtgtatgctggagaagaagatctcatatgcaattggcttggtaagttcgattacttttttggtgttagtccaccagttcccaaggggaaccgggcaatcaagtgtttgggtggaaagtaagtaaagttctgcaataaatctaatcagaatttgaagtccggctctcttaaataatttgtccttaactgaagcacattaattataagtttgattaatttgaaaccaaaattgcttgtgtcaaaatagaatacacaaatatgttggttagatttataaatgtgtttctcattttggcagggaattcaaggtgggtcgatgccatgacgtggtcaggtcaaaaagaatttaaggtgtctcctacgaccccatatttggttgatagtgaagaagcaggagatctgaaaagccacggacctcttgctttcctcaaggtttgtgttgaaggatgtattctttagtgtattagacgattgatctatatagcactgacacttcaaactaaatgtgtgtttggttttcaatgcatgattcgacatcgagacaagcatttgcattcgatcatttttattttctcaaattgttactgatgtttacatgtctcactattgatattgtatcggtgctctgtagttattgattcgcctgtgtttaacttccttatttttttaacaataggtgaaagaggctggtcacatggttcctatggatcaaccaaaagctgcacttcagatgttaaaagattggatgcaagggaaactgataaggacaaagggaggagataatgtctcgtctatataatgcactcatcttaaaacaaaaatcacattcttatcttattgtatacacattaatggcatttccttgtgaacattggaaggatgaataaaatacatttctttttccccaagtcactcaattttttggcatttttgctcctactttttcttaaattctcaataccaattgattagactatgctcttcatggttttctctacacttgtagagttataaacagtgattggaaaatcgaatgtgtaaacttcattacaaatgtcttcaaattttactattacaaacaaatcaacgagatacactataggcaatgaataagattaaggctcactaactaatttacggttttgtttgtttttagtttgtgattagttttctattaatctttttcttatataaaaggagtatcctcctccttcacttaggttgtaatcatttttctattttacaatgattcaataatgaatgaggtgcactcagtttatgattaatagacataacaatgggaaaagggaaacagccaaatgagctatagagagttttagaaggaaacggaagaaaatgatgagaatgattcaaatgtccctccagaacaaaaacaaaaaaaaatcatttataccatgcaaatctacgaatgcaaatgaaaagttacgaaataattcaactaaatagatacgttaccgtgaaagaagagtatattttttaaccatcttgttggaggacaactattctccttgacacaacataatgaagtttatttttttcttcaaaggaatcctctttggtataacatcaaatgtcttcgacaatataataccaaatatcttttctaatagaatcatcattggattgttctcatacatcctcgacaaaataataattagatagaatatcttcttcaaattatccgctagactcaacaaaatccaaagtttcggttaagacaacattattcgaattgtctgctgcgactcaacagaatccgacgtttcggctaagacgtcattttttatgtcatcattagatatgcgaagtcaccacgccaatccatcagagatctagaccaactaaaatgtcaaaacttggccaacacttctccttcaagctagcaataactagtaaaaattgtcaagctcgaggcgaggaaaacggcggaaggtcaaggaaacgtttctacaattacaatctcggttataaacatcccagctcctcacgtatctctcaatcctcttatgatagaggcaaatgtaaacgattctcacattacttacctattattttacttttcttgcttatatacttgaacgtcagaatatttacatgtgcaatttccgtcaattcatacgaagggatgttggaccctttcccacggatgaaatctctagatccaattcggatcaatcatcaatgtgttttattgctactttattgcaatgcatcttgaacttttgagtacttgtatcatatgcagtttgttgtttttagattttcaaactgttgtatttggatttccaaattattattttttaaataagaataactaccgaagttgttactagattgagtcacgaccatgtcgttctctttaagacgttttgtggcactgttcaaagttgtgcaaggcaaactatcaaccacgccacctcctggataaaacaagtccaactacaactgtgtggttaactactatagaaaaccgttcgagatttacactctcaaatatggttaccaagaccactctttaatattgaaaccactttaatatgatattgttaccactttgtaatggtgttgagaccactcaaatatgatgttacgtccattctaactttaagttctccaaactatcaagatgatactacgaccactcaaatatggtgataccaccatttcgactttttaatttcacctcaaaaattattgaaagaatatttatatacttttaagatcattcttaattacgacgggacattattgttccaaaagggactatgatattaaaagcactctttattcttaagggagatatgttatcaaaagggctatgtttttaagacctttcttaatttcgaatggacattatactgaatagggactaaggtcttaagaacactcttattttcgaagggatagaaaaaaggagatgaggagaagaatagctcgtcagcagaagctggatggagaagagagaaagaattctcgacaactcaatataaactcttttgtgtgatttttgaaccgagtggagtcctctgtttatatagaaattttgtaattattttagcaaaaattgcggcaacagttattctaatggatagtatcaaaaggaaatttattcattaatcagttcaacaacacttgtggataagataaaaaaagaaacaaatccacaaaagtggaggaaacaaactcattaaatttgaatgaaggaaagataagaaattcaattgaattcttattcttatcacaaccatcataaactaaatttataggaagtgatattcacaaataaaaataaaaattactattatttttattattatcaagtatttaaaattaaataccacaatttaaacactactaatgtgtgtgttctattttatgtgggatccccacactctattttttcaacattagatcaaagtactccctccgttttaaaatataaacaaaattcactttttaggttcattcatttaatgatgtatgtggttcataattatttggtgtttaatcttccaatttttcttccaacatcacaccaatgttccaacacacttgattcgtagtaatggcccacatagttgatacgtaataatggcccacatagtctaattaaagtgactttcatgtaggaatttcgggatactgatcaaaagcttcatgattatttttagttgaatgacacttttatttttagctgaattgaagtttagtagtttatggaaattttctttattggaaaaagaaactaacttttctatttttagtctcaatttttttgaagaaagtctcaaaaaagtttagagttaagcctttgatactcaactcaacttttccgttaatgatgaaactaaagcaactttgcatgcgtagagcaagcactataaattcacatccatttcttccattttttcaacaaaaacaaaacaacatggcatcatctttaaggttcctcaaaatgtgtctgtcttttacaatgttgttgcacttcctcttcttcatttcaccttcgctctcctttcttcaactgcatcccaaaaacaatgacattctcctttcttcaactctcataagaggacttaacctttttcctaaaagttccataaacataccagagaatgatcctcatgtcctccatggaaacattgtggagaagaagttcactttccccggttttgatgactctggttattctgttgaagaacttggtcatcatgcagggtattatagtcttcctcattccaaagctgctaggtaaatgttttatgttgtgtgtgcacgcgcgcttttttttaatgtattttctacccttttttcttttataaagttcaagattattaataaattcctctaaaaaaaaggttattaatcaatgttttttattttaaaagtggacagacagacactaatatgcttttctgtatattatctatccacacatcataataatgtgtgcatggacatatttccattgaacaatttgttatgccaattgcaggatgttctattttttctttgaatctcgaaacagtaaggatgaccctgtcatcatatggttaaccggaggtcctggatgcggtagtgaaattgccttgttttatgaaaatggaccatttcagttctcaaaggacaagaacttgtcccttgtttggaatgaatatggatgggacaaggtagctgctattcattattcccttttcttttttccactttagttctcactgatacataatcatcttgcaacatatacttttttctttctcttttgtaggcatcaaatattatatttgtagaccaacccattgg

SEQ ID NO: 4651 - DNA, 2863 bp, Medicago truncatula
  Intron number 8 from transcript Medtr1g137700.1 (locus Med tr1g137700) derived from phytozome v7.0 (chr-ID MtChr1; po s 30565511 to 30568373)
tttgaagcctcaaaggtgctactattaaacattgtctttttgttgttttaagatttctttaagtatttgctggcgtttaatgtgcagaaatcttataagcatcttggatgttagggcataagatgcttggggttaaaatttgtgtttttttatacaagatttccatattttgtattacctcttagagtactaggcattgtttggcaatagtttatgctactttcaatttctaaaaatacttgtattatttaggaggtacaaaaggagtaatgataagtgcataatataatatgatcttaattttagtgtatcatattaaggaaacaaatcggtagaaataatgggacattaagagatcatttatgtactctgaaaaaatcttatatacaataatgatatcacgagactctacaaattagcacttaaattaagatgaagatggcccggaaaaacatgattgaaaaggcaaccctagggttctagatgtatcttgagggacgagtgtcattggaggataagaagatagcttgaatcatcgtcaggctgaagagctcgtataattgttgcatgacagagtagagtggtacatttgcatactatacatgcaactggaagaacaaggaaatacctgagccaactaaaaagaaaactcaactgattaagtaggaagtacacacttggtttgacgagtctaaaccaaacatggcaaagtgcagcccaagggagccaaacagcttggttcaaggggaactaagaaaggttgaatctgataggagacgcaaaggaaagacagtgggaggccacagtgccaagaagtgcgcatcacacactttctcacatgacgaaggttaaacttacagtatccgggaaccatcacaccgttgctcctgctgcaacacgccattaccttagtcacttggtgggttttttacactagagaagggcgacacgagcccaaattagcggcagacattgcgtgatgtgaaagcagtgggatagagaatccaatggttgaagaaaatatgttttgaggatagatggaaagtagaagtgcaaattagagatagcagtttttgaagaagagagaaatgggagggacattttgatgattagggtggatgcagacattttacttggagggcttacctaaaagcagacttattgaagaaaatgattgaagctgggagagtgtgctacaaaatgtccacgtagtgcacctatgagaagtgactacagagcaaaactgaaacagatctctgttatattttttaacagaagctggatgagtcccactataatggctagcaacatataacaaaacggactagatttcttagttcttacagtacaaagtccaccaagtttgggagagccacgggaattggaagaaaataatcatggagataactagatctttacaacagggtagggcactagttggtgaaatagtgatagtgtagctaggtcattgaggatggtaccacattgataatacatcgtgttgaaattatatagttaaagcaaggaaggaaaaaaagggagagaataatttttgagaaatgggatcttatgtattatgatgtgataccagatacgaaatgcttatcttttttatgctagtactagattcttagtcttgatcaaatcaggaaatatactgtgtccgtggcatatggattccaatcttaagttatcatttaagatgctctaaactattctaagatacaatagtgatgattttattagatgtttatttatgtgctaatcaattccccatgttttttattcagttattaatatattacactaaattatacattttcctgttgctcttataccaagtcataaacctataatgaagaggaaattacactcccccctctaagagaaactttaactagcaaggtctcaaagtaggacaagtgaaggctgggagttgttagtgtcactccctagctatgtgttattttgcttgtgatttgcctagtctgttgattttcaatcagtagttctgcacaatttgtcaagggtatgagggttggaatgataaacatcatactcctgggggactcctagtccttctactttaagtaacgtcaatgcctcaatggtgacaatggaactttgtgaaaacttttttacttgtaaataccaagaaaatactatctaaataaacagtattgaagaataggacaaatataattttagggatttttttgattaaacattagtggaacggtgtaaaacagtgaggggaggtaattgaaggtgtaattctaatttatctttttaattagaatgattttctcatttttctatataatttctaatcaattggtaaattaattatcagtccctgaccacaatctggccagtttggtaaccatccaggtttgctcaataatattcattcttgtttggtcaagtactgtactgttaccatagcagtatagtactgtcaaagtgctcaagaacaattatgtccttaggcatctaagattctcgtgaactggaaaaggcacatctcatcccccagaatgaacatcttagctggatagagggtagtagggcactacggtttcttttattcctctattgacattaattatagtgtgtagtggattctacatatctcattctgtctatcattcttttgttggtgcaaaagttgtattacgtggttacttgatactaatgattagttttgctactgcaatttaaggcacctttggttttggatgacttgtctatcattcttttgttggtgcaaaagttgtattacgtggttacttgatactaatgattagttttgctactgcaatttaaggcacctttggttttggatgacttgtctactgcagga

SEQ ID NO: 4652 - DNA, 600 bp, Medicago truncatula
  Intron number 1 from transcript Medtr3g016500.1 (locus Med tr3g016500) derived from phytozome v7.0 (chr-ID MtChr3; po s 3224565 to 3225164)
atagtgttcaacattgtcagaaaagtcttgttggcaaatttcttgctaaagaaaactctctctgtaacagctgatcataatgctttgacaagaatctgtagtaaccttcaaggattaagaatttctgaaattggagatagtaggtaccaaattctgctggataaagaaagtgatatcaaaagaatattgaaaggtccattaatatgggaagacaattaggagaacaatttggcaaggtggaggatgtggacgtttatgatttccctgacaagccaaaattattaaagtgaaggtgttgtttgatatcagtaactctgtgcttcctggactttacataggcaatgaaagagatggagttagttggctgaattttagatttgaaaattttcctttgttttgcttcaattgtggcatcattggtcatggtgaagacacttgtgatatggaaggtttgaaggccgagaatatcgggggtgatagaatcaatcagaggggtgcctggctgagatccaaaacctagctatggacaattcagtcatgtgcctaacgatttacatgacatgaggaggatccaacggctttagtcgatagaataagcga

SEQ ID NO: 4653 - DNA, 4998 bp, Medicago truncatula
  Intron number 2 from transcript Medtr8g037000.1 (locus Med tr8g037000) derived from phytozome v7.0 (chr-ID MtChr8; po s 7875212 to 7880209)
cagaaagactttgtgaccaagtgaaggttgatcatttcctccacctttgggaaaaatgttttcattttggatcttcagcagcattttcttttccatgcttaaggtgctgtaaggcttagcatcctttgatccatagatagtgttgtttactatctccttccatgggctggttctggggttaggaatttcttctccatcgtatgtcccagaagcatcccttctcatggcttgagcaatcacatgctcattgattgttacaggaatccccatgacgtttgatctaatctcagtcccagtgaaggcgagtagacccatttcttctctggtttttccctccaaagtaggatcaaccagaatcatctgagcttcttcctgtttagcagcaactttgtcaaacactgaagctcttacccagaattgtctgacaagcacttcataagtaggaccgttgagaagactgaagtaactcatcagcttctgctttttgtagaatcttaccaagtcgcatccatgatgagttagagaagtgaaatccactggattttccgcttgaatgattagatcccattcctcaatcgacatagttcttcctttgatttcataagcaggagtatctatatccatatttgatgaagaaccaccggcagaacttgaagatgccattgatatgaagtggttttagggttctaaagtgttttgagaggatgagagaatgcgcttacgttcgcagagggttgagaagaaaatagaaagtgtttgttgtgaagtgagaagtgtgtgaaatgacttagtgtttttattaaaacgtttgtaattcagaggggacaaacaaacacagcattaatgacaaattgggggcgcgtgtaagtacgttaaaaagcgaataaaaacatcattgccctttttgttatactccaatacaaatagaccacgtcagagactcttcagaaaactaccttttgggtaatgggacagctgttacataaagtaactgccaacgttcccactagccaagctattcagaagcaaagaataacacttctgaagttttagtgctgacgtcatcttcagaagcacatttacctcagaacctcagttaagagcttctgatgaaccaaaatgcttctgaataaacttcagaaccaaacttcttattcagaggcaagcaatttttcaatcagacacaaaatgcatgttcaaatttttcttaataaaatcaaatctttcaacagacaaaggttttgtaaatatgtcagcccattgatgttcagtatcaatgaattgtatatctaaaattcctttttgaacatagtctctgataaaatggtgtttgatttcaatatgcttggctcttgaatgtagaattggattctttgacaaacaaatagcagcagtattatcacaataaatgggaatactgttagcattgatctgatagtcttccaactgatgtttcatccaaagtagttgtgtgcaacaacttgcagctgaaatgtactctgcttctgctgtagacatagcaatagttgcttgtcttttgcttgcccaggatatcagattctctcccaggaattgacaatttccactggttgattttctttcaatcctatcaccagcataatcagcatcacagaatccaatcaacttataatctagggatttcctatacaggagtccaagattagttgttcctttcagatacctgaagattctcttgactgcagttaaatgagattctctaggatctgattgaaatcttgcacacaagcatacactgaataaaatatcaggtctagatgcagtgaggtataacagagaaccaatcatacctctgtatagcttctggtctactactgttccagtatcttctttgcttaaggtgcaggttggatgcattggagtgttcatcactttacaatcttctagcttgaacttcttcagaagctcctttgtatattttgtttgatgaacatatactccttctttactttggttgatttgaattcccagaaagaatttcaattctcccatcatactcatttcaaattcatcctgcattaacttagaaaattctttgcaaagagatgcattagtagaaccaaatattatatcatcaacatatatttgcacaatcaaaatatctttcttaagagtccttctgaagagtgttgtgtcaacttgtcctctttcaaaatcatttttaattaagaaattacttagtctatcataccaagctctgggagcttgtttcaagccatatagtgatttcttaagtttataaacatggtcaggatgcttaagatcctcaaacccaggaggttgtttaacatacacttcttcttcaatgacaccattaagaaaggcacttttgacatccatttgatataatattatgccatgattaattgcgtaggatagaagtaacctgattgcttccaatcttgcaactggagcaaatgtttcagtgtaatcaatgccttcttgttgactgtagccttgagcaacaagtctggctttgtttctggttacttctccttgttcattcagcttgtttctgaatacccattttgttccaataatgttcttctgagaaggtttgggtaccagatcccacacatcattcctttggaattgatttagctcttcttgcatagctaatatccatccatcatctgagagagcttcttcaacagttttgggctcaattattgaaagcagtcctattaaagactcttcttgtctaaaatgtgatcttgttcttctaggactatctttgcttccaatgattaactcctcaggatgtgaagatttgtgcttgaatttaggttgaataacctgctgagtgttatcttgaaagtcctcagaagcaatttcattctgtacttttgagctaggttctgcttctgaattagactcagcttctggagtgatttcagcttctggactagattcaacttctgtatacttttcagaatcagaaggttgatcagattctgatgcatcttcagaatcagttgtacctgcattactttcactttgctctgaagttttacttccaggctctctatcatcaaattttacatgcatagattcttcaacacattgtgtttctgaattatacactctgtatgcctttgacctttcagagtaacctaaaaagattcctctttgagccttggcatcaaatttcttcagatagtctttagtgtttaagatgtaacaggtacatccaaactgatgaaagtaagagatattgggtcttcttcctttaaagagttcatatgctgttttctccaacataggtctgatatagatcctattttgaatataacatgaagtattgactgcttctgcccaaaaatgtttagctaagttgttttcatggatcatggttctggccatttcttgtaaggttctgttctttctctctacaaccccattttgttgtggagttctaggagaagaaaactcatggagaatcccatgtttttcacaaaaaagttcaaatggctcattttcaaattctccaccatgatcacttctgactttcaaaattttcaattctttttcagattgtatttgagtgcagaagctgctaaacacttcacatgcatagtctttacttttaatgaattttacccaagtccatctgctgtaatcatcaacaatgactaatccatatttacttccatataaggatgcagtgttaactggaccaaaaagatcaatatggagtaattctaagggtctggaggttgatacaatgtctttagatttgaacgaacttttcacaattttccctttctgacatgcaccacaaagtgcatctgaatgataatcaatgttaggcaatcctttgaccagttgtaacttgctaattttagaaattaatctccaattagcatgtcccaaccttttatgccatacccattttttatcattcattgacagaaggcaaactaccttctgatcagccagatcagagaaatttattttatagacattctcaactctctttcccttgaatgtaatggatttgtcatccttgttgactagtgtgcagttggtcttactgaacgttacatcatacccattgtcacaaaattgactaatgctcaataggttatgcttcagaccatctactagccacacattattaattgagatggaggaattaccaataatacctgtaccaatgatctttccagtttggttgccaccaaacttcacttctcctccatctttcattgtaagggtaaggaacaaagctttctctccagtcatgtgccttgaacatccgctgtctaggtaccatgacctttgtttctctcttgcccttaagcatacctgcatttttggccaattcagatttaggtacccatatcttcatgggtccttttgggttagctttggaggttttacttttcctcccttgtaccttagggtgaatgctgagtggcttctgatcattcaatactttaggtttgacaccttttggtattgttttctcagaagcagtagctgctttgttcttctgatccttttgttttggaattttagattctggtttaatcagattctgatgaacaggttctgatcttttcagaattttaatcttttgactcttaggatcagattttgtcattaccttgatcttaagattctctggctttgatgtgatcttagcctgtgaacctgaagcttcaggttttgactgaacagcagttttagcatttgtaccttcaggcacaaaggtggatttcaatccatccttgatacaatcacagtagctcttgagactgtattctttggatttctcctcagaatatccaatccctttgcctttgttcttgtatgtgctgtagatcatagaagcaactttgcttctgtctattccagccataataaaatcatccaaggcaatctcatgtttattgcctgaacctttatcacatttttcttgtagcttctgacaaagactcttgagtctatcttcat

SEQ ID NO: 4654 - DNA, 1159 bp, Medicago truncatula
  Intron number 1 from transcript Medtr3g101170.1 (locus Med tr3g101170) derived from phytozome v7.0 (chr-ID MtChr3; po s 24459739 to 24460897)
ccggttcgaaataaaattgttaactttattttgaagtctactatagttgtttttaattgaaaatcatttttaccaactttcgacctgtctttctcaaaatacttttcagttttttattttattttaaaatgttcatttttaaattgttaacaatgagattgaagatattaatatgattttaagaagtcaatattcattgtaataatttaagtaaaaagaagatgatatttgtatcatattttttttcttccttatatttaagatcgaagagaagagagtatttatcataaggttgagatatactaattgttaattagagataactaacttcacatttcaaatacaaacaaattctaagatgtttgcttcatagattgtaaatttattttagaatgtgacattgggaatcaatgattcccatatttgtttcaagttttcataagttatatctatgtatattttattcttaagaataaaatttacacatgattttttcacttgttattcccatgttaaagtacaagaatcttttattcttatggaaataagaggtaaccacccatgactttccactatcacactgtttttaaattaaatatatttaaaaacattcttgggaaactaaattaattaccacacactttaataggattaagattcacaagaataatgttttaggaaatgttattctcataatcgtaaatttaatccttcaaccaaccacaccggtcatatctaatatctatgttaacatttcaaaggtagtcttcaattaataatattctcatgaaagaaattataatgaagagaaattgtaatttctttttttgacaaaagaaatggtaacttgatgaatttagttttatatttcattaaattttaaaaataaatagaattaactaataatgtataaatcactattttttctatcaatctagcgaaacataagtgatagatacttgttgctccttaatcatttgatttaaaatttgatcatcgatcactctttataaaaaatatatgttggtagaagtcgaacctttaaataaaactctactgtttattttgagagaattagtgttcgcagttgtagatgaatgatgcttttctttttatagactacttttgcttatatagggattgacaggaatcattgtcg

SEQ ID NO: 4655 - DNA, 655 bp, Medicago truncatula
  Intron number 1 from transcript Medtr5g020450.1 (locus Med tr5g020450) derived from phytozome v7.0 (chr-ID MtChr5; po s 7734733 to 7735387)
tatttggtggttcttcaatattaagctcaaaaaaggttacttactttcttctgaattattagcgtgtaattctaggcaattcattctccttattctaaagtttctattattttatccttaagctcaaagttcaaactgtgtttggtagcatgatgacacatatagtacaagaaaactctatactcctctccaatcaaattgttaactattggatttatcaacctttgatagcttacaatttgattggatagacttataagtgcatgtttggatagtgagtttgataaaattacggtgacaccatgattttgttgaagctataaaatgtaacttttgtcaaaattacagtggttcaccgtgattatgttaaactcaccgtcaatccaaacatgtactaagttatatggcaaattatcatataaatataatagtttttttttattttttattgtatgttgagtaataatataaaaatatattgcagaatatcatataatatttctactttcaatgatgtttgttgaaagttgacctcttctcacttctcaatttaggtgatgaaaattacttttgttttactctattgaccagagtattccaaaataaatttgtccttctctagtagattttgttctttcattacagttaaggattc

SEQ ID NO: 4656 - DNA, 1846 bp, Medicago truncatula
  Intron number 1 from transcript Medtr7g022710.1 (locus Med tr7g022710) derived from phytozome v7.0 (chr-ID MtChr7; po s 5731120 to 5732965)
ctttaagccattcttcttgcgcttcaaagcaacaggtataaattttcttactcgactattaggattgttcatattttttcatcaaggtgttgaacatttagtttgttaaaatttagatcctgtaaagatttaaaagtgttaaatgttttgtcgactcgttcactattaatagattgtacataaatgcgtgtcatcttgaagttaattgagatgtctaaaggtctgatgaaatcagagagttgttgagaatctagacgtaagatcttaccggaaattctttagttatgcaaaaggtgagattaactttgttagaaaacaaaataatatttcataatatctcacaatatctaggttacaagttttcgatcttagcatatattagattatctcctaggattaattccgatttttcgtacttgtgattatttgttttcctgattttcttatttatttaggatctagtctacgtattactataaacagagattcgaatttagcattttggatcatacttctctcaagcaactatcaaattgttatcaatgatattgaaagttgttcttgttattttctgtcctctttggtctaaactcccacagcttcgtcatgtttattgcaatagacttgaacttatttgctaatataatttcttgatctaatattcctaggaagcataaaaatatttattttcctcttcttttctgctccttttcttttaccttagcacactgatattgaaaagccttgtgactgaacatggtttggagtcttcgaccaactccaaagtccaaaccgtgttctgcaaactggtgaagcagtttcagttcattattttcctatcaatgttccacttgcgcccactccaaaccatgtttttccaactggtgaacaaagaccagttcaagtttattttcatcctaccaattgccacttccaccaactccaaaccatgtaatgctccctggtgaagctgtttcagttcatgttattcccaaaagtactgttccacatcgtgctattccaagttctaggaagatcgagtttggagattaatatgatgaaagactagatctagactataatgtggtaaccctttttgaatataatgggaaatatgttcctccactcataagttatcacggttgatattaaaccatgtaagcttgtgcgcatagttgttatgataactgcagatagttttagcaatatataacataagggagattcactatcacatagggtttgtagctcggtggtagagcatttgactgaagatcaagaggtcaccgattgggccctttctaatttttttttttttttttttatggtttttctggttattagtatttttattaagcgacatcgcatttatccctcgttataaagcattaattgttttgttgtcttgttcgttattaacagactgtacatgaatgtaccctcttgaagttaattgagatatctaaggctctgatgaaatcagggagttgttgagcatctacatgttagaaaatcttataggacattccttttagttacacgaaatgttaaaataggtttgttggaaaataaaataatatctcataatatcttgattaatctcctaggttcagttttcaatcttagcatatcttagattatctctcaggattaatttccgtatttcttttgtcccaataaaattatcttgcaagcagctttagtccctgctgctaagtcaacatagattttttaataaaaattttcagggttatttagaacattataaaaagattctgtgtatttttgaatgattgattactcatgctgtttcatttattattcttaaattacaggagacatcgga

SEQ ID NO: 4657 - DNA, 2616 bp, Medicago truncatula
  Intron number 1 from transcript Medtr5g022870.1 (locus Med tr5g022870) derived from phytozome v7.0 (chr-ID MtChr5; po s 8926333 to 8928948 reverse strand)
tagtaagtgttttttcaaccactatttaattttttgttatattttaatttcatcttttttctggttcatatattttatgatgttcttttgacatagcaaccacatatgtttgtgtttgttacatgaataaagttcatagaatcacatgggatacttctttttagaaagaaaaagattgggggagagagagagagtatctgaattctttatgtgatctagagaccaaatctttagcctttaattacattatttcttttccattttagataatttttggaattgaataaatttatttaaaaggactaatttgattgaagattattttgtcaaaataattattttaaaattttatttatttcattcatatacacactaaattgtactccctccatttcaaaataaatgtcgttttagtcaagaaaaattgtttcaaaatgaatgttactttcagttttcaatgcaataataaaattttcttttcatttgtagcattcaattaatattttctatttacaccccatgtttttctggttacacccaaattttcttaaatttttttataatacaaaaattgcccttttatataaattttcttagaaccctaattttattcattgtcagtgagtttcaccctcttttaccccacaaagcgatcgatcaaataatttgatgttcaatatcaatctccatgaaaattaaagagtgaatcaaaatatttttcatctatactcaattggatataagtaagtgaatttcttcttctatttgctagtttcaatttttttccttcaactgcaatgatgcactgtacgattacggttttaatttacattggcaaggttaacttaaattcagtttaagtaggttcatgtaaacttagtttacatgaacctacttaaactgagtttacatgaacctacttaaattgagttaacatgaacctacttaaactgagtttacatgaacctacttaaactgagtttacaaaatcgcagaacaaggaaaacacaaaatcagaactgagaacccataacaagaaaaacacaatcgattgaagaacaacacttgctaacctgatttgcttcgaattttctttgaaatcatgaatggacgtgagaaagtatggttttgaaaatcttcgcagaacacaatcgatcaattggagaattatggttttggaagaagggttttggggtgtaaccaaaaaagaaggaataggctttttgaaaatcaaattttatgaaagggtaatcttgtcattttggggtgcaaccatgattaactagggtgcaagtagaaaaactcaaaacaaaatcaatagttgattatgataattcggtaaaataaaattatctttcttttaattaatgtatttcttaatatatgtttaaaccttaaacaacattcattttgaaacggatgtagtataagagttgtgttatattaacaaccattttgttggcaacttatggacaaccttagatttacaaagaaaaaatatgtattgacacgaaagccaaaacaataaaaagataaagttgtcataaaatggttgtacaaatatcattttcattgtatattgcctaaatttaagagattaaattggtaattttttcttctgtcaacaaaaaaaattggtatctatagtctccgaaatttgtacaaaataaaaaattgtgtgtaagtcttagctcaatcagcaaaaatgctgaaattgctatgtttgaacacttggatggggttcgaacccaactcctccatttgtgtgtatgattttcaatgacaattgttatttagtactatctccgtccctaattataaggcccttttgaaaaaataacgggaattaaaatagtggatatttgtattaaatatgtttgtaattactattgtttttacaattttatcctttaagaaagagggttggcttatgttttcaacattctatttattgttgattgaagaaaaagatgtataataaatagggacatgtatgtaaagaaataattaatgtagttggaaatagaaaaggggtcttataaaaagggacaatttttttttttttaaaatggtcttataattagggacggagtagtaattcattcatttatgtgtgaattttaggtggctattgtcattttgtctatcgaaaaaatatatttaatatggacctttcaatcagaaggctacatcaattaggatgatatctgacaaagtgaaattactctcattccagtggcttaaagctaggttgcattcgtttgctttcagttaccatgactggtggcaacaccctatgtcttgtatgggtatttacatgtaatcttctttgttttggtttagtaatcatggtgtcgggtattgtggcaccgatgaactgatattgtatcttttttaagtgattctcttttgcacactttgtgcgagatgaatcacttatggttattaattccattttggcttgttcaaaaaaatcttactgttttttagtaagattactgaaatattacatttttttcccttttttattagtttaaaattctaatttagtgttttttctttgactcaaaatccattagtttaatgggaggtacatattagacagctcccttgatt

SEQ ID NO: 4658 - DNA, 2211 bp, Medicago truncatula
  Intron number 1 from transcript Medtr1g100420.1 (locus Med tr1g100420) derived from phytozome v7.0 (chr-ID MtChr1; po s 20839757 to 20841967 reverse strand)
agtaagtgcttggaggcagtgattccatttaaggatggaatcacttgtatatatttaaacgcttatgagttattttaaaccttggaggctaaaacttaattgctttatattgggtttggatattggtaacaatgaatttgattattagttattgaatatgactttaattttttttattcttttctattttagcttttatatttgtatggtataatttcttagatcagggttcacgagttcatcatccccattcaaaccaaaaaatagagtgaaagaaatgcaagtgacagatgccaaataccaatgttttgaagaacaattgaaacccgtaattaattaaatgaaacccctataggaatgaatctgagagccgtaagctattattgcaacctacacacatcgatctacacacattataggaatgaatctgagagccgtaagctattattgcaacctacacacatcgatagaagagagtatgataggggaagagggtgtttcagtcaccgaaatcggtgactgaattaagggtttaggagttggaggttcaagtcctggcaaggagaaaaaactaatataacaattaacataataaccttttgccatttaaaaaaataggggaagtaataagcaaattcaaaatgccagtcatcccactttccgctattgtgctagtgtttttggggtttgctgctatccgggagataacaatgctaaatacatggttttttttttaaagccaaactagcccactgaaatgcgaaatacactcttatttgctcgtaagccatctaggtttcaccaatgtatctgagcaaaaaaaaaacagaatctctgggcactggtcacagcatttagaattttattcattattgcatactttgtaataattgaattacgtgtgctgtgtgagcatgtcgtgaattttgatacattgtaggttgtcaagggacttaggatttattgtgggtttaagattttcttgggtggattagtgatagacactaattggatcgaaggctcgctgagtatatgtgtgggtgaattgagtttcaaagccattgcacacttctaaggttcaaggtaataatggttgggtggatgctttgagaggctcctgcaagagcaaggaatttgcttcgatgtgtttcaggaccaattcaaggaacgaagaattagcttagattttgatggcttaaattcttaattaaggttgctgaagaaatggaatctggttgatcgttaaaacaggaaaaaatggataaaagatgagatgggaagaaagccttgagtttacacttagctgggatctcttagcccttaggcatcatccatatgctttaattgtaccactaaaccaagaagcaagcaccacagtcaatcaatctcattattacagtatttgctaaaattaggcttgaaaactgtttatatgatgaaatctattctaactcattgttccaggaagatttctaattctgtaaggatgcaaatccatctaatcatgaggtaagcttggatacaaaaaatccattgtaacacctgtagaataaaacccattctcgagtacaaccaaatcccaggaaagatgagaactattaagactcccctatgactgaaaataaaaatattgatggagtaatgataaatgtgaaaataagctagatctatgaaattacaatcagccatgagtaaccatactaaaccatgtatttttttatagtttgtattgatgacttaccttttctagcttctgagtaaagcacttaaattgccttcttttctagatttttgagaagcatgtttttctttttaaaataaaaagaagaaaagaaaaaaacatgtttttttaactaaattgattttttttcctctttaaaaagtgcaaacatacacacgccctccaaagaaaatacacccatcgccagcttaacatcccccctctaaataaatgggggaagcaggggagtacatgtgactccccccccccccccccaagtctcccaaacaggggtttgggtcacttaccctcctcaatttcctctcccttcatatctttttaaatttaggtttttatttttttataaattttatgctggagtttcaacttgttaatttatttttgatcatctacattctgaaacattacatttttcggttatgaaatccattctgctgtgtcaatattctcaatttattatttctgatagg

SEQ ID NO: 4659 - DNA, 1552 bp, Medicago truncatula
  Intron number 4 from transcript Medtr3g159980.1 (locus Med tr3g159980) derived from phytozome v7.0 (chr-ID MtChr3; po s 42007412 to 42008963 reverse strand)
tcagactcagaattggctacgaggcttttgaacaggtttcacttctttcctctctcaattgcaatttcctattattattgctactgttttgcatatgcccccatgaatgaatgccccaagattgagaaacatttttttacttaagctacctcctgtggccggaccgcgggacatgactttttgttatacaactgtagtcatagattatatcagtgttgtgaaatagaggtactgccatagcgggatttgttcatcgctattattctgggaattcgatacgctatttagtacaaagtattgttaagtagcggctatagtggcactattttccgcgattcactattgacaggattggattatatagatatcaagggcatctcctatcctacaatgccattgtatttttaagaacttaagtcttaaacaactatcactctaacactacaaaactttaagacctacaaatggatctgacaagttctacatatttatatttctgtaaaatgggttccacgtgttacacgaggtactcacattatcctcttctaatagtgaaacttgtaagaaccaatcctatacctttaaaaaccgacactggaaatgtgtcagtttgttttttgctcaagcgggttccttgtgaaactatgacggtgtcaggactcacaatagcttaggttattagcactcatcgttgttaatagtacacagataaattgaaaggatcaaatatatgggaaaagaaaccaccggaaaatgagaataatgttatcttttggcctcttgttgtccaacaaagcctggcagatcactaaatgttgcaggggtcaccatgttgttccgttgataactatgacttccaatcatttccaatgtagggaaatctttacttgcccatgttttctttttattacattctctatctccatgtagttattgttagtctacacgaaacataagtagttagctctagggtgaactgtcctagggtacaagtaactatcaactacggattttggccaagttgaaaaaaatgttaaattcattctctgataaatagaaatgttggaccaaatgtgtgctaatgctatactcatgtccaatatctatatttgaagacataagtattgaatttaatggaggcaagtaactggaaattgttcgtggtgacctagattgaattgtgagttgtgacagattgatcggtgcagttaagtagaaaactaaataatgccaagccttccatttaacttctgttaacttctttttggtctagcagtggtagttaaactacgatgtgagttttttatttttcatttgttgtcaatattttggaattgagaagttagcagaatctgtgaagttacaaccaatcattttatcgaatattttgatgacttagttcaacgttcctttccctaattttgctgagttattcttttcatgttgtctttcgttggtaatgcattctatcttttgtttagatcaaaatttcgttgtcttaaaactactcttgttttatccaaaataaaactactcttgttccaggttcctt

SEQ ID NO: 4660 - DNA, 1498 bp, Medicago truncatula
  Intron number 2 from transcript AC233662_37.1 (locus AC233 662_37) derived from phytozome v7.0 (chr-ID AC233662; pos 189966 to 191463 reverse strand)
ctcccattttccttccccaaggtccttggaagcaggtcattttctaattcgattgctccttcctcttctttcgttactttgctcagtttctttcacgtcttttatgtttaaacttagtatttacattactgtgattttcaattcaaatcaagctagttagaaaatggaacaacattttagagatactttttgtatgttattcttctgatcatggtgtcagaatgtacttatagattacagtagttgtatttatagagaaacctcaatctaaagctaagtcagctaaaagacataactttcaatagctctttaggactgcacatactccttttggattaggcgtgtcacgacaatgtccggcacttgtacttgtatcttgttaaaaatgtgttataataatgatcaatgactgaagattaaagactattgtatttgtatcttgttttagaattttttggtaatgaaacaaattgctcaattgtaatgtacttatatattttaattctcaatttagatattttataaataatatatgcatcaatgtcaacatgtttgtgtcgtgtcggatgtttgtgcttcataggtcaataatctgactcttgataattataatagaatactatagactttgatagccagaccaaaagatgctagacttcaaccacaattttggacacaagtggttaatgtggttcatctaaagagacaagtttggccgctacgcgagtttgaccccagatgatagagaagattgtgccctaattttatgtacctcctggccaaacataggttaatctatgggcctattttttgtaggacactgtgagtgaaaataaatataaaactactagactgctgtgtgaatgtaatgcttatttgaagttcaatgtattttgcacaagtgtaacacaaccagtgtagtctatggtggatagtggccaaccattagaaaacaacagtagtggtagatccgctatttcaaagtttagggatacaatgcaagaaaaaagattctatagtaccatatacatataaaagcttaaaaatagaagaatacacaaaattaaagacgtattcatagccaataatcaaagttcattgttactgatattcaaacccaatgcaaaaagcaaataagttttaggtgtgaaatgaccaaatagtgaaaggaaaaaaaaaacaggaaattagatacgtgcatatcggggcctttacagtttcttcactgtagctactgccactaaaaagtgcagcacaatgaggttttgcatgggagcctatgggctgctatgctgtgcaacgccactatagtggctgctattgactagacagaacacctctaacatttcatatcaacattacttctttactgatatgacatcttatttgaatatgttaaatggaagtccagaatgttcagctctgttttttagtgtctgaatgtttgattttgaacttctcagattccaggtggagttactgctgcagagggtttcaa

SEQ ID NO: 4661 - DNA, 6874 bp, Medicago truncatula
  Intron number 1 from transcript Medtr3g132950.1 (locus Med tr3g132950) derived from phytozome v7.0 (chr-ID MtChr3; po s 33549715 to 33556588)
tgttcaagacccaccaaagtatgtttttttttaaataacttatttatttttttggggcccagattttttttttttgcatcccttataaaattaaaatcggatctatgaatttgttaagacggccctggacggaggtagtatgtgttaacgatttttgaaagaaagagtatgttgtatgttatcattggtctaaagtgtaaacattattcaaaaccaaaactatggtcatgatgagtgcgatcctgacaaggcgcattgtaatatgatatatctactagtaagtaatagtaatacttgagagaagaaaattaaaggagataagggagagggacccattggccaacacagacccaacactagcttgcaattggcaaggagtgcgttcactcttcacacacactctcacattctttgatttgccaatgcattttttttcctctctagttgctaagattatgactttacttttgtccatgaggagttgccattacattagtagaggcgtttacgttcacaacttctttcttccctccatgacatcttgtgcatgttgcccaataatggttatccatttttagatataataatattgtttggataaacgctactgtcatcgatattttaagtaaatagtacttttaacattactctcattttctattgctagtactttcacatttatctggacctacatcctaaactcaaacttctaaatccagagactgggttaaaagatatgaacattgattttaaggctcttgaagacaatactacatggattttgattgattttcttgatggtaaggtgtacctattggttgcaaatgggtttactatattaaatattgtgataacggttcacaatagctagatgaagcgtaattggaagaaaatctctatattattattatatacatgtattctaagatacactttgcttacatggcatctcaccaatgccccgctttctaactaattttctaaactttcaccatgtggctctctcttttctttttctctattttccatctatttattactaaatatttacatttgcttatgctcattcttataactcttaaatatgtaattgatgattgactaagctttgtatctccttccactatctattattattttttggtagaatcatttatctatctttttttttttgtttacaaggggaaaatcatcatttatctatttactacacatttatttgtataatattcttagatattcctatagttctttattatgtaactgccaatgtatgttttataacttctttcactatccatcttcttctcttttccaacttcctatatatttcatatttttccactatccatcttctttcatatatatatatatatattcatattcatcccgtgccttttttttttctttttctttcttcacatacttactacatagtacatattatgatctatatatttattgaattctttatcatataacttccaattcactctcaccctttataacaaccacttacctcacattcattttctactcattttaagaattcagggtgttcacacaagtttactacaaagcttctaattttgttttttcagcttatatatcctttctattttagttttgacagttttcattattttcttcaagcttcatatatatttccttctaatattttgtattctctaatgtgtatcctttgtttgaattcgcatgtgcaggctttggaaaagggaggattatgttgaaattgaagttttattcattattatttttaatttaacattgtgatcagaacaagggtttacaaaacatgagagaaaacatataaagaatgaatatatttttttattcattttaatttcaggcgagcatgttatgttcttaattggacaattttaatggtaaaagcacacatttatttggaattataatgaaatgctcttgatcttcttaaaattggagtgataaagtgacattttgataatttcaaatcaacaacatggtaaatttgagtgaaactcatggaattgtttgcctactcacattcctatagccaaatttcatcattattactttattttgaggaataattgcaagacttatttgtcatttagttgttttctttaaattaaggtgtaaatttcattaggaatattttgagatttgatttaataaaatttacatcgattttatgtatttcataaatatgaggttaaggttgaatgtagaatagttgcaaaaatctacctgaaattctaatgaaatgctcttgatcttcttgaaattggaattacaaagtcacgttttgataatttaaaagcaacaacatggtaaatttgagtgcaacacatgaaattgtttccctactcgcatttctttgggaattttcatcattactttattaagttgcaattgtaagacttatttgttatttagctgtcttcttttgattaaggtgtaaatttcgttaggaatatttcattaggaatatatttcaatattatgagattaaggttgaatgtagaaaagtttctatacttatctttatcatatgtatgtattgagtaatctaagttttaatatggtttatgtgtcccatctaaaaaacttctttcactctttcttaaaaaaatttgtcatgcttattgctcctcactccattttctcacttattcattttcttttcaagtcgtacatttaattcttccataatatatattgtttttctgactcaaacatgttacatatactgtttaagaaaagttcctaagaaaatttgaaaagttacgttatcattagaaaaacacttggattcaaatttattagacaaaggtcaaagatacagcgatttgagaaatatagaatagtgcctctaaaatatatatatagataaaggtgaaagaaatgattcaagttacaccagctaaatttattgcaaataaaggttaagacaattcattaagaaaatagattcaaccaaaataaattgaaatcattgtctacagtataaattagttatcgtgttaattatataagtttaaatattagatgtgcattcttcttctagacttaaatgtgcccaacttttaatgtaaagaaaggtgaaaggatgcaccctctttaatgttttattgtggatttattttgagttcaaccttttaaatttattcttagcctttcaagttcacacagactaataaatatgtcttatgaacaactctttagtacatatgagtatatgaaatttcaatttgagagggtatgtaagagtattgttgaagaagaactcttaaaaacttatgtgatcttattgtgtcttttttcttcttctctggagtcaactgagggggatatcatggtacatagtttatccttttaactctagcacaccatgttcataagaaagttttatttgtgctcaaaacatatttcatatgcctcttaaatacaacatttttattttaataacttattttatttttgcttaatcaaaagaaatggaagacatcaggaggcgtcaaaatattctaactaagttttcactccaagaccagcttcatcctctaccaccatgctcataaaattttattaaaaaagagaaaattgtacaagcggggcaaccaaactagaacctgcaaaataaaacagaaacaaaccagagacctatggaggccaacccagtctctgaaaaaattctgaacatggccatgaattgctttagcaacaaacaaaatctttggtctatgattccgaaaacaaacatgaagtgcagttcgagattctaaattttctatatctcctacattccaaaaaatgtcatcactgagaagtgaaactacgtaagaaagttattttatacttatttatattctatattcacttgacatagaaaaaaaattaaaagtattttaatagtattttttaaatcaaatttcttatttctagtacattaaaaaaaaacattataatcaaacttgtgcaacgcacgggttatatacctagtggtacattaccatttacacaggaccctgtcatatgacctccgaagctttagattgcatccctcgtgtcttgatgacttatgtttgtcctcatcaagaaaattacaaactctctcaactataatttttgcacagaaaaattacaaactatttcatgacacaactattcaaaccctagtacgtccagaagactagagacgtttttgtagtgaagaaaactcaaactaaatttttatatttataatcactatctatatttttcttcttataactgatcaatgtagaacttggatgaatactcactttaacacaatctttatttgttgtgtttgatgataaaaatgaaatttgttaaagatggaatagaaatctaaatgtgagtgaaaaaagttttatgcagaaaattgttatagaaaataaggaccatgtgttaaagtgccctttaacttgactatgttaagttttttaggttagtattttttttggtggttactttttttttaggttagtatggaatatggaattcattacatgattcctccacttaaaaaagctaaccataagtggaataaaaccctccaaatttcttgggctgccatagtttattaggtgatataaaagtattgtttttcctttcaaaaataaaagtgttgctttttttgacaaagagttatgaagatgaataattgggcttcaattaaagttaggaaattaaagcgatgaaaagaagtttttttttttaagaatacaaaaagtagcattataatattgtattcagtcaaaaaaaaaatcattacaatgttatattaaaataaacaatattgtgattaaagagaactggaaaataacattttcggtttcaattaatgttaagaaaattaaagtgatccctcaaaaaaaaaattaagtgatgaaaaagaacttgaacataaataattgaaaaatgcaaaagatggcattattatattatattcagtccaaaaaaagcattattattgcttatcaaactttatgatcaataatttgtagattttaggttagaaataatgtcctactttgaaaaagctggtcaaaagagaaacaaaagcatattacaaactatgtgtaacttttctcagttttgcacgctttgtgcttaatgttgttgagtctattcatataattttgtctatttaaaaaaagaaagaatcaataatataacaatttgcgtggccattccaaaaaaaaaaaaaacttggcgtgataaacttgttgcattcctctaaataaaataaacttgctgcaatcaataattctattttgacaaaggctgagtttgaatcatcaaaattaatatgatttaatttgaactaaattgaattgatttagatgtacattggtaaaaagtgcgataaattaaaataatcgttgtttagaaaaacaaaaagtttcatagtgaattaatctattatttataaaaaaaaaatcatttgtaaatcaaattgattcttaacatcaatgatcaacaaatttgagacattcttgaagttacaagttgtatcattgacgagtaatacgatttgaggtatttcttcttccaccaaagtaacgtccaaacaagaggatagtggaattatgctctacttgttttgggaaaatcagaaattctgttaaaaaagaattaaatatatttttagtttatataaaaaatacttttacttaaatctcttagctagctagtactctagtttttaagaatgaaattcagtatttgagagtgtacaatattcacacacattaccaaaaaacatttgaagaaaagttttgttatccatcacgaatattcagttcacacactttgtccattaataatttatgctacacgcctacacctctgtaaaatactttctgttatatagtgtttttaaactcttacttatatacataaaaataaaaaaaaaactcttacttatatacatggacggacaaccataaattatggggtaaacgaccccactaacaaaaaggttgattgataatgattatgtagttgaatttaacaaaaaattgaggaaaaaaaatatcttaacaaaaaattgatgttatggataggtgtgcaagtatgtattttattcggttgcttgatttcttggtttgcaagtaaatcatggtgtcctcttcttggtgaggttattcgttgggtcatttgctttgttgccaacaatagtataagtgtgctagtatcttcattggtgtagttttttttttttttttgcttagcttggttgttatgggttagcttaattataattggtgtgtggtctaaatatgttttgtgtgtcgtagtggcatgagcaattctctttatgtggtttgtttgctatttttttggcgtaccctttttatctagcaaagctcctcactaagtggtctctagaactacagtacaaccttcttatcacacagttcaaacttggttgataaaaatttctcatttttgtcttaactcttaccatatgtgcataagaatatgtaagtaagtggttatttcaagttgataatagacaaatgataagggtgggtaataagggacacattgagacggatgatacttgttcctaattcaagtagtggtgtattcatccttcattttttatccacttacgaaaattaacaattcaaaaaagaaagactaaggttgacctgatggctaagacaaaagaataaataaataaatagagtgataaagttggtttcaggttcgacttccacattcaacataaactaacaaattaacaattacaatactaaaattgccatcctcgctgtgaaactaattacgagaatgattgacatgtgtttctcagatgtaatgcagcaacacaagt

SEQ ID NO: 4662 - DNA, 2473 bp, Medicago truncatula
  Intron number 3 from transcript Medtr8g008640.1 (locus Med tr8g008640) derived from phytozome v7.0 (chr-ID MtChr8; po s 1011131 to 1013603 reverse strand)
gaagagaatatccatttgtattgagatctgtgcgtgattttctatgaacggtggatcaccgtggacttacttttaaaggatttgcggttcttgttttcagatatttttctttagataaagtgtggaccatccctagaagaatgcatggacaataattatcatgaaaactaatattcggtggaaaaccgattaaggtatattgcgatatgttacaaagatataactaaattgacataaatgcatttgtttgtgtttttgtgcaaccaacattatttcatgagttcattttatgtcaaacttctatattggtttatcacttgaattgaaattatatttatatttgacgcaacaaggaatggaagatgaggtttaactgcttgcaatgcttcaactgatgtttagattttagtttcattgtaattgaatttagttttttcattgggataggataatttttgcattgtaagtggaattcgttttttgttgagatagattattttactgcattgaactttacattaaacttgtgttaagtagtaaacctagtttaaaatggttttttttgttgagatataatctaatcaatgtctctagtattatctatagatggtactgatatattatacagctgttgtgattggtctttgataacaatataccatggataaattgttatcatatttctttatgccataatttatatttatgtctttatttggtccatcaacgtgtgatagacttatagacttatactgtgtctatattaaacatatgatatatcattttccgtttaaaatctaccatcactttagttaatagttacaacttctttttgtagaagtagcaagatcacaatttgaagttttatgtccatttattttatatattaaaagttgcgagttctaagattcaagtaattgaatgttaacaaatatgtccgaattgtattatcgtcacatgcaactatctttaactaggtaaattcaattgcaagatgtttaactaaatcaactagaacatgagaatatcgatttgtaaatgcaccaactaatgttgttgtaaatttagatttatattttgtataaaaacacccctaatatcaaacaattcaatgaagtttaacaaaaacaaaatcttggcaagaaaacataaatttaaatgcattttttatttattttcaatttatcttcaaaaactactatttacaaacataaatacgctcttttattttgttcttctttcttgttaacgagttctaaattgataatataaagacgttaatctaagtttaaaaataggcacatcctgcaaataataaattttggtacagtaattccctcataaaataaagaaaagttgtgtttttaatgtatgacaaatgatgcatttttaatatattctatactaatttttatttagaatatatctgtgacaaaggaataataaaagttgtgttttgaacattccttaaaataaaagttgagttttgattatggatattaaatcccattttacgtaaaatcgacaacgttaatttgcatgtatttttatgtgatttgtgattgaaaaatgtaactagttttcgagttctttaactctgctttaatttacattcatgttattctaccatatgaagcatagtttttgtcaagttaacaaaaacaaaagaaacataaccattcaaggccaggaaaactaaacactcaaaaagtgtacaatttctagatttttggataattatttcaaaaagagaagggctttggcacctcctttgttttgatactaccatgttttcttcctatatattagggctggacaagaaattagataaccggcctaaaccgtccggccgaatgggccgaaacccgtcgggtcggtgtttcgcgggtcaccgggttgaacggttctaatcaattgggtacatgtggtttgtggtggtcgattacgggtgggaatgaaggacccatcgaaatctgtttccgcccaacccaaacatatatcatgtgtaaaatccagcccaatacgaaagtaagcccagtccaaacccaacccagagatataaaagcttgagttaagagatgaaaccctaatttatcattgttgttatgcgccgctgctatctcttagagtcagaatcctcaacgttcctttccttagattcatacccaaatcctgtttctgtttctttccttcaaatatcttccagaaacaatcaacatcccaatctttcaaacaatctctaccttctattttccagaataacatcaaagatcacaaatcaacaatatttatcaaattggttaattattatttggttaagtgtaattatttttatgttttttgtatcatgtgtgccttaagactttgagtttcctccattctcaattttcattgattttcttcatttcaagtacaagtgtattgtcgattgaaaatagctacaagctattggaactgccattaaattcagaaa

SEQ ID NO: 4663 - DNA, 1152 bp, Medicago truncatula
  Intron number 33 from transcript Medtr2g055450.1 (locus Me dtr2g055450) derived from phytozome v7.0 (chr-ID MtChr2; p os 14841357 to 14842508 reverse strand)
atcagtgtctgtatccacagatccaattgcagttggtaagttgaaattctttatctaactgataagatgagttgatgttaagtaaattaagttttgacattatatagttctctagggtgggttgccaattatctgttggtttatgtttttataatgtttatgaattcattaatacaatcaacacacattatctttgacaatacaccaggtagccaatccctaaaacactgggttggcataacatggtttgtcactgaaaaaaagtattatacatattaaaggtgtgttaaaatataaaattgcctaaaattaaaggtctatttataattaatagcaatccgaacatatgaatcaaatgaaaccattaatggataaattgtagcatgttagatatgtaagcagagatcaaattgagtttgaagaaaataattgtgaattgtgaagtatgaatgtgttatgatatagggactgttagagaaaagttaaggaagttaagttgttttttcttttaactcaaggaagtcaagttggtagaggggatatcttgtatggatgggattctgtatattggagacttgtgaatgaattaaatctttgtagaagggggaaacacttggagttggagtagaggtctctcgtatcttaaatcacccattcaataaaatttctttcttttcagatgtttccatgatgtttgaccaaaaatcaaattggaccatgggttcattttcttgattagatggctggaatgaggaaattcatttctagggtgataatcgtagtgttgtgagatatggaaattccaagtcaatgagtaattggcctggaaaggaaactgtgggttgatcttttattgtaattgcaaactgttcaaaatttgatggtgttttgttctgtgcatgccttttcatatttctctattatctactgtcttttggagttttccttttttgttttgtggatacaattcatgatagtttcgaattcttttcagtttaagtgttggtaaaatcaggctctaaaacaatggacttcctatattaattgttattttttgttttaaaagaagttcccatctttaatataggatttatatgtgacctttaattccatgcagagcctgacgttcttaaagaagtgaagcagaacctt

SEQ ID NO: 4664 - DNA, 3270 bp, Medicago truncatula
  Intron number 1 from transcript AC225528_6.1 (locus AC2255 28_6) derived from phytozome v7.0 (chr-ID AC225528; pos 31 259 to 34528 reverse strand)
tgagtcatagttagcttatttaggaaatgataaaaaaaacatgtggaaacatcatttttggatggatttagtgagaattaacttttgaaataaaataaaactataaaattacaacaatcccccacatatttcaaaagttaaaatgcatcggaacggtatagcaagctatggaacccgtcctagactaatgaggcttaacacacactgaattggtttagcaagctatggaacccaagacacttggtgtatgctagaggtctcacaatcacattacaccctcacaattcttgttgttacgcggttgtgcgctaataggccgtgtgcgggcctagtattcatgactgctctagagattttgccaagatctcatgcaagcggtgtaacaccccaaattttaatattaattgtcaatattattaatagataatattaatattattatcgggtaaaattagtattattgttattattatcattgagacttgatattattagattaaatcatttgtggttataggtgttacgaataatgaggaaataaggaggagttaactagtcagatgaataattcgagaaaaacaatttttagggagaaaatagtgtgccattgttgaaaaataaagttttggtggttcttattattttatgtgaatttaaattataaagagatgaatgatataataactaataaagatatgaggtgagaaatagaagtaataaaataagtgggggaggagggagtaaattatgataggtggaggagagaaaagtaattataataagaatttaacctagtttcctaatataaatagatgaatagaaattcataaaacattattgctgaacgtgagaacaagagagaagtatagaggaaaggaggcaaaccctaaggagaattgaaccaaaagctgcgtttccagagaattcgaggtaaggggagaatctttgcactttagggtatcttaatttatgatgggaggttgtcttaaattttaatgcacttttgctgttatgatgtaaatgttgatgagtgaatgatgatggacgaattgaaagatgaaattaaaagatgacaattgagggaaactagtttaggtttttgaattgagttttagtagtggataatcaggtaggttagcgaagaattagtgtttcaatgatagggtagtcatggagtgaagattagggtcgaatttggcgagtttagggtcgaaaacggagctaggaaaggtcccttgaggctaaatcgcacatgcgaaatcgcagaaaatctgtgatttctgtaaccgaaacaaacaataaaaactggcacttttctgttgagaattagatttcggtgtcttcacgaaagttgtaggtatggatgttagctttctaatgccgttggtctgacgtcaaacggatttatagaacttgagttatggtcaaattactgcgcataggtcacattgaatttttatgaatttcagcacaattttgtccgaatttgaaatgaaaactggtattgattggtacagaattggtcttaggtgtaaacatgaaagttttagatatagatgttagctttcatttggctttacagtgaccccaatagaacgtcaaaaacttgagttatgatcaaaatactacccagaggtcaacatggccgcgcactctgcctaggtttaggaaaaccaacctttgcaccactttctgtatcgaatttaatttaggttccttcatgaaagttgtagatatgggtaatatatttattttagatttagtttgacctcattcagacattcttaagttgagtaatgattaaaatatcgcacgtgggtcatgctgcatttttcatgaagtttcaacaccaccgttgtattggactctaaaccatccatgatagtattagtgattttaataaatccgttagcgtgtaaagtaaaggtgagggtccttaagctttacatctaaatgaaggagtgtgatcaagcataaatagaagcgattacctaaggataataacaagtctaaaacataaactggtgatagtgatctaagtgaatttagtgatgttaaaagatgacttgacaataggacgtgaaaaataatgataatgaaagacaataggaatgataatagcgatgaaaaggacgggaacaattagaggagagcaagatgagtaggaaagcggataagcgataatagttataaagtttgacgataataataacaaccggcatcgagagaataaaatcttgaattataatgaagtcttagtgaggaaagtttctgatgtcaaaagtactgatagaatgagataataactttaaattaggattaagttaagattaggagaatagtcgatgtatagatgacgacgaatgtgagaacaaggtaataagattataaagtcgtattaaatgagaagaataattacgaaagagttaatgacgatggtggggaagaacctagttggatagagaggagacattatatgtaatgataacgaattagaatacatcttgagactaagaatgagtaataggttatgctatcagaagtaaagtatatagagagcctataatagatgaagggatagagtatgttggtaagatgaataatataataaaataaaatagagagattttgatgtagaaatgactcacgcgtaagggttggattaatcaagggaataagtggtgatataaatagttgatagacagtaatgatgatgaatcctataattatgacaaagagtgtcgatgattaatattaaatatatatatatatatatatatatatatatatatatatatatatataggtgccccctaacatggacctccaaaaaaaggtccaccaatgaacctccttatatgacctgctacaacaggtcatcataattaaaaaaataaaataaaataatcaattttcattaaataaaaaagctatactgaacccacacttttcatctttcttctcagaaaattcctttccctcttctgtagtttcttttcatccattcttctcctctatttttcatcaattgccaattatgaatcttaaacttctcaaacaaaaattctaaatcttcaaaacttaaaccccaaatccatactttacatgaaccttttttccagttttctttccacatcacgttgaaactttctcaccatctcactccttggattcaagtgaaacttcttccttcttttaatcaaactgcttattcctttttccttttcatatcaagatcgtgattgacttgtcttggtgagggataatttg

SEQ ID NO: 4665 - DNA, 2735 bp, Medicago truncatula; identical to SEQ ID NO: 4534
  Intron number 2 from transcript Medtr8g116060.1 (locus Med tr8g116060) derived from phytozome v7.0 (chr-ID MtChr8; po s 26221474 to 26224208 reverse strand)

SEQ ID NO: 4666 - DNA, 2472 bp, Medicago truncatula
  Intron number 1 from transcript Medtr7g130160.1 (locus Med tr7g130160) derived from phytozome v7.0 (chr-ID MtChr7; po s 30367079 to 30369550)
tttattagctacaaatcttgtaaccattcatgttagattttaggatacaaaccaatgaagttgtccatagtttagctagtttctatatctttatcaacattttgacgtgtatcataacatttttttttggtacaatgtaccaaaactatcattccaaataaaatgcattaaacttgtttatgtgaataaaattatataaatacacgccacttatcatcgtagtagattcacttggttgaaaatttgttcttcaaccttgtggatctaaattcgatactctggcgtttctaaatttgatgacatgaattaaacatttattaaaaaaaaaaaaatccattccttagttttggattattattagtatatagacaccttaaatttcttttaagaattggagaatctctactctgtcttgggctgataactagtactaatccgtgccctcatcgtcactaattatctgactcaatttgttaggtagaggtcagacattgatatcttgcattcccattacagacatgtttaatttctactttctcctcttttaggaggaacataaataaagactcaattcttagctttgtgaattctatcaggaagtttgtttcattaatttttggttcccgaaataagtacttaaatttggccaccagcttgtgttcaacttactcaaatttgtttatatagccatagctttatgttagtatgaataaactcaaatttatttgtaccgattaagagaaaatcaatatcgtcatgagtcgaattctccatgtctcatttgaaacataccattgaaggaacttcacatagaaaatgacaaattagtagcaactaattaataaataataacataaaagagtgttgctgccgagttaaccaagatttaagctcactatgagagcaatgacaaaaactaggagcatcctatggcctcctcaatattctgttgtttaaattattatgacattagaagacaaaaacataatttattagtagtcgatcttctcaagttaaactcaaatttgagcaaaagaatactttctttctcaatcttcttcgaagtggaacaactgtaaaaccatccttgatgatgagctaaaacacgagtggttagtatcccatcgactaagaaagctaaatatattagataaataacacattcctaatgccttaatatttaggatatgaacatcgtgtctctcttgtggtccttgattattgggctcattgttgccatgcatccaggactcaccaacatctactatgtgcaattcaatagaatataaaagtgtgtaaaggtctttcaagtcatattccacgtagtctttaatatttttagagaaggagtcgacttatttagaaataattaagttcacattaatccacttactaactcacaaatcaaaccattgaagtaaaagttcttattggtagataaactctatacaattctttataaaattttaaaattgtttgatacttcatctaataacttaaagtgaaagtataatatttttttgaaatacaagtaattaaatgtcaattattcgacatagctacaattgttggatttttataaaacttgtgagtcgatttactatatgttagagtttactcgtggagtaattgtatgaagtaatcgtaattctaaaaaataaaataaaaaatctcgataaaaaaattcattctttcttctctttcaagaaaaattataaacaagaagaaaacagaaactggaatattatcaaacatgaagaaagtttcaaattttgagtcaattaaaaatgtgtatttccttcccattggatatgtttcttttcatatatcgaactactagtaaaatcgaagaaaacgacatcgtagaaattatcgctatagagatcgatacatttgatgaaacttgcatttggtaaaatttgcatacttaattacaaaataataaggacagaagcttgccaacattttatatagttatcttataaaaaaaaagatttacattgttacatcccgcacatttttttattaaattatggtaattaagcccaataaacatagcacgaaatttgggtttctaatttttcagaattattagttgatattgttgctaggtgacaaagagaaaggagccatatagataagaccagcgtaggggacaagaggcatgtttatagttttctgacagtttgtttatactttaccaagaataggaaacataaaagtaatatactgtagtatattgttccttgatatggacgtgttttaataaggtaaatgattataaaataaattattttaaagtatttttgtcgtaatcaagcttcaagcctgcatgaatatttatttatacttgttaggagattgatgttacaaatatgattctataatatgaacttatcgttaatgttatacaattgatttgcatttaataattaattaatgagcaggtagatatcgaaactgcgcccagag

SEQ ID NO: 4667 - DNA, 1847 bp, Medicago truncatula
  Intron number 1 from transcript Medtr6g005750.1 (locus Med tr6g005750) derived from phytozome v7.0 (chr-ID MtChr6; po s 469587 to 471433)
gcttggagaaatcgttactaccatccctaccattggttagttcaattccctttctctgtattcatttttaagaatgtctttgtcgacgtgttcagtgtccgtgttcattgtccatgtcatggtaggtgtctgtcttagtactttgttgataacgataccttgtgttataattttgtagatcaatgattacacaggtagaacatatcgttaagattaacataatacactctctggtctcaaatacaagtaacgattctttttttcagattcattaagtatatgtttggttccatttctagattggtcaaaaaattaatggaggtgtagagttgattctgacatgtttggttgcattcaagtagaagcttttgattctagaattgattcttaaacacaattataattcaactcacttttacatgaatgtatcctaagtccaaacacaaatctcatttttcattcgaatcaattttacagaatcaattcactcaaactaaatttttgccacgatagaaccaaacatacaccgagtaattgatttatctggtttataatatagactagatatagaccaaatacattagttattcaacaaacgggaaaaaaaataatttgcttatatttgagatcggagggagtacaacctctgtcataggattgttactaaatcatgacaattaaaaaaaaatagggttgttatatgaattttctattctttgaatttatatgtcaatgattaattacacatgaatataaggcaagcggtctacaagctgcgccgctaggccttttttgaaaattgcattgtttttagaagtttgacatctaagaggaaggattaatttattggaaaatgatttatgttgcgaaaaagtcatgcgaaagaaggcccaacaatctttgatttctgattaaaaaccaactgaaccatttctgaattttttaactggaaagtgtgtctagttaccttcgtatgcaaaaccttgcaggccatacatcattactctaatttattctctatcacaatcatcattgctagttacaaaaagtgatgcaaaatataatcttcatcgctagttacaaaaagagatgcaaaatagatagaggtattttggtaagaaataattagtgaagttgaaaatttgagagttcctttaaaaagaaccgtgaacaattattatttcaagagggtcatatgttaagggataaaagtagtatttttttctctttcttttcaaatatatgaatgaataaaacaaattcgttccaattttagttttgcttaggggtgggttaggggtgtcatggcaaggaagtttgatatatggttattggtaatagtaatactgattaattattaataaatgaccattttataaaatttggacttactatgatcgaagactagtggagttactgctgcaagtaaagtgcatccccttaggcgttcttactctagtttaatgcatgattttgtccacaagtccttgcgcctccacttgtgtatgtgagtttccaatgactcttgccatttcgtctatctaccaaaacgaaaagtgcatccccttaggtaaagatcaaatggttcagattccaaaatttgagcaaaacatatttaaatcactaacttaggaatgttagttgtctgatctttatctaacaactttgatttgtccgacccttggcaattaagacattgcgaattgggttttgataaaaaatattttgtactgttagttaactagcaatgaggcctacacgatgtgttttttaatgtacttatgccatcttatggctggatgtctataaaataaaataatttgagtcatttctatctacaggattta

SEQ ID NO: 4668 - DNA, 6394 bp, Medicago truncatula
  Intron number 2 from transcript Medtr3g147730.1 (locus Med tr3g147730) derived from phytozome v7.0 (chr-ID MtChr3; po s 38324133 to 38330526 reverse strand)
tggaatcgattatatcacggtatatctctctctttcactcacaaatagcatgtgcattaatcaattgacaaaaggcttttctttatattacctgtttttagtacaataaaaataatatttttgggtttagcaatctatcggattaagcacggcatcagttgcctgctgaaaggattttacccttgatctaatattgatttgaaaatgctttgctgtatggtctttccaataaatgataggatttgccttcgaaagtgtggggtgcaaataactggttaaagtgcaaattgttagctattggcaaggaaaccaaaagagttagtttttattaaatcatagagtgctatctgattgctatcagtctggccatcaaattcgggatgataggttgcactcatgtgtaatgtcacctctttgcaacccaacagactccttccaaaagttactcataaatatactcattattgacacggggacatgggacaccaatcatacacgttattttcctagaaaaggtctttctgacctgtatgcagatagcaagtttttgatggatatgaaataagtgtacttgttacgtgctttttcaaaaaaaaaagtgtacttgttacgtctatctacacgaccactaagatggtgtcctaacctttcgaacgctacagcctgttggcgtgaaacccttcccaccggcattgggaatgagaataagctgagataaaataaccggggaagaggcaccatagttgctccactagaaaatgtggcaagatgccacaaaaataaataattcacctttcattccaacctagtaaaaggattgtgcaaatttctgataagtgtgactgaatcctgagggctcctcggtccaagttggatgaaactcctagaggagccatggtacccactgggatttggcgaactacaaccgttagattagcactggtagccatggtatcttagattatctatttagactagttttcatatttcttattcattatcattatttgtttcgctatataataatggtttggaatcttgtattagtgtagatacaagttagtgcttaacgattttgcatcaaatcataatcataattcaaagttttattctttcttttccctgttagctaaaaccttataacatcaaaatggcattagattagcaccaccctttgtgacccatcttgtcactattgtgctgccgagctttccaaagttttaagccaaacaaaatttgaaattatttttttctcattagttgtacgcacatttcagccatctgaaattttgtttgtttgtgttttgaagcctaatgtttctagcgtgtttagattttctcgtatcccatgccatctttttagtgtgttcagaatcactacgttgtgtcatctatctagcatgtatagaatctcttctttgtcgtatcatcttccactgtgtttgagatctctcagttttggttttgcatttttgcactatttttgtctcaagtgcagtttggcaccagttttgtcttgtttgtcatttggcaccatttttcttatatccgaattgtggtctggctccaacttttgcttaacagaaatttggtctcgactcttgttctagatatgatatggccttcccaatcttcactatcaaatacatgatttggttatatttctctttcaaatgacacgttggtaacaagcttaaatgtaacaagctttagctcgatggagagtatttgaaaatataaaaatatctttcaatatcattatattatgttagtatttagattaactcatgattaattttgtattttagagtatccttaaattatatcttaagattaatttccatattttgttgttattatcaagattagtttctctgtttaactaggatttggagtgttgtatataattaaggtttagtgcttgaactttttgtatgaaaacataatcatcaaatcatatcaattgatattcataattcaaagtctctatgctttcttttccctccttatctaaaaccctatagctttaacaacattaatccaccattgtaaaatgtagtataacctattctgctacaaattatgttggacatgagtattaggatccttagatcctcgatgatccttttcaaatctaggtctaccttgacttcctccactatatgagaataatctggccaataaggtttaggaatatcccacaggttgacctatttggcatccttcaaaaacaaagaatcaaccatcttattagaattgccaacctggtacgcaatgtcatactcgcccattaacttacaaaccagtttctctgatttggtgtagtaaacctctttcggttcccatctctcccatgaggacgggactctcccaaggatcattcttccgtttcaccgtaaggtgatctgtagagtggcttcaattgacaattcaatgaaggtaaaatggcaattaggtacccgtgggctgcggcagtccttcaaagtttaagtagaaattcgagactttgctgaggcactgactcataaaatgtgaataatttctcaagcatgtatgactgccagtgctgtattgcttttactaagggaatcaactccttctcatgcatgatgcacctacttggagaaggaggatggaagtgaggtaacactttgctgaaaaatgctattggctgcctaccctgcgcaagaactccaatgactgggcctaaaccttaacccgtgcatcacactcgttggagaatggttgtgagaaatttagcatagccaacaccggagatgtagcgatagcttgctataacacctaaaatgccgtttctgctaccccagtgtactcaaaagcgtgtttcttcgacaatcatgtcataggctttgcagttttgtaataatcatgtacaaaccgctgattttagcatgtcaagaccaataatccaccataagtcttttactgttcttggaactagccagctcagattggagttcactttacatgggtccatagtaaccctgccttgtatatgatgtgactgagagtccaggacagtcactctgcctcttcctgaacctgcacttttacagattgtagcagcattttttttcgcaaggtggacaaaacttgcgtcaagcgagcctcgcatgttctaccacacacgaagatgttgaagaaaaacactagcacagatttccatagagagggatgcaggacaacattcacagcacattgaaatgtggctggtatattggtcaatctgaatggtataaccaaaaatttgtaatactcatgttgaggtcggaatcttgttttgggagtttccttctcatgcatccatatttgatggtaacttgcccacaagtcaattttgaacaactaatctgtcccatgtaatttatccactgcattcttctataacagggatcacatacttacctggaattgtcaccttatttagtatgcaatagtccatacaacaccaccaatttccatctgtccttttcaccaaaatcactttgtactgagctatacgatccctgtgaccaacatctcagctaaagcctctcactctcacctttctgccgatgcaagtagtatggcctgacatttgctggttcagaactatttcctccagcattcgatgccactccttccttgtacctacgtaccactaataaactacaaaatagaggcatatcaatcaatttcaagaggtcttgctactaaaggtgaagattagccatatccccatgtagtaacaccagtcaccaagttcccactgtaggtgaaggacatattggcggtggccatggccggattagtcaccaccacatcaaaatatgaaatttaatactgtcttgccaactgcaactccagattcaagcaacaaatggattcctcctccttgagtccatcaccccaatgcactcggtatgatggtgtattaagtggtaacaggtaaaccaaatccactggcaataaaattatggattccttggctttctatcaaaaccaggactgtttttaataatcccttgaccttcatggtttgcggccaggattttcctcatgttgaacagagtgctccaccaaatggcactctctttgtgtgaactcctcccgttgacaatggagtcgtccatacacgtgaaatcgctctcctcacctccgtgttcattgattgtgagatcatcactcaaacacatttcaagactcttgtctctggctgaaaaggcctccacgacagaagcaatgaccgtctttctacttaaggaacctatgatggggaactttcaggccccccgttgcgagcttctggtggctcaaatgtattagttttggactccttggacaaggtggatcccgtgctaaactttaagaatataacctatttggatagttttcccacttcttgattggataatcctttgtaattgcaaaatacactttgtatgttgctaaggtttgtaatgtatgaaccctctgcaatagataggttttctcaggatcttcatcttgaaattgccttcattttgccttctctagcagtttgattcatttgatgttccaaattcaactactttgctcgaccttcttctcattccatgatagttaggaattgacatgataaatgcattatgagttatggtaatacaaagtcttttgaatgattatcacatcactgtttcccacggagaatgtatccctacaactgagtaattcaactaaccaataagagtaatcctaaatcgccatctaacggctacatatttcgtaataagagccagcatattctttcttccttctactcttttcccctgctcgtaacacctcagttaggcctacgctattaggcacttcattgacacttctagagttctagttatacttattcaaatggtaatgctgtaataatgaggtaaatggatgcattatgactcatgcaaacatttaacacatcgatcttctcctctaattttagaagtgtttttgtgttaactttatgccaattgtatcttttcttttcccagtaatgtcttgttctatattttgtaaaaatttatatccgtatctcatgttgtatccatgctttctaactcaaatttgcagctggccaaatcagtttttggccatggtgttcccttatttaaggcagtgtcttacccattttgctttctgttgagaaatgactcaaaattgtgatgctgtgaaagatgaaaatcgtggcgcgattttcagaggcatggcgcgattttgctggcaaaatggatggtttctgctgaagcaaatcgtggcgcgattttgtgcagcgtgacacgatttctggataaggtcgttgtaccttggatcgtacacaataaaccgtggcgcgattttggctggcgcggcacgattttgacagatctgtcacactatttaagcactctatgatccatttgttaaagagcttggtgaatctcatggaaaccaaatgagagaacttttagggtatgtagatactaaaggttgagggtctttgggtgaggttcaaagcttcatgatgtgaatcttggagaaccaaaagagggggctcttgggaaaagggttggtgccttttggggaagattcatagggatgggaaacacatgagtggagagtcatttgtgagcaacttgggtgagtcttgtgaaaccaaaagagaagatccttaggaaatcaaagactaagagggttggttctcttttgggggttagattctagagttgagaaacaattgtaaacaccttgggagagtgaaaattcaatgagtgtcttgttcattggtgagattgagaaaatgggtagaaattaggtttgttctttgtgagcttgttgaagctaatttcttgtaacccatttgtatctctttgtaataactcattgatagtggattggagagatcaatctttcctccagagtaggtcattgttggaccgaattggatgaacattttttggtgttgttatcttttctttactctctttatcttgtttatcctttggttagattgtggttttgctatgcacttggtttatagattaggtctatattgttgttgttgtttgtggttatttacatttggttattggttgccattgatatttgctccacgaatctaaatttcattgatgtgatgtttggaatttgagatcgaattcacaacactttctaatcttgagtagtccaactgttcacttctgctctgtaactttcttgcgtgtgtataatgaaatatgcattactgcacttctgagctcgttaaaattctacctgttctggtttttcttcggggtaattataagattttctaatgtttatgtgttgatgaagagatttctcttttcctgctgcaggttggctatcatcccaactttgaccgctctag

SEQ ID NO: 4669 - DNA, 1224 bp, Medicago truncatula
  Intron number 1 from transcript Medtr3g148440.1 (locus Med tr3g148440) derived from phytozome v7.0 (chr-ID MtChr3; po s 38644455 to 38645678 reverse strand)
ctctctattggacaagttctaaatcctcttgtgatgtgatcttaacgtcccattctcgaatcaattggattaccccttgacacggaactactagtgaaagttaactctaatatggaataatgttatcattgtaatttgcaactgttggatagtgtcaacaataaatactatttgggaggagaaactagcctcaggtctgtgatatatatagtctatccaagataataaattagttttttcttttctttcaagatgataataaattagatatttagtgagttttagtattcttttttatttctaatagactcgttaattagatggatggtttaaacatataccgtatgatgatttaaaattagcatatcttgctgcttttgttatatggagtatatgaatttgaaattgctctgatttgatgaaacagaatgtaacagaggcaaatctacaaaaatatagtttcaggtcacctacaagattctaatggattgcttatcccgtaacaaatgctttggtttttaaattgacttgccatttttccaacaatggaatagccatcacggcaacgtccactcttcatttaaaacattggaaacaaactagtttactacttagtacaattcaacaaagttgtagcataatttagataggcaatgtgccatcataaacctgctacttgcacttatttagttattcatctcagatgaatatttgagtaacatgtgaaacttttatttagtcattattttcaaattgtatgatagaaatcatgtggtttgacaaatcagacacgcacattaaacaaccactatacacaaaatctcaatttggtggaatcctaatccacttttctgtgaaacaattccacaattattttcgcggtggtggaactacaaaaaacaattttagttgttgttttgacttttgattgagacttatgattttgatttaatgtgtattaattagggttaatatatgtttacacccctaagcgacttttggtttaccaaagtttagatttcaacttgtaatataaagattctttggttttgaaccatatatattgtgatatgactggacaaaaacgaacaattacattttaaggttcttttataattcttcttcaatactctctatgaagcgttttctacttctgaaaccatgaaaagatgtagaatttcatcatggtatcataagccgttttttccttcttctatgcagacg

SEQ ID NO: 4670 - DNA, 829 bp, Medicago truncatula
  Intron number 2 from transcript Medtr1g121110.1 (locus Med tr1g121110) derived from phytozome v7.0 (chr-ID MtChr1; po s 26314862 to 26315690 reverse strand)
ttttagtcatatttattgcagtctttcagagtaaagtttgatcactgtcatattcatatttttttttttctttattcttagcttatccaattcctatgcatttttcatttaatgtgtatcactatcatggttgaaatgaagcatgtgaattgcacactgtactagtaactacaaaagataaaagaggtgaattctaaatgttaatatttctgactgctatctatctggcatgactgtctgattctgctaattttgtattgtgtactctgctgattttgtgctgtaaaactgtaaatagtgtttaacaacactcgatgaaaagtagaataacttagattttgatttacttttgttgctgcaaactgatggaagaaaggcagctagagtgcttgtggttttcacccacttttacagtttgtgatgcttaaacaccgaacaaaaattatcatttgttgataggaagaacatgtttgtgtatatgtatattctcagcattgaagtcttttttaacaattcgatcagaaagatcataatccaaattttaacttctattcttcttgcatatagactctacaaccaattgtgtaagtttaacttattattattggtagttatatatatttttttttacaaacatcacataattgttatagaaatcttttgtttgatactctttgtaaggatgcagatgaaatgctgcagctgtttcttttgagcatgtatttgatgttcaactgttgttgtttcaattttttctaacactaattgtataatgaaattttcttctcatacaggttttgtctctcaccgtacaagtttcgttactgaa

SEQ ID NO: 4671 - DNA, 795 bp, Medicago truncatula
  Intron number 1 from transcript AC233671_11.1 (locus AC233 671_11) derived from phytozome v7.0 (chr-ID AC233671; pos 39961 to 40755)
ttgatgtaattaatgattttatctctctttagtgatttgaatatgtgaagaattcttcatctttttccattgtttctctaaaaaacaatgttttgattagtgtgtaagtaaatatagtcattatttttatctttgccttctttatttcacgtgctcttcttatatttattttcattataaaaaataatgggaatgtccttaacgagtattgttttattaaggttgttgagaatatatatatggattagagaattgcacttatgggttagacaatttatttttaatacaacaaatataatacaatagtatgtgtattggttttatgtagttttgactttttatagacgaggttttcgttattactcagctcagtattgtcaattaggaatcgcgaaaaatagtggtttggtcaaattccactactcaacactgctataactccgctacatatgttatttcataatttttttttgcactaaatagaataacaatggcagtttattcaaattctccaatgtaacatatctatagtgtggctatgtaacaacaatatttcgaatcagtagctaggttcgaggagcacatgacttttcatagttgggttaatattaagacttgataagttatcaaaggtttaccaatagtgttgcgtaattgtgttccttcttttccctcatttccctttcctgaaatctcttacttattctatattctgtttggttcaccctacatgtatgagaaattgctaacaacaaatttatatgcctcattacaggtgaaaaatctcatagagcg

SEQ ID NO: 4672 - DNA, 1543 bp, Medicago truncatula
  Intron number 1 from transcript Medtr7g135640.1 (locus Med tr7g135640) derived from phytozome v7.0 (chr-ID MtChr7; po s 32325345 to 32326887 reverse strand)
ggagagacttctgattttgggttcggagctactaggtagccaaaattctgtgttgtttatgtgtcatgttttcatgtttaaggtagtttgagaatattaatgttcacataaataaaattatgtactccaatgaacaagttatgtattataatgatttgcatgaataaaaagaagcaattacaaactacaatacaaattagtacaaatgaatcaggtttgaaaacaattatgttgttgattttcaatgtcttgtgacaaagatatctcacttggatatctcttagcatatgtaatcaattaattttttagattaaaaattgttaccaatgttaaaagtttattcattacttattaaaagttgaacatgttaaaagtttttgagattaagcacattagtaattttacaaattttacccacaaacaaataatgtttacttcacttataatttacttatgtgctaattaaatttttattgattgttcgtaaattaatttatgctcaattctttgtaatctaaaaaaaaacctcgttggtattcgttttccgtgcatgcaagttagtccaaaaattatatttgggtaacataggaatgctaaggacagttactcgcgcacactctcttagactctcttagacactctcagtgtatggtgcaaacaggccttcttttctattatttacttagtaaccggatcaacagattaatacttaagtgacttgcaacattttcttttaggttaaaatgcacttttggtcccctaatgttcacaaacttgcgattttggtcccccaagtttcactacaagaaatttgtaattttgtgacactagatttgcgacagttcaataaacagtcgcaatctaacatttgcgacagttcttgcaaactttttttacaaccgccgcatcattttttacttatgacattgcttttacattatcatgtagctttctctctctcttttgtctgcacacgcacaatttcccttccctctcattataaaaaaaaaccccaaatctccaaaataacaaaaaagagagaaaaccccaaaatttcactcatttaccaaaccaccaaatcgcaaattgattcactttacatatgacttcaatctatacttcacatatttagtatatttactttggcaaggatatatctattaggccttggcttgttcttctaagttgcagcaatgaacacgacacaatgaaagttcatgaatatagaaatgacccaagatgagttcattgaaggcaacatagggacacataattcacttcatttcccgaaattattatcaaattttctgatttttctatcccattcttattttaaatggttttttgttacagtgctatgttttggcttgttgtctaacttgacattgcaaattttcttaacagtggccttgattcaatacaccccttctacgcattcacacatgacattttccgttggtatgtgcataggttgcaaaacgacttaaagctatatgtttcaaccatacaatatgaaacatgttcctgttgttgagatagaacc

SEQ ID NO: 4673 - DNA, 2289 bp, Medicago truncatula
  Intron number 1 from transcript Medtr2g126260.1 (locus Med tr2g126260) derived from phytozome v7.0 (chr-ID MtChr2; po s 30551830 to 30554118)
aatccttgtgctccttgctccttaagttctctctggttttcccttgctttttctctctctcaagtggtctatgatatgatatgataatatctggattaaggtttggggctatttatataattctggaaaattgcagcgtggcttagccacgctcactttgcttagccatactcagatttcttccccattgggtttctgccacatcagcattggatgtccaaaaccgccttagctcgcctagccacgcatatctctcgcttagccacgcttcatggctttgactttgcttagccactctcccatattcagatttcttttgctctctgacttgcattgctttggcatggctttgactttgcttagccacgatgacaacatctaattttcttcactttctttgatctttttctcttggcaagcaaatccctacataattggttggtattaaacataaaaagcataaagtggtattaatctattattttggagcttttcatgagataatttgtaaaacaagtaattaaagtgcctaaaatatatatgttatttaactaatttctggcacttatcaggggggaaaacaaaaaatgacctatattacaggggggtaaagcaccattaacccattaaaatttgatttattttggtcccttaacttctatccgttacacattttggtccttttttaattcaaaaatgttagattttcttcattttcttctcctctttttcatcttcatatcatctccatcaaccttcaacaacaagaatcccagaaaaattccagaagaaaatgaagaaaacctaacgtttttgaattaaaactaacggaaaggaccaaaatgtgtaacatagagaagttaagagaccaaaataaatcgaattttaattaagggaccaaagcgatactatacgtaaatagttaaggaccaaacatgcaatttagccttaattattattttttaacatgagacgaattaaatatgaattttttaatcgcgaaaaattcaagataaaagtaactaaaatatgggtctagaaatcagattttgagatttttttagcggggaagttttttataacgatctaaacatgtatacaaaaagttgttaaaaacttataagagtttaaggttagttaaacaaattttgtattatttgagacaaattattaaacaaattttgtaatactgataccttaaaaactaataaaattattaaaattaagtacggactaaactcataaagtttttattttataggaatcaaaaacatatttaacccttaattattcaattaaagattaaatagttaagtatttaattagttaatgatgttttaaagtcttaacaatgacataccataaaaaaaatcaattggaacatgaaacataaacttttgtaaaaagtgactagtattacagtcactcacggaattatatttttcacgaaatattttttcctaatttaaaacccttcaaccgtgtcctagattttctcaacagaaaaaaccgtgttcttgacttggtttgagaatatatatatatatatatatatattttttttttttttgaaataagatttggtttgagaatatatcttctaactaaagtatattatattttcaaatcaaataaaattgattgcttcctaaaaaattgtttcttgttgataaagccaaaaccctatttcataactataaatatagagaccctgaaagagcagacatataacggtgagacgaaaagaagagtttttctttttctttctgaaagtgcttttttggtatgttccttctatgaatgttatgttatagtagattggttttagtagaatttgtttcatgtatttgttttttcatgtgtggtacacttatagctagcatgcataaactttgtttgggttgatggtgagattgtcggaattatggtgagttattattattttggcaaaaacaaaactacacttttaaaatattaccaccatgattttatcaaattcatcgttcatccaaacatacactcaaataataattgtatacagtattcttctttacgattgaaaacaatatcttgaaaagttctataactcttggtggtctgatttgaggaccactgttttctttattgttgaaaggaacgactgcaaaattacattaccattgttctctgtgtttttcctttgattctaattctgcatctgaagtgtaacgtattacttgttgattgagtttgaccgagaaatttttaaacgaagcttgttatttttctcgttcagattctacagttgaa

SEQ ID NO: 4674 - DNA, 1424 bp, Medicago truncatula
  Intron number 1 from transcript Medtr5g029880.1 (locus Med tr5g029880) derived from phytozome v7.0 (chr-ID MtChr5; po s 12484070 to 12485493 reverse strand)
ttttccttagcagaagtggtagaggaaggcttggagttttgccactctaagaaatttttcttttacctttttcttctttttattcctctttgtgaaagcatgatatgatatttaacatgattgaatctctatattatacatattgatattaatatcaaagccaatccaacaaagtgtgtaatgtgtaatgaaatgtttttttttttaacgccttgttcctaagctagaacctctttctctcttattctctttctctcccacgccctctctctagcttctctccattctctttctcttctttcttgttttctgaagttttttttgccaagtgtagatgtgaatgagggaaagtaagaatgtttagtgcttaatggagtgtgagagtgggtttcaacggaatcaggaattaagtttagggagaccgtgttgaaatgataagatatattcaaagttaaaatatctacaagattataaaaaatttcaaggatataggaaagattgatatcttgaggcttgctagagaaagacgattaggtgtttttaaatagtagagagagaaaaaatgaagcaaataaaatataaatgtaggaggatgaattcataatgaaattgcaaacactaaattattggtagtggttaagaatgtgcaaacaaaatcgcatacaatcgaatcaatatttttaaataaaattgcaatgaagaatttaaaattgagatctagttaaggattatagtttgtagatcgcagacaaaacctcatttttcttttctctttgaaggatttgaaataagaattagtgcagttaaacctaaaaacttaattgtttagtgtccaatatattgaataaaaaaagtatattatacaacatcatataaagttcacacaaaatacgtatatagtagtagtaatacgtactaatataaaaaaaaaaaaatgtttggaacaattgaacgtggattttgttgattccctttctaactccgtccctggatttgaacttagttgggttgctaatattttactaaatgcacctcactcataatatacatcttataaagcttcatctacatcgcaactttgtgaaccaacgtggcatatgaagtcaaatacttcaaggtagtaagctcttcaatttttggttcagtctccatctgaattggtcacttttccattagtatacctttaagtttcatttagaagtgtaaattattttttactacttatttatttgttgggttgtaggaatctatctatatttgtagttcttggaaccagcgagcgcattatcgttagtgaaggtttacggtgcattaaatatatagaattcacaattgtgtcatcgtgttgcttcaagtcattaaggacttttttttcattaatgtaaacaggttgaagattcaaggtgcactttcaataagctagt

SEQ ID NO: 4675 - DNA, 364 bp, Medicago truncatula
  Intron number 4 from transcript AC233661_13.1 (locus AC233 661_13) derived from phytozome v7.0 (chr-ID AC233661; pos 77321 to 77684 reverse strand)
ttgggttaggacttatgacttggaggtcaggggtgtagagggataaatttgtagtttgaaatgtagtatttaactaaagcttgtagtttctagtttgaaaccctaagaattgcatagtggaaaactacaacaatcactctgctagcggagacgttggtacaattggttgaatttcgtaatcaatcattgtattcttgtttatttatatatctgtttactttaagccagattttctattttaacctcagagattttatattctgaccctaagcattgcatatttaaaactttccataccatttaattaaaatatggaaataacaattaatatatgtttatactcttttcagtcagttggtattct

SEQ ID NO: 4676 - DNA, 1846 bp, Medicago truncatula
  Intron number 2 from transcript Medtr6g078130.1 (locus Med tr6g078130) derived from phytozome v7.0 (chr-ID MtChr6; po s 15842726 to 15844571)
cttcaaggtacatatattttcatgcttcttatatatgacttcactataatataattataagggaattgttaacaattaccatcatggtttgaaattgtaatacaaatccaaaattaatactataacatcagggctttaaaagtaatttttttttgtaatcaaaattatatattaaattaaattaaatgaagtacaatggcttttctaagactttgtttgcgagtttgaaggggaagagagggtttgaaaaaaaaaacggaaggagtcagtggaagaaataaaggacattggaaggaaaatgctttggagggtttatttttcttcaaaatataaaaccctccccgtttaggaaactaaaatattggattgaaggagagttttggggagtttgggaaggtttgtatgaatttttcaaatataacctatgttgttaaaatattcttaaaattaaaaatatattaatcatagacatttatcactgtctaaaaaaatacactttcaaaaaaatagtgaaaaatttctcaatattcccttatatttctcacctcataaatccattccttccatttccatccaaactcccaaacaaaacctaactcattaaatcaagtacatggatcaaagacacttcacatggtcagctctataaaaagtagtcgaatatttgtaccctccctacttgattaacaattagccctaagattattagtcacaaaaaaattaacttatgcaatcacatcacattattacaatctacctcataccctcttaaaaaattattctatttcataacaaccacgaccaagctacaacaagccaaaacttatctaactttctaactcagtctccttttaactaaagtaaaacctgcatgttgcgaaaaatgatcaaactccactactgtgatattgatacattccatcaaatcccaaccaactctaaactattcaccacacatttattagagaatggacgtgggaagaagaaataattgcaactttcattttgactaaaacaaaatacggatgaagcatcaaagttaagaaaactaaaatacagtttattttttatttttttattggcatgtgtgtgtgtatatatatatatatatataagagggatgaaattacaccaatgtaatgttacattgctcaatataattttactcgatgcatatttttcaaatttgatcaatgaattataagtttatatcacatagataattcacgtaaatttttaggaaaatctaaaattattttttatgttattgacatacactaagattaatggtttatgaacttttatagaacaccgttaatcttgttgtatctcaataatatgtcaaatgattttaaatttacgtgaatgatctatgtgatataaacttacaatccaacggtcaaatttaaagaatatgcattgggtaaaatatcaagtagtgtaacattacattctttgagaaatgaactatattattaaccaatataataagtactattaaaaaaaaacaaaaatttaaacaaaatcaaatattatggttgtttaaaaatcaaaaatttaaaatgatcaatcaatcacagtatatatacctctattgactattaatgaactgtgaccatttcgaatcaaaatactaattagttccaactcataactactaacttagtatatgtacctattttgtaatggtcattgatactgatattttattttattttgaaagaattgataatgatattgaaaatgttcattttgtttatttgatactgtagataaaaaaaagtacaatcaattgagttctatgattttcttcaagtagattccaataaaagtgaagtaactgata

SEQ ID NO: 4677 - DNA, 2157 bp, Medicago truncatula
  Intron number 2 from transcript Medtr5g094960.1 (locus Med tr5g094960) derived from phytozome v7.0 (chr-ID MtChr5; po s 37653748 to 37655904)
caagcttccgccgtcttcatcatctccgtctattggtatgctctctttttcccttttaccttttcaattttcccccaatttgctcttaaccaaaaccctagatttatgaataaaccctaatatgttaattttttttgttttctttttaattcatgcaattgggtattgaaatagttaattaattagttgaatttcgttgttgctatgtccaattttctgtttccctcataaccttatatacagcttagttgaattgaagcactgttcttattgtttctatcacaaagaggattttttttctataaagacagtttttttctacaccttttcgaaaatgttgtatatagttatgctattttttagtatagaacagtaggaacattgcctagtgttatccattgtggatggcggaaattaaaaattctgtcattttaagcctttgctatttccgctttggtgccttcatacttcacaaactgaccatgaaggttgtcgaaaaatctgccactacaattcgccatgtttgctatttgacaatacatatattatttttggtttagggtatgtatctgtaggtttggatgggttttgatatttgttaattgttattgatatcttgtgagttaagagtgattaaggttaacttgtacatgaatttcattttatcagttttgataaggcaacggatgtggaactttggtatttaaccaaatcattggctagtctcgcggttgggctaaattaagtgcttaggcttgtgtagtatttcattagatagggatactgacctgaaagaaaatcaaagcacaattgacttgactgtaggaaccaatgttataataagcataatggaatcttaatctcagctaatctagcgattctttttcacttagattctttgatcgtccaaatccaaatattttttgttccatgtagtgttgaatcggttcttttgtatctgttttcttttggttcaaatgtgagtttttctatgttggaaattctgcctttattgcggtccgcccctagtcgtctaaattgtggcctttggttggccttcattgcagcctccaacaccattgtgttggctttgagggagtggatttagtcccacatcggatagataggactcttgagaagagtttataaagaggagacattcctcaccttacaagccggttttgtaaggatgagttaggccccaaatttcaacattctattttctgtttgtttctgttcagctatttttttacgagactttcattttgaatgtgtgctttcactaaaaaagttcccataagccatggtgtgggatgtatctgtggatttattcagctgatgtggtgcaatacatttgggttagttgattggcggtgggttaaacaaacaggttttgtgtataccaaatttcacattctttatttgagttttcataaataaaatgagatgtattcaaccctaaacattcacccttattctatctattgttgcttgatgccatgattcaacctctctatagcttgatagttggaacttcacaaaacataatttcaagcaatgtgtttattttttctttttattgcaagactgatgatacttacacaaatttgtgcttagtacgttcatgagacaccattttctgttatataaatatataaataaataattacagacattgtcatccttacttttacggtatgattacccagctactaatagtctaatactataacccaaaccaaatcgagcacagaaacaatctgtcaacgcctatgaatcacccaaatctgtgtatttatttttaatttccaaacgtgaaaaggtttacaggggaggtgacccttttgattttagttagaaggagttccaaatgtggttatgatagaacattatggcgtaatttgatccatgtggccgaccccacttagtgggataaggcttggttgttgttgttttgtattttacttacaaggaatattttcacacgttattacaatcttagcatgtcaacgttcaagcatttttatttgtttatttacaatgaatgtttaatacttttgaaagatttatttgtgtctgaaattgaatggatcactttacaatgcagcaatctttgaaaatttgttccataactttatcggaaagtgtgtcgtagtc

SEQ ID NO: 4678 - DNA, 3156 bp, Medicago truncatula
  Intron number 2 from transcript Medtr1g037480.3 (locus Med tr1g037480) derived from phytozome v7.0 (chr-ID MtChr1; po s 8804246 to 8807401)
aatcgaaacctgttatttctcacttttcttttgtttttgttcaccattatgctgatttactcatgctattatgtatattggttgtttaggttttctgtctagggtggacgtaggtgacaggtttattatcactcacaacagtcgattatactaaaatctaatgtttattagagcaatattttaatgattgtgagtaataatcgaccgtggaccacagtttgctctagaagccgacgctgtctatttgttcttactgactcgacttttttttccttttctgttcattgatggatttgagtcgatgtgttatcccatacttgtttagttggttaaaacttgtgcctatccttttctcttgaatggttcttcatgattaaaaccggtaagcatgcagtacataggtgtaagtatgtataacttctagttctgtactatttgatgattaatgacaatgtaatggctatttccataactatatgtccaactaaatcatggtttgaaaatggttacgttaaatgtggaaaaggacaattgcaggaaaagaaattgtgtttaacacgtgctaattttctagcggttatagtggagcccttcaattgttaattagtgagagattatgtctatggatcatgaaaattaagtgttgcctttgtaggtatttaggatagcgaagttcttaaaaagtcaaaacatatatgtatagggcacattgacattgtgtcggctgtatccaagaaagaaaaagagtagtcacttggtgttttaccatgtaccgaacccttcaattatgccatgtctggttcacatgtgattttattccattaaatagtttcattgttggaattttaggaattcaggcttagcagggggggaaggagagagcaaaatttgaaaaatcgattctaatatttatatacggagtggactatatgttagaaaagcaatgttttcaaatagcggaaaatcagtgatagctgcattatagcatagaggatttagatcaattttctatgaaaaccgcgaggctgacctaatttcgctattgggcgccgctattccactttctgcttgctcatatagcggcaatagcggaaaaaagaaaattttagggattttaaaaataataaaactggagaatatgcatgaatgccaaacatgacctattatgaaaaatagaaaaactaaagagtcagcgttactcctatattcactgtaatacgtaaaccttccatatgtaggcacgctctccttcattctcttttttatttgtatgcaatacgcgctttattatattgtatataattatattgacttatttcaaccattatatgcggcttcctctatttgccgcaacactatatgctgtttcacaaggcgggtttttggcgtttcactattttccgcaatcctctaacagaatacaacgctaactctatttgtagagttaaggtgtacagctgtatttgtttttccctttatctcctgtttcggttatgaattaattagaatcaatgtattgataattagcttcgttgtattattgtccttattagaatacccgagtgtttactctataaatattgtccttatcagccaagttttcaatttgctctcgcagttttgggaaaaaatctcttgttgctatctttcactgggtagaaccctagtcaacctattagttacattctcttagtttctataccatgtctgaggagaatgtttgaatagtttctaacggcaagggtataatgttctcaaaatcaggtcacgtagacattgttggtcacacagattctgattttactgacagaaagtttgcatcaggtatttgttatttgttggaggaaatcttttgattggagaagaaacaaaatgtaatgtcactgtttagcgtagaatcaaaagttgtcaatcgtgaatcgcagaaatcaatggtttgttcaaattgcactacgctatagtgctatagcctctatttgacaacacacagtactgaatcgtgtatcacggaattatagttatttgttaaatttccactatgctatagccgctatttgacgacgcttttagctgctatgttgtgctcttcatcatgcaccacaaagcttatatggataacattcttccagttgaacttaggtttggttcggaaaacctatgtcacctatttgtgataacgtggaagccattgaaattacaaacatgatcggactaatcatgttgaacttgacagtcactgcgtcaaggatagcttaaacttaaatgctaacaggataccctatattaaaagctctaatcatctagcccatacaatgacccatgcagtccgtactggtgcatttgattcagttatgtccaccttatgctttaagctagttacaagtatatgtcacattgatgctgaagtatttcatgatttgtctactctgtattcactgctctagaagtacattactctatcacataaattgcatattgtattgaaattttggttttttggttctgatttatctcacaacgtgtcttcattaggatgaagattggacacagggccctcacacttccggtaggcaaatctgttccctttcttttatttgaaatttgagtgatcataaatagttatgtatggaaaggacattttctaccatttatcttctcaatattctcactgagaggacgtttcttgctggaaaagtttatagtttgtaacattttaattcatttgtttgttttactatgagcatactctagtgtgtagaccggtttgacaagcattactacaaatattagtaaatactgtaaatcgttctctgttcttttgcatgacaagttttctcaagctaatatttctgttggttggtgggtggtacttttggttttggggatcaaattgttaaaattttgtaatgtattttggaaaacaatttattaatatattatattatttatgccctatctgattgcgaatgattaaaatttcagaatattgcacatagattgatatttttcacgataactttttgccacggtagttgacttcctcttttggtctagtccaatgatatattggatttagttgaattttgtatggtatttagtagaagaaggtgaactatcttaatatttccttaaaacttttgacagcagtgtctaaag

SEQ ID NO: 4679 - DNA, 2933 bp, Medicago truncatula; identical to SEQ ID NO: 4233
  Intron number 4 from transcript Medtr7g092580.1 (locus Med tr7g092580) derived from phytozome v7.0 (chr-ID MtChr7; po s 20420985 to 20423917 reverse strand)

SEQ ID NO: 4680 - DNA, 3532 bp, Medicago truncatula
  Intron number 3 from transcript Medtr3g026560.1 (locus Med tr3g026560) derived from phytozome v7.0 (chr-ID MtChr3; po s 7172555 to 7176086 reverse strand)
tgccgtgtaaacttccaaaagttactggaattatcttcaattacaaggggatctacatcatttaaactatttgattgatgatgatatttacatcatgttgtttgaagactttttagtggtttttcattaaggaaatgttttgggggtaatttcatttctcatacttgttgttgactcaattaatgatggtaaaaggtaaaactattatatatttatagttttattttattgcttaaaacatttttgattggttggaggtgtattttggtgtatgatgaacgtctaattttgctataaatatttatattttaggcaagttaagacttatttcttgttgtttcatgtgagaagtagtatataatcattttgatatgattttgaaattggtctattttgaagtctttcaagattatgctctttttttcgattgcaatgtgaaaggtgaaatattgtcgtataaatggtatttactctaaggagttaatcttcactttcaagtaaatccaagtttctagaaaatttttgatgtttgatgagcattgttcatagcacaagattaaggactttatcatggaaacaattttgccagcgaatcagattttaagtctaattaatagactcttggtaggtatgaaatattgttagagattgcagtatgtgtttgtcacaaaaatcttgattttgaaagtgatgaaatgagattgatgaaggatacagagggtgtttgtagagtttacttgcaggagtaaagttatgctgtgatcatgacaataaatctaaaaattcaccactttcagcgtgatatacaccataaaacgccagggctcgactgttcgtcaagaatttctcatgacagttgtcaaatcatctgatacttcatctgcaatgtctgatatttgacaacattgttcatgtgtggatgattttgtgttttgttgattgctaactagaattatgctgcaaaatagtacttactatatactcctaatgtcgatgcttttcagatgtagcttatgtcaaatatcttagccgactaatgtcgaatatctgccgactttgcatctgagctatgtaacagaataattcaaacattatttagaaaagtggtaatacaagtagtttattgcaaccttataaaagttgaaatccctataagcctcaattttttttaatctccacgaccacagaacagtaataggttgttctttgttcacaataataccctttccacataaattcttattagcctcctcagatctacaatcttcctttcaacttccttcttgctaatattcttaaagtaaacaagacacactcataaattttagcaccttcctcaacatccgctagactctcaccaacaataatcgtgtctcttctcttgctcacaagttccctcaaaacattacttatttgtcacaggaaaacaatgatagatcaagagtgtagtttgatgaaataatctagttacacgttttctcttttaatgtatttttttcccataatcaaatctgaatagtattcactgtttcattttagcacagcctagagcaatagaactcatggtttttcgatttgtccatgtgaatgaaaaagatggagcgtacatacctaataattgttaaaaatctggattcctaaaaagaaaagaggtacgaataagaggaaaatttcagtacatgatgaaaaagaaaaaattgcatcaagttggtgaatgactctcaaagaataggtgtactaatttacatagttgtcggtgtatttcctaatatggatttctttatgaaaatcattcaactttggtatatattctcatgaaacttttaacttgtaacgcaataattatatgataatataagtaataacgttaaacataattaaaagattggttagggatgaatcagtcgagttgtgtgatgcgttgtgctattaaaacctcatgttttgaaattcaccctcgatacgaacctcagtgtgttccgcttatctgcaagttttgcagtcaggaatatgatagagtagcagtgattaatgtacttccccatgatatgaatcatactttaattaaggattgcagttgttgcatggaaaaagcaaagaaatcatagtaatggaatgccttcataagtcatacagtaaaaactatagatgaggaaacaatggtgaaataattcagtttggtagagtgagataaatgtttagagaagataaatgagcacagaatttgctgatatgtgattgagttggtaaacatcaattgatgatttaagttgtggattgtagttcttttagacaaggctttctttagatggtttattgctaatatttttcttaatccaaatgctaaaaaataaatttgataatagtaatgcatgcattgatatcatatttcactacctaaggatatcacggcacaacatgtacactgttcaattttattgtagtggctttgaatttgaaaccagtttccaatagcacttcacattgctccaaccttatcaggaatatcctctgaaccttatgagacaacctattgctacattcctggatcttcaatcagctccaaccccattttcaacagcaagagatacggtggcgaagctagttagccaaaataatttatatttttacgaatcttatcttgacaatcttcgttgttgacaaaactctctattaataattttcacaaggcttgcaccattttcacttcctgtcatttttatatgcaccatcatttttcgcgtgtcctgctcctatatagcttatcatggtttctaatagaggctagcattagacaataataatttaaacaagggaaatgttaacatgttccataagcataaatgttagtataccaaaacttgaaatcatgcattggaaaaaaaaattaacttccctttctaaaaacattcctctctaacctctctctatatttatatttccatcggtcgccctcctcagtcctcccttccaatccaacatatctccatcttgatgtagatgcagtcattggttgtgagacgattggatttggccgtccgcatcactgagccaccaatttctagatccggatcgtggtggtgttgtttgcacgattcatggtggttttcgggttcgtgctggtaaatctagatccatttctttcggtggctggtactttgtccaccacttgttgggtgttagtgttgtttgttggttgagggttgcttcctatgaagcatatacactccttggattaggcgtgtcgcggtgtcggacacgtgtcgtgtccgacaccaacacttgtaattacaccgaattatatgatttttcaaattacaagctgtgtcggcatgtcagtatccgtgtcgtgtccggtgtctgtgtccgtatccgtgcttcataggtcgcttctctgtttgttggcttctctgtatgttagtattgttgtcattatgttgtttctttctttgtattgttggtgtttacttttgggttgttggtgttagtaacactaggtggtggctattggtcttgggttgaaagttggaaa

SEQ ID NO: 4681 - DNA, 5473 bp, Medicago truncatula
  Intron number 13 from transcript Medtr8g074050.1 (locus Me dtr8g074050) derived from phytozome v7.0 (chr-ID MtChr8; p os 14657853 to 14663325)
taagcagcaggatacaaaaagcttgagcactaaaggtaaaatattaattttccatccaataatacaattcttgattctttttaacggtttaagtaaatcggagtttttcctatgaccgcaaaaagtttaactaaaccgcgatgaacttggtggagcaagaggagagaacaaacttcaacatattgttgaggaatgagaatctggtggggtggagcgggggtggtggaacatcaagaacctccagcactcgagtgagcaatgatccaatttgaaggaaaattgtagactgagtgcgtacctcgtatctgagcttgtaactcctgtatgtattaattaaatcttgtttggcgggagattcagttaagcaggtaactgaatgcgtatatggcttcattggttgcggcatgaagtgtgggagggggtagcaagatcccaaagcataagatcgtaggatcctaccaaaagttacctaggaccgagagggcgttgcaagataagtgtaggatcgcaagatcctaacaaaatgaaaaagttacacacacattacataaactaaatataatgaaataaggaaattatttgcagccaagaaatattttatttaacatcaatcgaaagaaaatatttgatttaatcaatttaatatagttaagaaatgtttaaaattagttagggaataaagtattcttaatttatttaatgtggttaattaagaacacagcccaaaccaatatcgccatattaaaccaaagcactaaaaagtaattggaaaagaaaagtaataaaaagtaaaagatccattacgttccataagtcaaaggtcacgcttatgtcataataacaagatcaagtcgcactactattataatgagtggacccaaatagaccaatactctttatagaggaaatatgtcataataaaaagaggagattgctctttggactactctatttgctcttaggcaccgtaaaacttacgaaaacacccccatcggcagttaactaccattggtctacggtagttaactgtcgttccatatccagacctgcatatacaagaacaaaaagaagaaaaaaacactcctacgacagttaagtcccgtataattccatcttgcattgcattgtcattgttcaaggtcattattggaattcagtttggatacgatcatttttttttggtgaatgggttattcttattcttattgggccgtgtgatgttttcgctgctcctttgctaatactggtgaagtgtcagttattatgaggagtcgtgtagacagttggtaaacttttaggggaagtgttacctgtttgatccctctagaatttctgtcagtttgtttccctttgttagtgtttgctttttcttgggtgtcattgtgcgagtcttttgaagcttgtgcttcttttgattaatagcttcttcgcattcaactatattgttttcttttctcttttttgtattccctatttttacatagtcatgagggagaaattgttgatccctagagaaaacttggggttggcttcttttcttgagggtcctagctctacttggttggtttgctctcggtcaattttaaatgaagtcatgttgtcagaagggtattctcctacacttccgctttatcgtatacgcttccgcgttattgtattcagaatgagacttctgttatgggtgagtttttcagtgcagttgagcgtatgattcatattcttgagcgaaagctagagttgttgataggttgttctgtactcgttgtgaatttgagacgaaacgtttccttttagagttgttgaaacttgttgactcttgtggtatgttcaaatctatatgagatgggggaaaataaagaatttgtattaggcaagggcttatacaagccttgtgatgctgtttttgttttttggaaactcgatatctggcccaaagaccgactaatctgggagaccaatcccgtcgttcacaaacatggggtccacttgaagcttatggactgacccaagacaagaattgttgccaccaaggggatttaaacttaaaacctagaaaggagcagacttctaggtctcaagcctttaccagcaggccaaccctaagcggttaagccttgtaatgcttatttgtatagctaacttgatgaaggaggttttcctcacctcttttgtgtatgacttcagaagttcttcacggagtttttattttttagttcatggtacaaataagggtaagtcttgcttactttgaggctttggagaatgtatcttttatagagtcctacgttggttgggagatggcccgagtaaatgtttataagtgggggcaatctccacatcataagccagttttatggggttgtgttaggtccatccacaatttctaagatggtatcagagccttctctaagatccgttgggccacctgctatcaggttttccctaacgggccacccaccatttatattcatgtgccaagtctaatagtgttgtgcgtgagggtgtgtgttaaagattcccacattggatgatagttagtatgagcaagtgcttataggcggaggcattcatcacctcataagccggttttgtggggttatgttaggcccaaccacaatttctaaatttatattttaggattgaagttaaggttggggcgataaacaacggatccagagtggggagagtacttcggcttctagaggtccttttggtcattgttcatcacctatttgtcaagagcatttattattggccaggatcaaaaatatttgtagtataaaacatgggagatgactcatagtttggaatatttttgaatcttatgacttttaatatgaggaaaattcataactggtttaagtattttgaaccaggtcataatagtaagcctttccacattcgtaagtgtctgacaagtgaacaccgtaaacgctcgatacatagatatctttaagttgttaccgctttcaatttttgtggttgacatatttcccatttgaatatttcagattcaatggagtgtctatccaagctctttgagcttttcaaggttgatgggcaaccaacccctagtcttgaggttgtggttgatgttaccgatgccactcctcttcctaaccagtctcctaaaatgttagtatctcttgatacaaatgttgagatttctcaggaggtggaagttgatggcgttgttgtacctcccatcattacttcctttaagatggggccttatgaaaatagtgcgcaaacattaccaaaagggataatagttcttgcaagtcgagaagaggtttttagtgctgagataggagagtagacgatagttctcataaacgaaaaacactaacccgctcgactaaagaagcaagtggcaaagttgggtgttactattgatgagataaaatctctgttgcagaagaacgaggaggtgaaaatcaccaaggaagagaagcataatacttcgaccaaaacaggggaagttgaaggtaagttcaatacaatcaaaaggtttgaagaggtcgttaggacatagatgcctcatatgttaaagagatgaagaatgtgaatgatctttgtagtgctcaatcttaatattgttgggatcatcaaggagagagatggtgttttgaagggatgtgatgagatgtgtagccttgcttattagattggcgaggtgcaatttggaattgtgctttctcaaatcaaactttttaatatgaacaatgtgttcaagacctcaaatatgacttcaatcccacattaagaatgtctgggatgccagttactttgtaatatgtttgattattttataatgattgaacatcttgtatcattttatcgtttagttgcggagttttgttggatctttcttgttatgcatgtactgcgattattgtggtttctcgagtagcaatcaacctcaaaacaactatttagtcttttcaaaacatgtcatatctttcttcaatgatatcttatgcactattcagaatctcatcactgaggtcctacggttaatctttccgaattcttcttttagttcctccaaacctgaaacttcgtcagcaaaccctgactcgaaattatcattaattccttcatctttgtcatgataatcagctaattttgcattgctgtatgtggttacgattccaattgattttctcatagaacttggatcagtaaatttattagcgacatgttgtttaattgtaacatttacgggtttgttactacgttcttaatttcaaaagatttcttttgagcacgttctgctcaacttctcctcccccggctaaaaggatgtgttcctcatcctgatctgggtgttggctaggtcagggcgcgtacttggtttatttgcaatgattcgttatcggttatggtttttgaataaatgtctaaaagagtaggtgcggtaaatttttagctgaaaacttacaaaacttttctttatgtatagatcttacatgatacatgaatgggtcgtaaagtgcgagggttgaaagatcctaactagaggattgtagcacaaatcataagatcctactaatccaacctaaaatagaaaattatatgaaattatacttgtagtctttgtataggaaattatacttgtagtcatatacacagaagcattaagtatctatactgttaataaaggggatacatgattttattaggcttaaatgtgattttggccccctaacaaaaaatgataacaatatagcccccttaactttacaaaacattgcaaaatgcaaaaaaaaaaaaatagcaattttggccctgtatcttaaaaaatatacacttttgaacccttatcttttggcccctgttttgagacacgtgatgtcttttgagcaattttggccccttatcttttttttttcttgtgcagcgtaataatatatctaaattacaattaaatctattaagtctttgttaactctcctttgtcggtccctaattttaaatagtagcggttgttgaatgaatcgaatgaaagcggaaaggcgggtactatcgtgcccgtcttgacaccggtgatagataaaggaaaatagtctttatttgtgaaatgtcttgggcttgctttgctgaaggatgccttgagccagaacattccattgtttatttggtttttttccttccaatttagttccttttttgttataatggaatgcataagttccttcccccgcgtttcttcctttgaaaggaatctatgtgcacataatttgtacaatggaatgcatctttgattatatcgattcaaaactcttgatctctagagctattgtgcatacacattgcaaaataagtgttattgtttgagcacatggaacttggaatttcaaatatgtggtgatcacagtgtattagtttttttattcttctgattcctaactcctttcctttactgtggattacagccttattgggagagatcaaagaaattagcgagcag

SEQ ID NO: 4682 - DNA, 3228 bp, Medicago truncatula
  Intron number 1 from transcript Medtr7g134640.1 (locus Med tr7g134640) derived from phytozome v7.0 (chr-ID MtChr7; po s 31840573 to 31843800)
gcgttgtataaggtatgtattaagttaatcttttaggtttttttaataccagatcgattttcaagatataatttttttgcactgctgccccttttatccaactctattagagggtgcttacgtgatcgttaaccgctgatatgcaacattcaaattagcaaaagatttcattaattaatttttattaaaaaaaccccaaaaaacataaatttcacgacagagactttatattttctacataatttattccttagttatggtttaaatgctagctttaggtaataacttgttcttttttttttttttttttttgaaatgaaggtaataacttgttcttagttctaagttatactttgttcaatgtttaaaattgtagcatgttagatcttcaataaacaaacaaattttttcggcaaaaatcaaacttctaaccaatttgtttaaaggctccaaattcctagccacgcaaatcagtgcattagaatattatcctttctttactgcacggaatcaataatattattctttacattaccagtaatatgttcattgttaccaaatgtttttaagaaaatcaattgtatcattatctatgttttgactcaactcaaacaatttttcacataattgagttatttttctgtccattctctcaagtttccctttaaacaaacctttatctctttctcttgccttaacacttgccaacttgtgaccaacaaatcaaatgatttgatcatcttttcaaataagtagattctcaacatgaaaaggactttagaagaattagttctttcgaattttgttaggtcgttttgcaaatgaaaaaactctttttttagcggatcctctacgatttctctgcattttgttcttcaacaaatttcttcaaattttgagtttcaatttgatagtgataaagcttattagctaccaacatgtaatttttactagatcagttgttacatctctttcactttagaaaccaactttagaaatttttattccctatctagtggacaaaaagatgtgatgaactatctctatcatttgagcagttcactaatccccaattcaacctttgcttcattgaatgtaatgtaattaatgccctatcttttgcaaagaaaactaaaaatctctatcaatgtacaattgattaacattctgaaaaacaaagtatgaattgctatcattacttcccctttcaaattttggatggtgttgccgataacatctttgattggactttgaaccatttatttatcgaaagatagatcaacaaccttgttgatcgcattgttcataacaacttcaactttattcatcaaacatttattggaagagttagatgagaaaaaaatcattcactcacaacacattttttttatcaactatatttcgaataaatctaagtaaagaatggtataaataaatgactaaaagattaatttagtaatataatcatgactcaaagattatcatccataattaatgccataattcatttggctttatattagaatacataatatgtacaagacttcaatcaacagaataccttctatacattttgtctacattaagctgtttaaaatatcatttgcgacaatcaaatggagaggttgaaataagtatgcattttaaataacatttattttgccttaaatttattaattgcaaaattaatgtcatgttttttctcaaattgatcgacaatagagctcttctatttttaagaagatggagtagaagaaaagatgaccaagaaccagaaatcacaatgagaggaagccgatggatggatggcacttctaatcttagtgttgcaaatgcagtggaaaatgttatataagcaaattgtgatgaaagaagcttttcggactatttcaaccatggttgtgactaagaatcatatggaattaaacaataatacttgattatttacataattggatttatatagtcgtatcgtagcttgcatataaattgtttcattatatttttgttttatgttaccataaaaaagatcttaatgtcatgtaaataaaaataagagcaatgctatatatcaagaaagattttatcaagaaaatttcaagaatgacatggcagaataatcacccttagattttatcaagaaatagtcctgaaattaatgctagccaataaaatctcagtctggccggaaatcatggggtggtggatgttatgtatttttttttatgaaagattaataaatgagactgaaatctaaaggtgattattgtgccatgtcattcttgaatctttcttataaaatcattcttaatatctagcattttcctaaaaataattaatctttgtttcaaagatgtctttaattcttgtaaccaaaaaaaagatgtctttaattctaagatgattagcaacttgtctgaaacttttttttttttttgaataaacttgcccgaaactatttgaaatagaatgtttttttgacaagaattagaaatagaatatattaattattcttcgattatccaagtatcattagaatttattgtattgtattgttagcaatgttgacctgagtagtgagcacagttaggatggagagtcgtcccgtgcaaaattttaattaataagtatattttaaaagttatattatgtatagataaatttatatatatatatatatatatatatatatatagggggcatatcacatgagaatgatatttatatgtgagaatagtaagaataaattgtggccatcagattaaaaaggaagggatgagattaaatgatggtttaaatggcttgttgtacccaatctcaaaactaaattcacgcattctcttctccccctcaaattcttccctagaacaactcatcttcttcctctaattacaacacaaattcaatcatgcctctattcaacccatcccaaaactcaaatttacaatacaaatttgttttatcaattattatgttattttcttttttttggaaaagaacaaattaataaatctgaaaatttattgttgaattttgtattctgggctcatcttgcgccatccccacttacaatcattgtaatggatctgttcttttttattcaaatgcaatgaatttcaacccaacacatagagacaattgactaagtgacgagagaagaagaagaagaagaaatattaagaacaaagagtagcaacgacggcggaggaaaagaaccgacggcgggac

SEQ ID NO: 4683 - DNA, 652 bp, Medicago truncatula
  Intron number 6 from transcript Medtr1g013810.1 (locus Med tr1g013810) derived from phytozome v7.0 (chr-ID MtChr1; po s 2700252 to 2700903)
gtcagccacacagggcaccagatttgcaggtgggacttgtcctcttgaactacaaaaggatctcatttatctaggttaactttttgttttcttcatcagcagaacacatcgtcaacttaaaggattttaatttgttttttatttcatcgaacctaacttaggctctacttggataaacaacttaattaaacgcttatcgcataggcacctatcatataggtgctaaacataaactatttacagaacaaaagataaaataaagttaaactgattttatataagctgttttcataaactattctggagaatttatggaaataagttgaaaacaaattacggacatgtcttacaagtgtttatgccagtagataaactcaaataagtcaatccaatcccacccttagtaaaccaatgaacctctttgagttatatggtatatatttgatgaaataagatgctatcacttcatgaatttgatttgttcactttgatttctgttcatattgtgaaactcaatgttgattttttcttttgtaaattctctaacaaaaaagtcaattcaaatggaatttccttaaaacaggccatctcgttttcccattttattccacgtactaaattattctagttattatacagaaagaagctatat

SEQ ID NO: 4684 - DNA, 1955 bp, Medicago truncatula
  Intron number 2 from transcript Medtr8g136920.1 (locus Med tr8g136920) derived from phytozome v7.0 (chr-ID MtChr8; po s 32721035 to 32722989)
tcgttaaggtgacatcaattgttgttgtggtgaaggtggttgttgtttcaatcgttattgtcaccggttgtttttcaaaggttgttggttgttgtgtaggtgcttgacgttgctgtttgtgggttgtgtgcgagcagcggattgtgggtggtggaagttgttttttgtggcagcttgtgatgttggttgaggtttttcttttatgtatgttgggtgagggttttgggtacaaattttatttttccttgtacgttgctacttaacgaatcctagtctagcatttcttatgctggttaggactcattgtgattttaataaatttcattttcgtttcttaaaaaaaaaaattcaattatttgtctttttcattttttttctagataatagcttactttttttcgacacagaagaataaaatcgtgtaaaaatatgttttaaatgaaatcaaagatcaaattaagagaatcatttcaatccaatttatgttgactaattcaacttatttagaaaaaaaaatcattttgatgcaacaaaaaaccttttcacttttaatcaatgaaacaaactataaaaacaattttctctctcttaaatcggtctactctctcatcagtaatagagttaggagaaataagtgatgcctccaagctattcaattggtttgaaagtggaaggacctttttttttcttttgaaagaaagtggaacgaccttaacaagttctacgattgttaatttaaaaattaaaggtagatattataaatacattataacaaatcataaattagttagaaacactttacactttagatgattcaaatccattacacgtagagatacaagacccgcttgttacggattaaaataaaaatgatttataaaaaaatcagaatcacttttgcgtgtttattgcaaccatcgtgtttattctgtttggatacaattatataaaaaagattttttttccacaaaatcacctttatattttgacaattattttctatctgcttaattattattttttttgaaaaactacttttaacgactattcatttgaagtttttttctagattataattatcttaaaaaatcgaaacaaatgaacacaacacacttaaaaataatgattattttttcttaaataagtgattgttttccctcataattaaataaatgattttattttttgtttacaaaaactataacaaatgggtatatatttgcgcaattcattctaggagacttttgttttaaagaggaatattaacaacatacattttaacacacatatttttgaatatagattggttaaaattcagatgaatccataaaaacgagtggctagtttgttcggtaacttcggatacctacttctccggtttccgcatagaagtccgtcatccttgaagtttagaacatatacagcctattcttcctatcaaacagcggattctatgatccgcctttcgctgggtattgactctatgactattatattaaggagcgcgtcttaccgggcagttaatcggagctcgcctgcttattgaataaggctctttacgacgatgcatattcctttattatgtaagatccatataaatttgataggcaaatgtgaatttcaatagagggcaaaaaagtgtgttaaaaatatgtgttttagcatttttcttctttaaaacaaacatataattaaaaaaattgtgaaaaacaaaaaacaaaattgaaaaaataaataaagagttattaaattgacgagatgattaggaattgatgattttgtagcatcgtcgttaattgtaaactcctttgttcaccggtgcaaagaaataaacacttcacactctttcttctctattcttcttcatctacttcttcttcttcttcttcttcttcttcttcttattctctagggttttagggtttcactctgttcgccaaactggataggcacag

SEQ ID NO: 4685 - DNA, 4078 bp, Medicago truncatula
  Intron number 1 from transcript Medtr7g138510.2 (locus Med tr7g138510) derived from phytozome v7.0 (chr-ID MtChr7; po s 32889364 to 32893441)
caaacacttaaacctgggctgttgtcttcatcaaggtcaagttctttacatattttgtttccattacatgcaacaacaacaatacaaatatgaaattggatgtgattttgttttatttctagagatgtaaatttttttttgtagatgaatcttttttagttccgatgctactgataaaaaagtctgttttttcaatgaatctttgatagaacagatttttttattttttttacagatgaataaaaattttatttgcaaatcaaaagaattttttttttcactttcaatattcactttctgttattacttgttatgatttaacaaaaatttcacttagattttcttgtaatatgactcaaataatattcatttctttctaaaaaaaaattcactttatgctattacttcacttgttgtggtttaactaaaaacatagtttttttatatttacaaatgaatatattttgtatatttgcttttttgttgttgatataattataaaattgtgttaggactgtttttgttaaatatacatgatatgaaggtcaacaacaaatgaaataattaatgatattaggaaaatgaattcttatacctgccgtgttcttcttgttgtcaaagagagaagaggaaaaggaaaatgagagaggagagacagttgagagaatgagagagagatttttttttttgaaagagagtgaatgagagagtattaaattatgaaagagtagtgaatgacaatataggagtatttgaaatttgaaattgaaaatttgccaccaattgattgtagatctgacattagattatactccctccgtcccaaattgtatgacgttttaggcatttcacacatattaagaaatgtaattaatattgtgtgggaaaaagatattatgaattgttttacaaaattgttctcaataaatgatatggaaaagataaatgaaggaattgaaagaagagagagtaataaatagttaaggatataatagaaaaagtaacattaatttttcattggtattgtaaagcgacatacaatttgggacaaatattttttctaaagtgacatacaatttgggacggagggagtatcttttttgtacaaaagaaaacttttttcgttttccgtgtcaaccaaaatcggatttatttagttggcatcaaatggaaatgactttatgaagagcaaatgaactaaactattagttatttgtagttacatgacatcatcttagttaattgtggtaatttgtttgaataaagtaagttaaagacagattttaccctttggtgatttgtcaattaaccaggttggggcattaataggatttccacaacatcttctcttatattaagagagattatcttgtacattgactatacatatgaattaaaaagctttacaataccaatacattacaatcaaccatttgtgtgaccttaaacgtggttatgataacccaagagctcttagatgagatgacgcgggtctcttctagcttaagcaagatcctgggttcgaatccagtcttgggcatacaacatcgttaaaactcgtagggagagcttgccgcctatttgggtcacacaatgctcgagagattagtcttggcagtttcgcgcgcggaagatacccgatttacaaaaaaaaaacgtgattatgataaaattcaaacagttttaatgaccaattagttatatttgattcatacgataaacatcctttgcatttgacaatgcacttatatgaattaaatgtttgctttttaatgtttttgtccaaatggagaactctatattagccttcactgactaatatcattctcacacatgtagctttcgtgaaaagcctatttaattatgtatcaatcgaaagacagggtgacacaacacttaggggtggaaataggctaggctgagctgagctttgtaaggcctaagcctgacctacttcaaaaattatacggctgagcctggcctattacctgtcataggcttattttcgaggtctgacctggcctttttaaaggtctgatgaagtctgaaagcctatttagaagcctattttacactaaggcctaacaacacatgtaagcctaatactaaataggccaaaacttatgaaggtctaaagcacacaaatatgtttgctactaattattgagaaggtctaatcacactaatataccttgctactaaataaccaatcataagtttatgaggaagaaacttcaacaatatcaataatggaagatatattatatataaaaatcttaataggccgccctgacgggcttaataggcttttgtgtaagccttagcctagcctatttaactaaacaggcctaataaaaagcttgagtctgaccttgttaataaactagctgggccgagctagactttaaatagactagacagtaggcccctgtcggacggcctggcctgttcccacccctaacaacactcaagggaatggttacgtccctcggagataggagcatgtcaaatcacttacaccttttaaattttaactaaataattgagtttaggaaaatgttacatagacaccatttattcccatacacccttgtacaccccatacattaggaagagatgtgcttgtgcggggtccatgtggccacgtgtcagatttttgtgtgggtgttaaagggtgtgttgccacctaaggatgtctatgtatcataactcgtcattaaagtggttaataaactgcaaattttttaggaatctgaagttgatttcttagtgaaataacaattcttcccataaataccaagagttaatataaaaaagaaactgtatgaaaagacacatcatccttcactaattcactaaagacaaaaatgaacacctctagacattttactagcaattttcaacactttttttgtttgaggatcagtaattcttcaaaatataaaaataaaaatttaaaaccctaaaaacagcagataagcagctgtgtcaatataaaagaaaagaaatcgcaggcgctgctgtttggccctgtatctgaaacaagctggagttgcagcactgaactctactcgccggaaaacgcaggcggagttggtcgtcggccatcagaaacagtgagaaagtccatacacatattcctttttagtattttcttctctcttctttctttcacagatccataaacatagaaactacatctctcttctcctctcttgtttcacctcgctctcgtcttctcttcacactgtcactggatccgtcctcttcacaaatgcttttatgttggaaaatcgttcaaaattgcttagtggttcaaaattctgttttttttctttctttttgcattgtggttccttttacaatcgtgcttacaaagtcacttttcgtgtctggatccgccaccgcctccgctaaaggcattgcgcgtcggagaagaagcagctccctttctctttttcgttctcgccttggatccaactctatgtttatttagcagcagcagacagtttttctagtgaaggtctaaatgaatggtgaatctttatttaattctctaataatctgtaaccattttgaactaagagtaaattagatctacacccttgctccctttcctatttggctctggaatgatgtgaattagccaaatcagacattaatgtgctccataaggcaaccggcatgatcgatctgcttggatcatgttgatgaccctcatgttgaagcgcatttctctgatgatcaacaaagagattggtttctttttcctgaccagaacccttttctctctatatagaaaggaagagaagttaccattattcagttacttgaaaagttctgttttagtctaatttcttcattttatgtctgatagcatttttggttcacatgcagcccttttctctctattctcttgttcattcctctactctagattctgtgttccatcactggtgtagttcataacaagtctcttgctatattaaattatatccaatttgaaatggttcactgttactgaaatagatgaacttatgcaggtttgagttgaaggttagggcaacgtcttcattat

SEQ ID NO: 4686 - DNA, 1010 bp, Medicago truncatula
  Intron number 27 from transcript Medtr3g139210.1 (locus Me dtr3g139210) derived from phytozome v7.0 (chr-ID MtChr3; p os 35735935 to 35736944 reverse strand)
tcttgtttcccttgttccgaaatcctacacttttagtttttggcattctgccgtatttaaattacagttttgtttgtttgtttagttttcatctttatgtgttgaacttgaataatttagataaaaatattagagaattgatagactttgaatattattgattataactagatactaactcgatacagaatactaaacactaatccttctaaacagggaaattgggaaataaatcttgataattactcagcaatatggtgattcataaactacataagtcaccatcacaataaccatcaacaggaaaagaagacaccagtaatatgattcatctgtgggaaaagagtcactatcggaataattgctgatggtgatagaagccactgatatgatccattgattttatcttaatgttaacaactatggcaacatttgcagatggttgtcctttggaattaatttacgaataccaaacatcttttatatatcctccaatccagtattctacaaaacttataaatgtcgatagtcacttccttagtaagactttctctagcatcctcaaaacttacgtttgttccaggaatcaacttgctgatatcttcataaaatctttataggttccttggattgcttgtatgtgcttcaaccttattggtaaaaatctgagacaaaaataaggcctgaaatgagtttataaagagtggcaccttactagccggttttgtaaggatgagttagacccaatataaaaacttaataaacttgaggggggcgttaagatatgtttcaaaattgttcatgatttgggagatcagtttatgtatttattgttttctttcttcgtatacttatttatttaattctaatgtcttacctttagggattaatttggttagtatcttgtatagataactagatattgtacaaattattcatgatttaatataaagtgattttcttgtcggtctcagctggctaatagttgccatgtgttgtccaggataact

SEQ ID NO: 4687 - DNA, 1544 bp, Medicago truncatula; identical to SEQ ID NO: 4306
  Intron number 1 from transcript Medtr6g015350.1 (locus Med tr6g015350) derived from phytozome v7.0 (chr-ID MtChr6; po s 3810522 to 3812065 reverse strand)

SEQ ID NO: 4688 - DNA, 888 bp, Medicago truncatula
  Intron number 1 from transcript Medtr1g028340.1 (locus Med tr1g028340) derived from phytozome v7.0 (chr-ID MtChr1; po s 6861405 to 6862292 reverse strand)
agcacaatcctggacatcagtctgatttcgctgaggtagtttgataagcacttacttagataatcacttttttcaattagatgattaaatttggttgttgttgcggattttcaattttcaatataacgtggttgtgaaaaaagaaagaaaaaagctgttcacaatgagaagtgtttgtagggtttgtttgttagagattgtaaaataagtgatttggatacttcaaaacatatagcgattaatttttaaagtaagaaaaaaagcagaagttgttagttgttttgtgtttgtttaccagagtgaaaatcacttataaaaagtgatttacttgaagttaggatttgtagcttttgattatagaattgatttttacacacaaatttatagttcaactcacttttacataaatgtgtccaaacacaaatcactttaccttgagctcacttttagttagaatcaattttatagaatcagttcacccaaaatcaattattgtcaccacagaaccaaacatacactaaaaactgcttcaatggagaagctgttgttttttgtttttgttgttttgaaaatctgtaactaatggatgcaaatttctacaagtgattatttcattgaagaaaaaaaaatctaaaaattgtttaaaatgagaagctcttttgtagcctctttagaaaatcattttgtggttttttcttttttagaaagtgtttttttatgcatatgcttttttattttttaaaaattaatatctaaattgttgcgtatgtgaatcccttttttaataatctgtaacgaacgggctgacctgaatctgatgttgatgttaatatgattttggttttgtttgcagacgatttacaaaataagctttgggcagatttattt

SEQ ID NO: 4689 - DNA, 3515 bp, Medicago truncatula
  Intron number 1 from transcript Medtr3g039180.1 (locus Med tr3g039180) derived from phytozome v7.0 (chr-ID MtChr3; po s 10238401 to 10241915 reverse strand)
ataaagttgcacacgtaaatagcaaaattttaaaggtaattaagagctatggagattgaatctatatctatataaatttaggacacatatgtggttaattcattcctttcttttttacaaatgctctcaccatattgttcctcacaaaatgctctcaccacattcatcctcacaaatttgtatttaatgcttatgaataaaaggaagtttttcaaattcaaattcaattttatttctaatatttcatattaaattaaaaatcaaacattttgaattcaaataatacagatttaaatcaaataattttaaatttaaatatttaatttcagatattatattaaaacaaataataaaatttaaatattttaatgtcaaagagatcaaataattgatatatgccaaataataaaaatacgatttaatatagcttatataagttttaaactaaacaaaaaaaaattgaaaaataatataaccttatcaactcatgtttctttttaaccaattcacatttttatgcttttatgaattaataaaattaacgaattaatgaacttaactaatttttattttattttcataataataataatattgtcagacaattttaatttttttttaaataacatcatatttttcattgaaatcaatatcttaatttttattttcataataataataataatgtgatacaatttatttgtttaatttattcaaaaaatatatattttgtttgaaactatgtcaaacatattttatatgtaattgcattaaaacaattaaacacgatatgttttgatttccttaacaatagggaaaaaaattaaagaaatatttattgaggcaaaaaaaaaagaagaagaaaaacttctaattttgatagtcaactatataaaaacgtacaatcaaaaacggattttccaaaagagaaaatttaggtacaattccttaggtgcttttcgtatggttcttaattcatcatgattttctcaaatccataattttttcaaagtttgttatatccaaaaaatatgtatttttagttaagaaccatatgaaaagcacctaaggaattgtacctaagttttctctttttccaaaatcaaagtgatttttttttttagggaaaaatcaaagtgatataaatgtgaggatttgttgagaggcaaagttgtaaccgaaaaaaaatcaaaaatggatgaaaagccaaaaaaaaaaaaacagttaaggaaacgtccatatgtaaatggtgaggcaataaaagtaaccggaaaaaaaaaaaaaaaaaagttaaagcaagacaaaaaaaagtgtgaaattaatgaatatttgaaattatatgtgatcattttaccaaaatatcctgtaaaaattactataaattagacctatggtttaacaattttttcacatcacaactccatatgtctttctatttgttgtttcttcttatttctttacaatccaaataacaccgaaaattaatttgatgtctgatatttctcattcgactttgttatgtttttagatcttttttatatagtcgatagtttgtttgaattagttcgtggtatcttcattcgcatacgttcccaatatctccatttgcataaagaaatttaaagaatcaatggtcgaatcatatatcgatcatatagttgatcttttttaaatcttttatatatatatatatatatatatatatatatatatatatatcgtatgattcaattatttgtataaataaaaaatgtaaagattgcattataagcttaaacatcttaattggttatttataacaattgtaatcaacaatataaacaaatgaatatatattgatttgttcaaaaaaaaaaaatgaatatatattgattattgtactgttaatgcttctctaagattttattcaaaaaacatgatcgcatcattttggttttatcttacgaagaataaagatggctgaaaataaatttcatgcaattgctaaaataagccgaaataaatcaaatcaaagtttcgccacataagccgagatcaaatcaatccatttttttttttgtctttcacaacggtttctcatccatcaaaagtgggtgattaatccgactcgtgcgtagcataagttgtgcaatataattgtatattgtgtcatctcaaaatcattgtaatcatacaattctttgttgtaacagtgaccgattgatactctattaaattgattttttttttccaatccataaactttttttatgaactaatgaaatctatattatataaatttaataattatttttctaatacaaaatattactgtaacattgcccgattgataccctatcaaattggttttttttgaaccaataaaatctataaatttaatactacctccgtccctaattataagacccttttgaaaaaaaaaattgtccctttttataagacccctttgctatttccaactacattaattatttctttacatacatgcccctatttattatacatctttttcttcaatcaacaataaataacacgttgaaaacataaaccaactctctcttaaaggataaaattgtaaaaacaatagtaattacaaacatatttaatacaaatatccactatcttaattcccgttattttttcaaaagggtcctataattagggacggaggtagtaataatttttctaatacaaaatattattgcaacattgacctattgataccctatcaaattgattttttttggccaatccgtgatttatattatataaatttaataatattttatctaatacaaaattttattgtaacattgatcgattgataccttatcaaattgtatatttttctcatagatgtgtagcttttttatttgaaaaaaggttttggactttattgggattaaaatcagattaaaactttttaaactcaacaacctattgattttgatttgtgtggtttattgagcaactttatttgcaatctgaagcaataaaaataaaacatcatgacccattgatttttttattttcggctaaaatattttggaatttattgatattaaaatcggatgaaaactttctaaaactaaataacctattgattttgatttgtgtggtttattgagcaactttaggatgcaatccaacacttaatcaaaaaaaaaaaggatgcaatccaacacaaaaaaaaaaaaaaaaaaaacctaatgacctattgaatttttattttcggctacaagcagattgatatcatttatcgaattgaatgtggttattttacataattgtcctctaaaaattattataaattgtattgacaaacattttcctcacaccacaactccaattttacagttgtctctctattttatttctttttctttgcgtactttttgtgtctcttcattaaatcgaaatggccccaaagattgacttgatctctgatatatcccattacaaagaaaactgaaatatcaggttcgagtcgttcgcatttggtttgtgacagatat

SEQ ID NO: 4690 - DNA, 1333 bp, Medicago truncatula
  Intron number 1 from transcript Medtr3g143810.1 (locus Med tr3g143810) derived from phytozome v7.0 (chr-ID MtChr3; po s 37168717 to 37170049 reverse strand)
ccaccgaaccagttcagttcttttgatttcgactaagtttatttcttcttgttctttcatacattcattatattctctttagttatgtttgtgtcgggagaatacaacactcctttagtgggttttcgtatgtgttatgcatgccacagtttttagacaacagaagataaatttctgcatttccatgctttctatttctttatattttgcttaacttaaataactgactccagtaaaaaaaaacttagattaattaactttcacatcaacttatttgtttgtttggatgatggatgtaattggaaatgttacacaattttgaattctacacatctcatatacttttaattgaattatctcaattatattgtttattttgatattctttattcttaacatttttatttggatagagtaattcattataataaaaaaaatcgtgtctatttcaaattttgaaaatcgatagatcatttttgaaattttataaaaagatagatgtagtaatctacaaaatatggaaaatgaataggactgatgtgaacacaaaatagtgattaatttaaatctaaataacagaaaaagctagtagggtggactaatttctggttcacatattttttattaactctttatagttattagaagaagggatcatagtaagtcgaattcgatcaaagtaaagtccgataaaaaattgaatttaaattcctgaacgatttgaacttttagttgacaatttgtatctgcatcattacataattttatttattgtcaaattatgtcttcttttattcaaaccttggttatcaccattccaagaataaacagtaaacatgataaatgcaagtcttgatcaaactagggaatgaaaaatggtaatatacccccttttgtaaagctagtatagtactcataagctagaaacatgatacaccagctagcactccaaatgcaccatacaccaactataaacgaaggtattatctccctggacctagcattcaggaattaagtcatgtcatttggtaagctactgaaaatcaatcttgaaatccctgtataacagtataagtccttcaatcttgaaatttttggttactttattaattggattacaaatttcttgacgaagacataaccagggccttatctgaggcaggacgaagagggcaaccgccctagatctcaaaaaataagtaggaaatttaggcctccaaaatattttttaggggtctatatcagaccctaagaaaattgtttagttttttgtatcaaatttgatgtttatatatatttattagttaggacccaaattgtaagttcgccctag

SEQ ID NO: 4691 - DNA, 745 bp, Medicago truncatula
  Intron number 4 from transcript Medtr3g086470.1 (locus Med tr3g086470) derived from phytozome v7.0 (chr-ID MtChr3; po s 20217834 to 20218578 reverse strand)
attatttacagaaaaattctcatctgctcgtacaagtaataggtaatctttgtctttacttgaagtgaagtaattaactttgctagctgcaggttttcaagtacagtaccgatactgtcattattcttgatctgttataaaacgttgtcccaggttcatcgattcccttataatgaagagtagcacgcttttgttgcagcttttaataagatttgcttgtttcacctagtaagcattatggtagaatatgcaagttatagaatgaaaaatgaaatataaagaatagtacatattgtaggaaatggactacgttgtactgattgtcttgaaatttgactagaagtgaactaccaatataaaagaatatgcgaattaactaaagaaaagtggaatattaaggacagtagatattgacacatacaattttgctataaaataaagttatagaagatgttgtatagaatgctatgttgtgtgaaatggctctagtatgtgtactgattatctttgatattttcaaatttgacacaagtgaactaccagtttttcttgtgattgagcaattttcaaatttttcagcgtagtatacttaagacataaatttggttaagcacatgacaactcatgctttgcttcatgattttatatattcttttacgtagacgtggttcatacgtgtaattttgacagctatttgctttaattggtagaaaaagaatattgctcataaccaagccatacattc

SEQ ID NO: 4692 - DNA, 949 bp, Medicago truncatula
  Intron number 5 from transcript Medtr1g068720.1 (locus Med tr1g068720) derived from phytozome v7.0 (chr-ID MtChr1; po s 13781692 to 13782640)
tatacagttttgggatatcaatcaagtaagaatttgagttttttttctttaatttgtatttctttttggttcaaggaaaactgaatgatggtaatgtcttgaatatctgatgctgttagttatctgccataagaggaactagttgcaacagttttaccatgattaagtatgctatttcttaaatgcattataggattttaaatttaccaagatatttactccgtctttctttggaaagcaagagatagtctagcagaacaatggatggactatcatccacgtctttcgttttttcatttttaaatagacaatattcatcattgttgttaatggtggaaaaaggtttatgcctattgtgccactatggtggttggcgctccacaaattgcttatggtggctgggacaaaatctgccattccattctccaccatggcttctgtttaatcacaataatattcctacaaacagaaacttatacaagacaactttttaatttaaatagaactttaatttaaatagaactacaataatatgaaacatatacaagaggcattcgttcatattatcagatttgatacttgagcagtggttttgttgctaaagttgaagcattaaaaggagaattttttaaattttgtcgctaccattaaataaatcattggttacagtatgaatgttttgtaaaaatggctcattgtattcttagaaagtaattcggtgctagtgcatgtcaggtacctctgatgttatctttcattcttctgtttttataaatataaatattcatctttgcagttcaaaagagttaccattacaaaattgttcttctctctctatcaaatctctttctcttgaaaatattttatatatgttctgttttgtgaatttaaaacctttgttggatatgttgcagtgaactccttactggtgttgtgccatatactgatc

SEQ ID NO: 4693 - DNA, 3368 bp, Medicago truncatula
  Intron number 1 from transcript Medtr5g048030.1 (locus Med tr5g048030) derived from phytozome v7.0 (chr-ID MtChr5; po s 20287371 to 20290738)
gatagcaagccttttctaggtaatttaatttcattcatttatttacactttttgttctttcattatcaattatctttatgctcttgtttgttttatcttaagtaaagttttgatgattgttgattagtagtttccttatatgtatggtgttttgtgtgtagactgtgtttgcttttgatgaggacagcttatgttgtctatttctacattttttttttttatataattttttaaactagtttatcatctgtatggcttttttggaagttcttatggattatgtgagttggttggtagcaaggctggtgaaacaaggagcataatttttttattccattcccatttgttcacacactttctctcataaattttaaaaaaacactacctaggtggttgaaatagtcttagggtgtacgtttattagagtttatttacaatttgcttaaatttattcaccttttgacatatcacataagcatttgtgtaagcatttcatagaacttgggagaacaagttatgctatgtccataagatgttttgaacttattttaaatttgctttacatgataccttacggaaacagcttataagtttaatcattgaaaacacctatttaagaaactactaatcaacaatcatcaaaacatttagtaagattgaatgaagagtgatttttcactcgtattgaatttaaattaactaaagttgctttacttgtaaggctattctctttttactgtttttccttttattttggttattgtatgtttgaatatgatgctttaaaacacggggtaatgaatactaggggtgggcatggttcagttcgggatgaaaactgaactgaactgtttgctaaatttaaaataactgaactgaactatttcaaaccaaactgaactattattattgatacctttgaaaaaaatatgaaaaaaacaaatgaaattgaattttagttaccgaactaaactgaactctttcgaactgaactgtttcagttcagtttcagaactgttagtaatggttcagttttttttttttttggttcagttcagtagttcagttcagtttttggtttttttgcccgccattgaatactattcatcttaaagccacataacattgtaatgaattattttttgtttcacaatctatatggaattatgtattagatatagttttagtcacttcattttctttcttttaaagtttctcttgctttacacaacaaattaatttaacaccagaaaggtaaagaagatgctggcttttccataagaaaagttattacattctacattcctatttaacttgcattaccactctatttatttatactgtcgcattcctgattcctccaacttgatgtgtaattgcatgagacatggagtaaatttatacaacttccactctagtattgccgatttgggaattcagcccttgttgccagataggttccaactatagtcttaaagtgcgtccgtaaccacaaatgcagtcacaatataacggtttgactgcaattgtgggtgcctcggctgcatatgcgcccacctttactgcaatttaaggttgtcattttgaattaaccagtgaactgtgaacacagtttgaaacgatgataccaataggttgtcattttgaaattctgtggcttttcatcttattaagtactttaaagtttaaactctttcattgttacggattgtgaaataaatttcctattgtggatgcttctcattcgcttatttgaagcaataagtataccttatgtttttgtgctggtaaacatatatacgggtggagggaaaagactaatttactactgttttaaaatgaactttgatatattttggtatgtgtgattaggattatgcacactgactttggtttctaggttctacattaggattactgccaaatgccctagtaatgttcacttgttgaatgttttcatacattagatgatgttacgggatttgaacttttgctaaactcttggaacttctagattgaaaatttattctaacttagacttctgcatgtctatgttgagataagaaaatttcaatggccattactatagtacttatttctagctcaatttggtggatcatatttttggacagtttgaaatgtcatgatataaatcttcgcacattcttactaataatgcaagatcactatatatgtccttttgcttgcatacttaccaatattgcgaaatcactatatatattctgctgttttcttgctatgacagtctcaactatgttagatgtaaccaaaaacattgcatctaaagcatgaagactttatctctgaagaaagaatcatctccttatcgattgcatgagtaaactatcttcattgacttatgcttaggaagttccccgtaggatcaaaggaatatgaacaaataagataagggtctgggggtaggaacaagagcaatagagctacttcttggttctttagttccactatataaagggaaggtgattattctgctaaatattgagaagtcgtttcattgtttttcttctatttttctttgaaacacattatcaaaactctccctctgtcacttggtttcaatacaaaaggagaaagaattctccacatgacagtgccaaaaaagtatgtcggcagatttttagttttacttctaaacaaatatttctggtttagcatatggtcagtagccttatttagaaaagtattattttaaatacttggcagtttatgtttttattttcttttaaaaacattcttctggaattccctattgttttgctgtgctgtatgaattggcattgagttcctttcatatccactacatccatatgagcgactgagcgtatctgcatgtcaggataacttttagcttgaagcattggcgatacttgcagaaaatcacgagcaggaataatcaagaacacacatttttttgacagtttgtttccctttgttcatgccatttgctttcaaaatttcattgattattgtttaatgcgccattgtattcccaaggattctcagggaagggagctaaaggaaatttacaatctatagtgctatatccagttccttcataggttcactttggtgtgtactttcaatgataaaatttgtaagcaattgcattacttggctgaaaatataatgaaaacaacaaccaagtgttatcccactaagaaaggaaaaaagaaattaaaaatttggaaaattgattcgatccaataaatatacatgttatttccttataatttcgtttcttgccggtttcactgttgctagtttaattatacactttgatcggcatcacaggatcaagcagttgtggtgaaataagaagcccagct

SEQ ID NO: 4694 - DNA, 746 bp, Medicago truncatula
  Intron number 11 from transcript Medtr1g083710.1 (locus Me dtr1g083710) derived from phytozome v7.0 (chr-ID MtChr1; p os 16598119 to 16598864)
gcagtgagttttcatttcccatacaatttacaaatgtctgaaaagttgtttttatgcacttctttgtactgtgaaccatgttgtgggtgttttagatacaaattatgatttaacaaagttattgttgacatagggcatttgtacttgatcatatcgatggaattctttcttgcaagttgacaaatacatttcattttattttttctcattttctcaggaatatttcatgtgactattccaataataatatctttcctgcttggaagggaactacttgtaaaagcctatgtatagtgagtagatcatatgtaggatagtctaattattagaggtagagggagacaaatgaaattattggctcaaccattaagaagaatttagatttaaatggcttgtcattagacaagatttatggtaggacattgtggcattatttgatatattagagtatgactgattccaactagtgggaaaaggcgttattgtcgttaaaagggaactgcttttatttcatgcctcctttattctttagaagtgatgcttgaggtggatgagattgagttatttgtttgttgtataaagactactgctacttctttaactcaaattacatactaatttccttgtgtttaatcatgctgtagctatttctttgatatttttaagttatgttttatatttaaaaaatcttgcactatttactattttcagaacaacttcccaagaactttagaggctcttgttct

SEQ ID NO: 4695 - DNA, 3520 bp, Medicago truncatula
  Intron number 1 from transcript Medtr3g041180.1 (locus Med tr3g041180) derived from phytozome v7.0 (chr-ID MtChr3; po s 11460482 to 11464001)
cttttcttggtaagttacacttttcttggtcttagtttttatttttggtagtggtttcttggtcttagttactatcagcagtatagtaccatcttttataaataaataaaaaaatactagtaccctctaacctctaaatatatactcatatgttactttttaattgtcactatttgtagtttctttttatttatttatttattattttttaagttcaattaacaaaaattaatgattattttatcattaatacatttaagtatttgatgcaattgaaacaggaggaatgagaataattatttaatatattaacaaaaaaaaaaaatttaataaaagtaacataaaatttacatttcttcatatgtgtaataagttaaaaatgacaactataaagtaacagatatttgcacaatttatttattatttcattcatattgtcagctttgcaaataaaatgtgtcggcaaaacaaagtcaattctagttttcaattttttttttttaagaaacaaagatggtatatattaacaaaaggcggtgaaacctcctaagtacaagatgtattaagaagtcacccctcaaagagtcaaacaaatgtagtaattacaataaaccggatgcgtcgatacctaaacaaagcataggatctgaccaccacctttgagaaccgtacacaaatgtgactttactagcttttagccaccataaagagtgcaattttactttatctgataagccttcaatggatgtttgggtattattaaaaagtctgttgttgcgttcattccaaaccatctacacacaaaataaccaaatgagctgcataaaggatctacgcgccctaattttcaaatttaattttgatattctatttaattgtaccatctaatcaatactacgtctatcacgtacatgttacttatttttcaattttcattttagataatgagaattaatcaatgactaatatggttaatttggtaaaattgttactaatttccttaatttgtaataattaattctatctttcaatatatgatttttcattgcacttttgtttaaaaatatcgaatcattgtctacaattttctatacgcactactaaagaatagaactgtttcatattttctttctttactatatattaaaaaaattgttttaatctcatcatttgcacgcatgcctcaatgcactcttatctttcttatatccttgaatttatttattttttaattttaaatatatctattttttcaaatatcttctatatgttgtgcacttaaaacagttttttttccttgctaaatcatactttcaacttggttttgtccctagatttaactattacttaaaacaattattcaaatacttttttttgaaggagttattcaaatactattataaaaatgacaaaatagtaaataaatagtttaaatgaaaagtaaaaagggaaaaatccaatcaaaattaatgaatcctctttaattttccaaatttattatatattatagaagcatgggtttaatagatcagaaactactatattttctaatcaaatattattattcaaatgattcatgtttctcaattgtcgtatgatttcattcaataaaaattatatatatatatatatatatatatatatatatatatatatatatatatatatatatatatatatatatatatatatatatatatatatatatatatatatatatatatatatatatatatatatatatgggataggatcaaatgacatcaaggtgtcaaattaaatttgacaccaaatcctaaccattaatacaattttcatctaacggttcccatcaattcattaagtgctcacatgcttttaaatgacatactttttaattttagaaataatttattctttctcctcttgcttaattacttgaaggtgtcttttagcaagttattctatgagcatttgttaaaagacatcaactaatttttatgaagatgtattttaacaaagttataactaaaaagtagaaatcacaccttgaggtgtgggttgctaaaagacacattcatggatgcgttctagcaaaaccccatatatatgagataagatcaaatgacactaaggtgtcaaattaaatgtgacaccaaattttatccatttaatttgtttaatccaaaggcttaaaacaatcactagaacaattaaaacgatcaaatatttcttgatttctcttgctatatcttttctttaatgtttgatgttgcatttatgtatgaaattaatttctcatatatgcccttcatttcaatttttgagtatttcgctttccttgatcacttctgttgctgcaacacttagggtgtgtttgtttcaagttataattgttgattcccgggaataaaatgatagaaatgtatatgcctatgtttgttacaagtttactaaaatttattccttggtataaaatgttcctgggaatagaaaaaatttcccaaggaaaagggtgggaataaagttcccatggagatgggaataaattcataaatagtttacctattataatccctatttttatggttcctaggaatattataaagctaaccaaacatatttttcctaaattccttggaataaaattctcatctttatattccaaggaatgttattcctaggaataaatttggtaaacttgaaacaaacacacccttagtttttttaaatcgatattttgtataaactttatttgcaacaatgctaatgttcttttttaataacacaagttttttccggtaaattggttgaaatttatttatcacttaatttaattttaccatccatcgatttgcattcacggtaaaaaagtggagtgagattcagacacttataactatacagaaattgagaaaattatgtgatacaaaaaaaagcaagaaataatataagtgatgatggacgcaagagaaaattttgaaattgaaatgaagggcatatgtgagaaaataaattcagactttaatgaaaatacgccattaaaggaaagatagagaaaaacaaatcaagaaatattttattacattaattgttttagtgtttcttttaagcctttggattaaacaaatgaaatggatgagatttggtgtcatatttaatttgacaccttggtgttatttgatcctaaccctacatatattatgagatgtccctactaactgaactaacttatagggacactctctgactcacaccttatcaaaggcatctacattttattctagtcccaacacttatcatattccatattttttccttgttctgttttttttttttttttttttgtaaataatcttttcttgttctattgaatataaataaaaacagagatatcataatctttttgggggaatcacttaacacaactattttaaaagatatcaacactagatttactaagcatttcgaccattgttttttcttttggcttattattgttttattgcaataaagtttgtagctattgtggaatcaagaa

SEQ ID NO: 4696 - DNA, 967 bp, Medicago truncatula
  Intron number 4 from transcript Medtr1g074300.1 (locus Med tr1g074300) derived from phytozome v7.0 (chr-ID MtChr1; po s 15035600 to 15036566)
tatttgtcctactagagagttggctattcaggttagatgatgtttttatctttatgccctgtttggataaataacgtagttaagggtttatagtgttacgtataagctatatctataatagattaggggactgtttgttgcagattatagaaagagttattttgatactcaattagtttttttaaaaagcagaagctgtttcgtgtttgtttacgaaaacaagaaaaatatatattttgtgttatttagagatttaaaaaaaaaagtctgaagctatttctgtctgcatactgcccataaaaatcacttttttgaaaaatggttttgaacttgttcatttgtttacctccttgtttttgaaaaaaattgattttggaaaaagttaatcgtaatagcttttcattttagtcaaacatgattgttaaataaaatcctaaacaaacacttgtatatgacaaaagtgtttttttttttcttctaaaaaaattaaaaacaaatacgtccttaattaatcagttataagaaaacgtttttaagagaagctactaaaaacaacttctcatttgaagcagtttttagattactttcagatttaaaattcttaagaatccataccaagcagatggaaacttccaagggtgattaagttttttcaaaaaaggggattaagttgtaacaaacaggctataaataaagtcatattcttttcatataaaatactatcctatccttgagagcttatatgaaaataagatgaaaaccacatatggaaatatcataagctgactccataagctctttcaaacagtttcacaaatgcttatgctagtagatgagttattcaaatagtcctttatttggtttgatttaatttgattattcttgtttcataatagcctgtgttgaacaatgtggcctgtttgttatttgctgtgttgtgtgttagaacattgaggttctccgtaag

SEQ ID NO: 4697 - DNA, 3361 bp, Medicago truncatula
  Intron number 1 from transcript Medtr8g090210.1 (locus Med tr8g090210) derived from phytozome v7.0 (chr-ID MtChr8; po s 19615937 to 19619297)
cataaggtatattttaccctttatattgcactgtttggatttcattatatatattgtgccttgaacaaaccaaatcacatgtttggtctttgttctagattttttttagggtttttgataattgacaaatatattaatatacatgttaacaatgaaataaagtggatttcttctttttagtttatagaaaggtagatcatacggccaagatatatgcttctggttacattccaaaattatttattcctactctatccattttttgcctataaaaaaaattgcattcatagttcgttagacaaattttctacgaagctcctatgtatatatatttgtaacttactttgtctcttccattccttcaattttattttttggtagttttcatttttctcttccaacttcatgttcattttcttctaatattttgttatctaatggatatcctttctttgtaggattttggagaaatgagagttttttttttttttgaaatggcacttcttatgtgaaaaggtggttatcatttttatattaaaatttaagttttttcattattatttttgtttaacgttgtatcagtgatcttctgacttttatgttaactatttttgctgattttgtaatatggtggatgattatatttatcacctaatattttgtaatatctggaattactccaatgaaattatatctaattttttagttattttctcattccttttatttctttccacggtctatgatattataactctatatttcactctatacattgcatggtaaaactcctatcgtccttaggttctgaatttttcactcactttttttgatttatggccttataattatggattgtgtattctagaatggggttatgtgcagtagaaatcaatgttttttttttgaattagatatgagagggttcctttccaacaaggtttgtattttatcagctatttaatttacatgcattttaatgtataaccttataaaaatgtttgttttattgtttttatttgtctactaatatttgttacctcacaagaattgctttggaatcttccatatctttctatctatctatctatcttctatctatttatctatctatatctttctatcttcttcataaaaaactatccctctcaaattctatctaatctaataattaataatagagaatgatattgatatttcttcaaaaaaagaaagtaatagagtgatgatgataatgatgtagttaaacttaagttacaaaaatttgccaccgcttcttatttcattgtattatagtataatacctccttttgtttttaataattgcattattatagtgctactattactatagagctgatttaaagtctccgttctaacgattccgtgtatataggcgttccaaaattgaagagatgtacatattaattatctttgtaagtttaacggaatttgtagccttaagatttcattaattatacattgtgttttaacatggtaaataacatattaaatattgtccattaatctaccactaatctaccacttcttacaaataatagtgttgtttttgtacaaaaagtaatagtgtattttttatgatgtacctaagtaatagaataaaattttggactttttaggagtaaaatatttgtgttcttaaaaggaaacttgagttaaccatatgcaagcattatgtctatgtgacacttctaaaagagcttattctcactctctcttattctccacttctaaaattcattatttatctccactatataaatttaatgtgtgatgttaataatacaaaactaaaacgttcactaatatttaactaaaaaaacttgaggaagaaaaaaagtaaattacccattgactccaaataagtaaccgttatttcctcatatatttgtcttaattctccacttaagttgaacataaatcaaaatttgcaacccaaaaatgttataatatagtttttttttttactcaaaagatatgcacaatttctctcataaactacaatgctattgccatatctttattttttttagggagctgatctttattcttgaatgatgattgaagctcaacatccataattcaatacctgttattaaacccataaaatggcattaatatggtattgtacaatatggaagaaaaaaacgaacacataaattggcattaatatagtattgtacaatacggaagaaaaaaacgttttgagaaataataaattcttagcgaatatcctatataagtttgcaaaatcccatgcacttctccatattttacaactacgtccattttgtgtgtgctccttcctttcccaaatttttcaacttaatatttcaatgattttgttttaaaaaaaaatatgcgacaatcattttgttgcttcactaatctttcaactacctttttcttttttcatattcaataattatttaccactctctcactcaatacggtatcgtttaaattaataaattgatgagttacaagtgtttttaattgtttattatcctattgactttaacataccaaaaaataagaatgaaataaataagaaaatggtaaaccaaaaaatatgctgaaaaaacaataccaatactaaataaaagttaaagagaaaaatataaaagaaatcattgtatcaactcatgaattggattttcaataaatatgagagaaaaagaaacaaaacttctaaagacgaatcccattttgactgcttatttcagttgtttctgtgagcaatattgacaggaaacatgaatacctctagctttgatcgaaaagaataagtgatatcaagagaaaaagcaaaaacacttgcgattgcacaaaaaaagtttttatatgattacactaatatgataaaatattaaatactccctccggtcctatttataagagaattttgggtcaacaaaaattgatgtatctagttaaaaattcagtccaaatacattcatttttgttgacctaaatttctcttataaataggaccggaggtagtatgatacaactcttcaaacttatgaactatgaacaagaaccaccaagaactatattaattatcctaaaaatattttaacaaatatgaattctcatataatttctaaacaactctcttatatttaatattaaacataacgatatcaatcatttaactctatgtgaatatacttatcataattattatttactcatttgtaaaaatattttaaatatggattataatcaaacccgtgcaacgcacgggttatatacctactatagtatataaagaaatatatattaaaaaaaaaaaaataagaatataaataaaacaaatcctttttttttataagaa

SEQ ID NO: 4698 - DNA, 4320 bp, Medicago truncatula; identical to SEQ ID NO: 4375
  Intron number 1 from transcript AC202568_14.2 (locus AC202 568_14) derived from phytozome v7.0 (chr-ID AC202568; pos 70840 to 75159)

SEQ ID NO: 4699 - DNA, 1642 bp, Medicago truncatula
  Intron number 1 from transcript Medtr5g075780.1 (locus Med tr5g075780) derived from phytozome v7.0 (chr-ID MtChr5; po s 27653422 to 27655063)
aaaaagaagaaccttccattgtgccatctgaagaagttgtgaacaatgcaccttgaatttgtgtttgtatgattatacttcatcattttcagtagacagatttgagtgatcattgttttacaacactactctttcacatttttttgtaacactattttgtttagtgtcaactatgaagactttaaaccatatgatatgatatttatcttgaagttatcttaattaaaaattagcttactaatattgtttagttagtttacaagttacttatgactagttattagttagttatattagtttttttttcctttaaaaaaaaaaaaagagtacataagatgtatcctatacacaaaaatggattagatgactttactatttgataattttgataactttaatatttttaagaaatatattaatgattataataaattatttaaacaagaaaataattggttaaaaaagagatacgaacaaacatacaaagtcatcaaatttcaaaattagccaatcttatttcattctactcattgtatcaacttcttcatacaatctattccaggaccaaccaaccaacctttctatcattttatttttctccatgtttctcaacaatattaataataatttttttaaattgtatcatttaaataatgttagaaacatcactcaggatttaatatattcaactttatattcatgataaagataattacaacaattcttaataaattagtaaaaaataaaaagaatctcaataagagtaataataatataaatgtactattatttatcttctacttatatgttttttttaatatgtgtgaaatagttaaatatgacgattaaacagggactattcatttacttcttttttttttgtttctcgtactttttttactgaaggtaattaattctattatatgtggacaccactcacaatcaagatttaaccttagtttacttcattgagagagtcaagctattttgctagactcaaccccactgcttgaacatttatttggtgatttgtgatctcattttggctaacgtatttcaatttattagaagatgggttgaaactatcatgctttttcgtagatggaaggtaaaccgacgttattttaacttgaagcaaaagtgagtgaagatttattatacatgacaaagaaaaactagaccaatgaactgatttatttatatgaagaaaggaaagcaagaatctgaagagcttacgttaagtttaattactttttacccttcaaaaccagtttgaagatattctaattatttttccaatgttttgaattgaaaaaattaatgaaaatcaccattaaattcctggaacaataatatgatattcataaggtttaattatctttttagttctttaacttaattttagggctcatgatcttgatcccttaacaaaaacaacaagtgttataatgattatttagttttattaagtcagatgtgaataatcatttgacggaaatattctcatcatttataatgatcattttaagaaaatagtcacttgcgtaagttaactcacgatgagaatacacatgcgcgagttaactcacgcatgtgtattctcatcgtgagttaacttacgcatgtgtatttctcagcggag

SEQ ID NO: 4700 - DNA, 2079 bp, Medicago truncatula
  Intron number 2 from transcript Medtr5g022710.1 (locus Med tr5g022710) derived from phytozome v7.0 (chr-ID MtChr5; po s 8868474 to 8870552)
ctatcgccgtttcatttccggttagttcccaatttccctctgtaaactcaatcaatgagtaataactgatttcattaatttctgactacatatcaaattttgcaattctcagataaagacctcaggggaggttactgcaattttcccttaccaatttatgtcatttattctattagtctctaaactactatcaacttagttacaacaaacttgtaggagaatagattgatacaactctacaatttcaggcatcaaacagggcatttactaaagagtgagttgaaccacataaaagagtattgatgatgagggttatgtaaccaggaattcatatcattgaaggaaccaatcttgcattccctctgctcctatttataacagacttttaggtcaacaaaagttgatgtatctagttcaaaatttcaactagatacacatcaatatacgttgactcaaatgtctcttataaataggaccaccgctgggagtatatagtttataattagttttttcgacaaaaaggagctcatttatttgtgaaaatattgtggtaggcgagggtgaggcacttgtgcgtgtagctgcacattcgcatgtttcgtattgttgatctttcggaccatatagcacttctctttactaaataacttcgattgctaaagagaaattatcagtttatcactgtcctcccttcccctccgaacacaacccaaatgaagatatcactgaatatcaggacagtttggagttcggtaatgggtttaggccccgtttggataaacaacttatatagatgcttatagtattagggcttataacattagagcttatatcataagctcttatacttgataagctatttatgtttggatatgtacactaaaaagtacttacataaattgaagtgtttggatgtgacattacataagcaattatcgaaatcttaaatatttttaatttaacgaaaaaatcaaagaatcgaaccacaattatcaagattttttttgataaaattaatcaagatgtaaaaaacaatattataatatattaattataattatatatatagtataatcaatattcgtccttaaaaaaatatcaatattcatataagacaaaattaacattcgaggtgtaaataaatagtctaaacatcattatacacaagtataataatatatgataagctttcttttaaaaaaaagtataataatataaatataaacttgagaaattatgattgtaaacttaccatatatatagatattaatgtacagtttgttaccaaaaaaagacaaattaagtttgttttttttattcagtttcattttgttacgtaacaaaaaaataataaaaatcatccttaaaaaaaaatctttgttacgtgtgttactttagtaagataagtatatagcaattttgttactcatgcacaaccaaagataactaacattataattaaaatatatgttttttttttctaaaaacaaaaaaataaaataaaaatatatgttttgaaaaagtagatccagagagaatcgaagaaggttacataaattcataagctccttgttaagccggagggtaagctgaaaatttaggcttattaaaatatggcataagcagcttatgaaactatgataagctatttttatttatttacccaaacacctttaaaaaggcttatgggagtagataagcccacataagctcaaaataagccaatccaaacggggccttaatcaagtgaatttttaatacaagcttatataaactgttatttgtataatttaagagaaaacgtatgtggtaaactttgcataggttctgaacaacctgattcttttaatttttgtggaattatgagataaacttaaacaacctgtgtactgttttcataggttcctccaaacacttatacaagtacttttgtcaataaaattagtttagataaactctcttctaaacgtatacttgggcactacggcgtaattgataattattggtaatcaaattgtgtatgtagttttagtgatgacttatttaatttgtgttttcattttacctgctagataaaga

SEQ ID NO: 4701 - DNA, 1769 bp, Medicago truncatula
  Intron number 1 from transcript Medtr5g106430.1 (locus Med tr5g106430) derived from phytozome v7.0 (chr-ID MtChr5; po s 42803931 to 42805699 reverse strand)
ctcttgcttctgctgatttcaccaaactaggttcttctctatccattatttctgttttgaacggttaatgcaaataaataagcttttatgtatcattcataagcttgttaagatagtttatagaagaaaaataaaaacagcttatgaggatacaattttcgtaagtgacaacttacaaaataacataaaagcttatttatttccttaagctatttctcataagctaaaaaaataagccaatccaaacgtgtccttatttcctgtccattttagaaggttaatattctaatttcactatactttagttaggtaatataattatccataactattgtttcaatttgcatttgggttttcgcgttctgatgttagttgttgtttatgcttaaaaaaattgttcctttacatgtgaaacttcaatctctggacaatgcttttttatcagtcttttgtaatcttaaaaattagtgtattcattggtcaaaggattaccaacaagcgcggatgtaaacgaaacaacaataaccatccattgaaacctctatgcaccgatttcctgttttctctctcacatattttattaaggattaaattgacgttggatgtcatgggtaaatgagtgttgtgctatatagcactactcttggctaaaactaaacctgctgaaacactggagtcagtcatagcaaatccttttaggctgtgtttgcgggtttggaggggaggggaagggagtggaagggggaggagtagaggaaaagatagtgggtaaatgaatgtttatcgttaatatatttttagtttttagattattataacaacattaatttgatttgaagaatttatctaaagcctcctatttcctcctccaattcaatttttgagttcccccattttgaggggattttgtatcatgaagaaaaacaaaaccatgggggactaccctttcctccttccttttacccaaaaccctcccctcccctcccctcccctccaaactcgcaaaacatttatcttgaattccctgtacaacagaactgctatttgtacaactcagaactgctatttgatatcttccgtggtatcctatatgcatttgatttccgttggggattttgattctgcatataaaaagtttggatttctgtctaattatttagattcaaatgtatttaccgccttcccctaacttataatatatgactacccctttctaagtgttttaatttaagttttaacaagaacatggaatacatatgataggtaagttctctcttttctttggtagatgtgctgaatgctaatggtagatctcttttaaattgattcttttgctgcttgatttaaggaggatacgtgattcctttttgctttgaaatctttctacttatgattaatgttcttttagccacatctcataaaaactgtacattgtcatctttattggaatccaagactatatagcttcactactttataatataattatattacatttgtgtgcttctgaaagtttttgacttagttggaacttggaatgcaagctttacttttaatccaactaccctgtttgatatctgcgtgctttcagtttttcatgataacatggatggtacatagatgtggaatgggcatacaagggatccttaggacgagtctaatacctttattaatgttgttgcatgtgagtttacgttcacaaaccttaagattgattattatactttctttcagcttactacagtgacatttgtgttggcgcaattgcg

SEQ ID NO: 4702 - DNA, 4199 bp, Medicago truncatula
  Intron number 1 from transcript Medtr3g083670.1 (locus Med tr3g083670) derived from phytozome v7.0 (chr-ID MtChr3; po s 19715909 to 19720107 reverse strand)
gatagattcaagtcaacttctttcgcaagtgggcggtgggattggttccctagttgattcttggattgaataccgagtttttttttaaaaaaaaaaaaaaaaaagattcaagtcaactagaataacatagttgtattttggttttatatgctgccaatatctcttgtttgcaactaatattactacacaatgtgtaaagaatgacgttaagactactccggaacatttcacacagctctcttgatcactaagaaacacgagacgtttgaagataccttgactctttgaggaatcaaagaagggataaattttgcctacagactacttgtccttaacaaaactgtaaggtaccatggaatttacttaaaatattgctcaaagttggaagtcactaatctctatttgactacttatagtatggaaacagaaacatagggatgtgatgttaaacgtgtgattttaaggtcgaagaaaaccatcattctcattgagtatttatgtattacttacaaattttggaatttcagatttgttttcaagttataaccaacttgagcgggaaaatccaactatttatgccaattgcatttgacacaaatatcttatttggtgaccgaagtttcagctttcttttaaggaagttttagttaactttatcatatttaatgttttttttaaaaggcttatcatatttaatgttaccactctcaaaatatttttaaattaatattcctgaaattttatttatatttagacggaaaaggactattttgaatgtatccttgaggtccatgaatacattatgctgggtctcacgtgaagtttcttgcacgtaattaactcaacacaacaggaacagaataaggaccaataaaatttggaagagtctgcaaaatccattaccatttataggtcgtgttgcttatggcttgtgagcactttcaaggtctggtcccccaacaacggctgaaaaaaccaaataagaacttcaccctctccttcctccccaaacaaacccaaaatataagtaacttgctaactaaactatgaaaactaaaaaaattgatagtagtaatgggatatatatatatatatatatattttgaaagattgaatacagttaaaattatgtgcagtccttcagttaaaagatatataatcgttagactaagattggtcgatcacagatctttagactgtaggactacacttagtttttactgcaagcatacaatcatgatacatcgaaggtgtgtccctcttcaactctgaaataaaccagtagcttttaaattttatgcaagacttattgtaatttccattagactataataatgaacaaaggaacaagaaatgtctctatgcttgttggttccttcgttctaactctaagaaagcatgaaatcgaaatggataccttgtttggacaattaaatatagggtcttgctaaccgataccggaacagtagttaaggaactaaaattagaaagaaaaaacaatttttattttaaaaagaacactttcaattttaaaaagtagaataaacaattttcaagatagtatttccttttataattcgttaaatatatcatatgagctggggttttagtagattcaagtgttgttcatctgttttggaggcaattggtcaccatgcacagcaacatttaattgttcctatggtactagggacccctttcagatccggtttgatcccttattaaattgttgtcaatatcttaatgtgtggtgttgaattattaatattatctttaattaattaatgtttttgttgtttatttcaaagtagttgtttacttactagtactagtactatagtagtttgtttatttttttacctctatagctggtgattagtgaatgaattattggatgatttcagaaacatttgcttgtagataaaggtatacaatatgacaaacaaagggataacaaactttttgaataacccaagatagaataggagaaaaaaacaaagaggttcttcagccaatgttgtagaggtgtggaggtttaattagtttcacatgatccactgaacaactggtttctatgtacattgtactgattacttgtaccactgttattttctgttacatagaatattttcttctacttccataaagtatgtgcacataaattacaactcatctggtaaacgtcgaaattgtaacataatttcatgcaatttttttatcttcaccgttgatttaagaccagatagtctcacatagttaagattatacaatcgatttcacattgttaaactaactcgtcttttgatttagatcgaacagccgaaatctgttaaaacaatccatgtccatcaccctaggtatccaattaattttatagggtattctaataaatgattgaattgacctgcatctgcacaattaattccttaatgatgaattggaaatttggaatctcatccatgtgatgtcaggtttattaaactccaagtttttctgactccacatttcattttacttggtcaaaacaccacataaaaaaatatactaatattgggattccttatttagccaactagcatatgtgtactaattaattaataatcacaaccatgcaccttttttgacgaattgtcagcataatatactacactactactctgcatcctatacattctataaactaatcaattaacgaatagtactatgttttaaaatatttattacttttagtagtatcatctaaattttgagtgtaaccaaaattctacttctctgttaagctgacatgagcagatacttttttgattaaaaaattaatacaaatcattttcaatcaagtatgattgtgattgggaaagtttttcaatttttttaagatgaagtgcacatgtattcttctaaggagtttgtttttcacaagaaatggagtgagagattttccacttaagagtatacatatatacacccatcttgccaacctaaaacacttccaccatgaaatccctatttggtaaagattttaagtttttgtagtattaaaagtgaattgaatggattctcgttttttaagttatatggtgatccgatttagactaagatcaatattcggagttgatggagcgcgacaaccaaggtttgaactcctcgtcaagggccttgcacatgcaaacacttcaatgctcaacctctgaattcgagtgagatgggtgagagatttaacataatagaatgtgtatatctttcaagagaattaagctaagttacctagacccgatctaaaaaatatggtatgattaaacgctatacaatgaatgtcattcaatacaaatgttttttactcaaagtagagtttcgttttgaaagtaaattaacaaaaatctacggtctttatgaaatggtaaattggtaagatacccaagtagaaaagaaaatcaaagctgaaaagaaatacattagaaatggaaaattgacggttaacacttgaagacttggacgtaaattctaaaatatgccatttatgaagaattttgatacataaattgcttttctattagttgataataaagtttggtataactaaatatgtggtcccttctatattatattgttacgtttaaaatttataggcacagctatgagatatatagggctctataaatattagcaaaagtttcaaaatttccccacatgcatatatatatatatatatatatatatatatatatatatatattactcttaaattccattctcttatcattgtaatgaagcatattgggtcacaaaactagtgactgaaccatatcaacacatgctaggcactacaattgaaataatgtactttttggctaaaagttgaaacatcatgatatatggagttgaacttgaagtttcacattcaataaatttcttgtttagtgacctaactagtggttcctatagtttgcttcattaaaaatttgaaacaaaattaccacaaatttatggttgaagtagggcatattctatcatcattaatgttgcttgccattcaaatatacttaattagatagaatttctgtctgctcctcactttcctgatttaccattcaacttcatttttatacgtacgactttattttgttccaaaatagttttttcttttctatgaaaaattacaattagttgggttattttaattcttgttcaacttttgaaaa

SEQ ID NO: 4703 - DNA, 2180 bp, Medicago truncatula; identical to SEQ ID NO: 3983
  Intron number 1 from transcript Medtr6g069720.1 (locus Med tr6g069720) derived from phytozome v7.0 (chr-ID MtChr6; po s 12956028 to 12958207)

SEQ ID NO: 4704 - DNA, 781 bp, Medicago truncatula
  Intron number 3 from transcript Medtr6g027730.1 (locus Med tr6g027730) derived from phytozome v7.0 (chr-ID MtChr6; po s 6065096 to 6065876)
tgaggcatttgttgttaaggatcatcgtggagaatgtaagttttataaacataaactcggtatattaaatcataaacttggtatattatattctatatatgttatcctgaatatgacttaattttttgtgtagcatgatatattattgcaatatagattggaatatatttgatgacaatgactaaacacttatttccaactaactttgttttttaaaaattgaatttgtttacatgttaatgtcttttccattgatgatttgccaagtaagcacttttttttcctttcaaatcacttaaaaattagacacatcatcgtttttggaagagaaaaaaggagttaagacaaaaactgcaaaaatatgatagtttggggacagttatgttcgatttaaaaaaggcaggatcattttcgtgagttggtcaaaatgcgagggtcaaaagtgtaattaaacctaaatatattaataagatggtccccacttttgttgttgtagttatgttattgagtgtgcaaatattgtttatatttagtatttacacaaaaaatggagacgatccatttcctaaacaaaagtagtactttaaatcttactttgatatagtattaattttatgagttgcatatacacatatttgcctgttaagggaatcatagtttagaagtattacttaagttttttttttaagaaagtattacatgctaaatatctaaatttaatttcttgttgacattgttttcatcattatcattatcagtgtacaaaaaacaccacccacca

SEQ ID NO: 4705 - DNA, 2354 bp, Medicago truncatula
  Intron number 8 from transcript Medtr1g093880.1 (locus Med tr1g093880) derived from phytozome v7.0 (chr-ID MtChr1; po s 19252882 to 19255235 reverse strand)
atctttctgaggagcaaagaagacaatttaaaaaggtatttttatttcattattagttatctattgcgaactaaattgatatattggtccataaaagtataccagactgtccctgattatgataagtgtacgatttaatttttaaattatgcaaactagtttcatgttagtctttgcttttacttatcagtttttatatattattacatgaatgaagtatgttcgatagtttaaaggctaaattgtataatcaactaattattaaacgtcgtacacttacaagatcaatataatagtacagtaaccgtcaattgttgattattagcgtttctagaactgataattttgaagatatattgtttgacagccttgttagtgtgtgttatttgctataaatttcttcgtcgtgtgcagtctgttcatattcttaataatgaaatggaaaccaaaagtttaatatccgatattcattttctgttatttctctgtagttgtagtgcttattcctttagggacagaaggaggaaaatgaattacccagaataataaaattatattgatgtagtaatttacttgattctgaatcatgacgaaacaactgaatcctaatcacactagaattaacttcagccgaaaattggagaccatactgtattgtaagttacacaatatacatatcttaagtccttctttgacaaagttgttaaaattgcaagttgttggcaaccaaaagagattggaatgcaagaaagataggatgaatcaaaagaataggaatgtattattgaaaaatgaatcagaaaataaaaaatggaattctgcccaagggtttcccttcacaaaagatctcgtattttactcacaaatcaaatgtacacaatatccgcatgcatctttgcgtaccatattgaataatctcctcatgctaaccaattgccctgactaattatcccttctcaccaatccttactaacctactactctaattgtctctaacttttttttttgtttctctcctttctcaacaatgccctaagaataccacccccgaaaatcaaccgtttcctcatgttgcaatctaaaagatcgcacatgggaaaccctcatgtctccaaccttgtttttccattctaatctacagtgctacatgaatagtaagataatgggtgcatatattcattgtatattattggctcgggtttggtccgttattttcaaaacagtgcttggctggcagaactttccatttactcttatttgggcatggcccattaggtcatacactagacccatgtacaaagcccattatttcgctccttgtttctcctttataatgcccattaggtcaaccatctcaagatgtatgtttctagtggcggcgtcgttggtgacaaccttgcgggctagcgtcctgtgatttccatgttcagggcattgcccgatgcgtaaccggaatctctactgccgtcatttgtagatcccaatcttgccagacataaccaactttacacaggatttcctgtttggaatgaattagtttatttgtttacgtttttgtatggtctaactttccccgattcaattgagcatttatggtacaatttttttgaggattccaaattcttccgctgtttgttcttctgctttctcaatcagtcttctatataatagccgctattcttataattacttcaggtgctgcttatgttatgaaatttgtctttttggtgcgagtataattaaatttgtcataatttttttcagtcaccttaagtcttaattgtcaaatttgttatgatttttgacatttgtagcttgtcggttttcaattttgaggggttttgaaagcattgtggcagggaaggatccagagatctaacaaatttggggcaagaatttttaaagtattatgtaaagtcaaagtatcataatttttttgaccaaaaagattaaaatattaatcaaataatatatggtcgtgtgtgtgtatgtgtgcgcgcgcgtaattgttaaataacataatagtagtattatagtttatatataatattataatcaaacatgcttttggccttttgaatatgaatttcgaacaaacaacaataacaaaaaaaacctctttcccctaggtggaatcaactacatggattaaatcatgcatggtgtgaacatatttgtataaccacactgatgttggaacttgtacccaaccaatgtattattattagatacatcctggcatatagaggcattccatgttaattgatgttctgcatatctgtatattttctaattcatgcttaggaagtttttcacattttcttctgcttttctatgacaggtcaaagaagagg

SEQ ID NO: 4706 - DNA, 1156 bp, Medicago truncatula
  Intron number 2 from transcript Medtr7g071390.1 (locus Med tr7g071390) derived from phytozome v7.0 (chr-ID MtChr7; po s 14716488 to 14717643 reverse strand)
tcaatccaacgctccctgtgcatccggatcctgtggttttgggcttgggctttattctttgttttttctacgtttttgtttttttttcttgctatttgcactgtttttcttgctatctgaacctgttgcttgctcacattttttttacaaaaaaattcctaaaaatcctagttgtttcttgatatattttcggtattttctatggtgttttgcatgtaaaaaaaatggtaaaatggcatgaattaattcccatgtgtttttacacttttggtattattttggttatgtttttgttcttgacactttgatatgtgacatgaataaatgatatccaatcttgtgatgaatatgcctctggtcatgtgctttttttgctgtttttggatatgattttgtaaatttcttgttttgcaagcaacaagtgtttgtcttaagaaataaagtgtcaaattcctctatgaatttggtgtgatactttgcttgcatgtgtctctattaatttcatgtcatagcttgaaacaaaatctctttcaaaattgccatgatgtgaggattatgagtcacaagcacatttaggtatcatatcaaaaaattttaggttttttaccactttattactttctttttgccatccttatgcaatttctttttgtttatttcctactattttgtgctttatgattactaaccatttcatttcatgtgccatacatttcatagcatttcactatctcctccactttctttagcttagcatttatttttgcaagttttaattcattcggtgatgtaatttgttatcattggtttgtagcttggcaaagaggccatagaatgtatttaggtaatttttgtaatatggactatggacgctatgacgcaccggcacacacacactcaccctagatgtatgcctaggattgtatgcgtagatatgtggctatgattgcatggttagatgaatgcttaggtttaaacacttagagaaaatccaacttttttccaaaaaatatgcaaacaaactcgcttcaaatatttttcataaaaatggagtcaaaactccaacaacttttcaccttttattttcttaataaaattctcaactaaatctaatcatttagaccttttttgcaaaatcactaaacaaaccctcact

SEQ ID NO: 4707 - DNA, 1956 bp, Medicago truncatula
  Intron number 1 from transcript Medtr1g096480.1 (locus Med tr1g096480) derived from phytozome v7.0 (chr-ID MtChr1; po s 19749986 to 19751941)
ctgctgctactcctgctgctagtaatactaattcgcatttttcttcatatattatcgctttttggtcaatgcttctatttcaaaatctatagtaacatcttccattaccttctttagcgtgttctacttctactatttgctgttactcataaaagtaccacttacattactatggaggcaaaacatatcttgctttgattgtggataaaaacgtgatcacaataatattgaatactccctccctcccaatttaattgagttagtttaacttttcatacagattaagaaaagtgtataaacgaaagagagagaaaaatgattttgagtgtctttgacaagtattggtgcattcttctttatcataaatataaagtagaatatattgaattggaaatggtgaaagtagtattaattagagttataattggaaaaaagtaattaatgttttattgaaaactgaaataggtcaatattccttagacaatatttttttacaaatgactcagttgttatggaacggaggaagtaataaagttctctctacttgatttgttcttcaaattgttcattataatgataatgataatgataagatgccttttgttgattgaataatgtcatgccaccaacacacttttttcttctcatgacaatatttactttttcgttcaaatttaaatcgaagacatcaaactcttttaacccttacctcaaaacaattgagcttagcaaacctctctgacacggtcattgattgataaaaatttacgtgagtctcaacatatgatttggtggtacctatgtgatgtgatcctaaaattatctctcttgacaagaataataaagtcattgtggaataaaagaaccaaattaattttgggttcaaagttttattttcgtaggtcatgatatgtctgtcttgttttggctatatctggagctctggatgtccgtttgaggcgatctttaactcgttggaaagcttacgaaattctctacatttcatctgtttgactcaagatcaaattcgaaatatttaatggtgtaaaatgagttgtaagttgaaaacgtggttaaagtgtgtaagctgaagaattaaaggtgtttgtggaattgtaacgtctagaaataattagccttcacaaatcaatgtgcaaatgaatatgtaacctcctcatgcattgattagccaccaacttagagagtcattttgtaacattttatttgcattaatcagccaccaaaacattattgtaattagtggttgcatttcctttcattttctaagagttttagagtgaaaatcatcatgtaataagctcatataaatagagcacgaaaatgatatgaagaaaaggttgaatattatagaatttgatcttgagtcaaacagatgaaatgtagagaatttcgtaagctttccaacgagttaaagatcgcctcaaacggacatccagagctccagatatagccaaaacaagacagacatatcatgacctacgaaaataaaactttgaacccaaaattaatttggttcttttattccacaatgactttattattcttgtcaagagagataattttaggatcacatcactatgtaaattttaaacaatcaaattaaatgcgcgttagactgtccacgttaaagagtgtcactccctcttgttgattttgcttctataattgaaaaaatatgattaattggtaaatgatactctaccccgttctagagaaggagtgactcatttaactatttcaaaagtattattcaaaatgtatactagaaagagagaataaaacttttaccgaagtagtttagtcacgagtgatgtaagtagtattttgctgaaatttgaaaagggttgatcattttgtgacaaatattttttataaattggcgatgattagagagggagagaatagttactcctaagtattttctcgttatcccag

SEQ ID NO: 4708 - DNA, 9479 bp, Medicago truncatula
  Intron number 1 from transcript Medtr7g084880.1 (locus Med tr7g084880) derived from phytozome v7.0 (chr-ID MtChr7; po s 18410390 to 18419868)
taggtaacacaagcaccgacactaccacgttttatttaccgctttccgttagtttttacgacgttacgttagttttcaccgttagtttagaaaaatcattttctcaaaaagtcaaatatgcaaaacttcaaaaatcattttcttaataacatttttcctttattttttcttaatcaaactctcaatcaattttaattcaacttcaatcattttcaaaatttaaaatcaattaacttcactcatttcttttatctcatgccttgaggcctctttctcttcttaaaacccatttcgaaaaatcttaaaatcaacctaacccactaaagaaatttttgagtggaactacgtcggttttgatccctttcccaaaaagggtacgtaggcagaggactcgtccttccaaatcaaataaaaataaccaaaaacatacttcttctccctccattctttcacttagattttaggtaataattttttcaaataagcaacaaagttagcacaagataatctaggtaagaggttcctatggaataccatagacgcttagggtgctagcaccttcccttcgcgtaaccaacccccgaatccaaagtctcgaaggggtttttactcattttttcccttcccaagaataaaaatcgagagttcaaagattgacgattcaaatcaattaatggtttgacatctgaaaatcgtgagcacagaaatggcgacttcactggggatattagatcctacgcgggttaaacccaccttactttctttattttgtgctttattacttgtttatactttgtaaatatttgcttacatgtttaccttattacgtgaggggtgagaaaataagctctacacccgagctcgagggaaatataagataggagtggtaaactcatagtggcataccgagagtatactcgtgtcttgacacatgtgagataaccacacttagcggaggagcttgatgtgatatatgtcggcgtgtgttttcacgtttagactttattactcttaagtttccattgaagctaaggacctttagtaacccttaacccatcttggccttttaggatgtagtgcggtggctaactgagtgttttctcggatttagtcgacacgcgatactacactcaaatgagactttcctacgaacgttgttggaccgggtgttttctcggtatccgataatattcggaagtggtcaatgactttgggaacctcggtagaacccttgttacaagtgcaatttaaaccatagtccttaccaaatggcgttgttacccttgactccaacattgtggaacttaccctcaccatgtattctatgtacttgagcattatcatacatacatgcattcattcataaacatattttctcatccattgaaatattgaaggacttatataggttttttttataaacatcataggttatggaggttgttggaaggaggacccacgggtataaattcaaggcaccggatacagagagtttagagggtttgaggggtttgacgaagatgttgaaaaatccgggtcattttcaggagcggtatggtaatttactcgacattctcaagacaaaagtggatgtaatgcttctcaatactttggtccagttctatgatccgatttaccatggcttcacattcccagactttcagctcttcccaactctagaggagtattcccattgggttggtttaccggtgctcgatgaagtaccctttcatgcctttgggcccattcctaaaatccctaccatcgcaaaagcccttcaccttgaagtagccgacataaaagacaagttcacaaccaaagacggtctcccatgcttaccttacaacttccttcaccaaaaggccaccacttgtttcgagaaatccaaaaccgatgattttgagtctatccttgccctgcttatctatggtatagtcctcttcccgagagttgacaagtttgttgacatgaatgccatacgggtcttcttaacccagaacccggttcctgttttactcgctgacacgtatgttgctattcatgatcgcactagtcatggaaaagggaccatcgtctgttgtacacctttactccaccgctggattacttcacacttaccccgtcccagtattagaccagaacctatcccttggtcccaaaagctcatgacttggaccccaaaggacataatctggttcaacccatcttgtgacccagagtttattattgacagttgtggtgacttcaacaatgtacctcttcttggtacgcagggaggaattagctacatcccaattcttgcgagacgacagtttgggtattatatggagatgaagcctgtgtacctcatcctagatagggatttcttcctctacaaaaaagatgatgcaaatcaaagagtgcagttcgagaaagcttggtattccattgtcaagaaagataagaatcagttaggaaagagatcggttatcgcccatgaagtttatgtccaatgggttattgatcgagccaataaattgaagatgccatacccacgacaaaggattgcaacatcaaccgtcccagctatacctttacctttacctcccgagtccttagaagggtatcaaaagcagttggatatcgaaaggcgtgagaagtccatatgggaaatgaagtaccgcaagaaggatcaggagtatgaggctgtgatggccctactagaccaagaagcctatgatagccacaagaaagatgtgataatcgcccagctgacaaagagtatcaaggagaaagatgccgcgcttgatcgaattcccgggcggaagaagaaacgtatggatctctttgatgggccgcattctgattttgaggagtagctcggttcagaggcttgagagtctttcagtttgtttttgatgtttttgtgtagttacggagtctatcccttggttcactttgttgaaagggaattatcttgttttattttgaaagtttatcccttgtctttgttgttagaaagggaattatcttgttttactttgaaagtttatctcttggctttgttgttagaaagggatttatcttgtaatcaactttgtttttttatgatttgtttaggttggtatgtttacaaaactgcttctataggtccttcaataaaaataaaaaaaatatatataaaaattgcatattttggcatatagcatatcatgcatcatattgcattcataaaaagtatcaaaatccaagtctcatactctcctcatttctgcctcagaaaagcaaagtggcccggcgtattcagtacaaacccactcgcattcacaacactcgagctcatatcaagaaaaggatgttagcggcagaacaggaaaacgctcagctcagagaggaactggttaacctcaagggggagatggaaagaatggcacttatgatggaaactatgatggctgagagagagcaagcagcaatctccaatttaactcctgttgtggtcgtcacagctgcacctgagggtcccccgcaaccatctccgactactactacaactatcggtctcacccagcctctgatgactgatttttcttccggtaatatggcaactatgggcaactcaggcttccgtcctcttggcccccagggtccctttgctactcctcagttttccatgccttcaggctacccttggggcatgccgattgcaaccaacgggggttttggtccaggcgctattgaaatgcctgtcacacagggtcaacagacttcggcacatttccagatgagtcaaccgattcctcaagctaccatgactcaagcaggtcctactgtgcatattgggccacaacatgaagagcagatttatcactccgacagtataatgggggatgataaagcaatcgattgggaagaaaggttcggtgctctagagaagaagatgagtaatatgcgggggaaagaaacagtcgtccaaagcatatatgacctttgcttagtaccagatgtaaacatacctccaaagttcaagatgcctgtatttgagaagtatcaaggggacacatgtccacaaaatcatctaactatgtatattaggaagatgatagcttacaagaataatgttcccttactcattcactgcttccaggatagtttgactggtccggcacatacctggttcatggggttgaaaggagtcactacttttgaacagttggctgaggccttcatgcaacagtacaaatataatacctatctggcgccaagtcgcaaagagttgcagtccttaacccagaaagataaagaatcgttcaaagaatacgcacaacgcttcattcaaaaagctgctcagattcgtcctcccttggatgagagggaactttcagaattgttctatgaaaccctgagcccttgttattcagaaaagatgattgtctgtgcatcacagaagttcactgatttggtggaaacaggaatgcgtatcgaggagtgggctcgtaagggagcagctgtttcgggaagttcttcaggtggttcttcaggggtttcgtccaatggtaataagaaatttgggaatggttacccaaagaggagtgctcaagaggttggcatggtggctcatggaggacctcagcccgtgtaccctaatcacccctttgttgccaacatcaccccacaaatgactgcgccccagaacccaaactatcaatcacccagacctcaaggacccgcaccatactaccccccattataccaaccactatacaacctacaacaattccctcaacaaccatattactcccaacaaccataccaacaaagaccacagcaacaaccccgtcctcaggttcctcacaatcagcagaatcaaaggcaacaatttgaccccttgccaatgacctatggagcattgctcccttctttacttgcacagaatctggtccaaacaataccacctcctcgcattccagaccctctcccacgctggtaccgtccggaccttcattgtatttaccatcaaggggcaccaggccacgatgtggagcgttgttttgctcttaagaaagaggttcagaaactgataaatagtaaagagttaaccttcaccgaccctgatgctgtagctcagaacaatcctctgcctactcatgggcctgctgttaatatgattcaagacgattaggaagaggctcgcattctctctgtaggtgatatcaagactcctctggtaccgatacatgtgaaaatgtgtaaagcaactctcttcaaccacaatcatgaagcttgtgacatatgttcgatggatcctcgtgaatgtatacaagtccagaatgatgtgcagggtctcctaaatagaagggaacttgtggttacaagggaacccgagagcaaggacgtctgtgttgtcactccggtattcagagccaggaggccgctagtgataaaccctaacagtacaaagcccgttggtactcccttggtaatctgtgtgcctaggcccacgcctactactgctcagaaagctgtaccctacaagtatgaaggcacgattctagagcccggaagtgagacaacttcacctgttgctgtggataatatcgcagagaatagccggattttgaggagtggccgcatccttcctacggtgggtccgaagagtgttagtgttccgatcgatgagccagtaaaagagcgaaacgccggtaaaggtaaagctggggagcaggccaaagagtttgactttgaggatgccgatgaagttttgaagctgatcaagaagagtgaatacaaggtggtggaccagctgttacaaactcctgcgaagatttccatcatggccctgttatcaagttctggtgctcatcgggatgccctgaggaaagtactagaccaggcatttgtggattatgatgtaactctgggtcaattcgaaagcattgtggggaatgtgaccgcgtgtaacagtctgactttcagtgatgaggatctcccagcggaggggaataagcataatcaagcgttactcatctctgtactttgcagaacagactcgttatccaacgtcctgatagataccggctctgcacttaatgtgatgcccaagtcaaccctcgaccaattggcgtactccgaggctcctttgagacttagcaaggtgacggtaagggccttcgatggaactaggagatcggtgtatggtgaggtagatttgccaatttcggtcggcccacatgaatttcaggttactttccaagtcatggaaatccaggcttctttcagctgtttgctcggcagaccatggattcatgacgctggggctgtgacatctactctccatcagaaattgaagtttgtaagtcgtggaaagttgatcactgtgagtggcgaatcggcctttttaatcagcaatttgtctgctttctctgttatcggtggtagtggttcagacgggccatcattccaagggttctctgccgaagaaagtgtcggtaaaattgagacttgtatggcttcgttgaaggatgcccggagagtaattcaggaaggcaaaaccgaaggctggggtcagctagtggagttgccagaaaacaagcgtaaggagggaattggtttccttaacagtaagcctgggatgttcgaccctaccagaggttctttccacagtgctggtttcattcatgattcgccagagaccaatgcaattttagatgatgcacctggaggagtgacaccggtatttgtgacgccgggaggagcttgctgcaactggattgctgttgacattccttctgtgacaccccgctctgagtaatgtgtttgtcttgtcttttgttgttttttttgtttgttttttagaaaactcctttcgttctgcccaaggcgaaagtgaaatcatgtagggctttgttttgcttctagtacttttattacaaataaaaatcgtcgtttctttcacggcttttattactttttattttttgttgctttttctggaaaaatggtaatacaaaaatccaaaaaaatcattctctttttcttttaaatttcaaaaccaaaggtctgcatttactcattaaaatcaatcatgaatcatgtgcagactgaacataagtgaatccgttgaacacagtgaccccatgctttctcccaactttgaggtcccggtttacgaggctgtggcagaggaggatgaggagatcccgaatgagatcaaatggatgttggaacaagaaaggaagacaattcaacctcatcaggaggagatagaaatcatcaatctgggtactgaggaagacaagaaagaaatcaagattggggcatcgttggatgtatctgtcaagaaaagagtaattgagcttatcagagaatatgttgatatattcgcatggtcatacaaagacatgccgggtctagaccctgatgtcgttgaacacagactgcctttgaagcctgagtgtcctccggtaaagcagaaattgagaagatctcatcctgatatggccctcaagatcaaagaggaagtgcgaaagcaaattgatgcaggtttcctagtcacatcagagtatcctcaatggttggccaacatagtgcctgttccaaagaaagatggcaaagtcagaatgtgtgttgattatcgggacttgaacaaggctagtccgaaggataattttcctttgcctcacattgatgtattggttgataacactgctaagtgcaaggttttctccttcgtggacggtttctccggctacaatcagatcaggatggctcctgaggatagagaaaagacgtctttcatcacaccctggggtgctttctgctatgtggtgatgccatttggtttgataaatgctggtgccacttaccaaaggggtatgaccaaaatctttcatgatatgattcacaaagaaattgaggtctacgtagatgatatgattgttaagtctggcacagaagaagaacatgttgagtatttgttgaagatgtttcagcggttgagaaagtacaagctccggttgaatcccaacaaatgtactttcggtgttagatctggtaaactcctaggctttatcgtcagtcaaaagggtattgaagttgatcccgacaaggtcagagccatcagagaaatgcctgttccaaagacagagaagcaagtcagaggttttcttggtagactcaattatatctccagatttatctctcacatgaccgccacatgtggaccaattttcaagttactccgcaaggatcaaggggtgaagtggaatgatgattgtcagaaggcttttgatcaaatcaaagaatatctgttagaacctccaattcttgttcctccagttgacggaagacctttgatcatgtatttaacagtactggaagattccatgggctgtgttttgggtcaacaagatgaaaccggaaagaaagagcacgctatctactatttgagtaagaagttcactgattgtgagtcccgatattctgtacttgagaaaacttgttgtgctttagcttgggctgccaagcgtctccgtcattatatgattaatcatacaacttggttgatatccaagatggatcctatcaagtacatatttgagaagccagctttaactggaaggattgctcgctggcagatgttattgtccgagtatgatatcgagtatcgcactcagaaagcaatcaaaggtagcatcttggcagaacatttggctcatcaaccaatcgaagactatcaaccaatcaaattcgacttcctagatgaagaggttatgtatctaaaagcaaaagattgtgacgaaccagtgttcggtgaaggtcctgatccggaatccgaatggggtttgatatttgatggagctgttaatgtctatggaagtggaattggtgcggtactcattacccctaagggtactcacatcccttttactgcgaggttacgttttgattgcacaaacaatatcgcagagtacgaagcttgcatcatgggtatcgaggaagccatcgatttgaggatcaagaaaattgtcatttatggagattccgctcttgtgattaaccagatcaaaggagaatgggaaactcgtcatcctggattgattccctacagagattatgcaaggcgtttgctgactttcttcaacaaagtagagttacatcatgtgccccgcgatgagaatcaaatggcagatgctttagctactctatcctcaatgatcaatgtgaatggtcacaatactgtgccagtaatcaatgtccaatttctcgaccgacctacttatgtgtttgtagctgaagcaattgatgatgacaagccatggtatcatgatatccaagttttccttcaaactcaaaagtacccacctggggcatccaacaaggacaagaaaacattgagaaaattgtcaagccgtttcttccttaacgaagacgttttgtataaaaggaactttgatggggtcctacttagatgtgtggataagcatgaagcagaaaaattg

SEQ ID NO: 4709 - DNA, 1544 bp, Medicago truncatula; identical to SEQ ID NO: 4306
  Intron number 1 from transcript AC231342_23.1 (locus AC231 342_23) derived from phytozome v7.0 (chr-ID AC231342; pos 105768 to 107311)

SEQ ID NO: 4710 - DNA, 2053 bp, Medicago truncatula
  Intron number 1 from transcript Medtr2g038110.1 (locus Med tr2g038110) derived from phytozome v7.0 (chr-ID MtChr2; po s 10626379 to 10628431 reverse strand)
ctgtcactaagtttagtgaaggtttagacagagatgttagttgtttttctctaaactcttctccctgatttaatttttttgtagttaagtcttttcgtttgtgctatttttataaagtataaaatcttagctccaccagttaaaatttctagaacgaaaatgaatagagaaaaattaaaggtgtatatgaagttgcccttggtgttatagttgttttggtgatgcttgattaaactaggtattaagtattttgatgatgtttattgtttacatattcatagtcattagtataacttggaccttaatttcctctgctttttcctttttgttttgtctagttactttataacaccacaaaaaataacgttaagcagtggcggagccagaaaaaaatgttagggtgggccactaaaattaactattgaaaaattgtttaaagtctcataaattagacctataattgaattatttaaatttttcgggtggaccactacaccaatttgcggaaatttgaatcaaccgaaacctaaaaccgacataaatttgtataaaatcttacaaaatagacctataattgaattatttaaattttcgggtgggccactacaccaatttgtaggaatttggatcaaccaaaacataaaaccgatacaaaattgcataaaatctcgcaaattagacctataatcgttgattttttaatttttctacggcccaccccagcccatgaagggctccgccactacgttaagataagtatagtatattttcaattagatgcactttttcatctatcgtttgaatgaattccaatttactttttgtattttttttagattttaaatttgtaatttatatattcttctcttttagacattcatgatatcaaattttggcattaaaagtaatttggtagattgtcatctgagtgaattatatttgaaaaatgatatttgtacaattattttttgataattttaaacagctttctatctcatagtcacatgatgttattattctctctcttcttttttctctcttcattgtttttgaccaataaaaacagataaaactaaggttgtcgtcaaagctgtcattacatacaaatatcattactcattatattttaccctccaccacatatcatctattttatacaattgtccctatgagcttagcttagtttgtaaagacaatgtataatatatgcaagattcagggttcgaatctcaaccaccaccaaaacaaaaaaaatgtcacataaataacccgcttgagttggtctagtggtattgacttgggacctgggagtgtgctcctccttaaggtctcaagttcgattccaccggtgtcaatatgagtggactaatttagttaagatcaattttgactcaaaatcactcatctgaattgtttttccttctttttttagttacataagaaatttccacatatttttagttttctttcatttgttcttgtgatttcgccgtctttgcatgactatttagtttgattttctgtctttgtgtgatgtgtttaatgatttctcgtcttagtgcaatgtttatttgattctagttgaaagattagctttgagaagtgcaaattccatcaatgattttgatttcacaaatgttttagatcaaaatgcatgggtattctaaagacttgaatataatcatatttgtagacatagatactccgtcgttttatgcttttagcattgatgttgcgagtttattcgcattcatcttttttatttttaacgactttaaatttgtataatatcaatgtaaataaatgaatatcgtttattttcataaaaaaaataaaaaataataataataatactcataaaatgcatttaacctatttacgtgtttgtgaagaaaagttaccgttatgagttagcatttgtattaattaagacaaacacctaaaaatacgttatactaagttagtgaaattataacgaactaataatctaatccttgactttatattatattatgtagagattacttgccgccgtacatacataccagacacg

SEQ ID NO: 4711 - DNA, 1409 bp, Medicago truncatula
  Intron number 2 from transcript Medtr5g008890.1 (locus Med tr5g008890) derived from phytozome v7.0 (chr-ID MtChr5; po s 1781059 to 1782467 reverse strand)
gcagacactttgtcttgtgatctgtctatctctgagtatgtgagattaagatttaacattatttgtcttagaatttgtgattgaacataccacaatctcacaaaagtagcttgtgaggtgacggcgcccccacttataaacacttgatcgtgtcatatcacttcaaatgtggaactgttaacactccccctcacgcccaggactgagacatctgaagataggctctaaaccaacccaaaccaaactgaatatcatcggtttagtttggttcaattctacttttgaaaaacgttgaaaatcaaatcaaaccgagccgattacatcatattgcaatttttttacaatattaatttatgtaatacttagcataatattttatttaataattttaaaaatattaataaataagaaatatttatcatgcaatttttttactagcaagtaacaatttttctttcttctttttttggtgattgtgaaaaacattaattgatgccatatcaatatttttctggaattgtttcagttgaatcaaaattagtacaaggaagttttataaaaaattctaaagaattccctaaaaaaaaaaattctaaagaatattcttctaccctaaataatattctacaatggatgtattttaaaatcacaagttcgaaatttttcagtagtttttcattccatcacatctaccaatgtcaccaacagtctgccaaatttttctgtagtaccgatatctccaaatgactatttcttcttaacataatctactactcctattttattgtttgctttgtggcttattaatccttaggtacgttctttttgttaatggcattggatgcattgatcctagttttgttttaatattatgtcttccaactacgatttataggtttgtggttttattccctgaaaaaacaagtttgtggttttattttgctaaacaaaagagtttgtggttttatttatttatttacgacaatcaacgtatttttatactatttacttttgatacttttgcttctaacttcctagtaccatccttcaaaaaaaaaaacttcctagtaccaaacattgttaatcttttacgagagtttaaatagtcataaataacaatgtaatgtcttcaagatctatgaatataataatttttcaaagaattggttttgccatataaaaggattaccagcaatatgaattatctggtttgttaatatatgattatatgtagattttcaatataataatttttcaaagaattggttttgccatataaaaggattaccagcaatatgaattatctggtttgttaatatatgattatatgtagattttcaatccaagatctatgaatataataattattggtatccttattgtatttgaaggttggttttcggcaagct

SEQ ID NO: 4712 - DNA, 1368 bp, Medicago truncatula
  Intron number 6 from transcript Medtr7g116700.2 (locus Med tr7g116700) derived from phytozome v7.0 (chr-ID MtChr7; po s 27066632 to 27067999 reverse strand)
cccattgaagatatttcatctctagatttgaaaacgtaagtaaactataaacttttatttgattctaacctctattttgttatgcattgttgtatttctaggactactgattcatcaatttcttagacaactttttggttctctaatatgactttgccaatacaaaattacaaatattctccaaatttgaaatatttgaatttgacttctttagagtgataactgttgatgattagaaataaataaaagattatgataaagcatatgtatgtgcataaaaacaacaattaagttattaaaatctaggccattaattttccaatcaacggttataattttgcaacagcagctaaaatatttagtagtgtttttttttaggggaaaatatttggttgtgttgttgtgggttagatgagtaaattgcaccccactttagagaagtcaaatcctaaacattttatatattgttcctgatctattaccaacatctaatctaatcaatctaaaggtaaaggataatatagcttttgaaacatgacatgcggacaaatattttccattcatcattgatgtcggtcatctgttttgtttggtgggaaaaagttgcctgtcgattatattagttagtaatatcattgtagatattgacactaagtcactaacgcgcacaacactgacatgtatagaaaattagcgctgtaaacttatctgctggcatcatgaaagatactgattcaggtatcgagattaacagaaagaaaataggaaatcttacccaccatcttccaactctggatcagtgggtatccacggtcaagaacaaaaacatcttacagtggtatcttttataggaagtcaagagcctgaaccgtgccatactaaatctgatagtcaactaactgccttctcttatattctgtctctatctttaaagggattactagtaactactacaacaactttcctgagaagcgtgtctaattaactccttgaccaatctgatgtgtcttttcctagttggggcatgtaccttgtaattatgcatatatcatctcttaatctgataaggtaacagataaacaaaaagttatgtatattttcaagattgaatatatgaataaaatgctagagaagtagggggttttaagataatccatctagagcaaggttctcagttatatggatcaggaaggtacttttttagagcaacgcaaaagtgcagatttaatattgaatgtctctatgtaagcttttggtcatatttcgtacatagacatgcacaggcatggatagagttattggtatgctgactttaccattccatcgttgacagtggtattgagatcacggaagctctacgactgcaga

SEQ ID NO: 4713 - DNA, 802 bp, Medicago truncatula
  Intron number 7 from transcript Medtr2g010390.1 (locus Med tr2g010390) derived from phytozome v7.0 (chr-ID MtChr2; po s 2524060 to 2524861)
aagcctttacagttgaaaggtacacacatatttcttgcacaggtttatggtaaacttctattatgttttccatctacaaactacttttgggtccaggttttgttcatgccgatttgataaagacacgagtacctgatatagttgcatcaggagttcaaggtacactaagaattaagtattagttaaatacaacccctttcaaaattttattagccttaacaaagttcacttgtttgatttaaagtcatgagcccttctaccggcagagatgagtcggtgtacttaaaggcagagttcagagataaaagttcaaatgaccaatccaagttagaacacataccttctgaaataactaattttccaattattgatttatctcatctttatcgtccgacatccatcatctagtggctgatgttttcaaaattctatcttattgattcttattttaggtctaaatctgttacaaaaatgtttgatcagttctcgaggttttggattgatatgaaagcacttctgctcaataaggtttatgttatcaatattctaggtgcttctcactcaaactaatcaactgtacgcatcagctagtttacgttataagatttactttattttgtcgataaatttgtgtcagaaagatgctatttggatagcttacttccctgtgaacttcatattgtaaaatcgtaaatgtattctatttttaacaataatattttatgacatcgctttatttaacccatgacttaaatatatatttgtaggttacatagcgtacaactttgtcttaggtgcttac

SEQ ID NO: 4714 - DNA, 1498 bp, Medicago truncatula
  Intron number 9 from transcript Medtr3g156820.1 (locus Med tr3g156820) derived from phytozome v7.0 (chr-ID MtChr3; po s 41247218 to 41248715 reverse strand)
agaaggtacaaatataatatctgcagatgtaattgcttatttgttcactacaaatcaccccttccccagataacataaagatatgttaaaagaggataagatatatacaacactaaagcatattatattgtgaatgcatacataatttgtaagtcaaagcatgctgaacacttgctagattaagttaaactggctgtagttttaaagagctgtgacaagcaggaaggcagaatatttttcaattttttatgaatgtgcttgagtgatctgcactcagtcaatcttctattatacactcttcgcaataactacaatttacatttaaaaggagattaacaacatcgccacttcctaagtgcacgaatgatattttctagtctagatttggctaactatgtacatgaagtcttgaacctacaaatctcaatactaatacgaactccaacacttcttggaaggtggaataatgtgatactatttccaaccagagcaagttggaaattatttattgcttatatcgatatattattccttcaatgtgtatttttcaatttgaatatatgagataataccaagaagggaaaagcctgagctaatctctcaccattatgtcgttttgaaagtgtaataattccaccttgtgacgattatttatggttcatgatatgatatatgccaaaagcatcggaaatgtgcggttagcccaataaaaatacaactgtcattattcagtaagattataatctttacaacatcatgttcaacaattgtaattacagttgatgcattgaattagtgagatagtggggagttaatttaattctgctatgtcatgacaggatagttttgtttttagcttattcggacaagcaactgttttttgtagctaagatttatttattacattgtataaaatttcaacctgtaaggaatttaagcacaaacaaggaaaacaatgtcatattgtcagtagcttgtatgttacggtctagttttttaattgctgtttgaccaaaatgtatggaattcagaacacaaatgggggaaaacatagcacatatctattaaaaaaagtcttgtaagtttgctatgtaggtgttcaaaagttgaataattgctttatgaatctctctaggtttgtcagtctaatcaattctgtaaggtagtcttgctttctgcagttttgtcaaccagttactatagctagtatgtttctgtttgttgatataatgtatttaaatctcacctcacccagtggaaaaggcttgtgttgttgttgttaattattataccatgtcaaaaatgtgccactgaagtaggtttggacaatttaactgaattaatatggatgttgctaaactaaattattctttgaatttgagaaagaactggactaagcatgcacctttcctatttctcttcattgtctttattgtaaaaaaattaacacgacttttgcaaatcaaatatagtcgtttctcatttacatttcttcagg

SEQ ID NO: 4715 - DNA, 2577 bp, Medicago truncatula
  Intron number 3 from transcript Medtr8g077770.1 (locus Med tr8g077770) derived from phytozome v7.0 (chr-ID MtChr8; po s 15594749 to 15597325)
atccacaaggtgccgagacggcagtactactatcggtaatcttcctgccattgatcatcagttaatatatgtgtatcacacatggttgtttatgaaatagttaagtattttaagcacccaatcaatttgtcttggattgtcatccaaagaatcatatattcattactgagatttcagggcttagaactacatgattgtgtgtcatttatccttaaaaaggcattgccttgagttgatgtgtttagctttttggctagataatgtagcataagggaatcttgtagaaaactgatatttatttgaggatcttgtagtgctacatgtttagaaactcttacctgagggggtttcataagtctttttttttggctgtattgttttcacccctgccttttttggtgataagtatcctccatttctcaaaaggcgtttctcgcgtaattggtcatacttgttagttaatcttcaaaattcatcagtatctccatctcagcttgtcacattgtatcctagcggtcgatctcgttatttttaatttttcaaacaattcgagtttttttgttgttgatgacaaacaatcatgcaatcctttgcttgtttagtttggaccttagaggctgcatatatgtctcagctgctttcttaggcagttaggaatatggcatttttcctattcaattcacataaacaagtttagtgttatgaaagaaaggggttttggtacttattttgatgccactgttagttcttatgatataaaagaatgtctttgttgagcgtaaacatcaggtttggaatcattttgaagcttcacaattagaactgacattattgtttgtcatgaaccaactatcccaaaaacttaagctattgggtgaaaacacacaaatggttatttatatgtctgattcatggggttcccttgccgactaacgtaagagccctttggtctggaagcgtagacaatgcacaggcccaccctgctttgtgctgaaaaataactcttatttagaccaatggaggaaacagagattgaactctagaccaaatggtcaatgtgatacaaactcagaattgagaataataaaatagggtgacagataaaaatattcaatcataaaaatattcaattttattaatctttaatgagaggtctaacatattctcttcttaatatagaggctgtgatgccatgtcgtgaataacagataaaaatattcaatcattaatctattatcccaaaagcttaaaaacacttcaaatgtttttatatttaacactattttccggcaattttattggatatgcatctctgcctatttggtatacttagttggttccatgttcagagaaaagagaaggattgtgctgttcggcagtcaatagtcaatataaaatgttacttaatctttatgttatggattatcaaagttgatctttttggatatgcatgttgtattgattcatgtgatgtctgatgctggaaaacgtacccttcactgctttaagataaaatttagggttaatagtgttttatccgcctgtaatatatgtcatttccgattttccaccctgtaaaaatttttgtttagttttcgtccttgtaattttaatattttttggttttggaccttcatcgaaaatttcgccccttgtaatttgagaaaatttcggtttatgccccaaaaatttgagaaaattttggtttaccccctgttaattcgagagaattttggtttagccccctgccatatcgccgattttgtactgtcaaaattcatgaaggtccaaaaccagaaatcttcaaattacaaggacgaaaaccaaacaaaattttttacagggtggaaaaccgaaaatgacctatattacagggggttaaagcactattaaccctaaaatttatttttgctactagaactagaagattgggaagtttcaatcattcaatttcagatttaatataaattgaaggggagtttgaaagagtttaaatatgcaagcttactgatgttaatctgtgtttggtttgcataggatcctagacactagttgtcttatttttgggtttgtgtagtagcaaattaaaaagaatagcctttggaagtatgatatgttgcctaagtgcctctactttgggatgtgtctgatttatcattttatttgggtagtagatttaaaattttatcattgggtcatactatgagtttgtgacattgctgacatcctattatgttggtcaacttattctggtccaacgatgtatgcaacctctcatagatatcagtgacataaaattgctataaaattgatccttaaaataggatcaatttggtcctggaaggatgaaactggcaacgttattaataatactaatcattgaaggactattttgatatcactgctaaatggagaagcaatttgatgcatgtatatttttggagaaccaaattaagtgtcttgtttctttaatgtaggaatttatttagccagcaattatatatatatataaaaaatttaaccgagtttttcaacatatcagggggcaacaatagttgatttgtcagttaagataac

SEQ ID NO: 4716 - DNA, 1872 bp, Medicago truncatula
  Intron number 2 from transcript Medtr3g097460.1 (locus Med tr3g097460) derived from phytozome v7.0 (chr-ID MtChr3; po s 23319708 to 23321579)
tcaccgttatcatcgttaacaagtggatctttcaggtttcttctaattccattcttcttcttcttctttttttacttttataaatgctatgcatacttaatttcatgaaattctgtgattttctatattaattttctaatttatcgattctttaagcatgttatgagttagttcgcagattctattgtttttgtttttctgcgatgttgaatttgtgtttgtatctgatgtactctagcaatttgaacgaatgatgtcgtgtttcttaggaaaaaaaaaaaaaatcatgcctttgagtcactagttgggcagagggggagggacttttgtatttgttaattgctatatttggtgttacctttaaattcatagaattttagcttttccactttttacgtttggttcttcggtgacaagaattgattttaggtgaattgattaggtaaaattgattttgattaaaagttagttgaagataaagtgatttgtgtttggatgcattcatgttcatgtataagtgagttaaactctaaatttgtgtgtaaaaatcaattttagaatcaaaagctacaaatcctaacttccaagtagaaataattatggaggcaaaatctattttactcgaaagcaaccaaacaagtctgaatcaattctaaagtctagaatcaattttggcccttcaaattggaaccggcatacacaaaatcttttgtcctttactccatttataatatttttttaagtagtttgtaattatataaaagaacaatactaatgttgtttttttttcccaaaatcataaccaagcctcctagcttgttcattgaactggagctgttatggttccaaagttgtgttttgttactgatctgcatactcttatgttacatgtcctagatttccatgaagtcttgagttgtttagctattcagtacatgtgaaacccagtattgattttctcggatttgaaaactcggatgtttgggtttaaatcaatctaggcgagttctatatttcatttgaaaatccagatgatcgagtttaaatcaatcttgggttgcatcatatgaatcagaaatatgaaaccaaaatatgctaagaaaaaaactttatggtgttgtcaaatatcgtccatggcggattacggtggcagatttttgcctaccgccatggccagcttgtgaaagactgtgtcgccatatggcggatttttggttttccaccatggtccactatccgccatcgataacactggtaactgttctagactgcggtagaacacaagtatgaatttgattgtaaaatgaattaaaaatgaccttgataggtggtatgtgttgttaatttctgaaaaagcatagcatcaacctttcagtgcttctcgaaatgtatcatttttcttatgaagaggctttctcccaatgtatcttaaatatcaaattctgtgttttgatggtcaaaagaggtctggtggtttcttaggctgtactcttggttcccagaaatcagaaatatgatctacatctggaaagggtttattatttttggagaaaagaaggcaattatatttaaaggattctttaatgatggtattgaagtctataaacaaaaaattacgaggacctacatgattataatcacaagactgtttagatcttctatgtttttgttcattttatagtgaagaaaaggtttatcaacctttataacttccacaatccacattggtatttaaaattcctcaatcctcaccttaatctcccaatcatcattgatcttagtaaagacttctatggattacagcagtattttattttattttgttttctatttgcagaaattggatttcaagtttcccctatcagtatcctg

SEQ ID NO: 4717 - DNA, 9567 bp, Medicago truncatula
  Intron number 1 from transcript Medtr6g080460.1 (locus Med tr6g080460) derived from phytozome v7.0 (chr-ID MtChr6; po s 16144030 to 16153596 reverse strand)
caatctcaagataaatctgccacaagtccctaacggtgtcaacataaaatgagttcatgatcccactcataaaagacaagtgtgatcataatatttttctaaaaaccatttctaaatagtgaatttaaccctatccatcaatcggagcacatacgtctccttcactaaaaagatgtgagcgttttgttttttgttttgaaaatttaacatttgtatagtgaaatataatgtttataaagagctattaagcaaaataattctatctagaagatttactctatttttttaatcaaaatctagaattactctctgaattagttgatctctcctcaaatccttgaagtaataatggtaaggtattttaacctcccacaaccccaaatcagaaggttagtttgaaactgtctatggtagtgcttttgggggtagacttggtgacacacgctttgcaccatggagtcatggaccacacgccaacacatttttattccttaaataaaaaaaaaactactactttttttagggaaaaaaaaaaccactacttatattatatctatgcatgtgttattagtgtgtcatgttgactttttggtcctctttgaggttttttaattcttaacaaccttaacatagacagctagcctcattaactaatggaaacatatttaatatatttggttttaatttttcatgtgcctctttcagacaaaaataactctttattcacttcagaacttattctctctagttgttattataaacaaaactctactttttagatatattgaataattaatgtatctaatctttattatagactgaatacattaattattcaatatatataaaaagtggagtttttcttataatagtgaccggagggagtactataaatgatataatcggttgaaatcgaggcttaactcatttttataaaatcgatcttatctattcgatgtgggggcagtattcttaggcttggtgtgtgtatataagtggtgggtaccctgatcaatgaactctaatagcatgctatgatatcatcttaaaaattatggatgagtctaatacaactctacaaagtcgacttataaggtgagaaatgtcttctctttataaactctcacaaaaaaatgttatctattgaatgtggggttagggtttttcctaatataatctgattgttgtttcttcatggaaatatcatctgatggtaaagacttggaataacagatatttccagctgaataattgaccaaacaaaagaaacaaattgaatgtggaggaattagtcgacacctttgatgattggttatcatcataatctatttgaatatacagaattttaagaaatcgtacgtggaaattattctgttatatattctttctttgatgtgagacttttgtgaataagttaaatattctaaaatgctcaatatgaacgaagcttggatttaggattaactaatgaagtcggtggaatacgcgggaaacgtatacaaattttttagagaaaatattaataggtgccctaattttaaggatttgttaaaaagtttaaagaaaaaaatttatattgaaatttggatatgagtacttttatacaacacgaacaacttaacacgcgaaagccacacgacatgtataacaacatgcaattttgtattttatggagtatatattaataaaacaattatatcaaagaaatactttcttaaccccatattatttgacatggttgactctatcacatatatcaagacataattttaatcttaaatatttttaataatatattaaaaaaaattataaaaatttgatattctgaaaatattcatcagacgaatccaacatcttatatactacaatttgtctttgtatattagtaaaaaaaatatgatcaaaacatgttatatgaaaatgcacatttttgaaataagtcagttaaaatggaacggagggactaacatcataatccacttttcctttgttaatggtgaggtaagaacacggtacaaaagttgatttggagaaacaccatggaatgaggtgtttttgtcattctgtgcaaatcaaaatcaagagaaaaatctgaatggcattataaacttgttcgtataattttgacaacatattgttgtgcttttcagcattttcctttgtatatttaacacgttaacactttaaaaagcttttttttttgtatattaaatatatacgttatttttttttatccttaacaatgtctgttttagcgtcaaaatgtacggtgagatttaaaggagacacacctcttgaacaatattttatttcttgaacctcaaatttcttacttattagtttcaaagagtaaaattttagctatcatagactatttgataaaaaaaaatattacgttaaaacaaatataaattatatttttaaagaggtgtttaggttataaatttaatttgtgatttgagaactttgatgtctattttaagtttgacatactatttttttaggttataatatatagacacacactcctaagaatcctaaaaacaataaacaatcggtgcagaaatgtttcattctactatcacttttttattttttaggattcttaagtgatcagtggacatcttttttgtttcattttagtgtcataacataatcatcagtgtcagtgttcaatatattttgttgatcagtggacatcatttattataaattctagtgtcactttttctttcaacattttatgtgtttctataggacggaagacaatcttagaacggatcctctagtgatatgtatcatcatgatataggaaggtttaataagtctagtgactaggaaacttggtgatgattgaaattggtgatgattaatgatactttgtcatattgttttattttactcattttaatgtcttttaataaagttttagggagttttagactgtttggatgttggaatagtacaagaaaatcaaactttgaagcttagaaatcgtgttacgatttatggagatcgtgacacgattttgggactaactcgaggattccaattcacaagacaatcatggcacgatctggagcatcatggcgcaattttgcattgaagatgcttgctatgtaggataagtgaagaatcgcaccatgatctatgagaatcgtggcacgatttgtcggaacgagatttggggttcaatttttggagattttaaagatgattttgcatctccaaacttgaggaattcatagtgattcaccattcaactcataattggtccttattgcatgtaatgtattcaaacttattagttgttatgttttagccatgaggaactaatttaccattgattaggtcttggatgaatcgattacaattgtttgaaccatgtaattttgaaactctattcaattcaattacaatcccagtctttattcagtatatttattctcgatggcttttatatattgaaaatatatgaattcatcaaaacttagagattagggggttgtaattagagaatagggttttgaatcaagagattgatcaaaactattttgttaattcattgttaaactaggagaataattgtatagaaaatgtgcaatttaccgaacaggaaatagaggatttgaatctctgatcattttccactagaaatatctaccaagttatttatattttcacaattatgattgtgaaacaaatttatatgtttgttgatagagtagtgatatatgaacaactctttggtataactttcatgacaactttagttttctatcttttgattggtcaaaaataatagagagggaaaaagaaagagagaaaataagaaaataatgtgagtatgagagaagaaaattgtacaaaaagttgttaaaaaatggttgtacaaatatcatttctcttgttgataacaatgtttgcctaaaagaaattagagtaaattacactccactccgctcagagatgcttgaattacactcatctcctctcttatgttagaatatacatttttctcccttcttattcaaaatatattaaaaaatatttcactcccctcccttgagagaaactagaaattaaagcaattcttgaggagacaaattattatattactctgacacatttttattacatttgctaaaatttcatcatttctaaatgacttaaggggacaactcgattgttgagagctaccacacaatccttaataatttttgtatgtcgcattggagaatctcaggggagttgagtgagcatatgagaatgttaatgaccacctccgttggagtatagtgttacattcctcgccaaatatttggagcagtgggtatcatacaagttagaattatcccacaaatatgtatttcttccggccacatttataagtaaattttactttttttagattcattgaatagttgatgtatctgaactatgatatagtccaaatataacacttattaaatgaatgtgaaaagaaaatatttgcttataaatatgataggatgaagtatgcatcaaagtgttgaattgtcatatgactgcatttgtttaatgtgatgtggtaagtgtctgggttggtagtgtgtcacagcacaaagacttcatagacttgtgcattgaagaaatagaattatacggttcaaagcgtgattcacgttaaacacatgcatgtctctcacaattcaacaagatgaagaagattttaatcaacattttgatataattttcgatgacatgaacgtggtagctaagcaaatttatttattcgttaggccctctctatttgtactatttttcctccttttgcaggttaagtgcaccttgcactaaccttacctaataatatttgtcgtttaaaaaaaacaataataataatggtttttattttagtaattcttataaacgtcgaatgtctcatgatgctgtatatagtcaagtacacatatagttaatcattcaccaactttgcatcacatgttggagccacttgaggaaagtatgacatgtaaatatataaagttaactcctggacacatgtcactttgtcattggctctgagttttttttttttttacaaaaaaaataattattttttttaaaatatatatatttaaaaaaaaaatcccaaagccaatgacaacgtgacacgtgtcccagagttaacacgtgtcaccttgtcattggttctaggaattttttacaaaaaaataatatatatatattaaaaaatatttatttttttgtaaaaaaaaaaaactcagagccaatgacaaggtgacacgtgtccacacttaacgtttttttattaaaactaacggaaacctaacagaagggaccaaaacgagactaaaaaaaaaacttaaaatcctcaaagaatctttttttagttaagggaccaaagcgataccaattaaatagttaagggaccaaaagagcatttaagcctaattattattaggtcaaatgtatctaaaggtcctttaagtttttcatttttcacaaagtggtcctctaagtttcaaaggtctcaaacaagtccttttagtttttgaatcgtttcaaaaaacttctattgtagatagcatagttggtaattgcttccttgaactcatctttggtaccaaatctggctcctaacactcacttaaaattagtcatctttttaggcatgacaaatggtggataatgttctttgttgctatcatctgaatcatcaccatcatcctctaaaaggacttgtttgaaacgattcaaaaactaaaaggacttgtttgagacttttgaaacttaaaggatcactttgggacttttgaaacttaaaggacgactttgggaaaaacgaaaaacttaaaggacctttagatgcatttgaccttattattattataaacaaattaacctattcaaaaaatgggaaatttattttcaagtttaatcattgtaaacagattaacctaattgaatcttaaatagatatcatgacatctttataaacaatatattaaggttgaattgagtcaaaaaaacaaaataaggatgaatttggtatgaaaagtagtgctatgtgaacattcaatataaatatttttttttcaacactcgttttttaattcgataaaattcatacggagcccattatcttacgatttctgttcaccactttaaaaaatgaattttgaaagactaatttaataacaattttagaaaaatattgtggtgacattttatatcttaagtataaatttaatgactaaatactttatacatcttaaggataaatttaatgattaaatactttataatactttagctaatgataaaatacatatacctactctaaaaatcagcttgaaagtttagacgattaaaaaaatatgattaaaatatttttttagacgaatatagagaaaattagagcctgtttgaaacacttctgaaaaactcttttttagttttcaaaaatttgaaaattaaaaacttttttgctaaactattttaaaaatttacagttttaaattttttagttttgaggactaaaactaaaacatgtaaaatgataaatattgcgagaagaagatttttatatttcaaaaactgaaaacaaaaactatttcaaagaggctcttagtctctaaactatcactttctcgtcaatttcatctttaaacaatttaaataatcaactaaaatatctttaaattatgaaaaatagatcaatctagccactaaattatcataagaaaacaaccaattttattaattgagtgactaaattgttggatgaaacaatagtttatggacattctagttgattttaataatctaaggactaaattgatgagagagtggtaatttaaaaactaaactgattttttattcatttttagtccatgtaaatagaaaaatgttcattttttgtcccccggtcttttcgtcgaaaatgaatttcataaattaaaaattttgaggaaataatatggagatcttgaccatttattttcacattatcaatggttaaggtgactattaacaaatgaagatcaatgattaagatggccgaaaatgtgtgactacgtaaatgcagtattgggaaaaactcatgttccacatcggatagataagactcttgataagagtttatatagaggaggcaatcctcaccttaagaaccgatttttaagaatgacttaggcctccaatttcattatgcagcaacgcaccgatcaatgttaattcatgtcaatttgtaaatcatatatctatcaaggcttagtctatggggaaagagtgtctcatatctctcattgtgcataaatattatgcattcaattattacttgtattccttgtctcctctctttcacactttcaaagagtatttgtgttttagagtagataatccatttacagaaaatggaattgtctattcatgtccatttttaagaatgacttaggcctccaatttcattatgcagcaacgcaccgatcaatgttaattcatgtccatttgtaaatcatatatctatcaaggcttagtctatggggaaagagtgtctcatatctctcattgtgcataaatattctacattcaattattacttttattccttgtctcctctctttcacactttcaaagagtatttgtgttttagaatagacaatctgtttacagaaaatggaattgggtagctgccagcggtgactgtttagagtgagatctgatgtttcttgataaaggaaaattaggtgtcaccaaagaacacacatacaccatcaatcaaagccttgtacttcctccgtcccaacatataaataaaaataaatcaacataaattaatgtattttatacgaactttgaattaaacacattaatttttattgactaaattttacttatattgtgagactgacaaaatgttgtagaagctccgtaaaataaaagaattgcatctcaatatctcatcaagaaaatcttattctttttttttggttactcaagaaaatcttattcaagcaaaggaattcccaccaaattcaaaattttgacgaaaactaggaacattttttttttaatcaaaattagcctatttaaattgacacactgacactggggaatcaaacttgagacgttaagaatgagcacactctcatgtcctaagtcaatacctccaaaccaactcatatgttaacaaaacatttatagagcaacgtttacaagttaatctaaaaaattggctctctaatatatagagcaacgtttacacgtaaaatctcaaataacctaaaaaacttagacatttttgtacaagtgaatagttcagagtatatataaaggaagatgaatgatagcaacacacattttaacatacattttgaacattcgaaaatataagaatttatattatattgttggtgtcatttaaaaaaataagtatattttgttttttgaacaaaataaatatagtttgttataagatgaaactgcaaaatatatatacatataatttgaatcaaaatcaaaaaaatttaaaaattattattcgtaatttatatgcattatcataataaaaggagaaagatgtgctatcttcacattctttagttttttcctatgaaatttaccttctatttactatcttcacattctttacttttgtttcctatgaaatttaccttctatatattcattgtgcaaggtgtgcttggtctctgattttgacatcttcaaaccatgcacttatattattattataaaccatagcccttttcattcataataagccaccccttttttattttgtttttccaagaccaaagcctttgacttttttttctttctcttcaacgtatattgcccgagtaaatgaagagaataatacctttgaaatttttggaacacattgtttggatattttatttcattgtttgaatattttatggtagaataaaactaatttttcaccctattgtttgaaaagtggatgaaataagatgtgtaataacttttttatttcattttcaccttttagtttaaaaatatcaatttgtttaaaaattattataaaataattgtacaaatatcatttctctaattttatatatgttgaatgtcccatgatgaatacagtcgagaatgcatatagccaatcgttaatcaactttgtaccacatgttgtagccacttcaagcaactatgtcatataataaatgtctgccaaggttggaactgtgaaattcatgagactttaagaaatgaattttttagttacaattataagaaaaataccatggtgacattttaatctaaaggaaataatttgtgattacatttttatataatacttttatgatcaaatgagtaactactctaaagaatcaacttgaaaatttagatgattaaaatgcgactagaatatatttttagaccgtgtaaagtaagtaggaaactgatcattttttgtcccaatttttaagtttcgtattttaatatttgtttactctcaaaaatgtgttataacttataatcactcttctcccttttgttaattgaagcgttaac

SEQ ID NO: 4718 - DNA, 866 bp, Medicago truncatula
  Intron number 1 from transcript Medtr5g006190.1 (locus Med tr5g006190) derived from phytozome v7.0 (chr-ID MtChr5; po s 601436 to 602301 reverse strand)
tcaatctcaggttagcatttttttctttctgtttttcttgtaataatcagtgttttatcattcactgttatattattgttattgttattaattagttttagttaattttagtttttcattttgtggtgtttagaatttaactggattttggatctgtgaaattgtttatgtattatacgtagttagttatagtttgtttgattgtgaaagattctgccaaatggattgttttatcatgggtagtggaagaaggcttttggttttttttcaatgttgtttttattcgtagttattggaacgtacccactttttagttttaaatttgtcagattctcagtttaatgttaatttgaagctttgtattcctccacatccataggagtatattttttatgatttatgaagcagaagcaaatacatggacaccggatactgataataatttaagaaaatgaacgttattgaatgtaaccacgcatgacggtgtcagacaccgacatgcatcgacgacatacacactttcgataagaaatgtttgtgctacatagatcatgataggcagtattatggttaaatttgtctaataagggttatagaagttgttactgtgtttcatcacaaaaaaggttgaggtctaggaaggtgggggcggagaaggaaaattgctaggtaagaagcagaaatgattgacaatttgaacataaacaagtcatgacatgatcaatgttggcctgaagataaaacattgagtttgctagtcattgtcgaagttttgaatctatttgcaaacttggctcgccattatagttgaaaattctccagaaagtaaaattatgttcattgatgtctttattctgtagggcttc

SEQ ID NO: 4719 - DNA, 3103 bp, Medicago truncatula
  Intron number 1 from transcript Medtr3g081070.1 (locus Med tr3g081070) derived from phytozome v7.0 (chr-ID MtChr3; po s 19276439 to 19279541 reverse strand)
accaatctgaatactacgaggttgggtatgtagatcatagatcttcaactgactaactatattgcttttgaatattcagttatttatctacatattgctattgttgttttgtttcagttttttaagtcttgttgaatacatcagctattgatgagactgcagtgtgcactcagctgggttttttatgctgtgaagcaaatgtagcatctgcatcatcagtgtttaaattaaactgtttttttggaacacacccttctcactaagcatgtgtcatttggctatatgcatttggtggattagactaatatgcgatgtttgagtttgagtactatgtcaaatccaatatggatttcaccaaatgacgagattctgcaatttcattctgtaattaacgaaattccattaaactcctgagattgaaaattcgcaatcacattagatatcaagaactaattaaccgatccaaattggtatgagattgggatctcctatcacacaaggccttgcattgttgaggattttcaatatcacaagtcattttgaaatttctgcaatttcagggactgaattgtctgaaacctgcaattttaggactaaactgattattcactccttttgtttggttaaaaatatttatcggcttctcattcacttatctgatcatttttcgtaacttatttttctgttttttttccccctcacaatttagggatttaataactgttttgtcaatgtttttgatgtcgatgaaggctttgcatttcatcacaagggtttcgaaaaatggtagtttgatacatgtattatttgcagagttcagcaaacctcaagcaatattatgaaccagtttttcttgtatcttggttgagtctttttggtggtctcctagcatccaatgtaagatttttctgcacttagttttgatatatgtacatgctctcaaatttgaaataagcaagaatgttttgttgttgtttgttccattcaagatttgctttctgcttatgataatgttgattttcatgtttgtgtccatttgctttagtgttactgagtgttgacataatttacacattattcacatctaatgggattcttttaagttacaaataacatttacagaataactatgcttgctttctttctatctggaaagatcaaaagttttaagatgattagtaactccttttgaaaacacttgttctgagattgtaattcaagtctgcaaggaacagattcaataatgctcagtgacattgtttgcatcagctagacctccacctcatgcttgtgttccttgttgcaaatgctctaatgttggtattcttactttatctacatgttattactgatcatattgaatttcattactaaaacaaaaaaatcttattcgttgttgcagaagtttatagtgagtctatgtgacttactaatcagttattcttctatagattctaagctcatgtttaaagatttttccttctataaagataaacctatctctttcaagtgctgaaaactttaggctcacgtttttacatctttccgttaataaagaaaaatctaaatgatgtgataatggcaacctgattacgaatggcaatattgatatcaaataaactttctccagaacatgttctgatgtttgtaaaaacatctatttcgggtgtgatatttcacataaaatttgtgcatgagtagaagtcttttattttatgtcaaatactatttggttgctttttcatatataggaggaatcaatctgttatttcctataaatgattgaaaggaatctgaaacataatttgtaactcactctgtctcaagctgttttgagatactcccaactaatttctgcacattttcatatatgctgctccacctcggtaaaagaaagaaaatgtctcatgttttctgttttaaattagttttgggttccttaaaaaattgcggtgcctatttgttttatgtatcccttgctcattttaatgttatgcatggttccattattgcttttatactcaatttttttttttgtagtaacttaacttgtgggaagcctcaaattttgtcctcaaatggttcctgtactcagtttgcaaatcttatagtagcggtagctcggatctttgttttttttttgaactgtttcactgaatccttttctgaggtccctttcatctgttactccttttaatgattcacaaattggatcccttttttcacacaatttacttttttaatatacaaaatttgtgagaaaaagaaacatgatttttcaatttcgaaatgaaattagtttttattgtcaagtttaaattatatggattccctgaagaaaaataaagtgatacgtggttctctttatgcaggcattgtacagtgtgatctatcaacattggctatgcctctaagctttatgacgttgacattgactcaggttgtgacagcacttgggttcagtgtgatgcacaccttgtaaaggttgcatcaaggcgaagtcaaacttagacctggtatcattctgatgtgctgtgtcaatcttcgcagcctcataatcaattctcttttacttattctctaaaatatatgaaaataatagtccttaatggtttataaacagtcccaatgttttgtcaaattcatcaaattagtcattattgttatatattaagaaaatgataggcactatcatgacagatttgacaaaacttcaaggactatttataaaatgttagggtgttgaaagttgctccaggggatgaattgtaggtcagtctaaacctaacaacaaccttgtgcaatgtgtggctcaactgtgggttgattatgcagatcatggatcatttctaggtgtcctagtccgagactacattccccctcaattcactatgaaaaatgcatttaaatccggaaccacatgaagcatctcaggtgtaagatttgtaacttgcactccatatgaaaccatgtgacttggttttgtagattttttgtatttgtgtttcttcttaattttctctttagtagtatatgtataattgttgttcatcctaattaagctttaggggctaaagttgaaaaaggaatacagggtattttc

SEQ ID NO: 4720 - DNA, 1936 bp, Medicago truncatula
  Intron number 5 from transcript Medtr4g062100.1 (locus Med tr4g062100) derived from phytozome v7.0 (chr-ID MtChr4; po s 11938109 to 11940044 reverse strand)
gaccatcgctagtgaggtaatcgctctaactttcaaatttgtgtatgtttggttgagcggtgattaatcactgctgtgaatatcgtgaatttagaacccttccatcttaatttttagaagattgaaaattcgtcactagtgactttttgaggttttggcggtgggaattccacgttaggccaaaatcacggcaactatccacgttttcatggaatttaggaccatcaacttcttaaaatcacgttcaactttgcatagggacgcgataatatatcacctgacgtcaattcaaacaagcgacgaattattttttcaatcttaattatattttcgataaaatatagcaaaagtaattgttaaaagtctcacattgaatgagataaaacatgaatatggatttataagtggattcggttttcatcgtttaagctggttttgtaagattgtaagtataatccatattttaagataaacattgaatttgattttaattacttataacaactttttgttccaaaaggataaattccattagaagcctacaaaatctacttgtaatactaatcaatttggttcatgctttattgagaaaagttgaataagcaccaatttaacttttcagtatatgcttcaaaatcttcctttattgttttgtcattcctatgataatgattattaaacatcaaaatataaaaaaaattgttttcagttgcaacgtcaattcagatgaaagtgattgataggattcttaggagacaacacacgaagagacccctacttttcttacacgttacctattgacactaaaaatttctatgtagggtagtcttattgaagataattttaatcacatatagtgttccaattagaatcaatcacctgcatatagcatagtggtgccacttgtggatcccatgcatataccactaatttggtccttttggtgcatgtgcatgtttgaaattttagataatttgacaaaatcacaaaagaatttatgattttgttgaaattttttagtgtaacttttgtcaaatattatgctagtagatacaaattctgtcaaattcatgatcaatttaattatggactaaataagaactttttttagactagtgttcttgtcaaatccattgactaaattgatggattactttgcaacaagataaacatgaatgtggatttgctctaatcagcaatccacatactcatgacattaatagtcgttggattgagattggacgattcatattttaaatttggtatttctgttactttttcaaaagtaatatcaatgtttgattttgatccaatgactatctacttggtgtcattggacgattgatagtcgttggatccagatttgacgattcatattttaaactaggtatttctattactttttaaaagtaataccaatgttctattttgatccaatgactatcactgtggcgtcattggacgattaatagtcgttggatcgagattaaacgacttgtattttaaacttggtatttctgttactttttcaaaagtaatatcaatgtttgattttgatctagtgaccatcaacatggtgtcattggacggttaatagtcgttggatcgagattggacagttcgtattttaaatttgatatttatgttactttttaaaagtaatatcactgttcgattttgatccaatgactatcaacatggtgtcaggcctcttcgtgaatgcatgaatttgttgaaatcaaaatcctttaaatatggaccccataatccattataagaagtcagtgtatgtttgatgatcattgaacctaaggcagacaacccatttatttggaatcaagttaagcatttagtagattttaatgtcatgaagatgaagataagattttgatgtatgcttctgacatttgaacattgaattaacaggcaagaacat

SEQ ID NO: 4721 - DNA, 1689 bp, Medicago truncatula
  Intron number 1 from transcript Medtr8g118810.1 (locus Med tr8g118810) derived from phytozome v7.0 (chr-ID MtChr8; po s 26804190 to 26805878)
accttgtatacttcttttgttgagtatatacatgttgttcttcttgtcgaaactcatttatcttcctctaaatacttgaatttcattctttgtaattcttttttcgtatccgctaactaaaatctaataaagtaatatatttatatttgtagatattttgtcgtttctttcaatttaacgcgtgtttgttttgtgaaggtaaccactatctctagtttagacttttcataacatgacttttaaaagttctaatgtgtagcttctgattcatcataatttttttttgagaacatccatcatgattttctatctttattttggtattttttaaacacacactcaattcttatattttttcatttattctttagttctcactctttccctctttaattttatttttcaaatttgttttgatagaaaataaaataaaataacacaatgccccttttatttgtctcgattttggaatgcaggtggtgactcgatataaggcggagggttgtggctaaagaaattgatccaaatgtatgagaggagagagaaagggcagggcaaagtattgtgtgataaaaaatacatgtgctcctaattttgtgatatactctgcgcaaattttacttgtaatgatgtatgtggttcagagggagtatcttaaaaattaaaaatattattaatatttatttttatagaaaaaagtcaattattgtgaaatgaagagtaccaattcattaatcattattatgtcccaaataattacttgctgggaagatgaggccctagacaatatgcacactcaccgccaagtaccgtcaagaaatgcttgctgggagtaataaatttttcacaaaaacaagtaagtgaagcatcttaaattctcaatcgtgggagaattttctatcataaggttatgtgtatgtcatgcaagggatgtgatgtagtactataaaagacaggttatgtcggacggaagtctctcactcatctctaaaattagatccatcccttaacccgatagcaataatgtggtacaagttcaaacggaaatatttaaagataaagattagattgatctcaaaataagtcaccaaatagtaatgcatacactttttttttttttttttaaaatattgtttataatagtaacaagatgatgtatgtcttatataagtttttagagttccgatcatactcgactcaaaatttaagagacggattaacagtccgggctagaatttttacaccaagtgatgtgttaagaaatagacagatggaggatcatccaatggacagaggttggagttagttaataaattatgcacgacaatatttacatcattatattttaggttaggacaattttggatgcgacaatattgcaacttttgatggagatgtgctttcaagattttgttcatgtcgctgtgaacaaaaaaaggtttcgttgttcatgagtgcttaatcaatcgtttctatttaaggtgtgagaatgtgagatataactaataatactgagaaagtactgctcatgtttcctttaaattaaaattcaatgtatgctgtatgcctaactttcattgtcacattatttgtttctaaattgttttagtcgaaaatgtaacattttatttattttatttttattttctctcatgggctacttttttttttttttttttttttttagga

SEQ ID NO: 4722 - DNA, 3160 bp, Medicago truncatula
  Intron number 3 from transcript Medtr8g101540.1 (locus Med tr8g101540) derived from phytozome v7.0 (chr-ID MtChr8; po s 22044050 to 22047209)
gctaactggtctcagtggttcaggtttgtgattttttaggtagttagtgtccacaattgtctgctttgtttcatgaaatcaagcgaaaataaagcacaattgtgcagctatataaggtagtgaaactttgcaaaaataaagcacaatataaggaagattcttgtccaactatgcttacttcttgcagcgctttaagtcatttttaagttggatttatcttatattttgtttattttcagtcatatttgcgccattttatccatttagtttttctgttttggcacttgctgagttggtatgagtatagtggtaatattcctttgcaaatggctgtatcttctcatgcatttatcatgaccaagtggtcaagcaagaaaatcatctcaacatttcagaaacaactgttctttctactctacactcaattctctcaactttatcagaattcattcttaattatgagttccctgcctaatgagcttttaatgtagtcctccttaaaatccaaattctcatctcaattgttattagaccatcaggctggtgcttacccgtggataaggcataattgtccttgaaatgcagacaaaactgccatacagctgaatctgctagaatgagagcagtctattcaaaaaagcgcaatgaatctaacataatgaaggaattgggttttgatcaactcatgaaaagcttattggcaatgagcgctatgctcagaactcgattgaaatcacttcaatgaattcctaggaattttcagcgactaccgcattatactcggaggatcttgatctcaacctagaactgtttgttattcatcaagggctcaaaaactgacttctacagatttgatgggtttacctagattcatctggaaggaacaaccgcaagcaaattagggaacccacaagctgaagtccgaacgtgagcctgataaatacaagaaatgcttagggaaactataattcgacccaaaaccagtcttctacccgtacttcgaagatcaagtttcctcgatttgacggagtggttatacaagtgtgaacatttcttctccaaggacaacacccacctgaatccaaggtacagttgacttcaattcatcttgatggtaaggtttggtgatggaggcaccttaattatgtgaggactaggtttaatatcatcccaaactggcgacactatacctctgatgttatgtagtattttggagacacacaggaagtgtgtgcagtttccctgatagcagcaagcaacacatcacattgtcctgtgccccgggtccaataaatctatgatgaatatcaataccaatgtgcaagtccacaaaattaagtctaaaacacaaaggactgggagtttcaatgcatcagaaatggctgacaagatggaaaaagttgtattatgtatgttatgtgacgaaccttttactattgtcacaattttaagcataaaaacactcaattcttagtgatagagatggataaggaggagctaaagtgtaaaagcagtccatcgagtttggagactgcagaaagaacagttgctacttgctagtgtccataaagactttgattagagtctcaaattattgaacaaagattgtaagtggcccctataggttgaagatttgctaccattagtagatgatagtggcattgcaaattatctcttggaccttcatctagttaagatattaagttgtaaattagagaacattaggctattgacagtccatgtgattgataaaatgttggcagatgcctcatatagctatagaaggttttcttggcagcttcaacaacctaaatttacgtctgaggtgatggtgttgcgttggaggtgcagtgagttggttttgggagcacagtggttacccaagattgacgcaatcatatggaatttttcaacgctccaattgattttttttttctagggagggagctaaatgcctaactctgttttgaagatttccaaaccttccggcagcaatttaatcaatacagaaagcttctattttagatgatgcacagttagtgctttgtctgcataactacatcagcaaccgagtcattctggctgccaatgatagtggcaactcaatcagcatggtcgtatagtagttactagttatatggatccagactttagggtcaaatatgtttttagtacctataaaatgatcaactttcgtgtttagttcccataaagttttgttgacttaaatccccagaatatttttcgtcaataattttggtccccaaattccatcacgtattggttgtgttactcccaaaaccatcatatatagtttttaagatcttgggttcgctctttgttctccttgggactatgttcatgtgtgtgatttggagaatttgaggattttttttaatcttaaaaaccctaaattccaatatttaatattatttcaattataactaataataatatgtgttaataaatcagaaaccttctacatcattacaaaagttcacgtggcaagtgtcgcgtggacttttgttagccacataggctgggaattaatagaaggatcaaaagtgttgatgaaaaatatttaggggactaaaattcgggaaaaatttatattataaggactaaaaatggaagttgatgattttataaagaataaaaacataattaaccccagactttattagcaaggcttgaattaactatctcagctctaagggccatcaatgatcaattccgatgcatgccctcataattgagatgttctcagcttgctcctagtccccaagctgattttatttcaaaagccacactctgatgttgtccacctgtcacagttctgagttccctgcctcagagtattgggttttattggaatcctccctaaaattgaaattcttgtctcacactgttacttatccctgatatgttaaagtaaatacaacaattggcaaatggatttcctgtttctaaatttttctctttttgatattgtatgaaaattgaaatccgtgagtttaatttattgagagatgtcaggctattcgattacttctcattcttttagataccatatgcacacccttgagttctgcactcactagtaatttttttttttgaagaagactcattagtcattaatttcaggaaaaagtactcttgc

SEQ ID NO: 4723 - DNA, 1081 bp, Medicago truncatula
  Intron number 1 from transcript Medtr5g082320.1 (locus Med tr5g082320) derived from phytozome v7.0 (chr-ID MtChr5; po s 30969726 to 30970806 reverse strand)
cacttggacagaccagctttgttccacaaattctggtaatttatttaatatttctgaaatatgtttgttagaattgaaatactattttcttctctcattctattaatgggaatatgctgggaacctttatatttgtggcaaaatttgaaaaaatatggcggatggggctataatttgggttataatgtggttgcggagatctcatattcctttatgcttgcagttgtggactgcaatttaaaaccatgcgagtaaaaattaagattgatacatttgctattatgattatatagattaattatattttttaaacacacttaacatgcaacaacttattcataatagtaaaaaaaaaaaaaaaaattattctccttatatgatatttcatattttagataaatattacccttaaatcataataatataaacatgaaatgaatatatacaatattatgatatattaattcttatgaaactttttatacgaattttatgaaggcatggaacaaaattctcatttcactatttgaaaagtgaacaaaatggaatgtgatataatttttttttctatttaattataaaaatatgacaaatgcatgatatatcaatattatcattgctttcactttatttaattatatttaaaggaaaggtaaattaattcattaatgtttaaaattgaaattttaaagaaaaataaagaacaaaatactattagttttctacatgatatattatcatattttatgaaactataggaacacaaggaaatgcaatattgttaagaactattgttcaatttgaagaatgcatggcatgagcttaaaatgtccatgataccatattattgaatcaatgatccaagtacaagttaggtacattaagtatatttatagagctactaatctaacttgttaacttgtctaacaagttacctgttgtaactatctagatcatctattgtaattgttattctatgagattgatgagttatctatagtatctgtaatttgaagattttttggttttggaccttcatgatatcaaattacaaaatttatagtactttcgcctcctgtaa

SEQ ID NO: 4724 - DNA, 2453 bp, Medicago truncatula
  Intron number 1 from transcript Medtr1g074330.1 (locus Med tr1g074330) derived from phytozome v7.0 (chr-ID MtChr1; po s 15047699 to 15050151)
gtggaacaattgaagttggtctcttaaaagaaaattgaagtcggtttgagctgttcttatattaaaatgtttttaaaaaaattaaaaatatagcaaggttggagctttttatagaaatggtctcttaaaatgtttactatagttggtctcttaaaatgtttccgagattatgtttactatatgaaagagctcttctattttactatagttggtctcttaaaatcgcagaaattcacgagaaaacctctcatgagaaatagcaccgctctatttttataaaaatgttaacgagtgttcccgaaatacttacctttttttttttttggtaaaaaaacactcattaacaagatgcttaaaattctttgacatgacacaaaaaaagtgaacatgagtatttaagtggctttaaaatttgaaaatgggtgaactaataggcataatctcttttattatgccttatagttcagcccaatccaaatattgaggggaacacttgtagaaaagctttagaagttttccatagctcaccactgtgtttgagtgtttcacaattgtcatgagttatctcactttattttatataggcatttctgcttacgatggattaaaaacattccatgtgggacaagttatatttttttatgctttgacagggcatacaagaaagttaacataacatggcacgactaaggctagcgagtcatcatgctatgatccctctttcaggcttagtatggtgtcttttccttcaatcagcatgaaagggaaagtgtaagtaaaaatttatgagaacataaatggtcttgaaaattgaactctaccgaacatgcactgtgttgattggcatgttatattttgccgaaggcaattgttacttggttcagttgacagaaaatttgctgtaactactagatggctgggttgatttcgaatgtcatagctctttcaatggtgtgatttagtagaaacaattttgttatcaatttccagtcggcaacacaatagaaattcacatttaaaagaatttgtctgtctttctaaagtatatgatttttgttgtgctctaattcaaaagagtgatccacagatgcatgttacagactcatagcaactctaatccccaagtttggctagctacaaataaaagagtattttttttccttttgtagttgaaattattctttaaatgtcattcttcctattgtgttcaagtgcatatcatcttttggagtttgaggcaagtattttgtcttcaccgaaatcgccatatttttcaacgatgaagcttttgaattctgagaagattttcctaaatgtctgtttagaatgctttggaagttgtttaatttagatgggacaattaggcatgaaggtaatgggatgcacttgaaacttggatcttcaaatgtggcaaagctttcatttggggattcgaaactcttaagatttcttgaatctatctatcaagcaaagcatatgaaatttcagagcgattcatggatgataattcacttggtcacccaaggttgtaatccgaggcatccctaccttagcatgatgaaaagcacctcaagtttgctgaataaaaagatggtggctaatgtattcttgaatccccgttgttgcatgagagcttcttttagtcctcaacgatttttaaaagatgcacccgtccaaaaagcacacgtttgatgggaaaaaaaatccagttttgtttgggtttatttatattttggacgacaaataaattttattttttccctactaaacatacgtggtttgtaagaaatcatgggagagactagtacttctctcttgcataacaagaaattataatttaacgtaaacgcacaaacttgagtgtcaaggaaaaaatcatactatgaagaagcagtctctttaaactcagttatgtagtacctgttcaagagtctgttctaacaaacatgtttattatgatgggtttttaattttatgtttactttttattttcctttagttattatttccttaggtcaggtttatggctctttgatgattttttttaatgtaatctactttagcatataaaagaatagtgttcgtcggactaatttaagtttaaattttttactgaatttttaatccatttagatccaaaattagcatctataaaaaaaaaagcataattaacccaatataattgcaaaaatattagcataaatgacaaaaaaaaaagagagagagaataataaaaaaaagaagatgaaaaacactcacttgtttgccaaaaatttaaagattattacttttttcggtccgtatgtttcttgtgcaccctatcttttttctttcaaaatatcatttattctgattatttaatctgaactcacttatggcgaggaggagagggcacttgaaggagggaggtatatatggttctgtttggtagaaggagttggtgcatatccgta

SEQ ID NO: 4725 - DNA, 1156 bp, Medicago truncatula
  Intron number 1 from transcript Medtr5g009400.1 (locus Med tr5g009400) derived from phytozome v7.0 (chr-ID MtChr5; po s 2036765 to 2037920)
tttttcggttagtttttcatctttatttcgatgcaaatctatattcatttcatcaattttatgtgaatttgatagtgtgatgacttgagttgaagttattcgttccttatttaatcttcatttcatttttctttctatgtacataattagtagattgagtaagactagctacactctctctttaatactattgtgtgagtctacactttgaaaattgaactagatcatattctgtttatttaaattattttaattttcgttgaatttttatgctaatttgcaaatcatagctctctgatctgaatcatcataatatcataactagttgtaacattcagagtgagtaaatcatattttgttatatttggtttctcaaattttctttctaacattggagaaatagtgtttactaatcttttatgtgtgtgcgcgcgcatagaggacttgaatatttgatttaaagttcgattgttatagtttttttaagaaaaaaaaatcacttttaaggtgttgcatcgtttgttaccactttttaataaaatcagaatctaaaaacagtttcttaataagaaactgttaagagcagtttctagaaaaaatagattttttttagtggagagagaaaatatggtttaaaatattaaattaattttgtaacaaaaaatctcttttataagtttgtatccaaacaaactaaattatttgtttatacggtaaacaaacaaacgtaaaatagattctgatttttcataaaatctctaaaatataatctctaaattattttatgtcaaaatcacttttattttaatccgtaacaaaccagcctttaattttggctcgattttggactaagtataagtcatgtattacttcagtttaagttaatgttaaaagaaaataagtgttgtatgtgcagatcgcgacaaatagaggttctgttataacgtcgtatagccgctgtttgacaagattttgtaataataaatagcttatcatggaacaatacctatttcttcaaattctgctatactatagttttgctttttaacaacactagcaaaaatttggacctgtattgataagaaattagtcgtttcagttctaattgtatcagtgcttttacagattgtctgttgagaaatatccaaataatcct

SEQ ID NO: 4726 - DNA, 1517 bp, Medicago truncatula
  Intron number 1 from transcript Medtr2g080110.1 (locus Med tr2g080110) derived from phytozome v7.0 (chr-ID MtChr2; po s 18373347 to 18374863)
tggcctgacctggcctattcccaaccctacttgtgaataatgagattatttactatacattttttaaagtttagggttaaatatgtttttgtctctataaatataccaattttttattttagtccttttaaataatttcttcggtttttagttctcaaaagttttacttccatcttcacttttgatccctccttttaagcaaactcatatgtaaaattcatagtttcaaataaaaagttacataaaagtttatactattatagcaatccctaaaaaaaactagaattttttttttacaagacatgatttaaatatgaaattttatattttctgcggttaaaaattcatatttagttaaaaaattctaattcttttgggagatatttttacaatattccacacatttatgcacaatttcatttaaaaatacagagcctaaaatagagactaaaagtgatgattgaaaattttatagggactaaaaattaatttttttttttaaagaaactaaaataaaaagttaatatatttaatatttatagggattaaaaatatatttaacattaaaaattatgaaacatatgcagtcatttagataagatcctaaattgaatataagatgccaatattaaaattgaagaatatttcttcgtctctacttttctcaacgatttaataatttttaaaactaatttataaacatcattaaacatgagtcatatatgatggtcatgaatcatatatgaacaaaaaacaaaagaatgcttatggtaattaacataaatcatatatgaacatattaatcaaatttaaaactattttcttaatcaaaaaactatttgtacatatatgactgttcaaaaaaatgaatcatatcggatgacacgtaggttcggtcttggggtgcataagcagctcaaccaaatcggacctctaaaatatatggatctcaaaataaattttgtagcataatatctacaccccactcaaatacaaaataagatatgttcattctttttctttattcaatatgcgtttgaatttcttcttatcactcaacatctctcttttgcttaatattttttatttcgtttcatgtttagaagttcttatgattatgatttttttaatgaagcttagttacacgaattttgttatatgttgcttaatgcttattagtaattactttttaaaatttcagtgtataattgctagttttgttaaatgttgcaaatatatgattctaatatatgttggatgttgaatgtcgaaatttatgttatatgttgaaagttgaaaaatataattggtaattttcttatatggtggacgttgaatgttgacaaattttggtatatgttgccaatatatgcctcctaaatttcaagttctacatttttttttagttttcctttatgcctcttaggattaaaaagttataaaaaattgtgttttaattttactggggtatattttactatgagtgtcgagcctcctgtttcataggaacgatcctg

SEQ ID NO: 4727 - DNA, 2232 bp, Medicago truncatula
  Intron number 1 from transcript Medtr7g093330.1 (locus Med tr7g093330) derived from phytozome v7.0 (chr-ID MtChr7; po s 20885083 to 20887314 reverse strand)
gccaaaacgacttattttttcattaacggtctaaggtgaggtgaaaataattgtaaattgtattttaatctttcaaaatatttcatacacaccaaaaagaggtaaacacaataaacatttttttttcccaaaaaaaggtgattatttgaattaaaaacttttcgaacactaatactcgatcggtctccaaatcggtctcaaaataaaaagtttgtgacagatttagccacggaaaatattttggttacggtgctcaacattccagtctctaattatgtagccaaagtgaccaaaatattttggttgccaaatcgttcaagaagggaaagatttctagtagttatgaaacaggctcatgagtcggactattcatgcatatttttacttacttcaagacttgtttttgagtgaggaggaaatggaaaagtatctatgatagatcaaatctaaatttgtatgaaacagccaccagtgttggtctcaaagtaccaatacattgatagataaaatctaaattattatgaaaaattgataggtttcttgctcaatattcagctcctcatacacttcattctaattatagccaaagaggttcttctatgaatgcataaattttgagagaatggttttgaatattgaatcatattcacatagaagaagctatcaagtttccttcaaaaccttccagcattcaagtaaattatatatgaatgaatactggaagcctttgagggaacatgaagttttcctcaaacaatcttagtttatgtatttctcatcatatgttagcaatgaaatatatagttaggcttatatttatacacttgcatggttgtcccttgctatgagatagaggtaaaacgaatatttggtcatatcatatttgctccaacattatttattcggttctctttgtctgggtttacttttttttccatactttattgtgatacggctaatctttgtcactgtatatatagaaacagtaagaatgtatatactctctccgtccctatatctaagcacccttttattagatgcaaagggtgcttacatatagggacggaatgagtagaatgaatgaataaatacaaagggccaaatctttttggacactgttgcttgattaggattgactttaagtaggattaaagtcaagacattattctcaatatgtatagctgattcaattatatggcaagattggtagtagaatatatgtgtatgtggcgctttggatggataacttattctgcatggaaagagtcgcatgcatttccaaagacattgatatgcaatatgatgctgtttttatgagaaaatggcacgtttttgagtatcagaagaatgtcaacgcactaacaataacatcatttttggcagtcacattgaatccatggacataatttagaaaaatagagagatccttctaatacataaaattcattatctcgataggactgtcaagatttcttttttgtgcgcacacatagagcactcaacactagaggctgcatgcaagttaattgggaataaattctaatttatctttaatcaatattaaagtgcctttatctaaaactttacgaatcaattactggttcctagctagaaggaaaataaatgttagctgtcatattttaattaatcgtagaatcctagagaataaattcatctgtcatgagtatactataaataggtgttcctttgtttgtaattgtaaagtgagtgtaaggaaattaaaaggactaagcattcagtaaccctcaaaggcttccacggcatcaagttacatgtaaatgtgaagtcgtggaagtgcttcttgggtttccgaaggctttaatcctatcttaattttgttcaatttaatgtttgaatcctctccacacaccaagtatgcttgatatgcactcaatcttctccacatgttttcaactatattgtataaaggatcatgcatcattaacaatttatcataataatgttatttattgagatgtcagtatattttccacacctcaataattttttttttgaaattcattgaattttcaagcaataatcctgtaatttagagttgaaagatggcatgagattctttcggtttattatgagatcacaagtttaaattttgaaatcatcacagtaattgatgttaagactcttgagtcttctacgtgatcctatttgaggattacaatacttcatatattcagagccggccctgtgcaa

SEQ ID NO: 4728 - DNA, 1077 bp, Medicago truncatula
  Intron number 3 from transcript Medtr4g110600.1 (locus Med tr4g110600) derived from phytozome v7.0 (chr-ID MtChr4; po s 25148157 to 25149233 reverse strand)
agtcttaggaccttttttcgttcgtgcttgagcaggtaattatatcgttaaggattaaaataaaatggaacaattatttttgaatattaacattagagagagagttggggtagaacctatggtagaaaaatggtcgaaactaagcttaggtggtttgagcatgtagagagaagacttgtagattatgtagtaaggatagtagatcaaatgaagagtagtcaatcactagaggcagaggaagacctagaaaaactatatgagaattatctagagattaatgagttggatcgaaatatggtacatgatagaacattatgacgtcgtttggtccatgtatccgaccccacttagtgggataaggcttgcttgttgtatattattctgaatatgtgaaacacttgtcaatcttgcttgcaaaaattcaaacctagcacaaaatgtattttaactatgaattggaagtgcagattgcacaatatgtcacataaatccagaagttaaaaatactcacaaaaatctaaattgtcataacctgttttagacttctgttggagtgagattacaaggctcaatcaaacataacatctagtggttaataatatatgataatgaacataagcagaagactaggaatatatcaaagaaatatggaaagcaattcttcgccgttgttgttccttcacaccgccattactgagaaacgagagcaggagagttgtgaaccacaggtcagggagtcttgatgatttgttgggtatgagaaaatctggaaaatttaacctagtcagtctcgatcaggattcatgataatgttcacccctaaaattgtgtgaaaagttattccaatagaacttgcgccatcttccctgaccaacagtaattaagaggggagtttttgaattttacgtctgaaatgtttatcctactaccgtacaaaccacatcctaggaaaggagttttcccctacctccgcctactcttatttgaggctgttatcacaaatgctggatttatcattcgattgaattatttgtatcctgtttcagggagtttgctgatcctgtcgtcgcagaagca

SEQ ID NO: 4729 - DNA, 1110 bp, Medicago truncatula; identical to SEQ ID NO: 4092
  Intron number 3 from transcript Medtr4g028600.1 (locus Med tr4g028600) derived from phytozome v7.0 (chr-ID MtChr4; po s 6617656 to 6618765 reverse strand)

SEQ ID NO: 4730 - DNA, 2268 bp, Medicago truncatula
  Intron number 5 from transcript AC233662_35.1 (locus AC233 662_35) derived from phytozome v7.0 (chr-ID AC233662; pos 169119 to 171386 reverse strand)
ctcgcaagatcaatctgacattaaacgccttacaggtatttgaattttttttttttaattttattttatctttattgttttaaccacttcaattattattaagtttataataactcagtaggaatttaaaagatcttgattatcataaaatttgggttttgaatggtaagcagcattttttattaaaaggaaggtttccttttgtttaattatatttcttagttataattataagcggtagtattatatatggtgtatgtgtaaatctccaatttgatccttcaaagattttttcgaacatgaatttgaccatgaaaatattaaaaggaatggtttttgtcactacatgacatcaatttgtcccctgtatgcagtaatttttgttaaaatatcattggaccaactctatttaataatcttttgagggacaaattgaatgttttgaaaatctttcgagtatctaaatggggtttaccataaagttatagtagggcatctctgctgctataattgtacagagaacatctttggcacgttgttcatttcttgttatttcgatgattggttaatgttacaataatatggaaatatctcatgaaattaatattttcgtatcttgaaacaaggtgatctctgaggattgatttccataattccttatatttcatgatctttttcctcatttaatcaggacttaagagtccagttgaagtataaatagggattggtagtttgtctcttgcaaatctcatatcaagtaaatatgaattttggggcattcattatctcttttctctctccatgtttggatgaaaagaaaagggacaattagagaagctagttagttagtgttgaaatcggggcctaactcatccttacaaaactggctcataaggtgaggagtgcctcctctttataaactcttatcaagagtcttatctacccgaagtaggacttgggtttttcccaatacacccccctcacgtccagcactctttttgggcttggtgcgtggataggtaggtggcccttgaattcgacaagctctgataccatgttgaaattggggcgtaacccatccttacaaaaccagctcataagatgaagagtgtttcctctttataaactcttatcaagagtcttatctacccgaagtgggacttgggtctttcccaagagttaggatatattcaaatttcaatgaggaagaatatgaacagttagagaagttggttaattggagggcatgtcagttggataaataggggaaataaagattgaaaagttcattcaaggaatttgatgtttgtgtaaaaggggaaaccctttgaggaggattatctcatttatgtttagatttctattaataatcatgtcattcttgttcatttctatctttcatcctatttttcaattccattctctgctcgtaacttactgactacaaatttaaaatcaattcaacgtattcctctaaacataaaattagattttcttttttcaattcttaattttttatgatgaattcctaacatggtaattaatttatgataaaatcaaattaatttaaattattccaaccaaaaccttgcagtaatctgaatatttaggcaaataggctattgcacaattaaattgttttatgttttttatctgcttttcgatgaatggaatcatagtgagctattgtgaaatttaaaataatgcaaaagtaacactagccttagtggaggatgcagtttttcagtagtatgccgagtagggagaaaattgtaatgatgctactgaaattttcagtaattaagtaaattatcaagaggagttatggttaattaggaaagcaatcttttaaaaattagtccaaactggccggttcaatcggttgaactgagaacctaacaatttgcctgttagtttgatctcggttacattgcagtctggtgttggttcaaccaattttttttcagcatttttttttgcacttcatttactttttcaataatttttatttatttatctggcattctattaacccgtggttaaactaattgaaccaagcgaaccaatgtcctagaggtctcgccacgccggttcaatatccactccggtaacaccctgatatttatgcagagatttttttctacgattctgaagatcttattggctcatataaatttggttgatggctttaaaataattgtctcttgagagtttatttttttaataattaaaggagagcttgacgagatcgtggctgaactcgaagag

SEQ ID NO: 4731 - DNA, 2331 bp, Medicago truncatula
  Intron number 2 from transcript AC235488_12.1 (locus AC235 488_12) derived from phytozome v7.0 (chr-ID AC235488; pos 49727 to 52057 reverse strand)
ctgtcgtcaacaggtatgatgatgcctttgcattttgttattttcactgcaatgagaagtgaagtaagctttaacaagatatactgtactgtgaaaagtaccgttgatttgcttgagtattatttgaagttgaatttttactgtggtaactgcttaatatgtcttgatttggagaatggaatgatgattatttgttttcctattggtttgattgcctgaatgatggcatttttttgtattagctctatctgaccattctccttatcatttgtcactttgatttggttacttgtgaattgtaattactaattacatggctgatcaagtattttcagttgtatttttttgaatgataaaaaatcacccagaatattttgatggtttatgtgtttgttctaaaagaattttgacaatgcatgtttaaaaggtaatatcatacaagcatgaagctgttgtataaactctgatgtagcaaacttgacctatttgtattagctctatctgatcattctcctggactttgatttatgaaaatgtttccatcagtagtaataatttacacgacaaattgtgtttttttttttcattgtgatgctattactttttttttgttgacaaaattgtgatgctattactagaagtttgtttattctcattgtgtttggttattcacatgaaagagtatggtagttgaattattattaattggtatattgcaaccttttcatagttgttaaatcttggagctgttgattggttgaactggagaatgaaacgatgatttactgtttcctattggtttgattgcctgggtgatggtgtttttgtattagctctatctgacaattatccttaattgttttgtacaagtaatcaaatatataggctatgttttaagaaaatatttcccatgtagtaataatatatattgaatattttgtgatggtttgttttgttctcgttgtgtttgattagtacttaatagagaaggataggtgggtgggttattaattggcatgttaaaactaatttcaactgttaagattgggagctgttgattggttgaactggagaatgaaatgatgatttattgttttcctattggtttgattgcctagatgatggcatttttgtattagctctatctgatcattctccttattttgcacattgtaataaaatctgtggatttcatttcaataaatatcttatcttggtagtaataatgcatggaaatttttattgattaaagtttgtaatttttacttgtacaaaaggaaagcaatctggatgcattcttcaagtagtttttagtttttatacaaccaccttttgattgtttgaactggagaatgaagtgatgatttattttttccctattggtttgatagcctggatgatggcattttgtattagctctatctgatcattctcctcatttttttttacattgtaatcaaatatctcaagtttgtttaaaaatattttccccttgtagtcatgatgcaaaagataattgtttgttttttttcccttgtgatgtttattgcttaaagtttgcaatcttttcttgtggtaaaggaaatcaatctgttgtcataagagaatttttaattgttcttgagaatgaaatgatgatttattatttccctattggtttgatagcctggatgatggcattttgtattagctctatctgaccattctcccaatttttttacattgtaatcaaatatctcgaatttgtttaaaaatattttccctttgtagtaatgatgcaaaagataattgtttttttttcttcccccttgtgatgtttattgcttaaagtttgtaatcttttcttgtggtaaaggaaatcaatctgttgtcataagagaattttttattgttcttgagaatgaaatgatgatttattatttccctattggtttgatcgcctggatgatggcattttgtattagctctatctgatcattctcttaattaatgatactgtttgtaaatttggtaggattcagttatggttgtgtgtttttcctaacatatgtttgggcccgtttaatatgttgtttctacgtttttacttttaatgtcaaaagttcatttcattttctcatttcaatgttatgtgctgagatacaaaatgtttattaatgaactgtttatggtattctgtgaaaactttttgaacgagaaacaaactgtaaagaaggttgtttaattcaaagaaattggggcttggatcttatttccctatcagttaaagttttaggatattcaatataatttgttcaattatattcttctcatgtagtggtcctagagaag

SEQ ID NO: 4732 - DNA, 680 bp, Medicago truncatula
  Intron number 2 from transcript Medtr3g169340.2 (locus Med tr3g169340) derived from phytozome v7.0 (chr-ID MtChr3; po s 44181940 to 44182619)
tggtatgtagttcctttgggtatctattttgcaatagctacaatgtttagggttttaattttcttatttgatgctaagttgattcttcaattttcatactgatttttagttgattcttaactttgaaatttttaggttagttctgatttgatatttctagatttattgtgatgttaagttaagctgatttgaaactaaatctgattatcatttgataagcctaggttaattccgacttgatgcaattgatatttctaatttgattttaacttttaagttgattcttaactttgcttaagcaattgacatttttagattgattctgatttggttttaagttgatctaatttgatgaaattaacaatttcttcattttctgatgtttatgtttggcttattggttttaagttgacactaagatttattagtttctaatttattgatgcaaccttatttctctcctttttttgttgcaattgaaattgaaattatactcttgtgatttgatgcaattgaaattttcttcctttctctgctttttttgttgattagtagattatgatatgaaatgagaataagaattgtcatatttatgtttggctggatgaaaatgaaagttctgaactgactttgatttttcttcagatttctctgtccacgacgctccgactctccagagg

SEQ ID NO: 4733 - DNA, 2476 bp, Medicago truncatula
  Intron number 1 from transcript Medtr7g133320.1 (locus Med tr7g133320) derived from phytozome v7.0 (chr-ID MtChr7; po s 31156255 to 31158730 reverse strand)
aagttaaatcaatcaataattgtaaggttattttttgttcagttactttttgagtcattgcttattattttgttatttataaggggcttcaatcatgtaatataccagttgtgacttgtgcaagtattattggatactggtcatgatgtttgtttttccaagtttaatgtatggtcttgttatgttttagcaacaaataacttggttggatttaacagattctagaaggagtacgactcagctagtttgttatgaattctgttgcactgttatttggcataaattatttagtaaggctagctgctacatatgccttatatggtgactccatgaatatcaaagagaatttagtctctcgtcttttctatctaatttctcagaaggccctctgtcctggaatttagagttcccttagcaagtttagtgtgaaaggctcccatatggggtcatgataagttctctcaagattttgaacagaaatttgttctgcatattacgtaggaagggcttgctcatgataagtttcactcaagattttgaagggtgaagtcaaaattgtatcgtataaacaatgtgaaattctcctgcacattcttcaccttgctagtcttgcattcaacatgagtaagtcagtaatttttggtatgctatctataaaaagaaaatatgaggaccactgatttttttactattcttttgacaaattttttaccttactctttggaaggccagaatttaccgatgcaagctaggtagattaattgtaaggttgaaagtttttaactgtctatttcagatgaacttgctctgggagttctttgattgggtttggaattgagctttgttgttattttaaaatacgttccgtcttgttggccttacggtgtttatggtaaggtgctttttatgaaacataaccttctttacaatttgcagaataaggattttctctttggtcctttttccacttattttaaacacatgtttggttagtgggaattttcattttcctttcaatgcaagggaacaaatttagtcactttacccattaacaatttttagaataagaatctcttttacctgatatgaacttcgtttgccactaactagggactaagatatccctataagaactcatttgaccaacatttgatattccaaggaatcatattggtattttaatttttcgtcgacaaaattggtctcttacaaaaatacaaaggttctatcaattttagtatttattcttcatgttttctatcaatgataagttcaatatatgatcatgattgctgagactaggtgcaagtcaaatagcttccaccaattctgaaccattgaaattgttggattcagtaactcacaatattccccctacaaacttgaaagatactaaacggtggtatgtgatcctgtttctcctttttataggggacgaaacctaaatcactgaagcggagtacctccacttctgataatcgttggaccaagtgccaccacccggactcactgaacccggcactttgacctggagttaccatcacaatcacatctctgactctgatagttctatgattaagtctttttctgtcacacggtcgacatcgaagcagcaccgcttcctggactaatcttcctttcaacttgattattttgtacatcaatatgagtcatctttcaaccagactgtttcttccaattagcgatatatatttatgttcaacgtaaaaggtttcatgttttatgaattttgtactatgaaggccgagtatatagaatactttcctccatcttttcgggtagcatcacttgcagcacttgtctaagctaagttattttttacatttatgtgcctaattgcccagttaacttacttcagttttgcagcacgtaaggtgcttggagagtagtagtagtagtatcatgtttgatctaatataaattacttctaaaaaaagaaatatgaaatatgtcatgatttgcaaatgccaagcttcaattgttaatatgttgaaagttgtacagttcaccataaaaaacacagtaatatacagctctttttttcctcctcacatttataacaataggaacaaatgtaagacatggtgccgagaagaacataatctagcattttaagttatcttaagaaaattgattggccatgaactactagcaaggaatgagcaacgccacttgagaatatttgacctccctgtattattttaaatttcgttcgtgctatcaaatttgtgataacattgttgtcataaatttatacgatgcacggtattagtgaagtgtttgatattttagtttatgagaaaagtgcaaaccatattttattaccagatttcatttttgttcgcttctaagctactcgttgtatttcttatatagttgatttgaattattgatacgatgttgcctggagtataaatttgattgccttagtttcgtggtaaaataagttaagaac

SEQ ID NO: 4734 - DNA, 1767 bp, Medicago truncatula
  Intron number 1 from transcript Medtr7g087410.1 (locus Med tr7g087410) derived from phytozome v7.0 (chr-ID MtChr7; po s 18736242 to 18738008)
gaaaacccacgaaaactgaagggaaaaaataagcggtgcatagttttctctctcctctattatcacttccttaattttatgtctcaacatttggattaatctaacggttcagattgcacaggagagaccgcaggatggttgaaggcaggaggggatccatatcctgaagaattctatcctgattgcatcacgaaaagcaatttcagtgataacaaaaaaaaaaaaggctccatttattataattggcagttaccacaattcaagggttgttttataaaggtcgtaaaaatctcgggaagcttgttttcgagacattcatcattttcctttttttttactccacacctggttcgtctacagaaatacacatttacttattttttatactcttctcaattttttacttattttcattctctagttatctggattttttggctaattcaaatatcaattttctaaaatgtatgagtttttgggaataaaaagtacattctgcaaatttgaaatttaagtttttttgcacattttgaaaaactcttgagagtttttgggggataaaaagtgcattctgcaaaattgaaatttaagttttttttgcacattttggaaaactcttgaagtcagatctttttttttttttttttgaaaactcaaattctataaaattcaaatttaagctttcaaaaaaatttataaatctgaggaaataattttttttttagggaaaataaacaaaattaaaaagggtaaaaatgagatttttgataaattgtggagtgaaaaggtatgtgtggggtataaaaaaggctttcaaagataaaagatgtctatagtcacctggtttgattttacagacttaggggcttaattggcacctgcaagtcatatgagaatccattgtattttaaagttgcttattacatctctattttttcttacacacttccttattttgtcaaaataactttttttagaaatttatatttgaaactcatttatgatgggtaccagaaaattaatttttaaattccatatttttttggttattagaatttaaattacaaaacacaagatatgtagtaaaaaaaaaaatcaattttaaaatgctctatattaactttcagaatgctcgtaattttactcatcaaactttgtttcgaaagaaagactaatcaatcaacaacttcttgctatagtatgaacattttattttcctttgatctttgtagttcctacacattttattttgtttcaaacttatatgtaaattacaatcacactttcgaaatacataaaatatatgtgtcaaaattaagttttagatgattgaagacattcaaatgctttctagttataaatttttggaacctatattttatgcatttcaaaaccaaacttaatggtttattttttcattctataaatttaatttaagaagacatttcgagatacagaaaaatatagcttcagtaaaagggtaatttatggaaagaaaaaaatgattgtgctaaagagtggcgtataagtaacataagagaatgtataaagcaactccatgtgttattgatgcaaaacaacgcatatggagctttagccttataaaaggaagtttctatttgcaccccttgtttttgtaataaaatccatgagtctctgaagaggaataaaatccatgagttaattcatgttttctctaaaacatcttattcattatttatttatttttctatcttttttgtttaaacgggtcctagaagaaggtga

SEQ ID NO: 4735 - DNA, 2551 bp, Medicago truncatula
  Intron number 1 from transcript Medtr5g009690.1 (locus Med tr5g009690) derived from phytozome v7.0 (chr-ID MtChr5; po s 2189347 to 2191897)
cgtcaaacattgatcattcacaacattgtgagttaagtctcttttattggactataaatcgtcaatggttttcgacatgttgtgttttattttagtgggtaaatatatgattattgatttaacatttaatagtattattttgggggtgatatttgttccgaccataagtctaccataccaccttttttaagatattgtttgcttggagtataatcccttcacaattttgttatttgggatgtatcgttgagttaaagagtttaaatgttgtttataaactatcattgattttgatttttaaacaatgttaaacttttgaacataccaaaaaaatcacttccaaattctatcggccatcgtgtgtggcttagaccctagattcttacaagcaatggtttagggtttaggacaaatcctcacaaaccatatatcaatcatatcacaacgtttttttaggtattgtctattttaattagataaattatttaagcccttcactgatttattatttgttaaaaagtgatttcactaaattgaagagtgtggatattgactataaatatatcttaataattatgatattttctttgtttgaaaactttttataataacgacctaagaaaatacgccaactcttcatttatttccttttaaaatgtgtaaattcagatcattaagctacttgattcataaaaaaaaaagagggagtaattagtaacagtatgatactcttgataaataatttctcactatttaatcagtgatactggcattcggtcggagtcacccgcatgtactgtaattagttaattaattaattaattaataattaacaaattaaaaagggtcatgtgggaaggacgcacgcaggcaggccagtccaaatccaatccattcacgtgtggtgagatacgtggaatcagataggacctcctttgactgaaaataataaagtcacaaacattactttactttaattaaattcaaattcaattcccattttaaaaactaccattaacggtggcccaaattctattatgtaaccgtgcatgtccatgctaaagcacgtaacggctaatatgtacctaaaagcatacatatgatgtatctaaacaagtttgttttttaataagctttttttctttgttgagaactataatgtataatgtgatgatagcaaagaaattgatgaagtaatgtgaatattctatcgtttttctttttggttacataaataatctatcatatcatcaaacaagtctattaaattttattcattgatataaaagattcctcaaaaaagaaaaatatacctaagagtgtgtttgtttcatggtttaaaatctcaattgtgagaaaattattccttggaacattattattaggaattttatttttatcaatgtgttttgtaagtgaattaatttctaagaattatttttaaagaagttaatctaaaagattttaaataaataaaatgtgttaaaattatgtgtcagtgagaagttatggttgattatctcttatgctcattgaaatgcaacattcttaagaataaaaaatagatagtcacaaaacaaacatgataatataagattattcagatgagattcttgaaactgaaaataagtttgcatttcatgaaacaaattaaacatgtagataaatgttctcataaagatgaaaataaattcatgtgtaactgttcatcatcgttcctattataaagactctcgataatactattaaaaactagtcatagattttttttaaaaaaattgtgtgttcaatacattaaaagtttaatttttatgttttccatacaaaaattatcttttaattccctttttagcttcttaatttatgttcatgactcataatataaatataaccaagcatatttttaaaaatatttaggattgaaactcgcattcttatattttcaaaaaagttattctagaaagtcaagcatttttaatgtcttttattgaatgtaaaagaaatgctcaagagtaaccctaattaatttctacaaagacttatcaagatttaatggtgggttttgtgcattatggtcttcaaggatccttaatcaaacttagttatatcaattctaaaaatatttgaaaacttcattcttcataaaaaaaatcagagcaaaaactaaattaattttttttttggtgaagattagtacaagggacagattgaacgcgaattgttgagtaggtttcatatttctttcttgggtactccccactgacaatagttgtgtgaacacaaatgtgacaaaaattagaaacaaaaacaacaggtgagtaagctaagctggacaatttttccaagaatacgacatgaccgtatctctaaacctgttaatcaatgacaaattgctgtatcatacacgttccttaggttttctattatcgaagtacgtaacatttttaatatttaaatgcaagtagtagtaagtgactattaccgttagtatagtgagtatgtacaccaagtcaattaacatcgtcttctaggtgcatttgtatacaaaaat

SEQ ID NO: 4736 - DNA, 1411 bp, Medicago truncatula
  Intron number 2 from transcript Medtr1g016250.2 (locus Med tr1g016250) derived from phytozome v7.0 (chr-ID MtChr1; po s 3108107 to 3109517 reverse strand)
atacacctgttagtggtggagggctcaggtttgttaatgttgttaatttttgtctagatctataaattttatgaaattgttttgttttatcatttttgtttaaggttttaaattgatgttgcggttgtatgttgcacaaggtttgatcctgagaataaccatggtttgtttaaggttttaaaaactcagaagcctctgcaacacaaccacaattgctgctgcatctgcggttgcgctgtcgaggcttctgaaaacctgtatattgcgactgcatatgtagttgcagacggaaatttaaaaccatggttattctcaggattttaaattggcgttgcggttgcatgttgtgttaccttttggctctgtttggtaaaaaatagcggatagctgataagctagcttacatagagcagtttttcttcaggttttaaattgatgttgcggttgtaggttgtgttgtcttttgtggttgtgtggcaattcttgatattgtgaaatttgtcttgatatggtgggaaattgaggatagatgcggctgcaattgtggttgtgttgttgaggcatctaaaaacatttatatttttatagcaattgtagttgctgacggcaatctaaaaccatggttagtctcaaggttttaaattgttgttgcaatgcgggtgcctgtttgttgccttttgtgttgtggttaagttgcaatgttttatattgtgaaaacttatcttgatatgctgctgcaattatggttgcgttgtcgaggcttctgaaaacctttatataacaactgcaattgttgatgcagatggcaatttaaaaccatggttattctcaaggttttaaattgatgttgcgatgcgggtgcctgtttgtttccttttgtgttgtggttacgttgcgatgtttgatattgtgaaatgttatcttgatatgcggttgcaattgtggttgtgatatggtttctaaggcttccaaaaccttcatattgcggctacaattgtagttgcagaaggcattttaataccatggttatagttattgttgttgactaatgtcattcattcatacttggaaggttttgcattgaaattttcatgttaaatttgtctcgagtcttctattgctccttctgttgctctgcagattcgcaacttggttttatgtggttattgtctttgtacttttctgatcactgattgagacgaaaaattattggaatttttgagatttatttttactattgtttggttgatattattgtcgtgtaggcgaatctatattctgttgaatgtctttagtccaatcttggctttttcattaactaggcttcctttaatttttccgacgttaggtcgattgactaagatgtttcttttgacatactttgttgttttgatatgtatctacagccaga

SEQ ID NO: 4737 - DNA, 1447 bp, Medicago truncatula
  Intron number 1 from transcript Medtr5g098980.1 (locus Med tr5g098980) derived from phytozome v7.0 (chr-ID MtChr5; po s 39542378 to 39543824)
aagctgctcattccaatctctagcaaatttgtttagtggagtagcaatcacaaacatcattatgttgttaatgtttgcactgcatctaataatcatacattttgatcctaaacatccttaaaaaaaattactccatggttattgtttcggactgctccaaagtccaatcataaaccataaaggtttaataagacggttatttcgtagttggactaccaatgccaacatgaggccgcgagatagaggaaatataatttggagttaatttgggccctcttatcatggccatactcacgcggttatttagacaatgtatcggaaaaggcgcaatgcctatatgatagctttaaccgtctgtaaaaggagttgtctgtcataaaaaaagatacatgtataccctcattctaaaaacacaaaatcaaaactccttaagtttatgattaacttgaacgcagaaatgtctttgcaaatacatcaccacacctttagtgatgaaatcgcatttcatcacacaatactttgtcatcactctcgtagacatagcaactataataagagagtttgatggatctcttgaatgatgtttgcagatctcatatgttaaggggaaatattcgtaattgttttcaagtgatttgataaagtagacgatatgaatggttgtggtttgttaataccgtaaaacattttaaaccattcatttatgaaaattaacttttatgtatactatgactatttgcaaaaaagtagtcaataacgtatgacttaatttgataattaataatgaataaactattagattacatttgaagtaacataagaaaaatgtcatatgaactgtaaaaacatgttattgctactattaatatgagtattaacaattggattgagtctaatagaatgagttagactattaacaatataatgaatcaatactttagtgactggatgaggtgttcaaatttaatgtttaattgtttcaaatatgatcaaccctaacaaggaaagatataaaaaaccaaaatgtgagaatgtttattgcaatactaatttttttatctatgaaaagattttcattcaagactattaaagactttcatttattatatcgaatttttacaggaaaatactattatcgattctatatattaaatcctctaataaattacattaccatagtcatgactcatgatgcttttgttttcacttttataactatgtgagtaacatatatttatgaatttataaatgacagttataaatgagaccgcaacttccctccctattcaaaaaaccaacttgtcctaaattagttatgcaaagtgtatttgatttccttaaattcctaacttgttaatttgatatgggtagggtttgacatgattgtagcatttttgcatgattaatttggcctaaaagggttagggagggttttgtggggctcaag

SEQ ID NO: 4738 - DNA, 8342 bp, Medicago truncatula
  Intron number 5 from transcript Medtr8g044920.1 (locus Med tr8g044920) derived from phytozome v7.0 (chr-ID MtChr8; po s 10170012 to 10178353 reverse strand)
tggaaggttggtcagaggttaagtctattattggtggctctggttgttgttctggttctgttgtttggtcagaggctatttgttcagaagttgtttgctggtcaggagcaacttgttcagaagcaacttgttcagaagcatcttgttcaggaacagtttgttcaggaacagtttgctcaggaacagtttgctcagggatggtttctgtttgttggttttctaatacagtctttccagggactgtcttagaggcctttgtgggtgttggttgcatttcaccacctaagtgtttttctaaattgtgaagggatgaggattcttgttgttggggggtttctgaagtagttgcttctgaaactacttcagaggctctttgtggagtttggtcattttgtgggtttgtttggttaggttcaggttgttgtatactatcaggttctggaatatctggatatagtggatgagtagtaggtaaattgaatttctcacacagtttaatcctatttttggaaaattctatttgagtactctcatagtcaagtgttccaaattctgttagtttggtgggtttggttctaagaagtttgtctatgtgttggctaaggggttggtcatctgattcagttgatgatgaagagggtgaagagggtagagaaggagactgagtattagttggagctttagatggattacctgaagaaagaggttctaactgaggtgcttctggagcatttgtagaaggatctgatgatgtggctcctgaagcttgcttgttcttcaaagcttgtgaaagcagagttgctccatacttaactgtttcttgctctaactcagatgctaaagcagcaatgacaggagtaggcacataccttgcagccttgagacgctcatccctttctttctcaaacaactccttcatcctttttctttctgctatcttggatgcagaatactccctagcgtactgctttaattcttcagtcatttcaaaactgggcatgactattatctcagaagttatagtcctttttgccttcttggggcttgagtcttcatcccagttttcttccaattcttccaacatttatgcccttcgtccttcagctgtcttcagattccttgaagatctcttccttttgatggtctgaagagcagcttctcttttctttttgggacttgaaggcttttcagaagcagcttgatcagaagcagcttgttcagaaccagtttgttcagaagcaggctgttctgctatttctagatcactccttgtcctctttttgataagagggacatcatccaaatcttccacttcttcctgaatagtggacattgcagatttttctttcttagctttctgatgcttctgagcacccttctcagcagcatcttcagcaagatattcttccttggtgatctgcttcttcttagattttctgcctttggccacaggcagatcaccaccatacatctcttcagggacatctttcaagctgatcttcttgttgtaggttttgtagaagtccaagatgtaggccctttgtacatctaggggatctttcttgcagatggggatgtgatgagtgactagatcagatattgcatcagattcatgcatatcagaatctagtttcttgagagcatttgctggaatcaatttcatcttcacaagtgttgatgcattgattatcttcccagttactgctcccagcttctggttatcatagatgccaacatccttcaaggcacttagaagtcctccttcttgaaagattacagagagtagccttccataaggaacaaactttctgttttccatctgactcttcttgagttcattgatcatgtacttaaacatgtacttgggaacgttcattgtggtctcttgagtgatggtgtgatgcagaaaaaccttatgaccaagtgacggttgatcatttcctccacctttgggaaagatgttttcattctgaatcttcaacatcaacttcttttccatgcttaaggtgctgtaaggcttagcatcctttgatccgtaaatggtctcattgacaatttccttccaagagctggttcttggattaggaatctcttctccaaagtatttgccagaggtatccattcccatggcttgagcaataacctgctcatttatggttacgggaatacccatgacatttgatctaatctctgtgccggtgaaggagagtagacccatttcttctctggtttttcccttcagagtaggatcaaccagaatcagttgagcttcttcctgcctagcagcttcaatgtcaaagactgaagcccttacccagaattgtctgacaagcacttcataggtaggaccgttaagaagactgaagtaactcattagcttctgcttcttgtagaaccttactaggtcgcacccatggtgagttagagaagtgaaatccactggattttccgcttgaatgattaactcccattcctcaatagacatggttcttcctttgatttcataagccggaatatctatttccatatttgatgatgaaccaccagcagaacttgaagatgccattgatttgaagtagttttagggttctaaggtgttttgagaggatgagtgattgcgcttactttcgcagagggttgagaagaaaatagaaagtgtttgttgtgaagtgagaagtgtgtaaattgacttagtgtttttattaaaacgtttgcaattcagaagggacaaacaaacatagcattaatgacaaattgggggcgcgtgttagtatgttaaaaagcaagtaaaacatcattgcccttttttgttatactccaatacaaatagaccacgtcagagactcttcagaaaactaccttttgggtaatgggacagctgttacataaagaataccacttctgaagttttagtgctgacgtcatcttcagaagcacattttcctcagaacctcagttaagagcttctgatggaccaaatgcttctgaataaacttcagaaccaaacttcttattcagaggcaagcaatttttcaatcagacacaaaatgcatgttcaaatttttcttaataaaatcaaatctttcaacagataaaggttttgtaaatatatcagcccattgatgttcagtatcaatgaattgtaaatctaaaatccctttttgaacatagtctctgataaaatggtgtttgatttcaatatgcttggctcttgaatgtagaattggattctttgacaaacaaatagcagcagtattatcacaataaatgggaatactgttggcattaatctgatagtcttccaactgatgtttcatccaaagtagttgtgtgcaacaacttgcagctgagatgtattctgcttctgctgtagacatagcgatagttacttgtcttttacttgcccaggatatcagattctctcccaggaattgacaatttccactggttgattttctttcaatcctatcaccagcataatcagcatcacagaatccaattaacttataatctagggatttcctatataggagtccaagattagttgttcctttcagatacctgaagattatcttaacagcagttaaatgagattctctaggatctgattgaaatcttgcacacaagcatacactgaataaaatatcaggtctagatgcagtgaggtataacagagaaccaatcatacctctgtatagcttctggtctactactgttccagtatcttctttgcttaaggtgcaggttggatgcattggagtgtacatcactttacaatcttctagcttgaacttcttcagaagctcctttgtatattttgtttgatgaacatacactccttctttactttggttgatttgaattacaagaaagaacttcaattctcccatcatactcatttcaaattcatcctgcattaacttagagaattctttgcaaagagatgcattagtagaaccaaatattatatcatcaacatatatttgcacaatcaaaatatctttcttaagagtccttctgaagagtgttgtgtcaacttgtcctctttcaaaatcatttttaattaagaaattacttagtctatcataccaagctctgggagcttgtttcaagccatatagtgatttcttaagtttataaacatggtcaggatgcttaagatcctcaaacccaggaggttgtttaacatacacttcttcttcaatgacaccattaagaagggcacttttgacatccatttgatataatattatgccatgattaattgcgtaggataaaagtaacctgattgcttccaatcttgcaactggagcaaatgtttcagtgtaatcaatgccttcttgttgactgtagccttgagcaacaagtctggctttgtttctggttacttctccttgttcattctgcttgtttctgaatacccattttgttccaataatgttcttctgaaaaggtttgggtaccagatcccacacatcattcctttggaattgatttagctcttcttgcatagataatatccatccatcatctgagagagcttcttcaacagttttaggctcaattattgaaagcaatcctattaatgtctcttcttgtctaaaatgtgatcttgttcttctaggactatctttgcttccaatgattagctcctcaggatgtgaagatttgtgcttgaatttaggttgaataacctgctgagtgttatcttgaaaatcctcagaagcactttcattctgtactattggactaggttctgcttctgaattagactcaacttctggagtgatttcagcctctggataagattcaacttctgtatacttttcagaattagaaggttgatcagattctgatgcatcttcagaatcagttgtacctgcattactttcactttgctctggagttttacttccaggctctctatcatcaaattttacgtgcatagattcttcaacacaatgtgtttctgaattatacactctgtacgcctttgacctttcagagtaacctaaaaagattcctctttgagccttgacatcaaatttcttcagatagtctttagtgtttaagatgtaacaagtacatccaaactgatgaaagtaagagatattgagtcttcttcctttaaagagtccatatgctattttctccaacataggtctgatatagatcctattttgaatataacatgaagtattaactgcttctgcccagaaatgtttagctaagttgttttcatggatcatggttctggccatttcttgtaaggttctgttctttctctctacaaccccattttgctgtggagttctaggagaagagaactcatggagaatcccatgtttttcacaaaaaagttcaaatggctcattttcaaattctccaccatgatcacttctgactttcaaaattttcaattctttttcagattgtatttgagtgcagaagctgctaaacacttcacatgcatagtctttacttttaatgaattttacccaagtccatctgctgtaatcatcaacaatgactaatccatatttacttccatataaagatgcagtgttaactggaccaaaaagatcaatatggagtaattctaagggtctggaggttgatacaatgtctttagatttgaaagaacttttcacaattttccctttctgacatgcaccacaaagtgcatctgaatgataatcaatgttaggcaatcctttgaccagttgtaacttgataattttagaaattaatctccaattagcatgtcccaaccttttatgtcatacccattttttatcattcattgacagaaggcaaactaccttctgatcagctagatcagagaaattattttatagacattctcaactctctttcccttgaatgtaatggatttgtcatccttgttgactagtgtgcagttggtcttactgaacgttacatcatacccattgtcacaaaattgacttatgctcaataggttatgcttcagaccatctactagccacacattattaattgagatggaggaattaccaatagtacctgtaccaatgatctttcccgtttggttgccaccaaacttcacttctcctccatctttcattgtaagggtaaggaacaaagctttctctccagtcatgtgccttgaacatccgctgtctaggtaccatgacctttgtttctctcttgcccttaagcacacctgcatttttgtccaattcagatttaggtacccatatcttcatgggtccttttgggttagttttggaggttttacttttcctcccttgtaccttagggtgaatgctgagtggcttctgatcattcaatactttaggtttgacaccttttggtattgttttctcagaagcagtagctgctttgttcttctgatccttttgttttgggattttagattctggtttaatcagattctgatgaacaggttctgatcttttcagaattttaatcttttgactcttaggatcagattttgtcatcaccttgatcttagggttttctggctttgatgtgatcttagcctgtgaaccagaagcttcaggttttgactgaacagcagttacagcatttgtaccttcaggcacaaaggtggatttcaatccatccttgatacaatcacagtagctcttgagactgtattctttggatttctcctcagaatatccaatctctttgcctttgttcttgtatgtgctatagatcatagaagcaactttgcttctgtctattccagccataataaaatcatccaaggcaatctcatgtttattgcctgaacctttatcacatttttcttgtagcttctgacaaagactcttgagtctatcttcatatgttgttgatatgaggttaaaccttttaagttcttcttcagaagctttcagttccaatagagttgacttttgttgtttcatcaaatcaacatatttttcttttaaatctgtcaactcattggttctgtgttcaaacagtgataaaagttcttttagagaatcaacaagttcttgtctagggattttggaatatacctcattttcatcttctgaatctgattcagattctgatactgcttctgatgatactgttgccactaaccccatggctgccttagcatcatcatcagcttcctctttatcagaaccagattcactatccaaatcttcccaggtcgccatcaagctctttttgatttgctttctgaatttactggagttgaagcttgatttcttggatttgcctttaaacttctccttctgaagatcagggcaatcagcaatgaaatgaccaggcttcttacaattgaagcatcccttctgatcttctttcttggagttcttgtagctacctctcttgctcaaaaatttcttctgcttccttgccagatactcaagcttgttggacagcatagccatctttacagattgatcttcatcagaatctccatcaggtgattcttcttcagattcactggctttgtaggctttggaagattttgaggtctttcctttagatggtaaagcaatggatttactcttcttagagatttcatgctcatttaaactcatttcatgcactttgagtgagctaacaagatcttcaacacttaaagtatttagatccttagcttcctcaatagcagttactttgggtctccatcttgaaggtaagcttctcaaaatcttactaacatgatcagaagcaacatagcttttcttcagtatttgcaatccagaaactaaagtttgaaatcttgagtacatttcttctatactctcatcatccttcattctgaaaagttcatactgatgaactagcatcaaagctttagcctctttcaccttcttgctgccttcaaagtttgcacatagagaagcaaacatagccttcgcagtagatttgtcactcatcttcatgtattcggtgcgaggtatagaagccacaatgattcctcttatcttgtggtgtttcttataaagcttcttctgagcaggagtatgtattcttctgtctatagcagctccttcttcatccaaatcgagatcatcaactccatcttccagtatgtcccataactcttcatccaatcccatgataaagctgtacatattagttttccaccatgaaaactcttctggatctccattaaaccttggagcctttccagagtctgttttcttgtcagcagtatcatagtcatgcttgacacttgtgtattttgtagtaactgattcctcatctccagacatgtttttctaaaagatcttgaactgtaacacggttaagtgctgtgataacagagcaagctctgataccaattg

SEQ ID NO: 4739 - DNA, 2529 bp, Medicago truncatula
  Intron number 1 from transcript Medtr3g031100.1 (locus Med tr3g031100) derived from phytozome v7.0 (chr-ID MtChr3; po s 8657572 to 8660100)
gtgctgttgaaaaagctgaggtactcttttttctttttcttttataatttttttttttgttgcaaatttgtgatttcttaaacattgtttttttgtaacgtttagtgtgtgttttgattttttgaaattaattttggttgaaatgggtttgtttattctgcttaatttattttttcgtaaattttcttaaatgtgtgtgttacaaaatgtaatttgtttgaccaagagcggtggttcagttccagcttaaccggaggttctggattcgaattagtaatgaaatgtagtggtgttagatctcttgtaggggagtttgccgctcaatgaagcacggacaccggacattgacagaccgacacaactaataatttgagaaaaacacataattcagtttaattatgtgtccgtgtcggccacgacaaatgtccgacaccaagacatgcctaatccaaggaatgtttgtgcttcatcgctcattgttgttctagccggcatgagagattagtctatgtgggttagtgtatgtttgaactgaagtttgcaaaattaggtttgattaaatgattctagccttccgcttatgaagaaatgtatattttagggtccttttgttacatgttaaaaaaagtgattttgattgtaaataatgagattaatttatagagatttttcaaaaaaaaaaacataagttgttgtgtctttttgccaaaacaaaaatcatttttaaatcaaatcataaaaaatgattttgaagaaaagccactcaaaacaacttttcatttcaagcagttttgagattattttaaaacttatttttaataatctgtaacaaacaaacagatgaatgaaaactttcaaaagtgattgttatttttctataaagtgaacttttacaaaataagttgtaaaaaacaagttcatagtaatgaagtaaaatagatttaaggtaaaatggtaaatgaaacatctcatacagaagagtggagaatgaaaaagttcgaagaaaacttggtttggctaataagcaagtatttttaactatttagaatactgaaataaataagcaagttttgtttgattattgttatgtttaattttatcaaaggagtgcattgtaggtgtggtggtttattattatttcagtaaatttgaaaatccctctcgacttttttgctgaaggcagaattaaatgggcgatgattataatgagagaagtctttagtgggaagtacccaattctatgggaaaatcagatcccaacttctattaatatcaaaaccaaaagaagaagaaaaatacaccaaagaaaggtcagaacatgaaggtgccgccacactcttttcaccaaaggggtttggctttggtatctcagattctgtcttgatcttcattctcctcttcctttttctcttaccgtctcttaacttgaaatcgggtattttccacggtgagagatctttcaaatttaaacttgatatgagccctaaacccatatgattttcttttgtattgataaataataaagtatatttgaaaatggcagtgtttcagttgtttgttttagagggatttgggatgtttggcactgaagtgtttgaatggatttgcttatttctgttagggggagggagagagtatattcgattctatatccgattttgatgctagaatcttttatcatttttaatttgtggaagttggtatgtttagctattaaattaaacttagactattggaattttgttgtcaatgtgaacaaattactctccttttatgttttgttcatcttgtataaatttatttgtacccttatccattcaaagcaacatagaaatgggatgatgattttagtaggtcctcaatgatctgtgtaatatgatgctactttcatgttattgtactcgtatccttggattggatatgatgtgtgtattatgctgctactttcatggagaaccttcctttggtataaaaggtacaagaagatttcatgttttaagtttatggccagatttcctgtgttaagtttatggccgtttatcccttttggtctgcaagacaagattatagtagtcacaagtggtattcgcaccacggtcgtatctctgtgcagtgaaacagtggctggtcgtcatgttgacgccatttgcatcgcacattaatggtgctggtgcagcgctgggttttaaggcaggaatagagtggtgcgattcacatagatgcatattgtagaaatcaaaatgcaacatagttgcacacatcctgttttctctccctggcaaaggttacattaatattaaaatagcagaattcagatttctggggggagaggggggtaaacctgttgtcatgggactgaaaggtcaccggttcaggtcctggaaactgcctcgtgtaaaaaacagggtaaggctgctcacaatacaccaactggtgggacctcttctcagaccctgcataggcggaagctttgtgcactgggcacccctgtagcagaattttgatttcgtaagcattaatgtagtagtg

SEQ ID NO: 4740 - DNA, 1504 bp, Medicago truncatula
  Intron number 1 from transcript Medtr5g100890.1 (locus Med tr5g100890) derived from phytozome v7.0 (chr-ID MtChr5; po s 40359471 to 40360974 reverse strand)
ctcttcgtgttctctccaaggtttttaccaatctacttttttgtccatttttaatatctttcttgggattctcattaaatcaaaatctttggagaagttgtgatattctgaaactgttatttaaattgtttgtccgctcctttgtcaatattgattcaaattttgatacactgcactgtcacactagttttggtagacttgttaatattttattttgtcatttttggatatttttgaggtataaagatgagattcaagtcataattgagttaaaagaggtcattgttttgtgtatcatggctgaaaattttgattcttttcaaactaagtaaataatttttctatatagttaaagatttgtttcaattttaacgtatgttaatcattgtgaattagatgaattgatctcttttaatttgttacaaaattgcattagttggtgtcataattgtcaaaaaaattatattgttattgtgtaattctttatttcgtgggcaatgtttatgttagactctgtgactctatgaaacataaaaaggtgtaagaaagagatgattagaaaggaaatatatagagtgaaagtaaaaatgtgacagtgatgaaatgaaataggataaaagtgatgaaatgaaataggataaaagaaacagtagacataaaatgctatatgatatataagaagaaaaaattaacttgaataattggactcgaattcacacaacttagtcaatctgaatttcgtgatagaaatcaagtgatttatgttgtaacttcaacaagtaaagaacttgatcgtgtgattttttttccagtcaaggtcattgattgcaatgatcgatgttgacaatatcaatttcatttatcataaaatctagattaccatctcacatgcatatcacaagattttaggattaagaatcttgatcttctttaaattttttattctatttttcacgtctttccctgaacacacacatgtaatccaactcttcgagaaattgtctagcactaaactaaatatgctcctttcttaacatatatttgaactatgatacgcttcattgtgagactatccactttcagtagacttagtcacatttgattgtgattttagtgtctttatatgattttttggatactgtgattttttggataaccaaaatgagattctactcatatacttgaataaaaaatcttcatcatttaaaataatagtgagaaaatgaatattttcatttggtttttttataaaaaaaattgatatatttatatatcttgaagtattctctccattttaatatatgttaatcattattaagtggttgagaatagtatcttcttaggtgttatggacttgcacaacttgatatctaaaatttagaacttttatattacagtttgtttagttctcgataatgttgctcaaactcatgcaactaatactttatttttcattttgttaagtttcagaggacgggttatttccggaacttgcacctttatt

SEQ ID NO: 4741 - DNA, 3315 bp, Medicago truncatula
  Intron number 1 from transcript Medtr4g073020.1 (locus Med tr4g073020) derived from phytozome v7.0 (chr-ID MtChr4; po s 14291640 to 14294954)
cgacgccgctgttgaaggaattctttcatcaccaagtatgtttgttattacattattactctcattgttttatttgttatttatggaccaataaaatcattattattattattattatgacattatcttgttttgtgtggggggatacatgaatgttttcgtcgatgacggtcttagaatacgtggttgggcctaatacaatctcacaagtgagaactgcccccctcctataaacacgtgctcaggtcatctctcatccaacgagagacttttaacatagggagagtctatcttgtttaaggtctaggataaagtacttatttccccgatgataatttattattatgacattggtacatatgaaatgttagttataagaaaatatgtggtgtgtttttttgtcgcaattacgagaaaatagacacttttttgttggtgtttcaagtgtggttaaaagtcttgcattcgatgaaaaaataatgtataagtgggtgacaggtatgaagatgtggtgtccaactcacatgtgtggttgctcttacctcgatgtaatttgaacctccaatgttttaaggctcccattaaattccaacaatatcaactacattaattgttagaattgtttttataccggtatgtaatgtgagatatatgtttactagaaaatcacatattgtgtatcaaatatttgaaagtttaatgaaggtgcattgttggtgtaaaactattttgcaccaatgacaattcaacttattgtcacataagttcgttttaaaactgtattttaaagataaattgattcttatttgttgttaatgtaaaattagtttacaccgactgtgcatacccccttttctcaatagttaatgttaagggtatatttggggtaagatttcagttttaggcattaaataagcgccttggtctcggtgatttttataatttatcgcctaagaagcatgacactcataggttcaggggtaccagcatggccggcctacgttggtatgggttggacattgacaatcttacgacatgtgtcagacacttcaataactctttcttggcttcaacactcctctgatactttacttaggcattcaaaatatcctttaaaagtgttacaaaatagtattttagttaggctttcaaaatatcccgcatatagaagtcctagtcttctttgcttttcatctttctttcccaatttcccattttcgattctccatttccagtctcataattcgcctctttttcagtcttcatcttcatttcatcccgtgttcgtagacaacgtttcccttcttctcgggactctgttcgcagtcgacgtatccgctctattcgcagacgacgtatgctttccgacaatgtctcaatgcctctctttagtcccgatgtctccctctctgacgttgtctcgtcgtctgtatcttcatcagcatccacaaatccaggtacctctttgattggttgcatggtgatttcagtagtagtttcatgatgtcttagtttgaaacttactctgcagtagattttgtgcttactgtatatttgtcaacattttaaaatgtaaaaattagcatctgtgtggtgtgtttttaaaatattttgtggtaatcttgattctcaatttagatacgtataaatgatgttcatatttgatttgatctaattataataaacatagatatagacgtgtcggtgtcctatatattggacattagtggtgtctccgcgtctgtctcgtgtaggatctttgtgtttgtgtccgtgcttcatagtttaatgcaaactaagtcatgtgtacccaatggatttttcccagtggaagcatgctaattccgcaagtgaggagattgtgcacagggtttctccttactaggagttacttggttcgatcttttgtgaaaataaatcctctggagaggggtcttactcttgttgctttatcagtctcaaatggacaggtgaaattgctatttatagcaaacgaaactaattagtattagtctttatagcggactggcttctttgagtgatactccgtcactgtggtgctcggtagaaaattttaaaaataaaaaattgtactcgatgcatgccttacccaaatatttgttcgattgaatgcaatgcactgtttcaaaatttgagacgaattgaaagtatttttaacttaatagattgattttgatggccatttttaaattctcatacaattatttataaaaacaatacacctcatccaataattgtgttgcatgggcagtttgggcagaaaggtcttcttttgctattctttatgagttttttccgattttgcaaaaaaaaaaaaaaaaactaatgataatcagaatttttcagagtttcacattggatgagatataacatgaaaaattgtttataagtgggaagcatccctcaccttgtaagccagttttgtatggttgagttaggtacaacccaaatttgaaggtggtatcaaagtttatccaagatccgttgggctaccaaccatcagaccacttgggtcacgctctaaatgttcaatcctgaggtgaaggattgtgtaaaagtgtgttaatagtctctagttggacgagatatgacctggaaaaaaaggtggtcggcatctctcatcttacaatccggttttgtaagattgagttacgcacaacccaaattataaaacgttccatgtgatgttttggacaacttaactaccatactctatgttggtggttggcattcgtagagaacgaaatgagaagaatatggaataaatgttctctctctctctctctcattaaaattattcagctaaaaagttcataactagtttccctaccaatgcaaaataggtttcaacttctgaatataattcttttcttccttctttatattatgagtctagaacttttattattttcttcaaggatgtaaatatatggatacttaacttcctttagttaattaactatcaaagcatcaacctttcccttgctgtttttctactttgttattgtgatttgtggtattttgcaatatacttttaaagctccattaatatgtcaaaaggagatctgcatgttatcctttcttgaatcatgactgtgtatgtatatgcatgcattgttttggcccttgctttgttagagtgtctgcgtccttaatctcgtgatgtggactatgattcgcttttattttcaactgttcattgaagtatcacttggttctttgttttagtaacttgtgtaattatccattctccttacagaagaaagtgaggtgaagataccggaggataaaaag

SEQ ID NO: 4742 - DNA, 1386 bp, Medicago truncatula
  Intron number 4 from transcript Medtr5g018450.1 (locus Med tr5g018450) derived from phytozome v7.0 (chr-ID MtChr5; po s 6713355 to 6714740 reverse strand)
tttcaggtactttcttaggtcatactttttctttgttatcttatgtacaaagtgttcacaaaatacatagctgttatagatggatttgaaaatcaaggctaatgcagcagaacagaagatataggatttaaaagaacaaaattaggtcttctatggatacctaaaggaagaagttaagggaagttagggctcttaaggaatatttggggacaagagtggttcaagtgaaaagaataacgggttaacctgcaagattgggattttgtggggagatacagtttccatgaagcaatttttgtttgcaattaggtcattaaaaccactttttataatgataaccaaaccagtcattgtaccggtaaagagagtggttctaggttttgattgcaattttatgagtcccgattttgctattccctttcgacctgaagtgaagtcccgattttgacaaccttggctatacgtatatttagtttataaataaattcatgtatcacatacaataaatattaaattattgtactcactactcaaactatcatttttctttttaacttctaccagtcctgcatcaaattagttagagagaaatgaagcttctcatcctatattagtctcgttaaataagtaaaagagaaagagatgaagcatctcgttatgaactgacgacaaacccttgtattacaaagttcttatttgtcctagaatgaacatgttaataggagtgagattgaatttgggttatatataggcaaccaaataagtgacagtttaaactgttctaatcatataacaacattaattggtttaaactatgaagtttacgtgaaagcatggaaatgatttttggcacgatctaattcatcggcatgcctctattatgagtggaatgtttatcctgtgcaatgtttgtccaggttttagtagcgatcctttttttttttggttgtgattttgttttgtggtacctttaccctttgtagttgcttttttaattgggttggaatactccttgtattcctttcttaatataagtcttttgcttcttaaaagaaatcttgttttggaacagcattttagggtcatttgatctagcagcagggaaaattccctccctactttcccaatccaaccagcttgtttgtccggttcatgctgaaaatctgattgaaataattgacgcattattattgaaattgactgcaagagataaaaaataaattgaaaattaatgtctccctccctcttgtttttttttttttttttgacaagaaaaaggagggtggttgggatttaattcatctttcttaatgttatcttcagaccatactgaccattttttcttacacaggtgctgcgacaggatcaggagcaagctttggggct

SEQ ID NO: 4743 - DNA, 3727 bp, Medicago truncatula
  Intron number 4 from transcript Medtr3g020380.1 (locus Med tr3g020380) derived from phytozome v7.0 (chr-ID MtChr3; po s 4601463 to 4605189)
gcattgctatcactaaggtacaccaataaccttaaatgtttttataataatgtaaatatatagtttcagttgaaaagatagatctaacgaggttggattcatatagttaatgaatttaacgataaatagttcaagagagagctagtatagagaagagagaaaagataagagaagttagagatttatcttatttggcaagagtaattgcgaagagagaagagtaaaagatgggtcccatacctttttgttttctcttcaaaagggagaagaaagaggaaagaacacaaaagtctaatataccattggttttttcaattaatcataaattataatattggcttatcaacgttatttttgtcattgataccaaatttgataatcttatttattccctcccatgcatcttttaccatatgggggaccagattgcttgcttttttaattgactcaatattccttcccaactcccacaatcccacatgtttgtcttttaccatgtcgatgtttttacccttttcgtactttcatagaattttgcctaacttgaacaacctaaactcacgaatgttggtattttgaacaaaactaatgatatgcgttttgtctaacaatggttcttaaccatatttggcaaattataaaaccctccctttttcctagatttagcaacaacctttttatatggaatacaaacattcttttttttttttttttttttttttttttttacaataattaattttgaattttaaaaacatttatcttaaattaaatttcgtaaaattaataaaaaggtttatgaaaaggaggtatcagtttatgaaaaggttttcaaaaaataatgataacatttataataaataatgaaaaacatttatcctaacaccaaagaacacggctcttggtggtatcagtttatgaaaaggttttcaaaaaataatatttctcctaaaattgacagaattgttggagaaggagagattatcctcttggcttacttcttcactcatggttatgtatatgtgtatatgtatatgagagaattgatagtgacttgcaataaaactgtgttactatttataactttttaggaaatggctttctttgttgcaacctaatcaaaatgaagcgacatgttgattcaaaagttaaaatattattttttgaaaaccatttcataaactgataccaccaagagtcgtgttctttggtgttaggataaatgtttttcattatttattataaatgttttcattattttttgaaaaccttttcataaactaataccaccttttcataacattttcattgtcctcgtgagcttaactcagctggtagggacaatgcttaatatatgcaaggtctgggttcaaaccccggacaccacaaaaaaaaaaactttttcattatttttacgaaatttaatttaagataaatgttttttaaaattcaaaattaattattgtaaaaaagtaattgtattccatataaaaggttgtagctaaatctgggaaaaaatggagggttttataattttggtgttttgtacaaaacaccaaaatttgtgggtttaggttgtccaacttagacaaaattttatgaaagtacaaaaagggtatgtaacgattcgaatttttgagacattaacttgtgtaattcttagcggaaaaaggtgaatatttttgtttttctaaaataataacaataagataaaactccatgacttcaaaataaaaataaatgagtttctctttgaattttcaaaatagtaaattagaatcgttttacttcaaaatacaaaattcctaagaacatagtcactggcctttcactacccaaaacacaccctagctgatcttaactttgaacgcatgtgagactacaatccaggcatgaaaataaaaaattatactcacaaccaagcaatccaaaagcaagttcacgtagtaagtaagcatgttacaatacataaacatgacaaaaacgtcatcattttaacaacaagtaaatacatatataaaataaaaaaatggagcgacctttcccttaccttgacaataacaacatttaaatttcaatcaacggtccttgcttcgctacctttataccttcacaagtaagtgtttacttagattctaattcttgcttgacacttaggtttggttaagatataatttacaactaaatccaatataaccattttcttagccacatagatgtcacaaaaataattcccaaagtcaattaaataaaaattgttttaaatataaataaatctttctaaacatagactagtgtaaaagaaaaaaattgagtttcaaacctgttttcttagaaattctcagccttcgcgttcaagtgtactctcattctcaattacttgttaaaaacatacaaacactaaaaacaataaattaacaacttatattgtcataccaagacatctgtttaaattacatgatttgttaaatcatgtgtgtccaaaaaactcttcatttgctactaatattcatggtgttaacatatttgtctatgttggaaaatgtgtgcggatcaaatcctactacaaaaataaattacaaaaaattaactcatataaaatcaaaaagaatatcaactcagatcgaattaaaattacacgttggaagtaagcaagatgcgtaaagatatcatacctttcaaacagtgtttcaacattgcagtgtgcgtttaataggtaaatgaaacttcaagccttcaaacattcattgtgaaacaaagggagtataaaacaaagagaaatgatatttgtacaatcagtatgtcacaattttttctctccattgtttttaaccaatgaaaagagagaaaaaagaagttgtcacaaaagttgtaccaaatatcactaatctaaaataaatatgtagattatagttggatatactataatattaacactttctttttgtttttccatatttcttcagttgaggtaatattattgatgtgtgtcgcacactttttttttagctgaaattcaaacattttttttaaaggaatctagtggctaaatacaccttttaaggtgagtaaatgtggaatccaaagtttcaactctttttacatataacaatgttcctatcaactaagttatgctcactcatgtgaacctaaaatccaaaccattactcgccaagttgtaagattatagtctcttatgttagactcaaccctttgataacaatttgtatattttaattcattttttttattggaaattgagagtatacattgccggtcatattttaccacttgttcacgttgtaagagtataatctcttccgttacactcgacactttgatataatttgtaatttaattattttttttacggttaattgttcaaattaaccctgtaatatacatggaatctgaaaaataatcctataacataaaaacacatatttcacccatgtaatttgagattcttccaattttttatccgctaatataggtgaagtcaaaaaaatgacagaggttgaaatatgtcttccaattttttttgaaaagaatatgtcttccaattaacgataaatagtccaagagaactcaaattccaagtctgattgagataatttttagtcagattttactttatctcttaccaaactccaaattaccaacaaaccagttaagattaaaaagagaatttcttgctcgtttgttatttctttgcagaaattgtccg

SEQ ID NO: 4744 - DNA, 2763 bp, Medicago truncatula
  Intron number 1 from transcript Medtr4g062020.1 (locus Med tr4g062020) derived from phytozome v7.0 (chr-ID MtChr4; po s 11880276 to 11883038 reverse strand)
gtgtttctctctccacttctgtatttcctttttcttttatacagatttatatatttttttcgatatcttagaatttacgtatttgattcatgtcatagagattcgatagagttttatgttggttgtcgaggtctattagtagaaaagagggtggaaaacaggcttatgtggttttgataccggtaatattagcgatttccggtttatggtgtacaaaaatttgtttaggtgatttgaagattctttggttttagaccttcatgaattttgacatgatatggcagggataaaccgaaattctctcaaattacaggggacaaaaataccttaaattttgtaatttgatgccataaaggtcgaaaatcaaagaatcttcaaactacaaggttgtaatctaaacaatttttttttacacgggttaaaccggaaatccctaatattacagggggttaacattatattaaccctaaaagatatttggaaattaatgtgttggacccaaatatgatttatgatagaacattattatgtaacttgatccatgtagcagaccccactttgtggaaaaaggtttgattgttgttgtcgtcctcctcgttcaggtgtaacacagccctctccttttattctggcttgggacccgttatgcataggaaagttaatataggctggattaatctcttacaattgagcccccactttttttttggggtcatgtggtactattgaatgattaggcttctgaatgttatttaaggattaatcaaataactattgaatgattaggcttctatatatttaaggcaggaaaaacgtcaaactttttaatgttaggaaaacattcattcattcattaatcacttggtatagttacatttgtttgtaggaatctgttgtttgttatttgattcatttacatattgggtttgttgttttacgactaacattttcatttgaagttaagtttagttatttgaaatggtatttttacttactatctgttgttgtggttgcatttgttgttgttcgatcctgttcttatggttatctagtttgttctcagaatttgatacaaaacaaaattggggttatgaaattttatagattagatttaaaatttaatcagaacctattgtcagggttatcacatggcttgtttaagttatttttctaatttgtaacctcgcttcattggctgtgaaagtggcatatgtttcatcgatatggaaatagtatcgacttttatgttgttggattgggcttaacttatctttatcaaccgcttataaggtgagtgatgccatattaaaaaagataagatctggaaagagttcatacagggtggcacctctcacattccaagtcggttttgtagggttgaattagatcgaattcaaattttaagatgatatcagagtctaagatccgttggaccacctgctatgacgggtctgttatatgtgtgtgtgtgtatttctgatggcttgatgtaaaaagtcaaactttgttatttgattcatttacattctgggtctgttgtttttatgactaacattttggtttaatgataagtttggttattgtattgtactagggttaaaatggtcttttttaattgttatcttcgggtgtgtttgcatttgtagatcctgttctaatggttacaagtttgttctctgaatttgatgcgaaacaaaatcgggggttatgtaattttatagattggattcaaaatttaacgagaacctattatcagggctctcacgtggcctattaaattactattttgatttgtaacctctttgcattagctttgtaaaatggcatttgtttcactgatattggaggtgtaatagtctattatgtttttggattgagattaactcattcttaaaaaccagcttttagggtggaagatgccatattaaaaagtgaaaagagtttataaatagtgacatctttcaactacaagttggttttgcagggatcagttagactcgatccttgttttaagatatttcattagtctttcgaagatctgttagattaccagctattgggctagttgggccatgttcgagatatccaatcttgggtgttagggatgtttgttaagagattctcacattggatgagatatggcttgaaaatgtgtttatataagtgagaagcatttctcaccttataaattttaaattaaactcaaattaagataatttttatcccagctatgaatggtgtcacaatgtgattttgttacagtttggattatctatatatcttgctttttactttacatcttttgattgtttgtcagttatgcaattttgttagattagatttccaatttgatcagaacctattatcatgatagacctaatccaacttttaagatgatatcaaagtctccaaagatccgttgggtcacccactattttaccactttggtcacgctccagatatataatcttgggcgtgaggcgtgtgtgtgtttttactaaacgaggggtgtgtgttaagagccctacattaaatgatatgaccagaagatatgttcaaataaatgggaggcatttctcatcttataaaccggttttgtgaagttgaattaagttaaaatcaaattaagatagtcttcttcccaactataaatggtggcacaatgttattttgttacaatttggataatctaaaccttgcttttcattttacagcttttgattctttatggtttatggattgcaggttgctgtactatcagaa

SEQ ID NO: 4745 - DNA, 1577 bp, Medicago truncatula
  Intron number 5 from transcript Medtr2g126220.1 (locus Med tr2g126220) derived from phytozome v7.0 (chr-ID MtChr2; po s 30531145 to 30532721)
aggaaacttgctttgaaaacaaggtttgaactgaattatatttccatcttgttaagcagtgccttatcattctgcaagaagcttgtgaaactgatgctccatgctgtatattatttaatttctgcatgttgattctgaacatttgaaaaggcaattatgtctgagtgtgaggggaatatataagccaattaaaagaaaaccctttttatatttttatttcctgttttcactaataatttcaaaaatgccatattgttttcacttttttcctacttgtttttgaacatgaaaaaagtggggtggacagtagatgcctaacctcgaaccctcatgagtaattgattgcagggaaaaaagaattaagtgcacacatatttagatcgctgtttgatttttgttatcatttttggtagctcgacaacccaaatagatattttgttggtattaccatgcttaaatccggtgttaaaacatccattttaggggatatacctttttttcgattcagtttgggaagaatctgttctcccaatcgttagatgtaattatgcaatgtttgcctcacttttaatattcacccaatattttaaataacttttgtactaggtattttgcatttgatgcttaaatgctttccaaaatatacaacttttttcatgctgataagtaattttaaatgaaggatttgcttaatcaaagggaaaattacattggaaagatattgcttcccttttcctatatctgattgatttttttttgttgccaaagtctatcctgctcctgcatatttttgtctactttttgtaccatatttgtttatttaggaaccattagatatttagaatttcgttacttgtaatagttcacccaaagcagtgtactgtaatggtgcacccaaaggagtatatggaataataagactcctaaaggatctgtttgtagtatattgaatcatccttggtttttaagcatgcctctttctatctcaactcctcaacactcttttaaaaaatattattaatattattattccaccaaatcattttcaccccatttaattttaggacgaattaccttgtcaagtatttgaattaaattttatgagtgttacgattttataggtatttttcctttgttatttttttcttcccgattttatatatcatgtttatgatctcacattgggtgtattattccaccaaatcattttcaccccatttaattttagggtgaattaccttgtccagtattttaattaaatttcatgtgaatgttatgattttattggtatttttcccttgttttttttcgaacttttgtatttgattttgtataggaaatttacgatctcacattcggtgtattacaaccgaaatatatctgtatattatttttccctaatactattataaatgtacatttgtgtgagaattcttcatctccttgatctactatattttaggttgttgtcttcagtgaaagttcatagcagtttcgccataaaaacagcctgtttgatcatgttggtatgttgttttacagggaacaaataataacactaccaaggaaagagacaa

SEQ ID NO: 4746 - DNA, 2965 bp, Medicago truncatula
  Intron number 2 from transcript Medtr3g106400.1 (locus Med tr3g106400) derived from phytozome v7.0 (chr-ID MtChr3; po s 26776314 to 26779278 reverse strand)
tgtcttaccctacattcccaggtaaaatggatttttggaatctacattacccctctttctctaaagaaattgatatgtgttagaatgatagctcatttgtaaaacatttagtttttcagcctgttatacaaaatttagaatgtagaaaaacctagaatattctatctatctactacatgcagtgaaaaactctaactattgaagattgttaaacagcgaatcattatcatctattgtgaacctcattaaggtcaggttagattattttgggttggtctgaattaacatgacattcgtacatcattttgagttttagagataattgttttttttcgtccaacaattccaattcattctgatttatcaatttcagtgaaaggatgatttcattcataaaaatttcatttagagtttgattggtagctaataatatgaaattaagtatctgtgttgtggaagataatgagtaatggcatcacacagaggcgttttgtttttaccaccatgtgttgtgttgtgggctaatatggaaaatgactgtattttgtttgactgtaagactgtgtcatttttatgactgcagtcaatcacaatcccacaaaatcaccaccaaaaaaactcatttacaccacaaaaaaaaaaaaaaaaaacataatcacaacatgcatcttcacaatagctaataatcacggagttaaaccaatttaaaaatcaagtaatcatttaaagttttaaaatccatcacagtgggaaacaagtaaaacataacatcacaggccaggagaaaacagtaaatttaagcaaaagctctctgatcccatgagtctaacagcttcaatggcaaacccaaacccctcttcaccgagttaaaccaatttaaaaatcaattaatgaatgactcaaaaaccactttaaaaccatcgtaagtattaagtaatgataaatcataatcacaaaattacctcattctaactaacaaaaatagatcacagattctaacaaaaaacaaacagatcacaaatatacctgcatttttttatggtccagccattctggaaattggagggatgggtccgtcttcataaccttccagttctttcccacccttgtgactcgcattttgatcaaatttttgtttgtaagattgacatggatcaaattttgatctcgcattcattggtcaatcttgtcttcaatttttgcagcatccattaggacgtctctgacctcattctaaagttcttttgatcaatctgaagtccttctaaacatttgatgatgttaaggtttatgtttcctgcatatttgtgcatttgtaatatattgttataaagaacactaagaaatttgttagaatttaacatggatcagaatcatattgatctcttcaattaaaaaaaattgttgtcattaaaacatcaatttaagaaggactttggaatttatctcaacaccactatcaacgataccattcaattttccgttatttttagtgtataaattttggtataactctcccaaaaacgttagacattgctttgtccataacctttttaatttatttattaacttcttatatttttctaatttatttattaactttttatatttttctgatacgactgttcgatgtataaaaatggacattaactatattttattaatatatacacatgttatttataaaatatttagagtgatactatgctttctataaaaatatttataaaaaaaaaaaaaaaaaaaaaaaaaaacataggtaagacattttttttgtactcaaaagtgtattactaaaataaaaaaaatattcccgtttttttcttctagattcccttctaccaaacaaagggttatttattttcagcattagactctgcgaatgtttttttaaagcatcaaaacaaacgccctcttacgtattgatttcccacaccttgaatttgtaaagcaaccttgtaaactatacccgacggtacctctttttctttcataatttttgtttttcgcaagtcttctgccatgaatgttaaattcatatcagacatatatcacctttgtgttggacggtcgttttttgctcctttgttcagaatgaattttctgatttcaacagttgctgttctattgtttgtttgcaaggtgaatgatacgggcctatttattgtacaaatatcatttctctaaaataagaatggaagttgccatcaacaaagcctcgtttaaattctagttatcctttcatcgaacgcttagaatgcattccacaatacaccaaacttagattattattcgaaattttttattcatagccattatttattgagaaatagcaatttagttattcgatttaattaatatgagatagacaaaatcataattataattagttgcattcagtgcatatagtacatcaacatatttaataatctgtcatttgatatgtaaatgctagcaaaactgaaaatataatgccattgtttaaggcgtaatagatatctagagcagaacagaagcatttggtatgatgtgcttgcctatctagtttgcaatattgtttcggacaatctcaacaaataatgactccggagggtcttgcagttcgaagaacaacctatccctttgacgcaatttgttatcttcagaaatttgttccaatcctctcctagatatttttcatttggacccctgtttgaagtggtaagtttgcactcgtattgtttttgggtattccaattcactaatgtaatggtgtactgtgtgtccggaagtacgttgatggagatcatattggggaagtgctagaaagggaatagtaacatgatttagttaatgactacgattagaaagattaaaatattaaagcggtagtgtagttgttacttaccatcacttgagatttttgtttatttttccaaggcttagttactttttttttgcaaagtgatacagatctgggtcgtaa

SEQ ID NO: 4747 - DNA, 992 bp, Medicago truncatula
  Intron number 3 from transcript Medtr5g092780.1 (locus Med tr5g092780) derived from phytozome v7.0 (chr-ID MtChr5; po s 36403574 to 36404565)
tttttgatcaccacttcaaacaaggtatatatacatgtatttatttttttgtttcaaaaaaatacatgcacttttttttggtaaactaaggtaaaagatcgaatatcctgaactaaatagttaagagatcaacaatcaaaatatctaccatttatatatatatattaccacaatccatcaaaagtaaattcatttgagaaagaagcaactagtttataacaaaaaaaaaatgtgtataaattaccacaatccatcaaaataaattcatttgactcatataacaacaatatatatgacaacttttccggtacatccaaaaatttaaatgtattggtacacccaatcaacaaattaatagttaaatgtgttattttttgaagagaaaaattattttccatcacctataactataaaaattaaatcttattaaccaaaaacgtcgacgaaataaaatttaatttttcagaatttttagtactcataatatatatatatatatatatatatatatatatatatatatattttatggaacaacaaaatttaataaattatatcaaaaacatctttttttttgtatggttagagaaccatccactatactatacttatgaattgtatcaacactatcagtttcatggtttatagtttgattgttcccttgaaaaaaatggattttccaaccatattttcccatgaactttgaatccttggaaaagttaagcattttcgaggaacaatttgcccataacgtcctcaaaacacacaatttcatattttaaatttattgagacatattccgtggacacatacaaatctgaccgttagatgagcacatcttgcaagggaaagtcctcttgaaaccctaaaccctaatcgtcctcaaacacatacaaatctgatcgttaaaggagcgcattttgcgaagatatgaatgacatttttacaccttccattgcatttgtcactggcaggtgaaaccaataggttcg

SEQ ID NO: 4748 - DNA, 2298 bp, Medicago truncatula
  Intron number 1 from transcript Medtr6g070240.1 (locus Med tr6g070240) derived from phytozome v7.0 (chr-ID MtChr6; po s 13184764 to 13187061)
agggtcttaagtgagacattagatcttattggaatgacccttgtcgcaaaaatgagattttggtctatatgcctacaaatttggtaactaggaagtttgaacttgtcccttgatgtgaaacatgatgcgcaaatgagattttagcctatatggtttgaagtttgataaaggttgaacttgtccctcgatgtcccttgatgcgaaatatgatatgtgaacctatttggttttatattcggtaaaatgaaagtattggaatgacccttgtcgcaaaaatgagattttggtctatatgcctacaagtttggtaaatgggaagtttgaacttgttcctagatgtgaaacacgatgcgaaaatgagattttagcctatatggtttgaagtttgataaaggttgaacttgtccctcgatgtcccttgatgcgaaatatgatatgtgaacctatttggttttgtattcggtaaaatgaaagtattggaatgacccttgtcgcaaaaacgtgattttggtctatatgcctacaagtttggtaaatgggaagtttgaacttgtcccttgatgtgaaacatgatgcgaaaatgagattttagcctatatggtttgaagtttgataaaggttgaacttgtccctcgatgtcccttgatgagaaatatgatatgtgaacctatttggttttgtattcggtaaaatgaaagtattggaatgacctttatcgcaaaaatgagatattagcctatatggttagatgtttgataaatatgaaggttgaatttgtccttcgatgtcctttgatgtgtaacataatatttgaacctatttggttttaaattcgataaatagaaagtaatgagatgatccttgtcgtaaaaacgagattttagcttatattgttagaagtttcataaatatgaaggttgaacatgtcccctgatgcgaagcatgatatgtgaacctatttggtttcgtattcggtaaaatgaaagtattggaatgttccttgtcgcgaaaacgagattttagcctatatagttacaatttagatttgataaatatgaaggttgaagttgtcccttgatgtcctttgattgaaaacttgatatttgaacctatctgcttttaaattttgtaaaatgaaagtatcgaaatgacccttgtcgcgaaaatgagattttagcctatgtggttacaaaaatgatatttacctccatgtcccttgatgcaaaacatgattttaagccgagtttgtttggatttcggtaatctggaagtatgagaacgtgtctcaatgatcctcaacccgaaaatgatttaaacctagtttattataaatttgataaataggaaagtttatattttgaatcgatgacacttgacacaaaaatgtgatatttgagcatagatgattttaaactataaattggaagtatgagttttgttttctattataatgtttaaattgtcttttggatcattaacaaaatctgcccttgacggaaaatattgaattttaacgtagatagttagaagtttgataaataggaaggttgagcttgtcgctcgatgtcagttgatgtgaaacttgatgtttaagcatagttaattctaaattcggtaaattggaagtatgacaatgtgcctttatgactgttgaatttgtccctcgatgtcctttgatgcttaacaattaaggtccttattttttttagactctttacacactcatccaatagtattgcagcattctgccacatcagtttaatgaaattaattgaataaaaaataaaataaaacctcaaaaatcatctttatcacgtccttggttgttgcttaacatcatatctcacacgcccttcctctacagttacggttatgatctttatttggcaactgcaacctttgtattatcattaaggactttactccaaaaggctcagcaattctctgcacctttattctacgggtttccgccttttcggtaagcttttagatatttgaagcgattcaagttagaattgtttatgtacaaagtcttatcaattctttgaaactctattctactggtttttcttagttatttaagtagaatatttttcttgttgatatttataacatgtggcgtgattgttattctgtgcaagtataatacacatttataatggcatattatgtggtttttattttctctcttttcaagtgaaaccgctattttaattatagatatgttggtaggtaagaattctgatgtcattacacttttacataacatgattgtgtgtactgctagtagatcaagag

SEQ ID NO: 4749 - DNA, 676 bp, Medicago truncatula
  Intron number 1 from transcript Medtr5g103810.1 (locus Med tr5g103810) derived from phytozome v7.0 (chr-ID MtChr5; po s 41593220 to 41593895)
atcagatcaagtatctcttagaacagttgtataagcaagcccaaccttagttgcacacccaactctagcttgttttttacttttgttcttagtagctgtgtctttgtatcttaatctttctttatatatattatcattgtttctggatcttgtgctttttcaccttcaatatgttttacaagctttaactctgatgatatttactgtttttaatgctgtttgctctgatactctttcttttgtttctattctttttgttgatgacaaaagggggagtaaatgtatagtattttttaaggcactgagccctactctaaatttcttttaaatacttctgatttgattttataagtattttattgaaatttaattaataagaatagaacttagggggagcttacaaacctcaccttaaagatctattagactcagggggagcttacaaacctctgtcccagtagtcaacttattaattagatcaacaacaattgaacattttaaatactattgtttgtcatcatcaaaaagggggagattgttggaacaaaatgtgtttcacaatgaaccttattgagttttgatgataacaaggtattaaaaattgtcaattggttattactaataattgttcaagtgtacaggaccaaaggctactcaagtcatttcaataggtctt

SEQ ID NO: 4750 - DNA, 1255 bp, Medicago truncatula
  Intron number 6 from transcript Medtr1g149750.1 (locus Med tr1g149750) derived from phytozome v7.0 (chr-ID MtChr1; po s 33111687 to 33112941)
caggtgcatatatatttctggtccatttcgagttgcattactttcttcacaattggatgcattcttagtagatttctatctcattatttatctacacctttggggctatggtgcattttctttgttgtttcctctagtggtgggaaaggatggtgtcaggggcacatattctatttattttttgttagaatgtaaggaaaaggtttcattaatagaggaaggcaaaagactgggtgatcttagtgggcaccgagtcttcaacttctttgattaatttattctcttcaatcaattttattgttttaggaaaagaaaaaaaatagaaagaggaagtatatatcaatgacaggaaatccctttatactggcattggcaaaataaaaacatgtatgataatagaaatagaaagagagaaaaataactcaagtaaaattatctcaaaaataagaatgaaaaatatgttatttagtccttttgtatgtccaatgaagatagctgttcgaaataaaccagttacttttcctgaaaaataactaatgaaatgaaaagtaaaatgcatgcataaactgttggttgagcaatactaagttgtgtttatgcatgtatgggctgtaggttgagccatatgaagttgtctctaatttttctctctctctattctctgtttgtgtacctcattactacatatagagtagttaaaggctattttgcatgctagtaatcaacatccctttcccaactgttgtaaattggtgaatttggttagatgttctatatagacccagactactaagggaagtttgatcagttaaggaagttttgacccataaaattgtgtcataattgggggttgattctatttctagagatgactgcagagcaatcatatactctgtcggctagtttactattactaattaaattttgacctgtttctaatatttactcaactcctgattttaatttttaatataccagaaatccctcttattcgatatcatgaggggatgtatgtgtaagatcacccaaactcagggcagaactaagttgtttactttccataataaagaatttgttcagatttgagcatatggtgataatttcgatttttgtaattatttgttatttttagtgattttattctgggcttcatttctaagcatgtttttgacagactatcattttacctccaggtatttgatatattctctaatttggctgcaatttcagattattgtcccgtacgagagtcttg

SEQ ID NO: 4751 - DNA, 2331 bp, Medicago truncatula; identical to SEQ ID NO: 4731
  Intron number 2 from transcript AC235488_19.1 (locus AC235 488_19) derived from phytozome v7.0 (chr-ID AC235488; pos 77647 to 79977 reverse strand)

SEQ ID NO: 4752 - DNA, 547 bp, Medicago truncatula
  Intron number 2 from transcript Medtr2g092150.1 (locus Med tr2g092150) derived from phytozome v7.0 (chr-ID MtChr2; po s 20963544 to 20964090 reverse strand)
gttgacagtatttggaatcgtgagttttactctatcttttacttctgcagctagtctgtgtatctttaaattcttactagactttatattcattagggtgcaatagaatccatttatccatattcatcaattgctatatccatttaattcatctactaaacagtaatgagttaaatagtgctttacccctgcaaaaaaaaattatccttgtaatttgaagattctttggttttggaccttcatggcatcaaattacaaaatttatggtactttcgccccctataatatgagcaaatttcagtttacccctgccatatcatcgattttgtacggtcataattcatgaaggtcgaaaaccaaagattcttcaaattacaaggatggaatctaaaaaataataaaaagttacaaggaggtaaaccggaaatggcctatattacagggggtaaaacactattaacccaagaaaaaattataacagccagacccttatgagttattagtgattcatcccctatggaacccattttgaatgtgtacagtcaga

SEQ ID NO: 4753 - DNA, 1573 bp, Medicago truncatula
  Intron number 12 from transcript Medtr3g150440.1 (locus Me dtr3g150440) derived from phytozome v7.0 (chr-ID MtChr3; p os 39634489 to 39636061 reverse strand)
ttgctatgtaagtgactctcaatataattctcttcattaatcaagtatttcaatttgaatttatggatttaatttatatatgaagtaatatacctataaccctgataaggttgcagaccaaaacccacttaggtccattctctggaaagtccattctaggaaacttaggtcttagttttattaattttagaaactgctatttgcagttgatttgtttaaataactgtaaagtgacagcttatgaaatattattattattgctgctgttgttgttgttgttttcgtatctattagtggggtacctttcagggacagttatatgaggtatttagcagttttatgaacagagataatcttttaaggagtggcagaacactggaacagcaagatattgctttaataatatgtactttggtgttgtttaatgtcattatcttctacttaattagtgttctatcatacgccagggaaatagtcatgcttattgctctcccaattaggtagtagtagttgagaagattgatatacactaggaaatcagtcatgttattatcttctctacttaaattagagtcccaccttgttttgtgattgtttgtataactcgtaaaattattgatttataattgaaactaagtttctatagatgctggtcaatgttgtcgagaatccgcatctgctagagatatggtcaaatgagtccttgtagcacttgagcaatcttcgccccttgagctaacttttgtggttgattaagccttatagattaaattctaatatgatattcgagtttattctagatctgttattgggccaaccatatttgtctccgctcttagcgctctagatgtccagttctaacttctaagcatgataaggtattgttaatggactttgtccatatgtctaatcctaggaagtatgtgcgtgttgagattccaaatcaactagaggtatgaccaaagtacaccttataaggttgtgcaatgctcatctattgaactaacttttgggattgagtttaggcagaaagctcaaattctaagaaatggattctaattcctgtttacaaatgattatcgcatctgattttgctcaagcaacaaagactttaatctacatgcatatgaagttattagttgccttgattatgaaattgaaaataaactgatctttgaatggttgaggtttactgacttttcttgtggccaatttggttatctgttaatgttcggattaatgtaatgacattaattgttaatttttgggttgtttgataggatgaagtagaatttaattgaatacctctattccatgctatttaacttcataccttaaaaccatatccttttattcaattccatttcacccgtcattagatatccaatattgcctaaatattgtttaatgtgaattatacattatagttagacgaacaatcttttgtgcccatacaaacaaaaatgtttgccttgttcccctgactttcaggctttcacggattatgcggttattgatgtaactccttttgatttctttattgtttttcattgtaggtgttattgtattttgc

SEQ ID NO: 4754 - DNA, 3525 bp, Medicago truncatula
  Intron number 1 from transcript Medtr2g030300.1 (locus Med tr2g030300) derived from phytozome v7.0 (chr-ID MtChr2; po s 8364935 to 8368459)
gcaggtcaacccctttcctttaaagtgtttttgttttgttatcatgtgtgcaattttatgtgtttgaagaatttattgtttaatagttatagtagaataatagtgtgtgcaattagagttttatttttactattgtaaggtattgtttggataaacaacttaattaagtgtttatagcataagtgatttctgtataagctatttctataacaaaagataaggttctcgtataagttataagttgttttcataagctatcctggagaggttatgaaaataagttgaaaggttatgcttttatggatatgtgataagttgttttcataaggactcccgaatagtctcataagtgtttgtgctaatagataagttcaaataagtcaatcccaacatgccctagaatagtgcgtgcaaccttttgtttttgaaaaagatagtgtgtgtgtgcaactttaaatttttccccagtgtaaagccctgttttgataaacaattccatataatgcttatcatataagtgtttatgtataagctatttctataacagtagataaaataaactcaaaatattttcatataagctatatgctgtgttcgtaagctatcgtggagagttgatggaagtaagatgaaaacagcttatggacatgtaataagttgtttgcataaactctctcaaacagtcacacaagtacttatgttggtagataagttcaaataagtcaatctgaacagactctaaaattaaaagcatcgatatcccatgtctcaaatcattgcgtttttttgtaattttagttatgaatgaaaaacaacttttgctttggaatgctatagttagctgtaaacttgcaatcatcaatggtaagatattctcagctttcaggtcaagtcttgcaaaaaatactcagaatttggataaggttctccaaggtctgtgtgtatctggaaaattggaagatgcaattaggctcttgtaccgcacgggatttccggtgcacccgagaacctattccttgatgctgcaggaatgtatattctggaaaaattatggtaggggaagaagaattcacgcacacatgatcattgttggatatgttcccaatgaatacttaaagatcaaattgttgatactatatgcaaaatcaggttgtctagaaactgcacagtttctatttaataacttggtggagaaggactcgtttgcatggaatgcaatgatagctggctatgttcaaaaaggccttgaagaagttggattggaaactttttatgagatgagacaggctagtttgagacctgatcagtatacctttgcatcagttttcagagcctgtgcaactttggcgttgttagaacctgggaggcaagcccatggtgtaatgttgaaatgtcaaattggggacaatgttgtagtaaatagtgcattaatagacatgtattttaaatgcagttgtatttgcgatggacgattgctgttcgataagtgtttgagtagaaataccataacttggactactctgatatctgggtatggtaagcacggacaagttgtggaggttttagattcttttcatagaatgatatctgaatcatttagaccaaattatgttacttttctcgcagttttggttgcttgtagccatgtgggtttgattgatgaagcatataaatattttcaatcaatgataagagactatgaaatggtgcctcatgctaaacattatgctgcaatggttgaccttttagggcgttctgggaagttaaaagaggcttatgaatttgttctgaagtcaccttataaagagcactcagtgatatggggtgccttgcttggggcttgtaagattcatggtgacttagacttgttaaaaattgcatctaagaaatattttgaatttgaacgtgtaaatactggaaagtatgttgtcttggcaaatgcttatgcttcctcaggtttgtgggatgatgttgaggaagttagggcttcattgagggaatcaggggtgacaaaggagcctggttatagcaggattgaggttcaaaaggaggtttctttcttttttaacggtgataaatatcaccgacaagctgatgaggtttattgggtaattagagagattacctctatattaaaggatgcaggctatattcctgatttaagtagaacctgataaatgcataccttatgcagtagaaaacaaggggcatttatttctgctgcttaaaattttggttgagccaatttgcaatgtacctgctagttatacacaattcttcagggattcaaacatgttctggtttacaatgaaagctgctgaattgtaggttgtaaatttgaaacagaacgctgaaacacatgggacattgtgctgtactatgcacattcttcaggttgctgggaatagcgttcctttgatgctacgcaatttttttcgttattgggtttgccatatacttcgcacgtttctgcatttggcaagctattgggtgatagccaactagcaattttttcttccagggaaccgacggaaagagtttacaaagagagctagagtgagtatacaagacagttagtttaattaatcgctttaatttattcacctatgtatcaaatttctgggaatcctttctgtttttggttatcacccattgtgaaggctcttggattaatttcctcatcctattggaggatctcattaagattgttttcctgaaaatcttgatttttaaatcaatattagtgtgatacgttacgggataggtagattacatgccaaatcaaattcatagattcacacatgcatgcatgtcagtgcttgttgactttctagttggtgttttacttgcttttccgattttatgatctagcgttgtgttatcttctttgcctgtaatgggaaaagaattgaacgcgtgtgtgaatgactatctaaatgtttgagataatttgtagtttattagaagtaatttactttttatttttgtactttcggtaacatctacaactgtttaattttgacagtaccttgttctaaaatattggctgtttaaaacaaggagtcaggttactcacacacacaccatctccatgtcaaatataataaaatgtttacatacttgataaaaaaattctcagtctactatttaaaataatacacgaggttacacactttaaagtaagaaataatctttcttcgagtgttgaagtgttggcttgtccctaaacccctgtactatgtaatgtatgttggccacacagagctcagtttcaaattgagccatatcttatggttggaaacaactgtttttatcttttatggaaccaagcagacttaatgctggatgataatacttagaataatttaatgatctatgtgggtgtatctatatgtgtgtggagcttatgttcgatgtgtaggaattccgtaattgtggtttatctttcaggaaagccacaatatggttttgcaatagcttatcatttagtatatgattgacatttcatgtttctttgatgcagaa

SEQ ID NO: 4755 - DNA, 682 bp, Medicago truncatula
  Intron number 6 from transcript Medtr2g080190.1 (locus Med tr2g080190) derived from phytozome v7.0 (chr-ID MtChr2; po s 18416158 to 18416839 reverse strand)
acttcttataaaccatttggtggaccaatttgctcgtaagtaactgaatatgtcacttgagtaaacttcaattgtttggtcttataggtggaagatattttatgtaacacacaagttgagtatcaatagtgttgacctaccaaacattgatagacacgacaccgatacttacacgtaggcaccgttattaatttgaaaaatggaagtgatcgaatgtaaacacaagtgtctgagttgccaatatcagacatcggcacatatcgaacaccgacacaaacactcttttaaactaaagtgtcaaagctacttgggtgttaactagtttgtaagttggtcaattaaaaacaaaacaagaaatatactgaaaagccaataaggtcaagattctgctggtgtaattattatattgtcaaaaatcaaaataatgtttttttcttgtaaaagaaatacgaaatataagttgacattgattgctagattatgatgtttaccaactcttgtctgcatgggctagttatacttaatagctgaatttcttgcaacttaatttaatgcatcaaagttagaatagtatgagctacatactttatatgcccataattctaaatatcacattgaattttgtgtatttaattgtgattatgaaagatgagaccctaaatagtagttgatgatgcaggca

SEQ ID NO: 4756 - DNA, 2331 bp, Medicago truncatula; identical to SEQ ID NO: 4731
  Intron number 2 from transcript AC235488_28.1 (locus AC235 488_28) derived from phytozome v7.0 (chr-ID AC235488; pos 123578 to 125908 reverse strand)

SEQ ID NO: 4757 - DNA, 2566 bp, Medicago truncatula
  Intron number 1 from transcript Medtr3g110490.1 (locus Med tr3g110490) derived from phytozome v7.0 (chr-ID MtChr3; po s 27844696 to 27847261 reverse strand)
aaggttcggtttttacgtttcttcttagttttatattatatttttctcaatgttcttgttattaatttagagtatatttggattgattatttgagcttatgaaacggttcgggagaacttatagcttatattaaaatatttgatgactttattttatcgtttgttatagatggtaatagcttataaataagtgcttaaatgataagtgcatatgttataaacacttaattaagctgtttatgtaaaaagggtataaacagttgggcgttgttttgataaacaagtttttttgcaacttatagcatacatgcttattaaataagtggttatgaataagctatttctgtaatataagataaaataaagtcaaactgatttcgtataagctataagttgtttcattatactatcttgaagagcttatgaaaataagctgaaaacagcttgtgaacatgtcataagctgttttcttgaattttcaaaacagtttcactatgcttatgacaatagataactcaaataagtcaattcaaacaggcccttagtttatgaaattaacaaaatttgattttgtaaattctcaatcacataatgtctatgacatccaatttcaggaactaaattgaatgattcaaaaggactaatttgataaaaagatgtttattttccaaatctattttgaaatattaataatttcataaacaaaattggcactgtactacaatttggagattgattttattgatagtatattgattttataggcgttgttgtttatgcattggtgtgattacatgagaaggttaagtgatggatttgatgacacgaataagtttaccttagaagatttacggattttcagcataggtataaacttaaaatactcttttaagcttgaagagaagaaagaaaaagtataatctttttgggctaattagttgtgttactatgtgatgttacttgcactcaaaagtcatggctttaacctgtcttattctcaataggatgctacagtcgttatgtttcatacattttcattgaaatgggcttgaactctgtcacatggttatgttctgttatgtatatctgatctttaatgttgtcattgatattcgccttagctcttgaatggtagatgtgaggtgtgtatgaatgattcatgtgtaggattctttcataggctgcatttaaatgttgatttgaagagaaaattaactatctaataaatgaagagaataagtagaatgtagccagggtgttgttatgaatgaggaaaatagagaaaataattgacagacggtaacacaacaatgttatgcagagacttttaaacataaatttcccttgcaaaattagtacataacactgtccctcaatacgatacatcatttttatgcagatttttacatacatcagtaatcactatctagggtttagtgaaaatacaacctaattggtctgctcttagtaggttttaacagaattgactctttatgaagttcggaacaaaacatctacctgcatttatgcacatagcttttgtgtggaatgcaggatctgttagctatgtgtgtgtaaaccaagctccttcaataaacgtgagccattgttctatcctcagattcaacattagagccaacaacactacccttagtacttttccaatataaaagacaaataaccttagagtaatgtttttatggttcctacaaaatcactattgtactcccctgggcaaatatccattttaggcggatagtaccgacatgcaaataagatcccacatatgattcgattcaagaagtaccactgtaggagtgtttaggggatcaacagagattggaacataagaagcagtaagaaaatatgattctaaagagttaactcttgcgatattactaaactctaccacacatatatgagttagatcatatgtaaaatctcttttgcatgaactttgacaagatcgataaactttcaattagtcaattctatagttttaccctatatttatacatggttttggctactgatatatgttttcaaataatattttataaacttgcatgagatcaagatttaggtataggatttgggtttatcaactcctcactataccaagactatcgagtttgacatgaaaacaacctttagcattgttgatgatctaagctcttaagtattgtcgtggataggcaattctacctagtgggaacaaactttcaagtttgctgaaattattaatatatactgtcaagctagtttttttttcatatatacatttgggctataagaaaaaaccttgagcaatttttctaaattgctttgttcatgtccttatgctactaaactttatggttaaaattagcagtttaaccatataatgtagtgaatatctaatatctaatataaattcaaccaaaagaaagataggaatgcaaaagcttaattttatcaaatttttagtgtttactttgatttaattgatctaaaactttgaaatgcattggttgtttattgacaaacttttcctctctcagttgtacgatatagtgcgcaaagaaat

SEQ ID NO: 4758 - DNA, 2716 bp, Medicago truncatula
  Intron number 1 from transcript Medtr5g075170.1 (locus Med tr5g075170) derived from phytozome v7.0 (chr-ID MtChr5; po s 27339122 to 27341837)
gcgccgtcattggtggtgatgaccaccgtcattgttgaagaacatggcccgtcattgctatctctaaagcacaatcctcctctataaattcttggaatgatgatgctttgatgcagagatacaaacgagtgttcttcatcttggcttaaactttttcatcacattaagaagcaaattcctcaccactttcatctaaacaccatattgctttgatagcatgttacaaatcacaagatcaaacatatgaagattcatctcatacgatgagataacaaagatagacgagaaaaattcttagaattcatattgaaaaattgttaaaagaaaaagataataaatgagtatatgagattctctatatagagcgcctgtgatgaattaacaaataaactacctacttaaaaaaacaatttaactacatattaacaaacgcttattaactatctttatattttcaataaatatttccgttcttattttacttgacatttacctttcctcttcaaattatttacacaaggatagaaggcaagcgggcaacaagctgcgccgctaggtttgttggatggtaaaaccattcctcgaaaaaaaaatttgatgactttaattattttgattaatatatacttttttgaaagtaagataatgacgcccttgctaacaaatgatccacattgtttgcttgtcgccagatgaaacttatactaaagtttggtaaactagagagtgaagctttacaataatttagaacaactcctaattcggaactggtaccaattttgttggagatgtcatcaacaacttgcttacagtcaagttctatggacaccgccattaattctcgattcctaagccacattatcgtctcttttggaccgcatgcttccgcttcttatggttatggaatgccttgaaaccaagttgtttttgctgctatatactcaccattagcatccctctgacacattcttataccgtaacctttgatccttaaaaattgccgcatccacattgcacttaaccacccaaagctagttttctccacatggtctcattgttgttactgttctgtgatgtgcaagttctgatacctgaacctaaaatgtttgtcatacgttgctgatttgaacgcacctgttgcgattgaagcaaagattcacgagccagtcaaactgatgttgcggctcgggtttcaacggcatcccacaatatgcttccaaatgcaccagatggtcataacaaacatgtgtaggttatcatgggacaacaatttgatcaattggaaaaaaagatcggcaaaaccatcaactatttccaatttatcatggataaaattccacagtctcgcttcagcccatacctcctccaccttactgcatccaaaaaatacgggccaatcattttcataataagatccctcacaatgaacacaccgatcccttcattgaactcctctagtgtgaagtcttacccttgtgaggagacaacctcatgctacacgccacaagaacactttgactttttgaggaattttcatgtaccatattttagatcatgattatccattaagctttctgtcatatagtggtatgccgaccttaggatgtactctccatgtgatgtgaatttcctagaacacttatgtgaaattggcataatcaagatttgatttgccacttgaggattgaagtagaaattaaccagatcaactatccattttccagtgtcactatctattaactctcccgccttcatatcatccacatcgttttgcaaagtgcctagaatataattttcctcgtggtctctaatccatgtatccttccacattttgattttttttaccatcacctattctccatctgaggcctccattaactactacatgtgaagcatggatactaagctaaatgaaagtatgaagttgatgattaagatgaagaagaggtgaaaggaagaagatgaagaaagcaaaaaaaaaaatatagttgtttatcccctgtgacgtggcataaggttcagtccacgtggaggtgccacatgtacagttaactaacacgtcataaagtttaacagccaaagtaaataaagggggtaattgactaacatttgacaatttaatggatttttttgaagtttcttaaatgtcagggttttttgacgaaagttataatttctgatttttttttttgcatattcactcataaaatatcatatatttgacccaaccccacttatgttatgtcatagaattgcttagcaaaaaatatcatcccccacatgaaaacccgaaattctagagttagcatcatcttatttgtccaaaggtgttatattacaatggtaaaattttgatattgcaaattcaaagaatatagttcgaattcctcaaagacgttgtgaaatgatgtcactctaattaatgataattttttgggatgtctttaccctccactactattgacccaagagaatttgctttttgtccattgagtatagtaatgtgtttggttagtagtaatgtgtgtgtttgattttataatgaacattatcatgatatatctatgtacattgcaaaattatggaatatcattagagcttacacatgctttagttttggaatatcatttgttttttagttttacattcacttctgaacttttagaattttactatctttctttgcatgttttaaccatatgttaaaaaggaaatc

SEQ ID NO: 4759 - DNA, 1661 bp, Medicago truncatula
  Intron number 2 from transcript Medtr2g126370.1 (locus Med tr2g126370) derived from phytozome v7.0 (chr-ID MtChr2; po s 30599536 to 30601196)
tcaagaatattggtggtggtaacattctttccaaggtgcttcttttcttccttctttttattttattttatttttgcttttattatccattttttttacttaacttagttcttaggtttctgttatttgtttgttgtacggttagatctatgaagcactgacacagacaccaccagcactgataataatttgagcagataaattaatttaatgtaatcactagtgtctacctctatcgcacaccggacacgaatttgatcagaagtaccggtgctattgatgattagatcatcatataattgaacaaaattattacagtagcttattgttaatctcatcaattgtgattcagatttcatgatcaataaataattcaatctgaaattttggttaattgtaatttttagtggaattttgccactgttttggcttcatcatcactaaccgtcaaatctctgatctgcttgatgagatttgttctttcaaacatggagattgaattttctgtgatctttgacttgtagcttgttgacttgaactgataaaatcataaatgtttgaagggtagtgaaggaatagttagttggaaggataaaggattagttttttttttttttttttttaagtccaaaggttagatttttattttttgtgaaaaagaaaaagggaaaaaaattagattataagaatgaaaaaaagggaaagtgtaagagaagggtggctgggattggtccatggataagacagaagttcatcaaggcaagaatatgtttcttaccaatcacatttaatgttcttttgtactcagaatcttgattgtttttgctctttgtgttggtgaaataattgttagaagaaaataataagctaaaaaaagtaaatctctttaggccttgagaagttcttggcaaatgattcagcttggattgtaaagtttgctattatgtctcagacagtttacatattttcatttagattattagtgatcacataatgttttgctacttcaaatgtttaatgtttgattttaatagtgaagggaaagttattacaatgttctggttccttaatttgttcatttgaatctatttgttgcctgtcggcctgaaattaaaatgaccttttgttcattaagctggtctttcaactcaataacttcaaattttatcatacttatcctttgtcctgcatatgctatgttttatcccaaaaaacatatgaacacatatgaactcaaaggaaacaaacctggatctttgttaggtttgtgttagtagcttgacttcatccttatcaaagcctctgatgggatatttttaagaatgggttcaaatgctttaccttaacaatctattcttttgatcttaaccttgttcattttagggttagacttttgcttggagctcccttcgttttagcataagtgcatgcatattattactgaagatcatccacttatgtttacatgccttagtacctgatgaaaatatttttgtttcacttttgtacctttattacacgatggaaggataatttttcacttttggacctttattttccatgtacatcgatgttgattgttgatttatgtgttgctaattacattcacttattctttttttttagataagacaaaactttgaggagacagttggattcgg

SEQ ID NO: 4760 - DNA, 1319 bp, Medicago truncatula
  Intron number 1 from transcript Medtr8g093080.1 (locus Med tr8g093080) derived from phytozome v7.0 (chr-ID MtChr8; po s 20323817 to 20325135)
gccatatcccttttcctcgttacaaaactaacaccaactcctaaggtataatatatgtactgctgctacacattttcattttctatgaccatgttcttaaattaatatgtttttgagggaagtctaaaagaggctacactctttggattatgagtccctaaacttaattagatattaaagcctaatatattaaacacgtatattaaatcccctaaactaagtttagctaaaatttagaaactaaacccactttagttgatatggtagtattgatttgggacttgagagttttcttaaggtattaggttcgtttcttccgataccaatttaggtaggctaatttaacttctttaaaaaaaaaactaaaatttagaaactataataagatttgtcgctgtatttcaaattttttattatctttacaaacatataagcaccctaaattgtgcagaataagcaactgttttttaaaataaaccatctcataatattgaggtttaccataatataaaatctctttcaaaaaattactctatgattgccgtgtacttaaagtacttgctgctatgcggggtccatattgaatgggataagaatttgggaatagatgtttaaaaagtgtgacagatatcgttgtcctaagagtattggttaaacatccaaaataagtaagtttttaataaaatgttgtgtaatcataacttgataaaaaataatatcttatatttttaagacaaaatttttatttgtagatttcttaactaatgctctaaggacactagttagcaaaatcgtagttttatatatgtggttcataacttacttcatatgtacatttatatgtttaatttttccttaggaattgtcttgttcatccaactacaatatgtccatccatgcacttaaacaatgacttatgacttgtcggtgcacttaataatgaaaaattgatgatcctaatcatatatcctatattgtccatcgaataaactataaaatatcaatggccccaagcttgctggttcaaacaaatgcacgtgcttgaagtttgaattccaaagaggaaaaaaagtgaataatttctaatttgtgcaaaatgaaaagtgtgtatatattggatagcttgttacatatctgtgcaattaactttataacctttcttcaattttatatgcaaaaacaaaaagaaagaagcaaagaacattcttattcttgtataataagtatttgaaaattttggattcaatattttaacaagttaatcttttcctatatgcttcgcaggttcttgaagatatatccagaacacaataagcttg

SEQ ID NO: 4761 - DNA, 1782 bp, Medicago truncatula
  Intron number 11 from transcript Medtr5g083810.1 (locus Me dtr5g083810) derived from phytozome v7.0 (chr-ID MtChr5; p os 31836693 to 31838474 reverse strand)
ttccaattacttgaggtatcttccccattaaaccttaaaaaattatcttctccttagatcctaaatgtgtatttttgattatggagtttctttctttcatctgagtatgcactatgtgtgagcatgatatacatatattactacgtgtatgtgttaggtagttccactcaattagttgctactattctatttgttagttaattggaaataaatagattgggttagttagagggataggctgtaacatatattcataggaggaagggattagagggagtgatctcatcatcatagggaactgcagactcgatgttctgcaagtttgttgttgtatttaagtagattttccctattctttgtaataaaataccagttttctcctagtgctggtatctgagcttccaccctaggagttcttcatggggcatacctacataataaagacaacaatggagtcacttggtagtaagctgaacactaggtaggcaatcccagatagctgcgtgatgcgacccatcctgaagtgggatacggtattgcgggatggccgctatttggtattttttagacaaattatacgaataatactatgatcacatagttagtgtaaaattaaacaaataattcaaaattcatgaagtatataagtaataaaaaatcacaacccacatgggttggtcttgtggggcaggcttgggaccttggagtgtgctcctctcaaggtcttaggttcgaatcctaccgatgccaatttctgactttaattgccccccccccccccccccccccccctcctctagtggacggtgggattagtctctggattagtcggtccttggaccggataccgagtttttttttaaaagtaataaaaaaatcacaagtattcatcaaaacatacatttaaataactacaaaattaaaggaaacagaagggagaaaatcagataggggtctgagtggaaaagatatcataacatgggaaaaagtcagaacagagagaggggaataaataatatctgaacatagggaataaatctcaaaataaggaggaggaaataatagcaaaacagacgagaaaagtatcaaaacagatagaggtttgaggggaaagtcaaaacagggaagatttcttttttcttccgcgcttatattaatagtaattaatcggtttaggttttcctattagtgatgaaatttctacattctggtgagcttttgggtgtacatggataagagatacaatctctcttacttttttttttttggtggtggccgggattcgaaccccggaccttgcatatattatgcattgttcttccttaccaactgagctaagctcacggggacacaatctttgttactatgttcatgatgcaaattctaagaaattaaagaatattattcactgtttttttttaataagcttattcactgttacttctgaagcacgcctaggttagaatcttacaaagtcatccgagatagaaaaggaaacacactgattttggatcccaggacacttatggtttcctaggccagaatccattatcaaaggtgtcaattctattgagggatctgttacagaatatataatatttcctaatatagactgcaatctaatcagtgtcagattacgattttcctcatgaattgttttaatatagatgctgtgtatatggccatatttactggtaattttgttttcctgcatcactttgagaaattgcatgtcattcctaatattattacaggaaaaagcagacattaaggataaagaaa

SEQ ID NO: 4762 - DNA, 3165 bp, Medicago truncatula
  Intron number 1 from transcript Medtr6g096350.1 (locus Med tr6g096350) derived from phytozome v7.0 (chr-ID MtChr6; po s 21001923 to 21005087)
aaaaacctccaaatcaaatcgacgaaataccaaaagtatccaaaaataatatgtatttttttttgaaaagatccataaatattaaattgttatccatttaattgttaaatattcaatatttaaatggtggctaacattcatttgtacattacaaaatttgaatgagcttttttttttttttttttttttaattttcaattcaaactgccaaagatgataaccatgctttggtcactattcaagactctaaaggcttgtttgatctcataatcagtaagtttcatatatttgaaatgaatgtatttgaattccaaaagaaaattcaagatgaatttcaacttcctgatataggttagtatcatttttcccttccaactaaatattaagtctaatttttagtcattaaatataccttgcaattttttattttttatgttttcaatactctatattaatattatgcagtagtttcactatagtataagttatgatatatttaaatatatgacattttaccttttgtttcaaatagtgatgtctaaagacaatacatgtaccagacattatctccatgactttagaacttggagcagcacgctatattgttaacgcattttgtgctgaaaactttagagacatttggaagtatgcattggaagcaaagaaaaataaactatttattgatagtttatctgcagcaagtgaagaacaagagacattaactgatctactacaaacaaaaaagaaatgtagtaaaagaaagagttgtgattatagccaagatgaaggggagtttgaaattaataagaaatttagtaaaatcatcacaactccccttcatcttaacaactccaaactcccattcaccttggtgattaccaaaactctttcttttactacatttcttttttgtttgtagttgatcagttgatgtttcttcttcttcacttgctgcaaataaactatcaataaatagtttatttttctttgcttccatagcatatttccaaatatctctaaggtcttcaggacaaaatggtttaacaatgtagtgtgttgctccgtgttctaaagtcatggagattatgtctgatgtattgtctttcgacatcactatttgaaacaaaaggtaaaagtcatatatttaaacatatcataatgtatacgatagtgaaagaactgcataatattaataaagagtattcaaaacataaaaagttaaaaaggacaaaattgcaaggtagatttaatagttgggagtgaaaaatgatacttacctataataggaagttgaaattcatcttgaatttgcttttggaattcaaatccattcattacaaatatatgaaactcgccgattatgagatcaaacaagcctttagagtttcgaagagtgaccaaagcattttttttttttacaaaaagagtgaccaaagcatgatgagcatctttggcagtttgaactgaaaattaaaacaaaataaataaaataagctcattgaaatttatttttctttgcttttgttctaaagctgaaggctaaagctgaatattgttttaaagacacaagcatttgttgttgtacatttaatatttcttcggaacattaagaaagacaatgaggttgaaatttaactattttgatttgaattcttcttaatagacttttatggtcaatacaaaggtttatgtatatctagacatgtggaactcaatgatttggtataagaaaaagttaaaaagaacaaagaaattgtttctaatgaccatgtcaaacatatatctgtcaaccatgtcaaaccatgtcaaacaagccttttggaattcaaacaaagaaattgctataactattttgtttctatttgaaattgttccttatgtaacgtagcatgactatactccactacttaaattgcaattgtacatcaaaatgacttttttatattttacggaatgattagtctttgaatttgttgatactatctaaattttgagttaaatttgttcttgttatctaaatccttccataatattcctgaagcatatagttatttttggagtatataaattttctgctttcataattgagttaaattttttctggcttctatatttaaataaattttcttcgcacttagcgttccatttaattcatcgattcttttccatgcacttaaaaaaatgttataaaaaaaaagtagttaatgattaatatgatagtctttgttgaaaaaagaggtacatttattgcaccttatcctatgcaatgttgcataggttagaaaaacataaataaacctctatgaattaacaagatcgaataagccaatgaaacattggcatatatttgtgggttataccatggatatccaaaactcagtaagcctttttggtccatcctcccaattcttgcactttaaagaagtagaaaacagaagctgtgaatatataaaatcagagtattttttaatcatatctaaacagagaatctatattgttttgaaagaatgacttcattcttctaatacagttgaaacatagcacactaaatgaggcaaacagtgaggtggaaatttgattcttctaatttcaaacaaagacacaaatgagaagaaaacatatcggtatcaaattttaattccttgtgtgcaatctctttcatatattatgaagtggtgataaattttaccttatgacattggatgtggtctctcaaccacttcataaaatggagcatattatgattctatttctaaaagctgaacatgaaaaataataaagaaagaatcttaatggaaaaacttatttcaagactatatatgatactagttccttcaagcatatgccattgttcttaaaaaaggagaagtagtagcattcaagagaagtatatcctaagcataaaacccttgagaattagcctatataacttgttgggagtgtcatttgatacttagcaaactagacacattaaagtaagcaaatcagtcatagggcatgtctctattggcaggtgatatttcatttgacttagaggctctagaaattcacttgccaaaggagagctgccctgcgagtgtttagcttaaacattttttacatttctccttgttattcattgcaaggagtttctcagctataaataaaggcatggttttgttaggg

SEQ ID NO: 4763 - DNA, 4001 bp, Medicago truncatula
  Intron number 1 from transcript Medtr3g114130.2 (locus Med tr3g114130) derived from phytozome v7.0 (chr-ID MtChr3; po s 28803921 to 28807921 reverse strand)
aaaggagagaggataaagaagaaaaaaaaagagtggtcaagaaattgtgtgtgaaaagattaccatgaccattgatcatgtctcacgttatattttgtttagcctgattttttttttaagttgttaaataaatttatctgtaaaataaaggttataaataaataaataaaaaaagagtaatatcacgtttactttaaatatttaagaccggaggtatttataaatattctatccattagggcaagttgtgtaattctcaaattttagttatgggtaaaatcacatgcaaaagtacaatttgcaattcgcctactaggtactgtagcaacaggtccctggtaagcaatctggactgcatgttggttttgaggcacatccaacagtttaaacacggtcacccacggtgagagacctgatttggtctcccacgctagaagtcgccgacttcatcagcttcaaacttacatgattttaaaacggtacagtttaaaaagtaagaggtatatagttatagtagttagtaacgataaaattaaatttttaaatattttaaaaatcattacaaaaaaacacattaacaataaaaaattagaagtgtcaagtgatcaatgtttgtgtcttaagtaactgagtaattgtcaaagtgctatgttgatctcaacatgttctatgtgtagacattatgtaggagtaaggtgatgctctgaagaagctcctttcttttgatgcttgtgatgcatgattgaagattttgctttgagacatatcttattgaccgcgtgccaagtatttatgtttttgttaggagatgtacacaggaagaaaactatgttatgttttacttttttatcttcttatcttggtcatttttaaatattacaagatgattccacatgtttgatggaatcaaactttaaaccttttatcgaagctattttataatatctcttgttattcgttgtgattttcgtaagagcattttcgagcattgctatttatctagatagattttatcaagaattgattaagaaaatgtctcagccagttaaatttgttatttgtcaaaaatcaaaggaggtaatgatgtataattaaggaaaggtgttagcaaatacactgtcttaaaattttctcgatacagtttgttgttgtatctataatttcccttttcgtaaatgtttctcactatattatatattcaaaagaaattttattaaagtcccacttttccgcaagggaaatgtcaaaccaaactattttaagaaaaagattctacaataaactttagggtttagagagtgacaaaaaactcatgttcggactgtataaatttcactttcataaaagacttttgggtggacttaaagaaatgttttttttagatttatgaatgaattccatgcaaacaagaggttggtaacagcttctaatagtacttttatagtcttgatctctaaataggaacctctctctcacttatccgccatgtatctttagtgggatgcatgtataaagtgccaacgaaggtcttagcaaatagactaaacaaaatgtttttaaggtgatttaaaacgataaatttacgtttgtgaagagaaaacatattttagatgacatcactattgcaaatgatgtggtggctaaggtaaataaatagaacaaacagttgatcttatttaaggtggactttggtaaaacatgtaattcaagaagagtcggattattttgagtatgtcttgatgaaaatcaattttccttagaagtggaggaaatgaattttggaatgtgtaactacagcttgaacatatgtatattagtattttgaacacgtttcatatcattttatgtcataaattgggagaatgatgaatgcgtttgaaatttggctaaatatcataaattttttagcacgttcatgaaattatgagatttcttgttatttcctcactctctaaaaaatgaataaaagagtgtatatataaaatactttgaaagatagtgtgttatagacttataattatttttcttatgtgattccttgaaattcatagaataatctgaaatcaaaatttaaatcttgatagtcttaaaaatcattaaaatattttgaaacaaaaattgtcttattaaaatcgtaatacaatacacctccttatttatttttttaatcaattgatttcatttcacaatacacctccttagatttcacatatttttcaaaaaaagataatttcaaaagaaagaaatataaatatcagtagaatatcctgcattttagaatgacaattcattcacacatctttgtcctatttttccacgtccattttagattgtcaatatttgatttttctattcttgtcgactactatgataactactttcctttctatttgccattcgtgcaccttattaaataatgtcctcaaaaattaagtctaagttttcaaaaaattatcgtctttcttcaaaaaataattatcgtcttgtattaatatttttaattttaaaccgaagtaggattaatttagatattttttttaagcaaatgttagtgtattaggttagattttagagttgaacttagattttatagtcgatattcgttcaatgtcgatcaactcatcaattgagttgatactcaaaagatctatatctgatttgttaaattaatttaaaaataagatttgttaaaattaaatttaaagattagaacagattaaattcaaacaaaaaactaccctacttccttaaaaaaaaaactacactacttgcaattacataaaatgataaaattaatttgaaattgggattaaattcgatcattttttataggcaaaattgataaaattgcaaataaaagagtttgaatgaatgataaaattagaacaaaaactgcactacttgtgattaaagagaatgatgtaggtaaatcattcgtaacaaattcgtaaggtttagttcaactgatattgtcaaaaaaattaggttggacatctctatccgaatttgaactatgaaccttgcagttgtgtgcatgtgtgttttatatcaatcacaataaagaaaggcatattattgtgtttcattgtatgtttgtttttatcgcatttgataaggataataaatattttagaatatacaacaatcaaataagtgttttgagtcttttttgatgatatgtaattcggaaaaacaagacagtacgtggaagataaaaggatttgaagtatgaagttaaattgtatttagaaggtttttgaagacattaagttccaagcattttaagatagaagaacgctaaaaaaaagaacggaaaactgcagaatttgcccttaggggttgcccaatgcgcatgtaaaacttgcccttgtgcttttgtctatgcatcttatacttttgttgttgggcagaacacactatttacttgtttttcaaacagaatcggagggaaaaacccataaatcataacttagcacataaacaaagttgtctatatgtctctaaaggagacttttacacacacttttataggttgatggtacaaggcaagagtcaaacatcacaagttttaaaccaaagtttccatctatcttgttctttagagtatgtttttcttttcttttgtaatgattcacgttcttttgagtaactaaatctcgttgattatttttatttggtttatgatcatactcttatataaataattagggtaatgttaacaatgtctttattgtttaagcaatcaaagtagtaatatttatataaaaaattgtgtacttattacttttacatgtgtttaaggtcaaaccccaacctctgttcataatgtcttcaatcaatagctatcaattgagccacatttacaagacaattaaataatttctttaaattattttaaatatacatgtaataatatgttgttaaaatcaattaataatgcatgaaatccgtgacaaaaaaatctagtgtagagaagaattagataccttattccgttttga

SEQ ID NO: 4764 - DNA, 1123 bp, Medicago truncatula
  Intron number 2 from transcript Medtr3g094140.1 (locus Med tr3g094140) derived from phytozome v7.0 (chr-ID MtChr3; po s 22502843 to 22503965)
aatcctaattctagaattcttgctttgaaaggtttgctactattccttttttgtttttgttttgaacttgtaagttgtgtttgtagctggtaatgttgtggattatatagctgtgaacatttcgttatcggtttgaattttgtatattgttgtaaagatcaatatttattaggagcttaaatttattatttatatcttaggagatgtaaaatttaagttttgatgtttttgccatagcatgtgatttccactacactcaaacatggaaaatagttgaaagtgttgtttttgaaatttataatgcattgaatggtgccgcggtttttcgaaaaaactttctatatcgcgtttccttggcgcgagaccccatttccatatatgcaactattttattaaacgaaaacgacttagttttaattcgattgacttcaattaggagcggactagaaagtcttttagatatgtgctttatgcatcccgattgctagggtttcatacccgtgaagcatagatctttgacggacctgacaaaacgaatcgatttgtattcttatgttttaattctatgtatgaaatcaaaattatgtccggagattacacttcagtcatgcgtgcttaaatgacacacgaccctcttccattttttaatcgaatactcgccactcgtatttgtttggaaaattgcagtcacctcttctagatttgttgaaaatacaccctttacagaatagaggaacactgtttttatgttatagagaggatatgttgcatttaaacatatctcaagggagatgggtggaatttcccttaactattatatattaagagaaaaaaatcaaaaaatttgtttttatatcttatttttgtgtatgagaactattgtaataaaaaagaaagacgattgtaattaagatagcataattttttttatttttttaaagatagcctaatgttcgtccaaccatttggaaataatgtaatgtcttactcttatttgattatttcatctgcttctctttgtgtgcactcatttgtatatttaggaattagaaatatattgacttatgaggtgcatttttctcttgaagctcaactccaaggaacaactcaagatcatttacaa

SEQ ID NO: 4765 - DNA, 695 bp, Medicago truncatula; identical to SEQ ID NO: 4372
  Intron number 10 from transcript Medtr4g110300.1 (locus Me dtr4g110300) derived from phytozome v7.0 (chr-ID MtChr4; p os 24960078 to 24960772)

SEQ ID NO: 4766 - DNA, 4339 bp, Medicago truncatula
  Intron number 2 from transcript Medtr3g029090.1 (locus Med tr3g029090) derived from phytozome v7.0 (chr-ID MtChr3; po s 7584601 to 7588939)
attcagtgtctctccaattcatccgaccgtgacatgtatatctggcagcgaaaattatgattcaattttgaacttaagtttgttgaattgaacgtaaggcctgtttggattgacatatataatattttatgtgattctgtgtgatttttttttagaatgaaattatgtttcttaatatataaacagacatggttttggtttgtttacttgaaaacctggagaaaatactttaacctgaaatttttgtatttctcttattgtgttttatggacatttgattggtaagtcatgaattgatatgttgatcaagatctccaaagaagtgttgttatgttatatcgattgggagccattgattttggctaaagaatgactgttgagaaagaaatagataagactgaaggtgaaccataaccaaatgcagtttttatgattgcttgaaaccttgaactttcatatatacgcacacaacctagcttggtattaaaatgagtttttgatgagagttgcaatgcattataggaatccaactatagtaatgcaatttgttctgtcaaacttgctttctccatatttaactaaagataattgatgaatccacgaatgactaatgttgtcttatctgtttcggttcattaattcttttggtatttaatagccaatggaaagatttgtttcttttgatcaaatttaggtagatttttgttgttgtcattgtgtttgatttgtacggtatttaaatttctacttcaatttacaatacaaggctggggtgctcgatgaggggatgctttgacgcgtgttgtgagctgtttgcgcaggattgtgctgttgcctgagttttttggcacctgcagagactgtttttggacaatcatgagctgctgctgtttgtgttcggtggtggtagttaggggagtcgccgacagttgctggttaaagttcatataaaagtttgcaggtaaaaagctcaaagaatggacaatgattgacttctaaagaatatgttgaaggaaaatttgttttagtttcaaattattatgttgttgagtaagcttatcaatctaccaaagcttactactctctgttcctcactttgtcattggtgtagtccttttcatttacatttgcgggtaaggtgcaagcatacatgtgtcagttatcacaaactttaattttttttttctttgaactattttggagttgttactatcctaatttttgggcaggtatagatatgatttgtcattgtgatctcttactccattgaatgataaatttgaaagtttagtcgtatggtgaaagtatgatatgttgatacttgataagcctcattcccacatatttttctgttattcatgttgtctatttaccatctctcacttctaataaggccttgctattattattcatgttctgatattccttaccattattcatgtcctgatattccttactacttatttatcaatgttttgtgactttattttaataaggccctgtgtttttaacaaaaaagaaacaaaatattatttatgtacttctaaataagaatgatgattaatttcaaaacatgtgatttgtaggacaattgcaggggagcattggacaatagctattacaaaatcaatcatctatgtgatagtgcagaagacattaaaaaatttaaggttttgagaagaggacaaattgaagtgagagattaagatcttttacatttacagaaagagtagtaaaaaagatctttcatattgtgtcattatcaaatttgctttaccattttgacatggaacttccgattgtagaaaccatgaagagttagttttataaactatttgtaattgtgtttaatggaatctttgtaatagattagaagagctctttagaaatattatatagcactccaggtatttggtaatgtttattgagatgaagaatgatatagttgaaaaaaaatcttggcaactcatccaaattttataattatcaatttcaattttttaatttcgtactggactctattttctactaattcccaacactttctatctatgttttgtgaattacattttatctttgcctttttttatatacttcttggagaaattaatttatatttttttcttggttttaaaagctttatttgactttttcttaatattagaggttattcattgaaacagtgaaataaatgaactacattttattatctcactgtttcatttttatcataactgtagttttagttgaaccggttgcagattgtcattctctacaatttttgtcattgtgccacaaattttggttatattaatttttcttttaaaatacatattcacatcactaatctttcattaattacatcttatcaacgaacctctaaaaccgtcccctttcttatcctaatttttccactccgagccaaaattaaataattaaatagttattccaagctcataaaacccgtgcgatgtttggttatttttttaacagaagtctcatctcttcaatgtttggttatttttttaacattgatatgtaacattgtaggtggcatttaacctacacaagtaactctttttgtgtatcatacaaaaatgagtttttcaccattgatatattagtattttattcaatggttaggattgaagaaaggttaactctttagcaagtttatgtgatacaatgtattatttgcaaagtcacccccacattatatgtaattatatttacgattttttagtattaattaaaatttgatgaattgtatactcatttgatgacaaaatttagtccattttttttatttcttgcaatttaattaaataacatttaattttgtcaaaaaaaaagtaagttacatttatttaaattttattgacttttttcaccaaaaaaaatactctctccggtcctatttacaagataaagttgactttttagatacattgaataatgtatgtatctagtcaagaacctaaatcaaatacataaattattttatgtatctaaaaagtaaattgtctcttgtaaataggaccggagggagtaaaatttattgacttacgaatcattttaattgataagaaccattaattatttttggactccttcaaaaaaaattaaatatttttgaacaaacatttaattagtgattttttggtcaaattttaggcattattctcctctaagagaaaaaaaaataaaaaattatcagcaatgaagatgagctgaggaaatgaacacaatatccttttgttgcttgaattgaaccgaaaataaaaaatacaaattgaaagttcacagaaattgaaattcagataagaagtccaacgtgttctttgcatcagaaaaattgatatgtattcacatgaatcatcattttgtgagttctccattcaacaaaaattcaactttctacgaccaaaatttataaattcataaacaaacccaaatgaaataaagtagatcaaaaaattgaaccacatgaagatatgaacgactttaatgttgaacacaaatcaccaatttaatcatgaaattgaaggtgtcaaataatttggtcaactgactcgatttagtttcaattttatttaataaactaacaaaaatctaacaatagatgcttagaaaggttagagctgaatacaaaaatatttgatctcaaaagaatggagagaaagaatcacagatctcaaaatcaaaagaaatgaaagagggagagaaagagaggtatgcctatggagtgagaacctgggagtgaaaccagagaaagaggaatgacggtgaaggtgaaggtgacaaccccaaatactggtgtgagagtgagaacctaagaactcagactggtgttgatgttggtgaaatgttcttcgttcataaatgatttccagacaattaataaaaaatacattgaagaaattatgttggccaaaatagtatattaggttgttttggggagatactttgatttaaacaataaaaaggtcaatttagaattacacataaaactggttcacttgctattaaaggttaaagaaactttttgtatggtacacaaaaagagttacttgtgtaggttaaatgccaccaacatagtatgatgcatttgatttacataataatttagatagaggtgattgcattgcagtgtagtgcatcctatctttccttgaaattgaatcaggcttgtcgtactggctgttaataaggcggaatagtcttgaaacttccattctaggctgactgtgatgatttttgagtctcactggacaagttatttgttaatttgttctttgtagcaggtttagagattaaggggtagattagtttgagcagt

SEQ ID NO: 4767 - DNA, 1470 bp, Medicago truncatula
  Intron number 3 from transcript Medtr2g038730.1 (locus Med tr2g038730) derived from phytozome v7.0 (chr-ID MtChr2; po s 10870662 to 10872131 reverse strand)
cactcctgaaggtatttatttaactctcttaggatgcatgcaagctccattgttaatgctttctttctttgataatttctagttgttaatggtctttaagtatgaaagacaaatgctaatcatctcaaagcgttaggaacccgaattaagggataaaaaaaaaggtagtattattgattaataaggaaatatcacgtaaggttaacccctgtactccctgagcaaaagctcctcagaaaatagatgattctctctccgcccaatcttaaaggttctaattgagtgcctctaccacttgctacgcctcccctgaatatatttctgtttcctctataacagattttccatgtaaacaaattgtaactatttatcctccatttggcccatttgttggtctaaggtcaaaacccagtacctaacatatagtaaaatttacagtggcaaaattgattttgattgaattcattttgtaaaattgattttagttaaaagcaatttaaggtaaaataatttactatgtttggataagttcatgtgaaagtgagttgaaaaataaatttgagtgtaaaatccatgtttggaggttaaagctacaaatcctagcttcacgtaaaaatcggatgaagatcctctccatttggcaaaataaatggagatttgcaagttggagagagatagacacaaaaaatagatggtgggtcctaccaccaagtgggtcccaccatcattaattatattttatttttttcaagattttatgtgtctttatctctccaaattgaagaaattgagaaacgcataaatggagaggatcttcacccgtaaaaatcaactttggaggcaaaatcaattttaattagaaccctcaaacatacctaaaatcaatttaaatctttagaatcactgttgactctcccaaaatgaatccaacatgcatttagcatctgtgtttgtgttatgaagaatggtcggagcttcagttcctaaaaatcctaattcattttcacaattagttcagaaaaatagggcctaaatttatgcggagtattttgtttttggttggtgtttagagaattttctctggctatgaagctttcggtccttttcctagtatttcctaagttttacagcaaacacatcaatatagaaactaaaactgatatgaattcttatcagcatctcatagacatgaagatttctctcatctagttgaacttctaccccttgattgcaatttgcagtcattcatctctcatcgcacatcttttacctttttaagttcttacgtagttattaattattatacttatatagtttaaatatattccctcaatttaatgaccttatacttatatagtttaaatatattccctcaatttaatgaccctgcttacaacatgctacatttaactttttgcttgttttgtaacatcaggtgttgcattgatcctgtgtcaatcagatcctgta

SEQ ID NO: 4768 - DNA, 1859 bp, Medicago truncatula
  Intron number 1 from transcript Medtr7g011720.1 (locus Med tr7g011720) derived from phytozome v7.0 (chr-ID MtChr7; po s 2906371 to 2908229 reverse strand)
tttttgttattcttcctgttcctcaggttagaaattttccattattctatatttttttactaaattattataatttttgtgggatttaatttgatatacatcatcaataacttaaatcttttttatatacagatgtatttaatcatatcattacttttattgattaatttttaaaatatctctaaatatctacgtattatgatataatcaaatgtatgaataaaaaagttttacacgatcaatgcatagagatatattttataggttataattttgaatttaattcatatacagtgataattaaagatattttacgttgtcattgaatcaaaattgataaatgaatgaagacattttgattttgatcataatacttctaaattcaaacacatgattagtagtgcatagaaatttagaaattaaactctacgatttttagtttatttttgtaaattaaactttatacgaaatgatattgtttatgtttgatgtggtccactaatatacttttggttcacatgttgtatctcaagtcttggaaaaattcttcaattagtttacttttataatagttttttttttttttttttttaagatgtttttgtttttactacttggtttagttttattagaataataaagaaaaaatgatggaattacatagagtttagtttgatttgtttatagtttatatactcttgaatagatagttgagtacagttttattagtttaataattttaaattttgaagaatgagtaaatattaaaatggaactgaaagaagcactttttaaaaattaaaagtgtaaatttatccttaaaaaatttaaacgtgggtttatttttttgttattttaaggataattatggaagatgttttaggatttgtcaacaaaaaaaaatggaagatgttttaggtatatttttttgttattttaaggataattatggaagatgttttagttttgtaccatcaatgattaattggcctacagccccacacatgtgacattcttaactattaaattgatgcttttcaaattatagttctatgtggttttcatttgtgaccagattgattatagattgtaaccaagattttttattttatttattgttggataaaaggacgaaataattgattcctgaaatattgtggtctacaaacaaagagtttgatccttcaaaaaaaaaaaaaagagtttgatattttctattctttgttaagtaatttttcaacatccatattgtttcatgaaaatttaatttaatttttgaataataaaagataaatataaaatagttctaaaagagtactactcaaaaaagtatgagtcctatagacacattgaataaattaaattgttgaaaacaaatcaactaaaaaataaaatattctagtatgcatgttttttttttttttgacaaatagtatgcatatttatttttggtaataatattgtttctatatttcttttacattaaataatatggtttctatagtttttataaaaattcatctctttataatttgagcctaaattgcacactcaaattcccacgcaaaattgcacatatgtgaaaaaaagtcgatatcatgttacttgattattgccttgttttataaattgttcaataagttaattgttctttgtaaattaatcaaaactatcacattaaactataaacttttatttagtaacaaataagtagataaattttcttttcaaaagtaacataagtgataactagtccttgatatgtttgttcttgttaattctaaataagttttttttgacaatctgattttgttttgtttgcaggttgtgttttggcttgtagtaccaaaattgataag

SEQ ID NO: 4769 - DNA, 5293 bp, Sorghum bicolor
  Intron number 6 from transcript Sb09g017250.1 (locus Sb09g 017250) derived from phytozome v7.0 (chr-ID chromosome_9; pos 43152773 to 43158065)
gacctaatttcgagaaaaatactaaacctagtaaggtaagtgacaccttgctttgtactggtatatgtttcaatgtctttttagttttctgggtatagctgtaacagtggcataatggcatcggcctatgggtgaatcaaatcctcacggatagttctttctcagaaagcatggctaagtaaactagccgaaatgattgttttaggtttcccatgtgtcattctgggtagtttagtaggtaccttttttttttggaaattttctttatgaagagacaataaagaacaaaagagggattctggccccccaacatgcacacacagacgcacccttttagagaaattaactacatgcggcacagacttttatgcaaccattagtgacgatggacttaagtatctgggggcaagtgactaggagaagctcatggagcacatgggctccagctaaacaccggaggctacattcttttgtcactgtttgatgatcaccgaaacttggatcagtgccactgaaaacaaaatctgcaagttgtttccaaaagaagctcccaagccactaaggataaccaacaacttcggaccctttcgtagttctttaggaatgatgcccttgatggcttggcgccaccaacttgagaaatgaatccgtgaaccttatggtgcaactgcaatcaaatgtagcttcttgaaaggttaatgtccagacttgctgagtgagtatgcaggagacaagtatatgttgaattgattcctcagcttgatcgtagaggagcaggttgttggatttggtaatctgcagttggcaagatggtcaaagtccaacatcaaattgttgacagctagccatatgaagaatttctagcacagaggagcacaacatttccaaattgtttccatgacgcaaacctgatggatcaaatgaagtaagcattatatgatgacttgctggtgtaggagccagaccatgtaaatttccatttttgctgatcaggtatgtcttgctgtaggaccagagacagagccagaaacactaattttcctttgatggttttttttggggtgggggtgggggtagtacagagttcctcaaaattcgatttggatcttaaaaaagtcagatatgtagatactcaaccagtggcggagccaggaatcaaaacttgggtattcccatcgataactgaagtcacaagaacaatccaataataaattgttcagcgaatcggcactaaattatgcatgaatcaaactgataactaataaaaaaacttacaaaaaattataatgttgctttaatcctgcgactcttcatggtttggaagcggttgatgatgtccttgtccctaacttatagaaagaactcccgctcaataaatgtaaccaagcaatcattcaagtattgatccccaatcttatttctcaatttgttcttcacataattcatgatagaaaaaactctttcaacactcgcagttgccaccggaagaactagcaccaattttagaagcttataaacagcttcaaatcttccaatcttgtcatgctcaacaagtttaatagaaagctcagcaagacttctcacattcgcaaacctttcatcattgcgcatatcagtaatgtacaaattgagttgagcaggtaggtgaagtaactctaagcttgtgaaatcattaggatagaatccagcaagcttgatcaatttttctttgtcaaacgcagcaaatgaattgaggggactgaatgcagccatgcaaataagcagctctgtgtttacctcatcaaacctatcatcaagttcttgaagctgcctatcaatgacacttaatttacctcatcaaacctatcatcaagttcttgaagctgcctatcaatgacacttaagaacatgtcaacacggtaacgatggagattcttgattttgataaagaacctcctatctcttccaacaggcctatagaatgtgtccatatcaggaacattgattttattcttgatacaaaatgagtccacttctttaaggaaatcatcccacccagtttcatgccgcaacgcatgcagttgcaacttggtcaaagaaatgagttctactgcatcgacaatatcttgatccttcttctgcaaggtatgattcaagtctgttgtgaacccgagtactgtttgcatcaagtgtgccatgaaaacaaactcatatgacttgaatattgtcaacattgtttgtgcgtgtgcacactcagtttgttgagagcgatcattgccaaccattacaagaactttccgaattgaaggatacaaagatataagacgcataactgttttataatgggatccccagcgagtgtctccaggccttgccaaacccatttcttgatttaaaccctttccagtttcaatgtcacctaattctagtgcttctagaaggctctgagcttgtgtgactcgaagcatttgtgtcttcttacaagatttcccaataattttcaatagaaatctaacttgttcaaagaaccaaacacagtctgggttttccttggctacttccacaagagttaactgaagttgatgtgcaaagcaatgaacataatacgcagatggacaatcatccataataagtttctttagaccattagcatgacccttcatgttactagctccatcatagccttgcccgcgtaccctagacaaacttaatgaatgctccatcaataagtcctcaattgcagttttaagtgtcaaagcagtagcgttttctacatggataacacctaggaacctctcaacgatgcagccctttttattaacatatcgcaaacaaagagctagttgttcattttggtaaacatcactagattcatcagcaagaattgcaaaatattcatcaccaaggtcttttatgagaagcttagttgtttctttggcacaacaattagctatctctctttgaatttgaggagcagtcaactgacaattctttggggcattcttcaaaactacctttgcaacctcttcaaagttttcagctagcatatctatcaactctaagaaatttcccttgttaagtgagctatgactttcatcatgtccacgagaagctaaaccttggcgtagaaagtacttagctgcttgaagagaataggacaaacgggccatatactcagtcttatccttatcatttatcctgctgaacttatcatcaattgttttttcaggtgtaatcaaggaaatatatcgctctagagccattctgtggaaactagtcttagaaccacagtgtcttttaatcctctttttcatatgccaatttctccagcccccattcacaaaagcatctccaccagaactataagttttatgtttgaacaaataacagacaaaacagaatgctgcatctttttcgacactatattcaagccatgtgaattcaccaaaccaatcaggcttaaagcgtcgaggcttacctccaatctgccttgtcggaaaatcatgactccatggttgacaaggcccttttgcaatgtatcccctgatcactgaatttctttcattgacattatagcttttgattggaagcctctttccggggtcatgaggaagaagatcaacatcataaataatattatcacttgattcatagcctgagtcatcaccatccctgataggggataaattagaaggttttgtggctgctatgtcaatgtcaagctcattgcttcccatctcaggtgacatccgattagtttctacctcagttattgccacttctctggttgttgtatcatgctgaacggatggattggtttgattatgaacttgactctcatcagtcgccggcacaacagattcaacaataggattttgaggctgagcattaatcccctctgtaactagttgtggcactgatgtagatcctaactccaccttccttgatttttctgctctatcccatagagtcttcaaatcaaccgatttctttttgttcctcattttgcaaaccaatagcaatatcactggctcactgcaaaaacattatgtctctgattctttgaaccaatatttacaaccaaaaattcaagatttaagaaggcaagaagccaagaactgtaacctgtgctgtgtgctgcggcgtcgttgtcctgtccagaggcactcagccaccggctgcgcgcctgcgccgctgcagccttgcgcttggcctggccgcgcgtgccacgagagccgctggaggctggacgccgtctcgcctcctcgcctcgccactcggcagtcgccaccggccgccgcccgcgcgtgcctagggttgccggccgccgcgcgccgagcaagaccgaccgtgccgaaggacggaactacggaagagtgggcgtcggtgtccagcggatgaaaggaattgaggtggatgcaggttaatgggctggttgggccggcctgggattgggaggtgtttgaaggcaggcctaatggtcgtttgattttcttttttgggctcaaatctttgaaaatatcacagaatatcaccttatacatatatatatatacatgtacatacacatatctattaaaaggtgtacaaaaatagctgggtattcccaggaataccagggaatacccctggatccgcctctgtactcaactataacctggatggtgggagttcccttgatgtcttccacccatattctgttattcaaagcctgcgtcacagtgcgctgtttccttgatcttcgatggtttttttttcttgaacgtgcaggagagctgcacatctttgtattaagaagaaaaagggagtaagagcccttaaacacacaccaacacacccaagagactaaggggatgtttggttgctagccatagtctaccactactaactttaggcaagtgtggcaagccacaaaaaatgtggctagcaaattggttgccacactttgccatgcctaaaagaatcttgccacactttttaactctatgacatgtggagcccaaaaaaaatatgcctaaacttagttgtcaaccaaatacttgccaacttggtcaaacttgtcaaaggtaaagtgtggcaaactatggctagcaaccaaacagccccttaagagagtagacatgaagtttagtagttagcaacaccttgccaattcatttcttttgttgctaagtttctgcaagcttattatttttgaaccactgtatattagtagtcttttttcccttatctctttgcatagtagttatcctcgtggttgattttagctatttggtcaggtctcaatcatacaaattgcatcagataaggtagc

SEQ ID NO: 4770 - DNA, 4549 bp, Sorghum bicolor
  Intron number 1 from transcript Sb01g020920.1 (locus Sb01g 020920) derived from phytozome v7.0 (chr-ID chromosome_1; pos 23958161 to 23962709)
caaaggtacgtaattaactaagctaaactgatgagatgatgctataattaaccttttcgatgatctcgatcgatctctaccggataaatatgtcctctaaaattaagcctcgtcacgtggtactagcgaagatgaagctgtgttttgattaaaaaaaaaacatttgagcttcttgtgttatcgtgaatggctgagacaaagaggacaaattgtccagatagctagtagaagcttgttttttcagcttcacgtgcgacgcacaagagagcatctataggaggtccacgcgagaagcgggtaagattttatccgttttggtaagaagctggagaaaaatctataccaaccgagatctaaattggcaccatgtgtccatgtctatacaagtataaacaccaggccaagttggacaagccaagcatctctataccattcctgtactagttggtatatccggcgagaagaagagtctccatcccatactagcctccaagccagccattctggctaacattagtatcggccaaaactcaataagtagcatacttctttgatgttcggttttaagaacttgttaaatcatatttactatatattaaattcaagtttatgtaattcaaacataattatagctaatatcatgcgtacatatatcatatataattatttacataactattactttattaacgcttgacttgaaacggtacaagggcataggtttgaagggaaaaaaaaacaaaagaaaacagtcagtgaaatggtgtcctttaaaaagaactctgaagctaaaaatagaatgctatctggaataggagtatgttccagcactggtgcaacccctgttgcattatctaggtttacatttacataaatagtaatatgagatgagatgagttgaaaataaagtttgatgaggacaaaagtgagggacacgccacttgacttaacagaggctgacgatatgaaacgcatgacgagagcagcccccaaccagtcgttgggagacacggaccgctagttgcctccattctccaatctccaacgcttttctttcgcccaatttaagcagttcctaccaaaaaaacgattcaagacctgtactgcatgctcctcaaataaagccacgcagttggaggacaggagtggcgcagatccacccggtcgccatcgtctgggccacacactgaaaatctcgttctccttgggtttgttgtattcttcagaaccatcatatctcactgtcggcacgtcgctagccgaatgcccagggcgccgagcattattacaggtacagtgcacgtacataagcgtcttggagtagtacacagaaaagtttgttgcttgccagtcactaatacgattccaaatcagtctgtttcggacgatcaaatccaaggggggtcgagtctcattggatttgatggtattagtaaatcactcgattcactattctgtgtcatccaatcctatggcttgctttagccagttcgtcaccgcccttggccttattagggcatctttgaagttactcaacctagaaactattttcttaggcctataatataaggtatccaaaaattgtaggacatattgtgcaaaacaaatgatgcatgtaactctcctttaattgtagagagatcttgtgtttactgtattttaagtctactagtagacactaatgataagtacacatattattggtagttttggcgagttaattcacctagaatacattataatttgagacgaaatttgaatgcttcaataccttatattttacggaaaaatgaagtagatggtgatttctatgttcattaattaggattctaactaaagaaaatgatgatgtggcctcggtgacgagagcttgctggctttactttctccttcgcccacacctctcttccaaccaaggtgaagatgatgaatgacttgacaaggaaaaagagcatatgatctccctggtaggtgagaagggcgtgagaatctaaaacatttgtggcatcaaaatttacctgaagtggcatataaacggtaacaataacatactccctctgtctcactaaaaatgttattttagcattcaaattgtgtcccaataaaaaggtcgttttaagggcgcaggtcctatgcctacaagtaacaacactctctaccatagcatgcaatcaacagaccatatatgcatgggaaagcggagcacaagagatagaatttttgtgtccaccgtactagagtagggatatgttagtatttttgctatagtcttggtacatgtgtccattcctagaacgacattaatttcgggacagagcggatatgagtacatcttatcatagaagatgaagtgacatataggagtagaaggtagtcgttgcctcttatcataggagatgcccaatggcacttttgacctatgcatctcgatagagaaaaacctccaatccaagcctactagagctcaatgtctacaacctacttagcttggtaacataaataatgagatattttatataaatatggacaaacttcaaatgatttgagtatggataaaattagggtatgtctatagcccactcgggtgttgcaacactatataaatatggacaaactttaaatgatttaagtatggataaaattagattatggctatatagcccactcaggtgatacaacactcgaaattcactatttatcttcctcctcgtcgcccttgtcgcggcccaccatcccactgtggccatgctaggggtttcacccgagctctgcggtcatggcggtctccttctttccctccccaatctccggcttccacgatgatctctagccatgacgccctgcctcgacctggctcggacacctgcgctcggtcaccatccccactgcttggttggcctacctctctcgaaccactttctatttccgccagacttggagaagaagaggggggagaggccgaatttgctgtagaaatcgatcgagtgttgcacgctcctgaaacactctgcgtgaggtagcattcccataaaattataataatagttgtcatatgggctaggtatactacttaggccttgtttagttccttaccttagaaactttttacctatcacatcgaatctttagacacatgtatggaacattaaatatagatgaaaacaaaaactaattgtacaatttatcaacaaatcgcaagacgaaaatgctcagtagccgaatccaaaaaaaaaagatctgaacaaggtgctagagttttctgtcataagaaggaagaattctgcatacatgaccgcaagaatgtcataggagtatgggctaggaatgccattaaaactaataactgtcatatagagtagcagacaagcagtacaatgtcaaacttgaatgctgccatatacacgaatcttttgaagacgaaggtatatagtactctaaaagctgaggtatacacgtcgttggtatcatcttcctttccactatgatctgtgttgaaaagtttaggctatccatcgtctagctacccctatataactaatggattattatctaccttgtctggtagtacgtgcattcatctattacaatactccccgtagtcaacaataagggcgggcgatttctggttccatacatcatcaaaaccttgtactgcttgtctgctacatactccgattattatactgccggccctaaccaaataggagtaacatggagagtgaaaaccaaaccagaaggccaccggcggctaacgcgatagcgacggatttataagtaaccaggagggtgatcgatgcagccgttgacgaccaccaggccggtctctcgcggcgacctagtgaatcaactgcgcgcactgaaatcgagcatcccctgaccaccagagcgcgctcgctacgctaggacgacgtacgaaaatatggcgcaaggggccgccggcgcagtagagacgacgacgacgacgaggcatggcggcggcggcaagccgcacgcggtggtggtggcgtacccgctgcagggccacatcatccccgtggtgcacctggcgctgcggctcgcggcgcgggggttcgccgtcaccttcgtcagcacggaggccgtgcacgcccagacggcgcgcgcgctgggcgtcgacccggacgggtacgaccccttcgcggcggcggcggcggcggcgcgggcaccaccggaggggccgctgggcgacgacggcgtgtcgtacgagctggtgagcgacggcctccccgtggggttcgaccggtcgctgcaccacgacgacttcatgggcgcgctgttccacgcgatgcccgcgcacgtcgagcacctgctccgccgcgtcgtcgtggaccccggcgccacgttcctggtcgccgacaccttcttcgtgtggcccgccacgctggccagccgcctcggcatcgcctacgtctcgttctggaccgaaccggcgctcatcttcaacctctactatcacatcgacttgctcacccagaacggccactttatgcatgcagagcctcgcaaggacacgatcacctacatccctggc

SEQ ID NO: 4771 - DNA, 2725 bp, Sorghum bicolor
  Intron number 1 from transcript Sb05g018900.2 (locus Sb05g 018900) derived from phytozome v7.0 (chr-ID chromosome_5; pos 45735265 to 45737989)
tcttctggcccttcgccggcgacgacccccaataggtacgcccactctttctcttcagttcctgctgtgcgaaaccgaacatccaaaccctaccttaagctatccgtattcggatctgattataccattgtagtatacgagtattttgctttgcctctaaacttagatgttttcttcgtgtatcttgtctacaaactttcattttccacccttttttgacaaaaaaatgttgggtgtacatgtgtctgtttaccgtgtccgtccctggattgattaaaaatggctctgctctggtttgtttgttttagctgtttgatgccgaagaacagaagtctgaatattgctatgcaaaatcttaaaaacaacagtctgttggatcacagcttttgttttcaagacgcaggcaatctggcagcttcttactgttaccttgtaatctaaaacttgactgagaatcttccctttgtattaccaatatcctaacaccagccgattgccttgtgaagtgcctaatttaattggcatctttgttcttcgttgaagcataatgatttgcttggcataatctccattggaaagtgaacagaatcttccctatgtatgaccaacattctaacaccaacccattgcattgtgaagtgcctaattaattggaatctttggtttttgaagggtaataattttcttggcataacctacattgaaaactgaataacctgtgaacataaaagctcttgtttgtgtttagatctactagctccatgcctgttgcaacgggagaggcaaaatttgcacgggatactattgttgactagctggaacacttgcaaaatagccaatccaagatatgattcaggccttgtttagttcaccccaaaaaccaaatttttttcaagattccctgtcacatcgaatcttgcggcacatgcatggagtattaaatatagacgaaaacaaaaattaattacacagtttacctgtaaatcatgagacgaatcttttgagcctagttagtctatgattggacaatgtttgtcaaataaaaacaaaatgctacactaccaaaaaccaaaaagttttcggaactaaacaaggcctcattagcaatgtactcgaggaattatgtgccatgttaagagaatacatacaccaaggatactggatgaacatagattggttatgtgtattatactgaaaaaatgaaccggtgtgtccatacaactatttggatttcagggcataaatgtgtgaaaaaagatacccatggttctgaaacttgagtagttgtggctagcaaagttattttagctcataaaatataattttgtatttgtataatcctcataaaatctgcaagtaaaaaatgagttgcatgcaaaggcaacattaaaagacaaattcataagtgcctgtcacctggcctggttcttcaaaacagaactacaaaagacagatgtcatttctccagtactaagatggtctggtaaattatggttcttttacctataaggtcatgtatgaataaaacatgccaaatcgttggaagataatctgtggtatgaaccttctcttgaaaactttaagctgcctaattagttagaattgccatgaaatgtattaaatgaatctgaggtatgaaccttctcttgaaaatcagttaggagagtagagcaatcctaactgtttcctatataggagtaatccgatgtatgaacttttgcttgaaaaaataaaagctgtctaatcagtttatttgttatccactgaaataaataacagaagccagaggaattggacagaattaccatcctgatgccactggattcatctagcagcaaccacagtccacaggaatggattttgcacaggctgccggtcagcttcctccttgcacaatgtgccctgttgcggaccaacatgtgacctccactggtgtatctactctctttcacagaccttcgtcacaatacaaacaaattaagaatcttggtgaggagtctgtaaaggcatggggggaagcagagtttgatggtccagagtcctggactatcttcctgctgcagttctatggcgccattgatttggacggaggaatttgaatatactaatggtctctactgcaactcatcaaattggggcctatgcttacatttatcttcctgagtggtagtgattgctttggtgattacatttgtttttttttctctaaaatggccacgtcatgtcactgctgataccatgtttctatccacattctttttgttgttctttttgtaggacctggtagttcacatttcttgaatgagtaattgcaaagaatgaaataattgaatatttatagcttaggtctagggaaaccaccagtctcccctgcctctcgacgccctttttgtgataatctcagtaccctttgtcctgtttctccttcacccacctaagatatctcatgcatgcagcacccttctgggttgaagattcctacttgaggtgtaagcaggaggcaccacagctcctctgaacacattagcactgggctattggctgtattgcctccttgattaacatctgtccaggatattagatgttcagtaactgcatctatttggtctgtagtgattaaagtcaactcacaaagagtttcagcatcagtaaatgacattattattattattgttatttaactgatgcatttgctctccttgttacttctgaataggtctgaagg

SEQ ID NO: 4772 - DNA, 1290 bp, Sorghum bicolor
  Intron number 1 from transcript Sb04g032510.1 (locus Sb04g 032510) derived from phytozome v7.0 (chr-ID chromosome_4; pos 62465148 to 62466437 reverse strand)
gtacgacgggcgcggcgcactcatcgctatcttcggtgagtaagtaggtgtcattgcgtacagtacacctatgggttggatgtagttgacttccgccccgttgttgtagggctggttttcgctgcagtgataagattgggtgttcggtgcgatctgttcggctaagggttttagtaggtgatgctatgatacggcatgtggctaactggtttggttcgtagttgccatttgtgtggtttgccgtgtttaagtaggtgaagtcactgaactgtgttgcttgttattgcacgcttttaggatttataactgagctggacgctgtgggttttatatcagttaaaggataacagcctctctgaattttagcgagtatatttctgttttcgacatctgaggtttaagctggtgtgtattgtgtgatctttgtcacatatatgaggcttatggtctgtgcgaattttgcagaatatgatttgttatttatagaacataaatctaaatggagagctccctagatttggaaacaaattgctgttgagcaaggtgattaaaatagtgaaacctaagtcggattggaactccaatggtaggatcacaaatcgtaggatcataactactagaatcgtagattctaactaacagaatcgtaggatcaacccgataaacttagatcataaagtcataaaactgcaccatagaatcgagattttaacaactatggatgtcggaatcaacaaaatccagaaaagaaaggaacaagaggagaagctaccgaaggttagggttcggggctgggattacctggtgcttccagactaaagggagcttcaggggaggacactggacttccccatagttgcatccttaattgaatcctgcttgcagtttatgggcttggctttgcttgcttcttgtatggttcagatgatattagcaacctttacctgttggcatgagtgttcatcttgctaaagaaacacaaccaagtttgttcaaataaataaccatagttaagaaatatatgataaataaacatggagagaagtataatcagtggggggttgttacatctccattagatattgctttgtaaaatttgttgtttaggcaaagcatgaatgcaggcatgggcagtcgggcacagtatgagtcttgggtgatctacgatggatctgatctgtgtgcagtttcatacatttgataggctttgtttctcctagctgcgttgtgctgatgtgacttgtaaacatgacagattccggagttgatccagctgctgctgggttgcag

SEQ ID NO: 4773 - DNA, 1152 bp, Sorghum bicolor
  Intron number 2 from transcript Sb03g008500.1 (locus Sb03g 008500) derived from phytozome v7.0 (chr-ID chromosome_3; pos 9065568 to 9066719 reverse strand)
attattgttgataacaggtaagtattcttttttgccatgttgcagctgttattagcttgcgcgtgctctttattctcttctaatttgtcaccctgtctctgaagtaactccatattgggccccttaattctccattttgtctaatcctcccaaacacacacacccatcccacaaactccatgggcatttagtgtgtaggtaggaacctcaactttgctttttataatgttaaactttagcactgaaacctgcctgaaattgtttaggactgttgtggcagtggttttcgaatttaaatgagaaaaaataacaagccacaaaaaattgtgaaacatgttctacaaactttaaataaatgattcgataaatcttgaatagagatttctggtgcatgcacacctcagctacagtgcaaatttctggatgcctgtcatcatggatgatgaagagatttctcactattggtgacaaggtttatatgatttttttaattttctgaagccttttttcgtttttttgacttattgaatcttttattttgaactaatagaatgtataaaccccagttgtttttgtggggttccctgtgtcccaaaacatctcaagtgtttcttctgaaaaatttggaggtgtttgagtatttgttcctcacttaaatccaaaaactgctgccacgtcagccgaaaccactttactgggcttaggggctaaaactaaacggaattgaaagttgggatactcaaactaaacgttattggagtaattagggtcaaaattagagaatctggaaacttcaggagccaaatatggacttattcatatgtgcttatttggtgtaatgagattttcccacttcatgctggatggcaaggatgcatttgggcctttgacagtttgactacaacaggggattgtcatatgggatttcatgtttgaatttgtggatgcatattcgtagtttttttatcactttgaatgcttacaatactgtaatgtgtaagaatttttgtgctcattgtagaatattacaaaaactatattgtttatttttttgcagaaaattgttgttatgctggcatgtttgttttattaacttacattgtttactttgttgcagaaacttgctgttgggttttgttcacatattacaat

SEQ ID NO: 4774 - DNA, 818 bp, Sorghum bicolor
  Intron number 4 from transcript Sb01g014620.1 (locus Sb01g 014620) derived from phytozome v7.0 (chr-ID chromosome_1; pos 13927715 to 13928532 reverse strand)
ggaattgcagggactgaggtaatcatatcactatccttgagatattttgagtctataaatctctcatattttagatataatcttgcaagattttgcaagctaagtggacgtgaatcttgacttcatactagttttatccttgaagtagcatctatttactccacgactgatttatcagtagtatgtactttgcacatgtgttcatttgtaatggctgcattctcaataagaattttctagaggaaaaccattcatggtagaagtatatcttcaacttctgttatcaaggccctccactgaaattcatagaggctaccacacatctgatgtgtgtctcatcgacatatgatttagtgcaatgttgaagcaactaaacagtgccctgtatggcttgtcaggtaccggtgttcaactacttcccccagtcacaaaaacatgccatttaggacaagattttatgaaaccttaaaaattacagacatcaataactcttcaataccataaacatatgcaaatcttcattaaatatagagaatagctttctgccccacccccgaatcatgaaaaaataacatggaagttgctggaggctgattcactgttgatgtaggctgtatgttgcttaaaggtgttttatcctctaattgtggttgccacttttttttgggggtgggggcaataaggtcttatgtatccttcatgatctgaataactactgttggtcggcattctagagtctacagtctaggttccagagaacaaagatttactcccagactctgtaaactgctttacacaggtagcaaaagagagcgctg

SEQ ID NO: 4775 - DNA, 2303 bp, Sorghum bicolor
  Intron number 1 from transcript Sb04g021790.1 (locus Sb04g 021790) derived from phytozome v7.0 (chr-ID chromosome_4; pos 50903557 to 50905859)
gacgtcgaggcggagaacgtcgccaccgccgagaggtatgctattgcccgcccgaggcggcccgccgacatccctagttaacccccgccaccgattccctccccaaggaaccaaaatcgtagccgtagtcgcggtctcgcagacgttgaagtttgctggagttgttgtgatgcctacctcttaacctgctcagtagcacgtgatcctggtgttgccggctgctgctaacaaggccacaaggggtcgatttgtgatgattttatactgaaatctgcattcagtgcgcactcctagtaggctagtacttgatttgcacgcaggagtttgctttcagtaacctctgattgattctgcagtctttattttaccatcaaatatctatcctgataaccaattccatagtaacctagtacggtccctagtagtatcttctaatgtaatttggatttgctgtaaattttttaggacaaaatcacctcaaacaaaattataacaatcttatatattaactgctgtgtatctgcacattggatttctctgcattcttccttggatcggacaaccctgtcagctactttattctcaattccattctttttttttctgtcggttactttattcttgcagtgaattattgaggcatctgctttggtgtttggattcggttatgtaccttgagatgttgtgctttttgttaatacaataaaagtacacacatttatgtattaatccttcaatacaatcttacataaccatttgtatcagctactttatcctcatttatgcatttctgatggcttcttggggaatcccaatgacaagttaagtgatctatttctaacgttcagttgttgggatttggttacttatgctacaagatctgctatattctagtacagtaaagtgcaagtccgtttccaagtttgtttctgtattggtagagcaagtacaataatgggcttaaagccaagctaatgctgatgtggaggatagaagagaggagagagatgatagcttggctcttatgtaagcaccaagctgggcacggatgcatatgtaatagtgggcccaaataacaagtgttgtgagaaggaataggaaagagaagatgttttagagacaagtatgagacaacttattgtataacttggctctaatcacttggcttatagccaagcacttggctctattattgaccttgctcgtatggtggccactgcaaaaacatgcaaactactgtggacttggttactctgtctacattttagccaatggtgctgttctaatttctagctgctgcgttaaaaccgaagcacatctttgtaaattaggaacgatatgcttattgagtcagttttccaccctttgcagtgttaactcttctgccacttttctatggagctacgttgccaggattctatttttcaatagttacagtgctgttccaaaaaaggaaaacctggttggatgctacagttacattgtgctatgctttgttttgattatatattttagtgaaaaaaagaaaactcggaattccaaaatttgtcttgtctttacttcatttgcaattctcttgcacctcatgtgggtacatcataacaacagtatgctttatcttgctgaatggaatttcttgaacttactctgtttcactttctgttactctgctttgctacttcatttccatacatgtagcatagttgaagtcatagctttacttgagtgcattggtgtgttgcaaagctattctatagttatgagcttagtagatgttctaaatttttagttttttattatttcttttgatctagtactcaccattagtgtcaattcgtctttcatttactctcactaccattgatcgaaaaaaattactctcactgccattctcagctggacagtcgtcagccacaagttttacaactttttattggtcactattacatcctcttgtgggttcaaaattcaacagttttagaacttacttttacaagatttagaattagaaatatattctgactaccctagaaaagttaaacatccacgattggaataaatttacctaaaatgacagggaatacatgcttttcagttttagctatcgctctgttttttctttggtttttttgctcaaatgcgctggagagcattgcattaaagaagaaagtatgatgtacagcacccagcacacacccacatgcacccaaatttaaattacatcgctgaaaaaccatgaaacttagggactgatcgcttgttttacaggttgattagggaagcacacaagaaaggtgcaaaga

SEQ ID NO: 4776 - DNA, 24810 bp, Sorghum bicolor
  Intron number 7 from transcript Sb05g015080.1 (locus Sb05g 015080) derived from phytozome v7.0 (chr-ID chromosome_5; pos 31916376 to 31941185 reverse strand)
gacctgagtgcatcaaagaggtaaaattactctgccataatatgataataggagttttatggaggctacttccgataagttggacatgatgtcagcatgcaatagatgaatatggaaacacacacatgatgtcagcctgccatcacttgaataacaccctgcctctatcacaaatttccttgcgtgacccatctccaaacctcattgacccatcttcccctcgtcgccgccttcgcaaccgaggttgacttgggtgcacgtctcgtcgagtgacaattgtgcgcgcggaggttccactgcggcgttgtcatggggttggaaccgtggcaagcattattgttcggatggtgccgtcgcacaacgaatacggtgtctcgggtgaattcaagaacgtgaggaacacacaggagacacagagatttatcctggtttaggccaagtcagtccctacgtcttgtagctaacgatccttgtactcaagaacaaagcggcgataaagtctgggcgcccagggcttggggtagccctaagccctaggtcgaaggcgtggcatggacaggctcgactggacctcctatctagaggctgcgcgtgagcgtgcccgatgggcatagcccccgagccctcaggctttctttgcgagataggccaggaggtctccagatgattgggaaccaccttaaattgagaaatatgcctagatgtttatgatcttgacaggcgtcattgagcgcacaaacttgtgccatcaacaacaccggctaattgtcgctgtcctcaccttgtgcatggtgggcttgctccttgtgctttggattcttgcaatctctagccagtgcccggtgttgccgcacttgtgacacttgcggttaggatggagatgcaaggcatatcacccttgccatgacatgcaccaccgttgggcttttcttgcccgagttgccttggcaccacccgtggaagctgccatgaccagctgaagaggatccttccccttgctgccactctctcgcttgcactgcccactcctctgtgagcagaaccttcttgtttgcggtcatcagtgccggtctcccgccgccttcaactacccgatcatctccttgatcctgagcgtgtccagatctagcgaaatcttgataaacaaggcgatctgcatgtacttgggcgggactacacgtacatacttggtgacaacctcctaatctttcatggtatcaacgagggcagtgagttgactcaccagcagctacaaccacaacgcgaagtcctcaagtgcctcaccatggtggaatgcaatggactctgtactcctgctgaagctgttgtgccttcaccttgcgcgtgtagtcagagccaacacgcatggtcttcaggttatcccaagcctgctttgtggtttcctttgctcttgagagtctgggcatactctggtggcactgactagaggatagcctccattgccggccggtcgttgaccttgtttgtgctgctgatttccaccacatgccacaatctctgagcttggaacctgaccttcatcaacaccacacactcaccatagttggtgcgggtgagcattgggtaggatgtgtttccatgcccccccaccgtcctcttgaccaagaacggttgtcgttctggtgattgaaacggttggcgtcctcgccggtccacggagtgggagcatcctcctgcacctaacattgttattgatctccctagctacggttctagtaatgatgggaaggttcaggagatggataaacgacttggggctttctgaaattcctctccatgggcgtaaatttacatggaccagctccttcactagtgctgcccctactcttgttcgtctggacagagtgttctgtactttggattgggaagatcagtttcctggatgtctcctgcagggtgttgcctctatggattcagaccactgtcctctggttcttgggctgcaggacattattggctgtaagaaacgctttcatttcgaagccttctggccctccctggatgggtttctagaagttgtgaaggaggcttgggattctgtacaacctagatcttgtccactttatactcttgatctgaaactcaaagcaactgccagaagcttacagagctggagtcagagaaaatttggacatttcaaatcccaattgcttttggcaagagaaatcgtccatcagcttgagctcaagagagcagaccccttcagcctaatgagttgtggctgcgtaacaatctcaagaagcatttgctggctttatcctctcttttgagaacaatagcaagactcaggtccagaattaattggttgaaggatggggatgccaactctaggcttttccatcaacatgctagatacagaaagaaaaagaattttatccctaaactgatagttgaggaccagattttcactaggcatgaggataaggctgctgctgtactagagttctatgacaatctcatcgggaccgattgtgctagagggagatctattaatctagacgcccttgacagccccagttttggtcttgatgctttggatttacctttttctgaggaagaagtgtggaacaccataaaggagttgccacccgataaggctcccggtccggatggatttactggcagattctataaatgttgctgggcaattattaaaagtgatgtgatggctgtagtccatgctctgtgggctggtaacttcagaaacttcaggaaacttaattcagctttcattaccctgattccgaaaaagaccaatgctgtgcaagtcaaggattttaggccaatcagcctggtccacagtgttgctaaacttgtgaccaaaattctagctaacaggcttgcaggtcgactagatgagatggtgtctcccaatcaaagtgctttcatcaagaaaaggttcatccaggataattttatgatggttcagcagactgttcgattccttcattctcaaaagcagcccagaatcctattgaagcttgacattactaaagcctttgactcagtgtcttgggccttcctcttggaggtgcttagaaaattgggctttgggtctcactggtctgaaatgatttgtggtctactttcatcttcttccatccaagtactcttaaatggcatcccaggtgaagccattctgcacagaaggggtttgaggcagggagatccgttatcgcctatgctctttatccttgttatggatgtgttaaaccgaatgttcacaagggcttctgaggttgggttgctattgcctttgtcgagtagacctatccagcatagaatttccctgtatgcggatgatgttgccatcttccttcggcctaatgcagctgacattaatctatcccttcagcttctggatttatttggggaagcagccggcctcaggaccaatgtccaaaaaagtaatgtgctgtattcggtgtactgaggagaatttggcgcttattcaaaatctgctaccgtgtcagatactagatttcccctgcaagtatttgggtctgcccctgaccaccaagaagctgactaaggagcaggtccaacccatcattgacaaaattgcagatcagctccctgggtggaaggctgatttgatgacccgggctggcagagctattcaagtacagtatgttctcacaggaattctggtttatgtggcaatggctacagagctccctccttgggctctcaaagccatagataagattagaagggctttcttgtggagaggcagaaaggagactaagggggggcactgtctcattgcttggcccaaagtgtgtcgcccctgagagctcggtgggcttgggattgctgatctgaagaccttatgcattgctttgaaagcacgttggccgtggctcaagagaagcgagcccaacaagctgtgggcaaaccttccgatccaagtcagtagagaggtagcagccctcctctctatggctgttacaactgtggttggaaatggatctaatacgctcttttggaaagacagatggctggatggcaaaagcatccaggatattgcgcctttggtctatgcactggtttctaaaagaagagcaagtagacgttctgtgctcgaagctttgtctggagataagtggattgaggacttgcagggaggggttggcccagctgctctctctcagtacctaggcctttgggatattctgaacactgtggaactaaatgaggaaactcctgataggcacatctggaggctttcttcatcaggggcttattctgcaaagagtgcttatgctacccttttccaaggcgctatcctatttgaaccttttgagagaatctggaaatcctgggctccccctaagtgtaaatttttcatgtggcttgttgcccacaacagatgctggactgcggacagattggttaagagggggctacctcatccagatcattgtcgcctttgtgatcaagaagtggaagatattcagcaccttctcgtgggatgtgtcttctctagagacttttggttctccctcttgtcgcgctttggctttgctgcacttgctcctcaaccttctgaccaatcctttgataactggtggagaaaagttgatggtgcggtcagtggagattataatttgggtttgaattccctagtcattttgggagcctggagtatatggcggcatagaaatgattgtgttttcaatggggcgtctcctaatgttaacctggctctagctatggctagagaggaggcccattggtggagtagggcaggagctaagggtatttccttgctaactgcaggaggttctgtctaatggtctgctgtttggtcgttggttcagtcctttgtgtagcgttgtgtgtgtgggtgtctcgggtctatgtatgactctttttcttctattaatataatgatacgcagctctcctgcgtgttcgagaaaaaaagctacggttctagtaccaattgttagttggcaatcaggtgcagacctggacccttagactctctctctctctcactcactcacacacatacacttgagagagatggcgaagtgaacagaatgcaaacacaggagattatgaactagtgtgctgctgttgctgaactgactattacatttctcggttggctcttcgaacggaggaaactgtgtaggaaaaaagatgcaaggcttgctggatggacgcgacagtggtgatgcctctggcttagcggtatgttgctccaacccacaaaaacaaggcaacatatgggctaccgcattagctcacgtacgacttgcggctcgagtggacatggggtgggctgcccactgccgccccatttgcatccttatcccctagtcctcacaagcacttccttggctagtcttgctactcttgatgctgataactttgttaacactgatgagccatgtgctctttctgatgagtcacggggtggtccgagatataatctatgagatcgtgctactattgggcctcctaataagtatggttttctccatgtcacagctgttgtggaagagccatccacttatcaagaggcctctagcattctagaatggcaactagctatgtgtcaggaacttgctgcccttgatcgtacaggcacttgggatattgttcctgtagagaaacaccgcacaccgtaatcaggggggtgaccttcattatatagcctaattggctagggttacagtgtacaaggccagtgggccgtacgcccaatgtgggctgttacaatatattctaacaccctccctcagtctaagcgggagtgtcacgaacacaaagactggacctaaagtcagtgaacaactgtacaggtaaccctttggtcataatgtccgcgaacagatgagaagatggaacatggagcacccgaacctgtcccaaagcaaccttctcacggacaaagtgaatatctatctcaatatgcttcgtgcgacgatgatgaactggattggcggtcatgtagacagcactgacattgtcgcagtagacaatcgtcgccgaagagatgggtgcgtggagctcctggagtaattgacgaagccaacaggtctcagccacaacgtgcgcaacagcacgatactcagcctctgcactcgaacgagaaaccgtagtttgtcgtttggaggaccaagagaccaagttgtcactgaggaagacacagtagcctaaagtggagtgccgagagtcgggacatacaacccaatcaacatcggagtaggcagtcaagctggtgatgctgcctgtgccgatgtgaagcccagtggagagggtgcccttgacataccgcaggacacgtttgagcatcgcaagatgaggctcgcgcgggtcgtgcatgaagagacacacctgctgaactgcataagcgaggtccggacgagtcagcgtgagatactgtagcgcaccggcgaggctgcggtactgagtggcttccgccaccggtgcactgtctgtagcagagagcttggcatgagtgtccacaggagtcgccgtggaatgacactcagccatgccggcgcgctggagcagatccacagcatactggcgctgtgacaggaagagaccgtcaacagaatgcgtgacagagatcccgaagaagtgatgaagatccccgagatcatggcgaactcggagtgaaggagctcggtgatgcgacgaagaagcggagtcgacggggctgtcagaatgatgtcgtcgacgtagagctgcaagtaggcgatgtcggcacccgctttgtaaacaaagagggatgtgtcggaggtcaaagcagtgaagccggaccgctgaatgaagccggagaaccgctggtgccacgccctgggcgcctacttgagtccgtacaaggactttttgcaggagatagacgtggtcgggggccgccaagtcgacgaagtcgggcggctgctggcagtagatggtctcgttcagatggccgtgaagaaagacgttcttcacgtccagctgatgtatcggccaggagcgagaggcggcgatgctgaggacaacccggatggtggccggtttgacaaccgcgctgaacgtctcgtcgtagtcgatgccgtaccactacgagaagccacgaacaacccatatggctttatgacgagccaaagagccatcagcattatacttgtgcttgaagacccacttcccggtgatgacgttggcacggtggtagaagaacaagacgccaggtgccattgtccacaagcgccttgtattcttcggtcatcgccgcgcgccaattggcatcggcgagcgcggcacgagtgttgcctggcagcggagaagccaggttggaggacgaggcggtgaaaccataccgctgcatgggcggcggcagggaacccgtttgggaacgagtctccagcacaggaggctctggagcctggggcgccactgcctgcggcgctggagctaagggctccaccggctgctgtagggctgtcggcgccttcgcctgcggctgaggggccagtggcgggcgcggacgacgagcgtagtggatgccgaaccgctgccgatcagctgcagcggcgggggcacttgccatcgtagaacccgaggggctaggcgtgtcctgccggggcgcctggggcagcctataggcagcaccatgccacaggatggcaggatccagcccaacggggtcgtcggcatcgtctgctgcagacgaggcaggcgcaaccgaggtccgcgaatgtcgaacgtctgaggtagacggggcaggcgcgggaagttcctgtatcaaaaaatcaagagaatccggtcggggcttggaagccgcaaacgaaaagtgagtcataaaaaacaacgtggcgagagatgatgatctttcgagtagagagatcaagacaccggtagctcttctgggaaggagggtaaccgaggaagacacacgctgctgagccaggagagaatttatggggagtcgtggcactaaggttcggatagcacaggcaactgaaaactcggaggatggagtagtctggcattttgcggtgaaggagatgatagggaataccattatgtatggaggatgacggtcgccggttgatcagaaacacagcggtggaaagggctttgacccaataggacggaggcatggcagcatgaaacagaagcgttcgaacaacattgttcagtgtgcgaagcatccgctcagctttgccgttctgggcggatgtgtaggggcacgaggtgcgaagcaggatgccgcggctgactagggaggtagcggtggcattgttgaggaactcggtgccattatctgcctgaaaacagcgcacaggaaaactgaactgtgtgtgagcgtaagcaacaaaccgtacaatatgttcatgaacttctgatttatggcgaagaggaaacattcaacaataatgtgtataatcatcaaccatgacaatataaaatttatagccagaaatactcaaaactggagaggtccagacatcacagtgaacaagttcaaagggagctgatgtactagaaaccgaactagcgaatggcagcctagcgtgcttgccaagttggcaggcatgacaaatgtggcgagctgctttattacactggatagctgatagcttattgagagtggtgacgacggcgggtgcaggatgaccaaggcgggagtgccataactccggggagacgacggcgacatggcagcgaggtggcatgtggtgtggaatggtgtagagatccccatagctattgcaccgaaggaggaccgtcttggtctgcagatccttaatagaaaaaccagaggcgtcaaactcaatcgaacagttattgtcgtgagtaagctgtcgaacagataacagattacgagtgagttggagtgcgacaagaacattatcaagatgaaaaggacgatcagctatttgtataacagaagtgccacgactatgaataggaatggattgatcgttgccgaccgtaatggaggatggtggcgacgggagatgggaaagtaaaataccgtcattggaggacatgtgagatgtcgctccgctgtccatgacccaaggtgcagacccgccctggatcgccatctggttgagggcggcaatcagtcctgccgagtcccagctgcccgaaggcccgtacgccgggggaccgccggcagtggagaactacggaggcgcgaaggcggtgtgtgcctgtggaggaggcgcaggtggcgcaccccactgctgctgctggggaggtcacggagcagcccaagggctgtagcacacctaggggccggcctgctgacgcccgccgaaattgccatcttgctgctggtggtgcccaccgccgccgttgccattgccgtcgccaccacggctgcccttgcccttgccacccttgcccttgccaccgcccccacgattggtggacgcagaaggggtggactggcaggacggcgacatgcaggtgcaggtggtggaggcagccagagctgaggccgaggccgcattgccctcagtgccaaggcggatttccttgacaggaagcatgttggtggcagccttgaagtcgggaagcggcgacgtgttggagatgtcagcggtgttggcgaagcgggggttaaggccgcgtagaaggttgagcatgagctgcgcaggagagacggtgtgaccgatctcccggagggcatcggcggtgcgcttcatctgctgggcgtaggcgtcgatggagaggtcgccctggagcaggttgtggaacttctgctcgaggacgacggcacgggactgcttgttcgcctggaacaaggccttgatagagacccacagagcgcgcgcatcctgttcgggttccatggcgaggtcgaggacggcgtcgtcgatggagccgtacagccgcggatgcagacgtcaggctgagaccacaggggttcagccgggcacgcggccaccgtgctgtcgatgtggtcaagcaggccgcacttgccgcagagggcggtgaagaaggccttccacttggagtagtttgggcgctcgaggctgagcgcgatggggacgtgctgcttgacgttgacggaggcgtaggcggcgaagagggggggcggcaaaagagtcccccatagcgccagacgactgggctccggttatggaggaggaactcgacgacgacgtcatgggcgcagctggaagacaaccgcacgcaggctggcacgtagagaagactcgcgactgcacagcgagccgcgcgccagatgctgcgaggcagaggccgcgtgacggagtccggaggtagagccgcgcgaggccgtgaatccgctagccgcgcgtgacgaagaggctgtgatcgatccgcgatcgatccgcaggcagaggccgcgacgatccgcgagccacgcaccgcgcgaaggcgggcctgggcgtgcggcctggaaggcggcggcgcgaaggtgcgcacgcagcctgggaaggcggcgacgcgaatcgcgcgcggcaggtgtaggcggcgacgcgaatcgcgcgtggcctgggaaggcggcagcgcgaaggtgcgcatgcggccgatggtgtggtggcgcgcgttctcagagagaacgcacgggcggaggagaagcaaagcagaagattaggatcgtaattagggctgataccatgtagagaaacaccgcacaccctaatcagggggggtgaccttcattatatagcctaataggctagggttacagggtacaaggccaatgggccgtacacgcaatgtgggctgttacaatatattctaacatttccattaccatcacacattgtgcctgttacatccaagtgggtttccaaaattaaaaccaagtcagatggttctattgaaagatataaggcccatctagttgctagaggctttcagcaaactctgggcctagattatgatgagacatttgcacctgttgctcatatgactattgatcgtactttaattgcagtggttgctttttcttcttggacaatctctcagatggatgttaagaatgcctttcttcatggtgatttaaatgaagaagtttatatgcaaccaccctcgggtgttaatgcccctccaggttatgtttgtcgtcttcgccgggctttatatggtcttcaacaggccctcgtgctttgtttgagcgctttgtctctgatgatgcaaacaacatttcttgtgtcaaacagcagcttggtgcacaatttcaaatgtccgacttaggtcctctcagttatttcttaggcatttaggttaaatagtctgcaaagggctgctacctttctcagtccaagtacatacaagaccttattgctcgttttggtatcactgaccatcggacagctgcaacacctatagatcttcattttcagctttgtcccactcatggtactcctcttgaggatccctctagatatcgacacattatgggcagccttgtttatctcactattactcgacctgatattgctcatgccgtccatattttgagtcaatttgtcagtgctcctacatccgttcattttggccatttacttcgtgtcttgcgatacttgagggggacatcatctcacagcctattctatgctcgtgacagtctgcttcagcttcatgcttactcggactccacttgggcgagtgacccaatagattgtcaatccatcacagggtattcttcttgggtcttctcctattgcatggaagtacaagaaacaaaccaccgtatcttgttctagtgcagaggcagaacttcaagcacttgccaccactactgcagaaatcgtatggcttcgatggttatagtagagaaacatcacaccctaactaggggggtgaccttcactatatagtcaggaagtttgcagtacatctacaagttacaatgtggtactaatacaagtcaggctaggagtacaaggccaatgggccgtaagcccaatatgggctgttataattatattctaacaccctccctcagtctaagcgggagtgccacgaacgggagtgtcacgaacacaaagactggacctaaagtcagtgaataactgtacaggtacccctttggtcataatgtccgcgaactgatgtgacgatggaacatagagcatccgaacctgtcccaaagcaaccttcttttttttctcgaacagcgtaagagaaaaaagatacatgggtcaagagacccaactcacccacccaaaactcacacaccccacacactagccactaggttacaaaatcgccacacaagaacagggaacgacccaaaagcctccttgccttaaaccccaacaggcagcagcctaataaccaattcctggagcttggagttccctgctgagcaccagagacctccctctgagctaatagcccaaaggacttcatgaatacttggccttttattatcgaagacacaagtattgtggtgcttccaaatctcccaagccaccaaaataatcaaggagttgagtcctttacgcgcctccttggggacattagcagttgttttctttcacaatcctgagaatcgagttgcagtaggctgtggagccaattgcagcagccctaactgttgcaaaaccatagcccaaacttgtcgagcaaataagcagcccactagaaaatgatttattgattcatcctcctgatcacaaagtggacatgcctcgggatggggtagattcctccttgctaaacgatcagctgtccaaaccctgttgtgaaagaccagccaaatgaagaacttgcatcgcggaggagcccaagttttccaaattcttctccatgagccaaacttgatggatccttcaaaaaaggctgcataggccgatttactggtgtaagaaccatcctgcgaaaatttccatctaaattggtctggagtttcaggatgcaaaatgaagccatccaccatatcccaaatctgaaagtactcaatcatgacgtcaactgttgatacggcgctgccgccttggggaacgcagaggagagtggagaagaagacttgactgcgagttggaacggaggggatagcgaggcaatgctgcggtgggggaatcgccagcagcagcggcagaagcgctcgcagccaccgtcgaagaggaaccccacccacacgggaggttctattcttcttcgataaacctgattacattcctaagtgcatcctttatagtccaggtgcattcctttcctaacaaacaatagccagatcctaaaaatcctccctgattattctctttctaaataaggccatctcagccactacttggatgtttggtcctacgcctgtacgaccggcccacaaaggagtccacaacatttccctcctccccaacaaacagctcgtccgcgagctgaaacgccgggtagcgttccttgaaggcggcaatgggctcccatgtagcttcagccgcagagcggccctcccaattgaccagcagctcccaggagcctcggttcaaccgagcgcgtgccacctgagatggagtaggaacgacgcggccttgaagaatgggtggcagaggcgtgatcaccgttggtggcggtcctgcaaacttcttcagtagggcgacgtggaagacatcatgaatcctggcccggggaggaagcttcaggcgatatgcaaccgcgccgatgcgttccagaaccttgtagggcccgtggtagcgaggaccgagcttggagggtgctgcggcagtgatgcccacagccgcacgctgatgtagacggagcagcacccggtcaccaatggagaactcaacatgacggcgcttctggttctgagtctcccgcatagtgtcctgtgcaagcagaaggcgttcccggatctccgccagaaagacgtcacggtcctgcagctgacgatccactgcagccacccttgcagcaccagccgagtatgacatcaaggttgggggagggcgcccatagacaacctcaaatggtgtagcccgtagagctgtctgataggacgtattgaagcagaactcagcccatggcagccactgcagccaggagcgagggcgatcacctgcaaggcaccggagatacatgacaataatgcggttcgtgacctccgactgaccgtccgtctgtggatgaaacgctgaacttcgcagcagtttgacgccggccagtttgaagagctcctcccaaaagtggctggtgaagaccgtgtcacgatcactgacgatcgaacacggaaacccatggaggcgtacaatgttgtcgaagaacgcccgggccaccgactgagctgaatacgggtggccgagagcaataaagtggcccatcttggagaagcaatccacgacggtcaagacgacggacttgccgccaacccatggaaatccttcgacgaagtccatggcgatgtcgctccagacgttactcggtacgggcaggggctgaagcaggccagccggatggaggtgctcagtcttgttgcgctgacaaacagcgcagccccgcacaaaatcccggacaaggcgctgggcggcgctgctgtagaaggacgcccgcagcctgtgaagtgttttctgcaccccttcatggccggcctcatgtgcagcacgcaggagctgaggccacaagctcgaatcctccggaacgaagaccttgccgttgtagagaagaccatcaaccagttgccaccctgccggtgctgttctagcagccaagcgggtgcacagatcctgggcagtggcgtccaactgcagctcctcgcgtaggaccccatagtcggtgaagaggggccctgagaggaccagcgcagcgacgtcctcatccctgcgagacaaggcatcggcgatggtgttgaacttaccggcccggtattcgaccgtgaggtcgtaaccgaacaacttggagacccaggtgtgttgtggaatggtggtgaggcgttggtcgaggaggaatttgagactccaatggtcggtgcggatggtgaacgcccggccccataggtacagtcgccaatgacgaacaaccttgacaaggccaatcagctcgcgctcataggcgggcagcttggcgtggtggggagcaaccggcctgctgaagaacgcaatggcgccgtcgccttggtgcaggactgcgccaaatcccgcgccagaggcatcgcagtccaccacaaagcgcttggtgaagtccggaagctgcagaagaggtgcggtgacgaggactgacttgagggcgccgaaggcagcttctgcctcctctgaccagctgaacgcctcccgcttgaggagggcggtgaggggcgctgcaacgccaccataaccggcgatgaatttccggtagtagccggtgaggcccaggaagccccgaagagctttggctgtgcatggtcgtggccaagcctccacagccgccaccttgtccgcatccatagcgacgcccgcagctgagataatgtggcccaaataggccactgatggttctccgaagtagcacttggaacgcttggcgaagagacgatgatcgcgcataagctgcagcacagccttgacatgctgtaagtgctcagcccacgtggggctgtaaattaaaatatcatcaaaaaaaaccaagacgaagcgacgaatgaacgacttgagcacgtcgttcatgagggcttggaaggtcgccggcgcgttggtgaggccgaagggcatcaccaggaactcgaagtgtccgcggtgcgtccggaaggctgttttggcgacgtcgtccgggtgcatccgcacttggtggtacccgctgcgtagatcaatcttggtgaagaagcgggcacccttcaactcatcgaggagctcatcgacgactggaatgggaaatttgtccttgatcgtcgcgttgttgagggtgcggtagtcgacgcagaagcgccagctgtcgtcgtgcttgcggacgaggagcaccagggaggaaaatggtgaggtcgactcccggataatcccctgcgccagcatgtcgtcgcattgccgctcgatctcgtccttgaggagctgcgggtaccgatacggccgcaccgtgacctgaggtgcgttcggcagcaggtggatccgatggttgtggcggcgtgccggtggcaacccgcggggctcctcaaagatgtcctggtaggacagcagcagctcgtccaggaccgtcctggagtcagtgatggcgcgtgcagcgacgccctggcccggcacgccagtctagtgatgggaccggccattgtaccagaaggacatcgccagggcgccgaagtcccacacgatgggccccagcgtgcgcagccactgcacgccgagcaccaagtcgaagccgcccaagtcgagggcgaagcagtcgatggagaacgtctcggtgtcgatggtgactaggatagcaaggcagacgcccgggctgcgcactttgtcgccattggccaccatgacattgaggccggctcgtggggtgacggcaaggcccaagcattgcacgagggctgagtggacgaaggtgtgagtggagcccgtgtccaccagcgccctcaaatgtgcaccaccaatagacacctgcaacatcatggaatctgcagaattgaggccagtcagtgcggcaagggaaatctccaagtcatgaacctcaccaaggggatctggctcgccctccgccaactccatgaggaagacatttttggcagcacactggtggtccttgctgtagggttcagggcaaaaatagcattgcccattcttccttttttcctgcatttccaccggagtcagacgacggaagcgcggtcgcggcccgtctgtgccactcgtgcccggaggtacagtgctggccgagacgctgacacgacgcgcagaaggcttgggtgcggcggagctgttggcggtggaggcctccgtgtggcgttgttcgaatgcacgcgcgaggctgatggccttctgcagattggcggggtactgcatctcgatgtcatgtgccagcggctgtcccaaaccgcccgtgtagagatatatcaccgtgcacggggcgaggttggcgcagcgcgcgagcagggtctggaagcgccacgagtaatcctccaccgtgcccttgcgaaccagggccttgatctccgcgatcgagttggtgcgaactggtggcctgaagcggaggttgacgaagtcgacgaaacgtggccacgggaccaagccgaagtcacgttccatttgaaagtaccagtccgctgcggtgccgtcgaggtatagggatgccatctacaccttctcatctgccgggacacgatggccgcgaaagaagttttcgcacttgttcagccaagtcagtggatcagattcgccgtcgtaggttggaaacggaatcttcggcggtctgtgtggctcgtgatgtcgatcaaaggaccggccgccaccgtcatcgtagtcgcggccgttgtcgcggaagccgcgcccgaaatcacggcctgtgcgggagaacccgtggtcggcgcggtcatcgtagccgcgttcgtagatgtcgcgcccgcgccagtcgacgtagccgcgcccgcggtcgtcatagtcgcgcccgccgcggctgtcaaattcgcgtccgcgccagtcgaaggggtcccgatccgtgccgcgacgctcgaattcgtcattcacctcgtcttcggcgccaatactgtcttctctgccagcgcccttgccggcgtcgggtttgtcggtctccacccgagcgaggcgggaggcgtgggagttcaggcggttgttcatgatggtgagttgacccaaaatcctatcaagcatggcgtccatggcccaggatcgggcacggtgccggacatggctgtcgatgcaccggaaggggtctttgatagcaaattgatacggcgctgccgccgtggggaacgcagaggagagtggagaagaagacttgactgcgagttggaacggaggggatagcgaggcaatgctgcagtgggggaatcgccggcagcagcggcagaagcgctcgcagccaccatcgaagaggaaccccacccacacgggaggttctattcttcttcgataaacctgattacattcctaagtgcatcctttataatccaggtgcattcctttcctaacaaacaatagccagatcctaaaaatcctccctgattattctctttctaaataaggccatctcagccactacttggacgtttggtcctacacctgtacgaccggcccacaaaggagtccacaacaactgtacgggctcccttaatgtcttgggtccaactactattatgcagggcctgggccacagtccttcttttggctgttcgcttaggaaccgccttgtgcaaattaggcgctagctcagccattatatgcccatccaaccatctgtctgaccagaataatattttctcaccatttccgactatggcatcaacagcaacatggaatagagcccgggccttatggggaaccgaaaaaggaaggccagcccaaggcctgtcatcatctgtcttttgtgcccacagccaccgaatcttaagagcgcaaccaataagatcaagattatgaatcccgagcccaccatatttaagaggcctctgaaccttttcccaatctaccaggcaattgccaccattggcctactggtggcccttccacaggaaacctttccgctttttatcaatggcttttatcacccatttagggaggtccaaggcaagtagatgatatattgggacagcagtcaacacagccttaaccaagactaaccccccagccctgttcataagagaggccttccatccagggagataatcagccaccttatccactagaggtagcagcacctctctagttggttttccagatgagagtgggaggccaagatatgtgcaagggaatgcctttatggagcaggagagaatgcttgccgtgcgagctagctcctcatcagtacagtgaataggggaaactgagcttttggccagattagttctcagacctgaagcatggccaaacaggtctaggaggtgcttaatagtgagcaaatccaaaatatggggtcttaaaaataccaccgcatcatcagtataaaaggatacccgatgtcgtgcttgctgaacagcaagaggctgcaataaacccatcaaagtggctgaattgatcaaagaattcaggacatccatgactcgaataaacaatattggagaaagtgggtctccctgtctaagaccacggtggtgataaatagtgtcccctggttctccattgagtaagatctgtgtcgaagatgtggacaggattaaacaaatgagatcctgtcaccgctgaccaaaccccaccttgcgcaagacctccaagaggaatgaccaagaaactgaatcaaacgctttggagatgtccaacttaagaaggatatgcgcctctttcttttagtgcaaggattttaccatttgttgaaccagcataaaattgtcatgtattctccatgtattctccttcccctcacaaatgcgctctggttcacagaaaccaaggaaggcagttgaggagctagccggttagccatgagctgagttaccaatttggcaaagctgtgaataagacttataggccgaaaatccttgacttccaccgcatccactttcttaggcagtagagtaatgaaagccgagttccggagccagaatttgaagacatggccttgctggatggtgtccaacgccatcagcacatcccccttaataatgctccagcaggacttataaaacctcccagtaaatccttccggccctggggccttgtctaacggcatatccttaaccgtagcccatacttcatcctcagagaatggaacatccagctccattaaatcgtgttgttgaatagccaaagcatctaaatcaagggtgtacgccctttcatcagccctgcccagaatgttctcatagaaatcatccactgccctctgcttttgctcatgtgagacaaccacctgattgtcaacttgtagttttgctatgaaatttttcttttttctatatctagcctgttggtggaagaaagcggtattagcatcaccttcctggatataaaggatcctagaacgcaaccgagcaatggttcgttccacagaagccaagccaagacaatgaagtttgagtttctttctcagccaatcctcatggtctaagagcacccttagatctctctctatctccaaacgagaaggatttccttggccaactctagctgggccttaatgtttcctactttcctttgtccccatttttgcaatcccttgccaaggcgctgcagcttaatgaaaagacgctccacagcacaattagattgcaccggagcctcccaactctgtttcacagcatcgagaaaacccggcagtttggtccagaagctttcaaaatgaaaccgacgcctgccggtagtgctcacctttagacccagaatgagagggcagtgatcagagactccagctgttgtactttgcaggacagcatcaggaaagatattatcccaatcaccacaacagaaagcccgatctaatcttaccaaggtaggcgatctcctttcattggaccaagtatatttacgacccaagagcggaatctctttgagatcattgttatccagaaaacgcctgaaccttcccatcattgctctgtccaaatttgcattgttcttatcagcagcctgataaatcaaattgaaatctccacccagcagccaaggaccattgcacagagccctgatattccttagttcttgcaaaaacagcaccttctcctcatctccttgtggcccatacacgccagtgaaccaccaattacgaccctctagctccgcaaacaaaactgaagctgaataattgtctaaccttgtcgcaactgcccggcaagagcatcccttccaagcaatcagaattcctcctctagtcccattggctgggagcgcaataaagttatcataggcagtgccaaagaccgaaaggaagagatgctgggacatgtttgcgaccttcgtttcttgcaaacaaacaatgtccgcgttactggacatgatgacctctctgacagaattcggatgatctcttcgattgagaccccggacgttccaaattagaatggaggaaggattcatttgacccaagaataaggacgacctcaagaaggaaccagatcttacaacattgtaaggacatctccagctctcacctcctcaccgtctcccacctcccagccaaaaatagcagctaaagcacagacatgggaaacagagagcgatggcgagaagagcttactatacttgtcttgagcgtctggctggatgacctccctttcttcgaagcccagctgccgcatcaccctcttctgggccactgagagcgccggtcccggagagcagggagcagccccagcaacctgtctgctgcgccgcggtagatacctagggggaggggccttctttctccgtttgtggaacacgggcagcgggaggagcctgtccaccggcttgcgcacatcgtcaagcttctgcagccgggacctcgcccccgggctcagggaagaaccattctcgacagatggcgcagcggtcccagcccggagccgccgccttgaataaacccgaagtggaggggtggcagcagctccactccgcacgaagacaggccccctgccccccgattcgagcagagagcatggcggggcagagcttgatggcgccaaatcagcctcaatcttcagcgaagcagcccccagccccagccccccattaagaattggttgggcggccagcggtggagcagccccaggcagagccccccctccagcggtgaggggagccctgttcgggtgaggggagccctgttcgagtagcaggcggggaggggtccggcgttagaaggccagaaacggggatggagtgtggaggcacgcgtggcgaggcaagaaatggagctccttccgtcgccaggccgactgggcggctcgaagagcacggctcgatcggctggccggtggagcaaattactgtagcctcaccaaggctcctgtcaacgaactgagagttacatcccagcccaggggggactcctatcttcagatgagggcccaattccagcagtagccacgtccgccctagagagaatcaggagcccgtcatgaacttgtgggacaacatcggcatctgaaacgaccgcaattgccgccgcctcctcctcgggcatggggccgtcctcgggaccgtgcgaagccacaaacaggaccgggttaccgtcgcctggaaggacctgctgctatctgctgccagatgacccgctgcttccgctgccgctcctagggccaccgttccaatgtgtgtcctagggcgagagctctccgtcatcctgctcctgctcgtgccttggtgtggcggcaggtttctctggccaacgaagcttcgtgcgcgaccgccccgcaacggtctcctccggcgggtgtggctggcggtgtgtctcgacgtgctcctgttcttgtctccgtgtggcgacggatttctccggccaccggtgcttctagcgctgccccccgcgacggccttctctggctggtgcggctggcggcgtgtctcgacgtgctcctggtcatgtttccgtgtggcgacgggtttctccggccatcggtgctacaagcgctgcccctcgcgacggctttctccagcgggtgtttctggtgacgctggcacttcgcagggccctatggaggtgcatggtcagggtcatggcgcggcggccgggctgcctcgtcgccgtcggcgcccgcctcgggcgcagcggcgtccagtgcaggatactggctctgccatggctgctgggccgtttccaggcacgacctcatcggagacatcctgtgatgacctgttgaggcctcctccgtgcatcgttgattggtccaatcacgtgtctagggctgtggaggacctggcttatgcagtggtggtgtctgtgatcggtgacggtcctctggccgcggtggaggaggtagcagcggtgatcgcatcgagaattgaggttgttgccagctccttagtgctccgacacgcttcttcctctagttacctgctggttcttcctgaattggccatggttgagcgtctggttgggttgcaacaacccatcagctcacctggggtgaacttcaggctgctgtgcaaacgatggagccgtctatccggaggtcatggccgtgttctcccgtttctgttggatattgagttgcgcggtattccaaatcatgtgtggggagcttctattgtggatcgtctcctgtgcccccttgcttgggttcagcaggtgcatcctgatactcttggactcgtggatctctcctgcttccggtgtttggcctggagtacagacccatctgtgctaccttcgacaagagaattatgggtcgttgagccaccgacggctcccgttgaggatcctccagtcaagagggttctggcttaccctgcattcggtattctgtggctctccatcccagggtgccaagccctccttctcatgggggggatgttgctgatgactcaacaagacggcgacgtcgtgtccgttccccatctccgcctcccagctctgttccggcggaggatgtggctctctgccacggcggcggttctagtccggtggatggtgttgctctgggccacagcggcggtgggaagtctcacgtagtccactctcaggctgcgtgtgttcagccattggccgtgacctcggggtccaaagcaaccttctcacggacggagtgaatatctatctcaatatgcttcgtgcgacaatgatgaattggattctgggccatgtaggtagcgctgacattatcactgtaaacgatcgtcgccgatgagatgggtgcatggagctcctgaagtaactgacgaatcccgtcaaacaagtttcagccacagcgtgtgcaacagaatgatattgagcctccgcactcgaacgagagaccgtagtctgtcgttttgaggaccaagagactaagttgtcgccgaggaagacacaatagcctgaattagagcgccgagagtctggacaattagcccaatcagcatcggagtaggcggtcaagatggtgatgctgcctgtgccgatgtgaagcccggtggacagggtgcccttgacataccgcaggacacgcttgagcatcgcaaggtgaggctctcgcgggtcgtgcatgaagaggcaaacctgctgaagctagtcaggcacccaaacagacaaaagatgcattatctaagtctgaacaaggagtaagcgaccctaccaaacactccctaggtgaccagcatgaccacagttgtagcacatcactggtactgaattgtcaatgttctccactaaattttataaactatttggtttatcagcttccttctctgtatccttcccttttccttggacagtcattctgtacgggctcctagggcatgttctgctgtaatctgggtctgtctgttcccctgatgctgttgagcaatgctcccttccaaactgaaattgccaaaactcctggtcgtattttgcaactatgtttaacacctgaaaatacagttaaaaaaaatagaaaaacacctgaaaatacaactgttggttttcctatgtttaatgtttaagttgagattatgttgttctatataagtttttctgtgtcctgctataattgctacagtgtacatttcctctcggttgttaggctttgggaacagtgcttgaattttataaataagtggtacatgctattacctgcttttcacatcctatcaatttttcaggtacacatcggacctactgataagcctatttcaaa

SEQ ID NO: 4777 - DNA, 2477 bp, Sorghum bicolor
  Intron number 1 from transcript Sb10g011270.1 (locus Sb10g 011270) derived from phytozome v7.0 (chr-ID chromosome_10; pos 16496846 to 16499322)
tctcaggtagctatagctacacaactagtaccatcaaatatattattttctaattattcaatttcagattatataattaagtagtactcccctccatccaaaattgtaagtcatttcaaaaatcttggagagtcaaagtattttcaagttttaccaaaattataaagagaaatagtaaaatttgtaacataaagtgagtataccaaaatatacttagttggtatcataataattattattttatcatataaatttggtcaaacttaggatagcttacaatttgggattgacggagtagattggaagtttctatattttctttctctcttcatttttcttaacacaaaacccacagataatctgtaagccatatctggccatcacggtgaactacgaaaagtatgtactcgctctgcaatgaaatataacagagttggttttgtcctgagtaaaactatgtaattttgaccaagtttattacagaagaaaagaaaaatatgtaggacatcaaattattttatctggatataaagtatgaataaatttattttaataatatacctcattgatgtgtggcagatgttagtatttctataaatattatcacactgaacatagtttgacttgggacaaacttggatcccatatattttaggacgaagggtgctcatgtttatttggtatatatgctcaatttagatatatatttaatttggggaacattttagtttatgttaatagaaaaatacatgggtaatttggatgcaaattgatggggttacttgattttatattatattttataatagcaaatatggataatttaaatgcaactataggagttactatataaattatccttcttaatgattaaggtttgtagtttagatacagatatggagggctatttacgtttttttatatggctcaagtgtataattttttaagaaaacataatagacccaagggttgccattctctatgaaccaaacgaattaagggccaaacagttctaaatactatgttatatttctttgatgtgtgtctagacaggttgtaattttgtttttctttctttctttgttgctagttgttgttggtcttggttaacttctggctaaccatggaacctctcggagtcatttggctccctcttcctttaatattttaatgccaccagggggctttgccccacggtttttgttcaaaaagagttgacataacttaagctttggtgtcaaccaaatacataataaataccaattgaggtgcaatgcaaatgttaacaacacatatcttaatatttcgcaaagcctgcgaatcaatccttgcaagatgcattatgaaaaaatgccaaatcctagaaaaatatatatccacatctttttatgacaccatgactatacatttttgtgtttcacctttgatcatattagttgctacagtttttttatctatatgctaagtcgaaactcttaacattattgattatcatgttgagaaaatccttttattttattaaaaaaatagtttctagatcctatactacactcttagctaccacaatggcgaaaacagccatttcggtctgaacctattcactcaagatgttgagtttatttaccatatcaaaaagttatatgtgtattagtattttttttgaagaatatagagttttaggaactaaattactattataaatatgtcatattagaagtcaaaatttacacacttaaataaagtaacaacttgtaaaatattattgttgtggagaatcaatacaatataattaaaattttaatactgacactgatatgtggattgttaaggagatatttatttaaaaaaataaacatgtatcttgctgtatgcatgtttactttgtctacatggagggcatgaagcattttctttatggttcttgagttattttctatagtggcttatattggtatttagacatagattagtgggttatttaaatttgcgctggaagaacaaaggagggtaatctagatacaaattaaaagaattactttatatcatctttcataaatgatatagatgtgggtaattgaaaagaaaatttaaggggctactttgctttatctttaacgatggtagagtgatttagatgcaagtttatgtgttattcttaaattatcttttataatggcgagaatttagaatcaaatctagaggttaatttatgtatttttataatggcagaggtggatctactataaatatttatatttttatatatagtttacttttttaaacatagtagatgctactagtgtctctgtatattaactcgattaaatttaaggcatatagtttaataacttaggacaaactcaaaggtccttatatattaatttatttaattaaggatacacagacagtgcgtgtttgctcacttgtccttcaccactgtgtcagattactgtagccatctacgtgttccacaagtc

SEQ ID NO: 4778 - DNA, 1772 bp, Sorghum bicolor
  Intron number 1 from transcript Sb01g022390.2 (locus Sb01g 022390) derived from phytozome v7.0 (chr-ID chromosome_1; pos 27861780 to 27863551 reverse strand)
accaccgccggccgctgcacgacgactcccctacggtaacaattctggattaatcaactgtctttcactcgtaccactagccagtagcccataccccagcagagtttgtgaggcagagtgccttctttcaccttgtctcgctcgctcacgcctcactcgtctcacctaccaaaatccggttggcttggctgtagttcaattgcagggcgtggaactgaagcaaccggaaagtatgtttacacttgaaaggattcgaatttcttgatcgacttttttgatgtcgtgtcgagacaaaatcgaaaatttaatttaacataacacacagtacaactattagcacctagttactgaattgttagaagacagaagcgagcctagtttcagttgttctagacagaccactgcggttctgaaaagatcagacagttcaggatgggtgtataacgcagctaatttttatacttttttatactttttatgcccatgagaagggaccaaccgagtaccaccatcacatccgtagaattgtcatgtacaatttttagcagcgattgactggccctacggctttgtttagttccgaaaagtgaaacttttcggaactgtagcactttcgtttgtttgtgacaaatattatcaaattatgatgcggcaattgcagatacaacaggctagtgcatccaattatgcgcatgcagtgtacagtagtagcagtagtagtgattggctcaactttggatgaaaaagacagcctcatcaatgtcttcctagcctccaaatctgcatttgtctgaatcgttagctgtactgatctatgggccacgtcgttgtccatctggagggagaaggttatctgggcaaaataaataaatcagatttatgtttgtaccttatttgatggtgtacaacaacgtcacccatccatcagtggatggttttagtagcttcagcatgatattggtccaattgccaattgcatttgttgctgactcagtgggaagcaggagttaatgggtttgggagcactcacgtgtgcatcaacttttcagcaatttgttttccctctgaaattcatagaatatattgatgtgtgggtttgcatagatactaaacgacctcccatggacgctccttttatgagtccaattttaactaaccttaccagtagacggcagtgatgcggcggagtacagtgatctgaattaataaggctatgggcagcttttgggaatcgaattcccaaagggtgtgattagtgcaggtggttatagatgttttcttttttaatgagaagaaactagatgtggtttagttggccacgataaagtaaagtcattcccttctagaaaagtagtttggctcgttactttcaggtggtgatgagtgcatgacttgtattgttgttggtttattatcttgttgatgtgctacctgatgaagaactgcaggcacagttaactactcgtaaagtgtgtgccaatgtgtcgttcactgatattagtgacccatagtttgacatattccacatacccatgaggaccacatgttttttttttcagattctcaacatgacattttcaatgtcttgcatgccgaactttcccttggattaccatcatgtgttccattgcttaagattgaccaactgtagcaatgtttccaccaccaatcttgcatgtaattgactggtgctgccaaagactggccaataactccaatctattgctatcgatgcagggaaggaagaagttcctgagctatttccattgctg

SEQ ID NO: 4779 - DNA, 9864 bp, Sorghum bicolor
  Intron number 1 from transcript Sb01g043520.1 (locus Sb01g 043520) derived from phytozome v7.0 (chr-ID chromosome_1; pos 66656708 to 66666571)
cgtggcgcttctggttccggtcgccaactcatcaggtaccgctgaaacctttgcaccctctgaaagttcagatttgctttccactgctgtggcggtttgggttctgattcggtttctttcggagtattgagatgctcgatcttgcgagctttcgacattgcctttgcttctccttgctcctttttctcccttttatttaaggagcatctctgaatatatcagcttatcaatcaactggatgcaatgcatttgaattgtatataagctgtcagcaagatgcagctctgctcttgatctttttctggttgacgagtatgtatggcccttgcaaagcgatcataggcccagaaccacttttatttgaggagatctcctcgctttctcggtatttagaatgaagagttcacactttctgaatacaaccttatgcgtttataccaacagatcaataccactcacaaccaagaattttgtttttatttcagcagaacagctgctaggttttcagagcaaatataatattttttaaaaaggaggtataaaacctctgcttttttagaaagcagtgtaacagtacagcatcacgactggggttacccgttcaaaacatagcagtacagcgaaaaccaaatacaactacaccactagatttccactacattagaaggagcaaatataatattaattggtagaagagactagtaccgagtttcaaaattctccctcacgtgtaggcttactcgcatttcagatgtggaataccatgtagaatttgaggcctcctgtcctgtccagataacatactatacttgaacaaatagttctttcactcacagagcatccaagaaatctacgcagtgatgactgatgaccacgtattgtacaagagtacacgtgctagtttatgttcgtcgggatcgatacagcagttgcggccatcggtgtcaggtagggtggtactttggtgctttcagagagacgtcggtgtgtgtggtactgtggtagcagttttttgtgacgtttacatacgcgaatcacacacacacgctggtagtgtgtgaggcacgtactcagcacctagccacaaaagccaaagacaatacacgaacgaaacgtccacgagagctcacattgttgccgtatccttgtcaccgtgatcgttgctcgtgtcgtcatcttcttgggttcttgggactgcccctgtaaatcgccatcgtaaatttggaatatatgcatatagcttcttagttagtgatggtttctttcaaagaattttccaagacgcgggaaattgcgatgttgtgcttctctcttgctgctctgttgttgtcggcatgagcaaaaattgacacacgtatgatattttcagacaagacacaagcgcgtacaaagcacatggttagaaccttatcctagctacagtacctgtaagtactgtatataatacacgcattggaaaataagcacatgtgtactgttgggagtactaggggcctgaaccgtaggcaaacgacacaacaatcatgcaactctgacgctttcttcccctgtccgatctcctgtccattgccttgccgccatcatctccatgcattttccgctactagtcaaacggagctgaaatgaaaagaaagggtctgtttagtccatcctgcaaaccaaaaaattttcaagattttccgtcacattgaatcttgtgacatatacatgaaacgttaaatatagacgaaaacaaaaactaattacacagtttagctgtaaatcacgagacgaatcttttgatccatgattggataatatttgtcataaacaaacgaaagtgctacagtaccaagaacttttcatttttcgaaactaaacaaggcctaagctgaatatcattgggggtggatctgttcttgtccaagatcaggtaagtagtgttactgtacttgatgcctgtctttcgtgggggtatggaatctttcttggattattttgctcctataagtaccctctgtcagtgcgctattggccgattcacactgctctcagacaaaattcaggccacatggtttttgcatgatctgtgatgtagagaagcgtacgtgccacgtagtagtactgtagtttcttccggcacattcgttgtcgtcatgttggaggcgatgctcgaccaaaaggcccatttaggtcaagcggtaggttaatttcgaggcagatagagaacgagagagagctagaagggcccacgccgcaggtgtgccgcagttaaacggatgcgacgacggaggatgagaaagcagatcgagccggcggggaagacggtgagatagaaggatcctgccaaggtcggccctgtggccgtggtggtccaaactcatcggggagcatgcagtttttgaccccgtttccctgtccgtttgcacccggtggctcggcgtgccgtgcggctgctggcttggcgcatgtgcgcgcgctacctcccttggtagtagtggtactctttgcggccttgccttcccgcacggttgcatggcaaaaacagatgctagtctccccgccgagggccgagggccgaggccatcactggccaccacaatctcgttggcctgtactgtctgtaaaagagccatggtccaatccgtggacggatcccgttatgcatgctgcagcaccctactggtctccatctccaatccttccgagctgacccgtcacttgtgaacctgacagctggtcttcaccgtttcactgtagcctcagctgacgctgacgctgcaatagtcggtctgtctgtccgtccatagcaccctgatgaaccctgatccatggtgagaggggagagagagatggcaatatgccaatggcattagcaaaccctcgaaagccgaggattcttaatgccatctagctagagcgccctatagctttacagcgccatccgcggcagcttttgtatccggcaagcactgttgcgcgaggccgggccggccgcggacgccgggcggggaccagggataacgtggctgtttgcggtgcgcggagaccagaccagggaacccccctcaccggactagtgacttctctcactctcaccgcgcgcgaacggttctggataaagatcggcggccgaaaaaaggcagtcaccgctgtgccggcttgtgcgagctgcatcccattcccaggaggaggagcgagcactagcacaagtactctagtactagcagcagcgcggcagcgccgcggagtgttcggctgcgctggcgcgttcgctttccagcctcgccgcggcgggacgcgggtgcgggcgcacggacgccgtgaccgtgaggttcctccaacggtggcccgatcgcggggcctgctgcgttgcgttgccgtcgggttgagtgaggtgtggatcaccaagcaggaagagttgtagctacccgaacggtgtgtggttgggttgaccttgttagcgcgctgccgcgcccggccagctgatgctgagctacctgcctgcctctggtggtgactggtggagtggtaggtgcgtcgggtcccaagtccaagccgccaagcctactactactgatcgagcgcgacaggtactcgactccagccgtccatcggtcttctcccagtttttggtcgaatttgggtaacctaatacggtactaatggttgcaagcagggcagtaacatgcatgtacgcgcatccgagcaggtgccaaccacgtacgtacagggttacaagtgtacgttttggttagagctagcttttttccggtgggtgatcgtgtttgtttgtttgtttgagttggttatcacggtagtgcacacacacgcgcgcgcgcgcgcgcacacacacacacacaccatctttaattctttatatatcatgcttgatctgaactcgccatacgtgacaaccaactgacacgtacgtacaatagcgtcggtggtattgttagggaattaataagctatataagcaactttagttgctgaagcaacatccacgctgtagtacgtgcgaattggtactcgtgattagcactaaatacagtactaaatatacttatcgtcacggatcgctagcgtaggttgaaaacagtgatcgagatacgtacacacgtactgacggtgcctcttaaccctcaaaatcccagctgctccttggactactttttgagaaggaaaaaaaatgacttgacacacaactttaagcctaggaaacgcggggatgtgagcctgtgatacagtgtagtgtcaactgcgtgccgatcaaagtcactagctagcgatagctgaagcaagttacacggacgcaccggccatcagtcacgtgataaacgggacaacaaccgcggcagggttcgaaaaaaggaaggtcgttgatgactccgactcgagagggaactagtactccgcgtcatcttcgtctcttccggtctccatgtccgacggtagatgccagacggacggtctccggtggacgtacacggcgagtcaggccaggcgacacgcgtacgcggccttggcactttggcaggcctgccattccccgtgctcgcgcccgcgggtggttcacgttcgcgtcgttggcgttgcaggtgcttcaacgacacactgccgcgcgcctaggaccgtcctgccccaacatgaccagggtgtggtgtcgccgagtttgttgagctgtatttgtccaactacacatagggatgtttagttaaaaaatacaaaatgtaaaataccaactactttgaaataatggaatgtaaaatgtcaaaattttcaagatcatgtttagtgtcatccaaaatacagaatttattgcccccataagggcctcttgaggcttttttgttttttttttttgcctcttgagggcaaattccaaaatagagaataaacacatttttaccaaaattgcatggtgtttagtttcattttgcaaaataatgaaccaaaaccaatttttttagaatataagggactaaacactcccttagatcttgtttagttcgtaaaaagtaaaggtttttaaatactgtagcatattttatatcaattagtgttccatcatgaactaattaagcttaaacgtttcgtctcgcaaaaaaatgtaaagagtatgcaattagttattttttaatctaaatttaatgctttatacatatgtttaaacatttgatgtaatgagacgaacacttttgggtaaaaactaaatagggccttaccaccaccaccttcatcttttggccggtcatagaatacattgatacactacctccatcacaaaaaaatgtttctttgttaaagtatctaaagtttattaaaactattaatacaccaaatagatataacataaaaatatatatcataataaatctaataatacctatttgatactttcttaattttaaattataagacgttttgactttctaaatacatagcttttctatgcgcttagatataaactatatttagatatatagtaaaataagattagtgtacatagaaaaaccaaaatgaatacaatttagaatagttagttgattttaaatactttaactagctcatgtgagagctgtttttttagatgagaagtgtttttttcacgaagggagtacaaagttacgttatattttcggcatagggtttagtaacagcagcgattaaatcacaagatttcataaaatgctgaaatagtggctgctgccgactgttgtttggtcatgtgacaggatggtggctggattcattaccaactcagcgttttttttttgcccatgcatcatgaacccaaaattccacaaaattccacatatagtacttcttctgtggccatattcctgcgacgcaataatgttcagtgccagtatctgtcttttttagttaatgataaaaacaactagatctgccgggcaagtcacatggctatgtgatttatagagtatgcgccatattttatatatagtgaccgatctggagttcatagtttgggcaagaaattgccatgtgattgacgtttaggcctcacccatgtggcctgtttttggtcggaaaataaaactgccttgtggttccccaaaaacatcgtcaatgtgcttggtgtgcgccctagctagacatccacttggtgatgattagtattaccacaaatttaaaaatacaaccagtcaaggtttgtatgtcaacactactagctgtgtttatgttggacaacagtcgcaggctaagcagccgacggctatattattttctgaatttaagtcattttatttaccttttttttggcagaacgagttagctagacggagcttcgttgccactgatagttaaattttaagattcgacctcttgttattacatcatcacaagctcatcttctggggcaaatggtcgaaaacgcccttttctgaatatatattactgttagtcgacaaagctcatctttctgaaaacgccctctcatacgatttgacatcctcttacaatctctctagtggtgcctgctggacctcacaagacactctcaagaaaaggcaggcattaggaaggttagatgctaagcaagcatgcgattaggaaaagaaagtgcccgtctgaggacgactccttagcgagaatactatagtcgccatgagacagatcttggcaagcatatataacataacagaggcattattgttgtagggagctaataacacgctgcaaagtgcagtttgaagctattgttaaaaagctactgcttacctaaaaccaaagaaaggggcgaaaatgacgttcttaacttcttatatatgtgctgcccgcaataaattgcctgggttctgttggatttagagcgtacatataattaaatgtttgatgcttatggctgtccatgaagaaaccagaactttgtgaattttatttccttttcatatacagcacagttatcataattctagcagtcatgataacactttttttatattataataaagaaagcaactaactggtgagtggtgtgtggtggtggtaatatatatgctgactttctagggggtgatctttctcatgggtcacataagcaatcatgttgcaaaagacctgataattaattaaaaaaacatagttattgcctatattaaagagatcctccaggacacccatctgagaatttcggagattcagtacaaaagttccagcaacaaaacttacctaattaaaaaggccagctttcctatgtttgccttttgtgtccaatcaatggctgttttaccatttgtgtgcagaaaagagaagaatatactgtatacaaaaccatagttaaagcttgtcatgtgtttcaattcaaggtagtcttgttgtaggtcatctttttctaaagttttgttcatatcatttttataggttattatatatatgatatgtacaccaaagcttttgttaagggtatgtagtagttctggtgggtcatccatcaaggaaaggttgggttgtgattaatgattatatatatattgttcaataattgtgacgtttaatctaagtaagctgagaccggctcaggaatcgagattgcaagtagccatcagaaccagaccacatatatgtggtgcgagctcatgaggtggactcgagttatcgccatcgatcaactcgtgatccccagcaatcggagcgttcaaccataaatccaactcactaatcagtccactattcggttattagaatcatgcgtggtggctaacgtttttattgtcattccaaagagcatctgtttggtgtttatatggggagtcgaactagaaagattttataatgttgtttttttttcaaaaaagaaatataaagaaaaccactttttgctcaagcctggaatagtggaataggtagttcagtagtgcgaacaagacttttgctacttttaaataagtgattatattgtggatgtggtttgcaaaatagacgatattatatagtgaaatatagcattaactcatttttacttttacgtgatttgacatttttcatcttataaaaaaaaatcgctgaaatttggctaacgctgatgctgaaatgttgtgaggaaaaaacattgttcttttgctaaaagtatggttgaagtagtgttgcaaaacatggcgtagttctccaatttgatcttttgtccctctgaaaattaaagaattagattagaacactaaaacaacaaacttaggtaagtatatgtcgcgaaacaatatggtatgggttttcatattggtagaagtaatgaataaacaatgtaaacgtccctccattacttcaatgacgccctaaactattagtactagtagatgaccttagtttagctaacctaaacctacctaagctctttagctcccgtaatgcttgtcattcgaaatcaaagccaaaaccaaccacaattaattccttccaagttctaacctaatacctcgatcagctgtttttcctttccaatccacaaccgcacaaacattatttttctgatacttctagcggattaaagtttgcatcattacaactttttgacatgacattaattcattatcattttcaaccttgtcataaaacaaaaccataaataactaacattagtaccagctccggtcacttaaatttgacgtttcagactgttttcgacttgcacgtaattttatctcgctttcctggaatgtcaactaatcacccaaaatcaaaaacttttcaaaattcttcatcacatcaaatcttgcggcacatgcatagagcattaaatatagacaaaaataaactaattgcacaatttacctgtaaatcgcgagatgaatcttttaagtctaattacttcatgattagacaatatttgtcaaataaaaacaaaagtactacatctaaaaaccaaaaaaaattcgaaactaaacaacacctaaaagttactcgagagagcaaaacagagtaaggaataatccaagttgatcatcttgattcaaccatgcgcacacgtgttgctttccaaccctaggtcttgtttagttcagaaaagatttcggatttcagcactgtagcattttcgtttttatttgacaaatattatctaatcatggactaaataggctcaaaagattcatatcgtgatttacaggcaaactgtacaattagtttttgttttcgtctatatctaatactttatgcatgtgtcctaagatttaatgtgacatagaatcttgaattttttttggtttttttatgaactaaataaggccctagtagtaataaattggtcagacggaaacatcatttctttcatgttttttctttctgtcttcttttctaaatacgtaccctcttgtcaatcaaatctaccgactcacgaagcatctgttccttcaacaaccgttgttaccaaattcacggtttttacatgctaccccactgagaatgtgttgcaccaaaatggcactgtcactcgcacgtcagtgcaaacattttaacaattttttttcaaaaagagaaaattataaaagacaaaaaaagttaaaggccacacccacacaccgccggtctcaccctccctgggagagtggggacagcgtcatggccacaccacaccacacccacacaggcacagggcaagtgcaggaatcagctgcccaacccaagcaaagatccccgaaaccaaagcaagacacaaaaacgagcaaaacaacagcaaaaggagcgagagaaaaaaataaaaataaaaaactcacgcaaaatcccccccacttcactcctcccctgtccgcctcctctcctccccctcaaactgtaaacactaaacactgcttcaccagttcgctgctgcgtctcctcgtcctcgcaggcgcgtcgtcgatccggagggcgcccgccgccgcc

SEQ ID NO: 4780 - DNA, 1333 bp, Sorghum bicolor
  Intron number 3 from transcript Sb03g031160.1 (locus Sb03g 031160) derived from phytozome v7.0 (chr-ID chromosome_3; pos 59484777 to 59486109)
agttcctttctgtcgtccgtgtggatattccagaggtagtttatataagtttgattgcaatcattttgtttatgctattacatttcaaaattgaaactggtataatcagtcgtgacagttcttctctaattgctgaagtaaatatggagtaaaaggtaggtggatgtggttgtttggtagatgcatcttcaccttgtttaatgtcccagagttgagttacgggccagttgagtttcttagtgctacactgaagattgtcaggacaaccaagaatgtgcaccattagtcagatctggtgccttaggtagttagcactagatgttgtcaacaacattgatgcattcataatatttcaaacttttggagaatagtgggtagttaatgctttctatctggaactttgcatttggtatgatcaagctagcaatgccggacatattattctccctcctccaatgggatcttgtttggacttcggacttctacgccctgttttgtaggatctgaaatattccatttcatgttctgttatggcctgggttagggggctgtgccgtatgagaggattgagagtcttcgagggtgaatggatgctgaacgcctgaacggcacacttgagatttgagaatgggcatatgcttggacggtggcatccaaacacaaggccgaggggcagatgatgatctattaaaataatattatttcaaaaaaaaattcagaacctagatatgtaaatccatctaactaacaacctatgtaaaagttggacatatatgtaatatactaacaaactaatgccgctgcatcatccctgctgctgatctggtgttccttggacagtcagctggcctgacatgtccctacttgtaaaggttgagtatgtcaagatattatgtcttgtttgcatctaaacttgttgtatgagttataataagtgttagaaagcattttggttaccaatattgatcatatatgtttgaactgatcaattaaccttagaattggaaagtgcaacttatgatgcccatcctaaatgttcgatttaattggttatgctcttttgcgatttgctaattgcggtagcaattattggtttgtgacagttgataagactataagtgaactaacaggcatggtcttaactcttaacatcaacttctctttagtcgatgtactacttgtaccactgaaattgtcattcttttcattttattctctgtaagaaagaagtacttgttgtaactttaggtcccaacatatttggtcatagttagctttttgatgacgttttgcaactcgcagtcagaagttcttctcgaaggattacttcaga

SEQ ID NO: 4781 - DNA, 1565 bp, Sorghum bicolor
  Intron number 2 from transcript Sb07g006890.1 (locus Sb07g 006890) derived from phytozome v7.0 (chr-ID chromosome_7; pos 10089475 to 10091039)
ttgcaaggggtaaggtgatttttactcttattaggaacttgatagtaaccagcatatgctgttctaatgcattaactacctctattgaaatttcttcatgtttgttttttttgctgcttcgtttaagtaatacttttttaagtgtcaagttttataggtgattctgttataatctgcacttgattactcccatttgcagttgctgcctatggttgtggtgccatttaatgcttgtaaggaaaaatgacctattcggggtttccatttatttagctaatgcagtttagagaaggtgcgatcttaatccaaagttcaaaattggccaacctttttgtattctgcttatatccattccccatgagatttgcctattccctttggtatcatagacttccttattaggatactattggatacagacattgatgtgtctgttaattctgtgaattatcatgtcagatatgccaaaaagtaattttcccaaatcacatttctctttccatggtttacttcctggattgttttttaaatattaaacatagtgttgctgattagtacacaaggaaattgcaatgctcaaatcaaatcggaatcatatatggatcacaaaaaaggaagttgttatttcattggctgaaatacttgtttttgactaatagattgattcttttttaaaccaacaatgatgtttgtgcctctgcaaaacgcccaccagaacaaaaatgagcttgagacccaccaaatttttgtaactggatttccagttcggaattggcaaaattttgtttgtgcttacacatagtgagattttgttaatctatattttgttgataaaggagtaaaggactccttaattcatgcagtacccctgtccctccatgccacagccttactgatcatacctgcaatgcactaactgctgccatgtatggtggttattgctgcctgcaccacaggttcctgtgacattttttgacctgataattaaactattggcctacaggaataggcctcacatgtagtaacatagtttatgtcttgcaggctaaaatccaaataaatgaaatttacaggttagatatggaaatgctccctttttttatgtatgattctgctacatctcatcgtgcaacatggctggagcaagaatggctgttcctacatgatatatggggacaaacatcttgtcacactgaactatgcaaacagtgagattctggtggacaaggccatggattgcaaaggtgtagttatacttgctggtgaggttgaggtctagcaccaacagaatcttattattattgatgcctgggatgggctttgtacaattctcttacagttctctcacttgattcctatagtcttgaaggcacaattattccttataaaatgtcatgcaaattaactgaccacaagataaggaaatgttatatagaccagatgttgactgattctgtagttattacctatatgtagttgacatttgttatctgcacaagaatcgtatttgatatcatgatgcccatttggccaggctccaacaagaaaacgcagtgcagagtttg

SEQ ID NO: 4782 - DNA, 26103 bp, Sorghum bicolor
  Intron number 1 from transcript Sb02g001580.1 (locus Sb02g 001580) derived from phytozome v7.0 (chr-ID chromosome_2; pos 1394126 to 1420228)
gtggacctgtcgccaacatcacggcccctctgctggcgaatcttgtgtggaatgatgtgtatgatccaagctctgtcagccttggcaagatggaacatctccgattgctgggcacgtactcttgttttgtttatcaatacagtcacttcatgaggaatcagtcttgtgtaagtttcttgcagcgctttgagggcatcgatactcttcttctaacgctggtgtatccgctggtgagttcttacttctcttatatatctggatcaaattatgacattgccatgttatttataccatggtagtctatccatctaggttcttatatgtgacagatgcgacatgctgactagtcctaggctactgccccataaccaaagtttgctaaatacacctttttgtacataaaaaacttgcacaatataatgtcctaactgataaggcttgggtagacatataaagcaagaaataaagtacttcaggcatattaaacacatgagtctttgtttagggaaaaaaaagttgaattgtacattgaaccaaatggcctaattaaaataatgttttattaccactattttgacttttttgttgaattgtctagatgatgatgatcagcaaaccaccattgggaaaaatccatctcgtgttttggtttgctcgtgtctctccaacgttgcttagcacagtcattcatcactgttgttgaatatatgctgaagaaacatgagatccaaaatatttttctacagaaaatgcaatacagtcttttaagtacctcactatggccaggctttgtgtaagcaatccataatgtatctgttagctttattatagcgaccgtttcatgctggctcacaacaatggccagctatcaacaatcacttaagtaactttaagtttcattctctttataactgtcacatataacccccttggtttacttcctacggacacacaggatacaaagtattatcgatactacatgatggaggacatcgcatatacaagtggacatgcctttggggccagcgtattattccatgttctcagattgtgtaatggtataagaaggttgatgctgcaatttgttgctagtgactcaaaggtaaagctattctttgtttacctaatactccagccagacactgaaaaaatgtagcatattggtcccaaaaaggcacttttgaaaattattttttattaaaaaggcaaatgaaatcgaagtattatgaaactattttttcaaggtagaccgacacatgctgttttgtgaaaaaagcatgtgtttgtatttagttagacatggtacggaaaaggataaaacacaacttgttttcttattggagttagtatatttaagttgtcagagaagtaatgtgaaggaacctgcattttgcatttttttagcatgccaaggcttatgtgcagactgtagtagatagtagatacatggtttatttgatatcctaattatgtcaatttagtctagattttactgaatggtatactatagtcagtaaatagttgctctctttctaagttattgttagcctgtttgaaatatatatggcagtggcgagtcattggatggcactaggctgatcgacctttgtaatatagataaaagttatgaaatacattgctctggacaggaagttgaaggagtcattggtctgggtatgttcatttttttaaaagaaatgaataaaggttatgtacttgcattcagaacccatgcactaaacttgattcaaaatctcattaaatttacatgattaatagcatgttaattagtattacctggagttttctttgattttacaacagaagttatgctcttgtttgttatctctccaaatagaaaattacattgctgcacaatcagtttttagtctgaattatttttgtagctgttgctgtcagcacattgacagtttgacacacctcaaaagtatgcaggaatcttgcgtgcttattctctcctttttccattcagtccacaattaatattattaagtttatacttccttgtgtcaggcccaaaccgtatgctcaagggattgcatgtgtgatcagccagcagactgggaaaccaaggaactcttgttgaatcaccttgaagaagttgaaatcgatggattgaggggatctgaacaggaatttgcttttgtcaaacgagttttcaattgggtgacaaagcttaaagagatgacagtaactttccatttctcaatttctgaaatcaaggccaaggagctgtacaaagtatttcagattttctctaggccggaagtatgcatgaaattttatgtatatcgtaactgtagtaaggtgctatatgcacctgaggactagcgcaccagtttcactttaggcacttttttttttatttatgtttccttgttatgaaccgcactatatgcgagcatcagaattacagctaagcttaaaagaatgttaaatttttgtagtttttattcgcgggaagtgaagatcccattataggcacgctgaagttcagcgattctatgagcttgcttgctagctactgcaattttacctccgtaaacaatcacatggtagtatttagaacatggataaatatctctcgtaactgtgaagatgcaaaatttgacatcttggatatatacatttacaagccagtgggccacctgaggcattggatgaaattgaataaacctgtgacattgaatcaaaatgaataagtaatctaacctcctgaaggtagtatttagaacacggataaaagatctgtcatgtttttactcctaaaaatacataaatgcaaaaaagcgaccattgcatagagcacagacggtgcgatgcgggctgacaccccccccccctctctctctctcacacacacacacacacatgaccacgccaacgcgctcgcgcctcgccagagaagaagaatacgtgatggtgttacggtgagggctccggcgaggttagggttttattcctcggtggctctagaaaggggttcctggggaggcgaccatgacacgatggtggtgttggaagagacggcagtggggcggcgagagaagtcagttggggcggggcatcactgcagagcttgtcggggccctgccttggattagggtgggcggagtcgaggggcgagggtggcttggcgcggcaaggcacctaggtggagttcacctagtccacgtgtggctcacacaccagcagtctagcatcccctggcctccgaatcaccggcgagcattgccagcaccgagagtagtcccatgccgagtgttgcccctaccttcactgagatgtcttccacagtgggcagcctgatcttttgggatgaaggcatggcggcaccatatctggtggggcagactgaggcgttgtggttggggctcattggggcattgatgttggctactctcgtccacctgaaagtggatatattcataacaccctaaaattccatttatgcaaatctagtttaatttgatttaattatgcaatttttgtgcattcaaatatagggaaaataatcattacgatggtgagggtgaggcggctatggcaccgtgcgagggtgagggcaagccgccgccgcgggagggtgaggcggcgacaacgaagagtgcaagggcaggacgagcctcatgttgttctggtttggtgatgcctaggcgagtgcgtccgagttgggtgcgtgtgggcgctgcaaggggttgcgggggaacaaaagtgctcaaagccagcggtggaacataatttttacaggcggttttaattaaaaaacgcctgtagaaagaaattgggttacccgactacaaaaccgcctgtgaaaatcaatttttacaggcggtttttctaacaaaaccgcctgtagaaataatttgaacttgaattttttgagcttttcaaatgacctcgtttgaaaaaaaccgtcaaaatgaaagttgtagatcttgaaaagttatgaaactttgtagttgataattttttcatttgaaatcatcttgtcatcgaaaactatgtttgaatttctcaaatttgaaattcaaatttcgaaaatgacctcggatgaaggaactaccaatataaaagttgtaggtcttaaaaagttgtaaaactttgtagttgatgacttttccatttgaatccgtttagggcctcaaataatcaatttatgcttggtttatgatagtatgtggggaactaaactctattataaacacaagtgagtgataggtggagtggtagaggagggtacgcgcgagggtgaggtctcaggttcgaatcccaccgaccgcgtagcacgcgatttctacaggttggcataactgaaccgcaggtggttcgcaattacccgcctgtggaaaaatttatttccacaggccaccaaacacacaggcggttcgcaaaaccgcctgtaaaaaggggttacgaaccgcctgtatagtacctctgtgtactagtggaagggaaggcacaattaccatactaaccttccacatataagattaattagagctaataaattacttaggaataaaaaggaacctagaagtacccccaaccattgtaagagcttaattttacctacatcagaagttatatgcacctaaggattagcacaccatattgtccccttaggcacttttttacggcttatgttttcttgttaaaaactgtattgtatgagagcatcaaaatgctagcagaccttaaaaagcaatgttgagattcagtatgttttttattttgttgatgaaagttgaagggcttgtttttttttctgaacatgctgaaagtgcccaatataggcatgacattctttctagccctgatcatatttaggtatttcgaacatggataaatatatttcccattcccatattattactgtgaaattgcaaaatttgacatgttctgtacacaggcaagtcagtgggcggccctgtgacatattggccaaaaaagaataataataataataataataaatacgatttggccaatgactccttcaactttttctattttacaaaaaaagaaatcatcgatattttgtagtgaaaatctacggacatttgtgaagttggtaaaaaaatatttttaaaaaaaatactttattcctgttagttttttttacaatgtattcctgttagataaaatatccgatcttttgaagaaaaaaaaaacagaacccaactcaaggcacggacacatcctgattcctggcccaacccagctgattccaggcccagcccagaccaggccaacacggacgcatctttattccaggcccaacccagtctgcacgcaatagcctgagggagcgacgcagcctgcacccctccgcgacctgctgcggcgctcctcccctccgcgacctcggcgacgacggcagcggcggttcctcaggcctattctgcatggtgcgcccctctccgcctatttttcctctcgttctccattctttcttgtgctcttctttcatggtctaaaccctatgtttggggttctgtagtgacgagacaagggattggggatttgagtgaagatggacgctactgaaattctacaagggtaatctcctttgacacactctgtattcttctaatgttgtatctattttgctggtatttttgtgtgcacatggctgaaatttctggtggggcttgggctagacggcagtagatatgctgcagtcatcaggtctgaagggctgttcagtgtttgctgttagaataaggtgtgaaggctgctcaaatgaatctgcaatagaagttaacgtggagttaattgatgtgctaatgggctactccgtacaacggaggaacctttccatgatattcttctgcagttcaatctttcaatggtatttttctaaatactgaatattttaatggtacagggcctctaaggaatgatttagaatcggattcaatagaaaatgagataatacgcaaacaaaatagaagaaacaaatgtattgcaaatttttttattcctatgttagattcattatcgaatccgatattgtacaattcccttctatatggaatatttcaatggtatttttctaaaggctgaatcttttaatggtacagggccaattttcccttgtgaaaatggttgacgacttttcaaggccagcggacgagacccaaatctaggggagctcccttttcctctccatggagccttgctgctgcggcagcgatggcgatgtctccaccaagcgtgccaagctccccactggtgcctccgtcggcgtcggtagtgaggaccgccttagtgcgctccccgacgacatcctggtactcatcctccaccaccttagcacttgcagcgccgcccggaccagcgttctctctcgtcgctggcgccgtgtctgggcgctcctcccaacactctgcttcccctacaccctagatccccgccagatcggctctgccctcgaggctcacgaggcagccatcctgtacctctccgtcttgacccaggatgcggcccctgactccgtgtcagcctggctccccgtcgctgctcaccgcctctctggcaacctcttctttcacaacactgttgtgtgggggaggagcgcccaggaaggtgacgatgaggaggggcctgggcagaggggcgcctttgagctcccctgcctggagcgcgccaccaatgtctcgctttgcctaggattcctcggcctcacagtgccccctgccggcgtcttcgctcggctcaccgagctgtgcctggatcgcgttcagctctacggcccgggggatctcggtgacatggtttcctggccgcgatgcccgtgcctgcagacacccgggggctggacaaccttgccatccattccgattctctccagcaagtggaactcattgatctgcaaggcttgcagcagctcaacattgtggcgccagctctcgaggagttgaaatttacacactgtttcttctacaatcggagccaaccagttgccagcatcacagcacctcagctggcaacccttgcatggatggatccatatgacccaagctccgtctatcttggcaagatgaaacgtcttcgattactgtggccttccttcttttttgtttatgggcctgacagctttccgtacaaccaatcttgtttaagtctcttgtggcgtttcaaggtcatcgaatgtcttatgctcgcactggcctatccgttggtaagtccagtacctctcttacacgaattttcagtgcgtatgtgttttccttgcttgtgctcagatttgaaaactaaggcataaatgcaatcagagctgtgtcctaaggcatcgatgcagttgacaccagcacaatattcttacatggacaaggaagataaaattaagtaggcatactatatttaaatctttgctattagaatttagaatttgaaaagaatttgtagcttcacttcaagtcaggcatgcttggttggatgtttgtccaacaaaattgtggtgacctggtgatatacaacttgcttgggactataaaggatttatgttggtagagaactaggtatgcaaatttattcttcatgctcgcagttaagttatattaaccacttcctgcttggtaacaataatggtcatcttagtacttaagatgagatgctgttatctcgttgcaaatgtcatatgacccttctttttttgggtgacttcccatggacaagcaggacatagatgattatcactatatgatggaagatatgacaatgctaccggacatcactattttgcagctgattgtattggcaaacggacatgcttttggggacagcgcatttcatgttctcaggatgtgttctagtatcaaaaagctgatgctgtcatttgttcctcctactgtggtggaggtaaggctatcatttgtatttcttggctcaccatggctttttctgttagttcccctaggcatttgttctatattttttatggaagttatgggtcatatatctcgtaatgtatatatttatgcataccgttagagtatgagtattataggcccatgaggttaggcccatgtatggcaactctatattgctaccctgtctagggttagcctaatcaaggaaatcagttttgtaacatcaacacacgagccccccacagacgcaactagccactggtgatgttgaggctggagcggaactcgttgaaggtcgaggacgggagacccttggtgaagatgtcggcgaactgggagatgttcgggtaatcgggtcctccacgtcccgaccacctgtgctcctatagtaacggaatagttacattggtatttgatcttgacaatcaggggctaggagatattagcgagtattggtacataaaaaaaacagttgcaattttgcaaaggcctcccaatttgtaaaaggttccatatttccattggataacaatagccctgtagtcagtaaaaaatctcgtgaatatttttgacatcatatagtcatgtactcatgtctgcagtaccacactgtcttaggtcaaaacagtcatattgttgcaatctgttggcttcaaagtgatatccaggatgagtccttttgcaaatcttgtcgtccttgatttgcatatttggacaatcagacaagtttttggaatttcctgtgtgtccattccaccctacaatatcagttaatcttacagttacagtttaatgcgtttcttgttccaggcacaaactatatgcccaccaggttgcatttgcggtgagcaccaaaactgggaaactgagcacttgttgttgaatcgcctcaaagaagtagaagtcactcggatgagaggatctgaacatgaagttacttttgtgaagcagctgttcaattgggcggcatccttagaaaagatgagggtagttttcgatgagtcggttactgaaagcgtgggcaaggagttgtcccaggtgctacgaagctttgctaggccggaaatacgcatggaaatccacatgtatatgtaggacttgctgaagatgatgtgtgtactcgaagactaaggcaggggggttgtcgatttgtctctgcagttttcctctttgttatgtacgaacttctcatttgctggcatgctgaggagtgacagtcttgtttagatcatcagtacaatgactctgtaatgcacatttagaccccttttatgaagaatgaccaggatgatctttcttctattctatcatgataaagcgcccaatattaggctgttgcagtagcaaattttcctggcagtaacagacaattgtgttttttaatttgcactgaaacagataacttttctttctttttttctcgacctcattcattttctgcgatgattgcaatttgtatatatccccatcaaaaatatatatattttttgtttcctcactaaatgaaaacctcttttgtgatatgacagccataacgacattatattatttcaaagccagtcttgttgcacagtcaacacttgaaacttggtgacaatctcttgtagaataaccaaatgaaaagctcttttgggtttttatttttttttccctcttgaggtcaaaaaccaaaatggagaataaccatcttttttgccaaaaaatttgcatggtgtttagttccatttaacccaaatttttttggaatatgaagggaactaaacacccctttaattttgtatttatatttactggaagcaaatctcacatgtttctctgcattctccttcgtctgtgcctctctcctacagctgttctcttttgtaggctttgtcttggtataaatatatatatactagagtgcatgcttgacacactagctagctctccctcctccccaccaaggatggtgcccgcacgcagcgcaggtgctctcctcctatgacagcgtcgatcgaccgcctcagcctcctccccaatgcaatgctcaagaatgttgtgtcatgcttgctgctcgccaaggatgccgggcacatatatatatagccacgctcaccacgcattggtgtggcccctctagcgctcggtgccactctccatcatcatcaacgctcacatcatgcatcctcctgcatgcgctggatgtcggtagacatcactgtggtggacgctcctcgtctggtgaggctcttcgtgatatcatcttccatgcgagacagatgctcaaggatcaagatttattagccatgcacccaaactgcgcatgctggaacccacaacatttacaatgggatatttgttttctctcgaacaggcattgtgcccgtttttcattaataggatggctcggaaaacatcacacagtggaacaacgacggtgtggcgaggagtcttcatccgaagaccacaggcacactagctaccactaccggaattcctggctttgccgtgagccggaaactttttgccgtgtgcttcccatcgggcacacgccaaagataatatgttgccgagagccacaagcccggctcacggcacaacggaaacgctcgacataaaaggtcttcaccgtgcgctaatttacaagcacacggcaaagagcaccagtttgtcgtgtgccgaagcgaagccctcggcaaaaaaggaaatgcacggcatccctattctttgccatgcgctccatgcaggcgcacggcaaaaggctgacgccgttgatgggcatcggccgccgtcaaatatttgccgtacgcctcagagggcacatggcaaagcttagtgtctttgccgtgagcttccaaagggcacacggcaaacattccctatgccgtgtgccttgttctagcactcggcaaaccagctaaaaaaattaaaattaaatgaaaggacgatgcattcttgtcttcctcttttgtttgtaggccactgttgaagtttaagttacatgaaataaccgtttatattgctgtaatatatgacgatgcgttcttatgtcttcctctcttgtctacaagctatatatcagtgaagtttgcgctacacatgaaataatgttttaaatagctctactacatgaaatgacgatggattgtttgccgtatgttgtagcctaaggcacacggcaaagatggtggccagagccacctgggaactgcctttgccgtgtgcctggtcgggcagcacacggcgaagaatctcatttagtcgtgcgcctggtcagtcagcgcacggcgaaggatctcatttagccgtgcgcctggtcagtcagcacacggcaaagactaccattttgccgtgcgcctggtccgggagcacacggcaaagcatcctttcgtgggttttaaaaataatttattttgccgtgagccctgtgacgtggcgcacgacaaagctggccgttactgcgcacatgaccgttacgttgcttttgtgtgccgagagccaaaaagacacacgcattaggttttgccgtgtgccctgcggccggcacacggcaaatatggtcttcatcgtcagctactgtgccgtgcaatctttgctgtgcgcagcgcacggtaaatgcttttgccgtgtgcttacgttgcttttgtgtgccgagagccaaaaagacacacgcattaggttttgccgtgtgccctgcggccggcacacggcaaagatggtcttcatcgtcagctactgtgccgtgcactctttgccgtgcgcagcgcacggtaaatgcttttgccgtgtgcttcagacacacggcaaagctcctgagtccggtagtgtactggggtttcaaatgaactgttacataggagacaaatttcggaccaaatcgggcatactacagccagggttgtgaacctaccctcaacccaaacctctgctcggtgaccaccgcctggtatagagccagaattctggccgatgtcctttggaaagtcctgctatttctctccttcattctagagtgtctaggagatgagtttgcagcaatgagtcaaacggcggtcgttctcaagtgtcggtccacatcctagctgagcaaacatcacccaggatgatggataagctgatggtgctcattgccgctacctgcttcttggttttggaccgctgcaaggtccagtaacgctccggtaacgtcctacttagccactcctaatgcagcctcacagcgaagccgaagaaccatagatcaagaacgctgagaccacccaaagacattggtctacaaatagatgtccacgctaccttgcacttgcccaacgatgtgtactcggtgtcggcccaaaagaaacgcctaacgtcacttgtcaatctgagtcaccgcccacatagacaaaacaacaggtgttttgccgagagggtccacctttggtgagcaacacatagccggcatgggaagcagccccgatttccaggttcggattctagccggggcaaagtccacaagcgaatgctcctcacagcgtttgagcctagtgagctgtaaaggtatgccgagatatttgcatgggaatagggcaatgacgcataggaacacttgctgcaccgacgccgccatctcatctgaacactgaatcggtgtgacgacacacttgtccaatatgatattctattgatagaacaataagtcaagattttgcagaattttgttacaatatgataattctttggaccaattttatttgcaacaatacaatcatattactacagtcaaatgagtttctaggtggaattttccacaaatgttgttgatgacttgacttcttgatgacatatctcaaagtattttagcagtcactaccggactcaggagctttgccgtgtgcctcaggcacacgacaaaatgcccaaagcacacggcaaagaatttgccgtgcgctgcacacggcaaagagtgcacggcacagtagctgacggtgaagaccatcgttgtcgtgtgccagccgccgggcacacggcaaaacctaatgtcatgtgtctttttggcactcggcacacaaaagcaacgtaacggccgccgtcatagggcctctttgtcgtgagcccgtgtggaagcacacggcaaagacactaagctttaccgtgtgccctctgaggcgcacggcaaatatttgacggcggccgatgcccatcaacggcgtcagccctttgccgtgcgcctgcatggagcacacagcaaagaatagggatgccgtgcctttctttttctgccgagggctttgcttcggctcacggcaaactcctgctctttgccgtgtgctgggaagttagcccacggtgaagatattttatgccgagcgtttttattatgccttgagccggacttgtggctctcggcaaaaagttatctttgccgtgtgcccgatgggaagcacaccgcaaagtctccggctcacggcatagccagggattccggtagtgagtctaataatttatttttagattcctttacttccatggtatccaaattttctacttgatctcatcgtgttgatatggcatgtgttgtgtcaggaaccattcacacgaccttctgttcgtgatcgtctggtcgaaatccaacggtttggatgatctggcctggtcgtgatcttgattttgtggagcgactatttcgttcggcgtgcgccgtgcccttgcccttgccgtgggggcgattcccagatccgtgcgggccgccgcgccgccattcgccatggagatggtctccggggcagagaggacgagaacactagaggaagaggaagagcaggacgaagaccggatcagcaagctccccgatggcgtcctgggcgacatcgtttccttcatccttcctccccaccagggacggcggccgcacgcaggtgctctcctcccggtggcgccacctatggggctcctctcctctccacctcggcctcggagcgcacggccacagcagcatccccgccggcgatatctcgcgcatcctctccgcgcaccctggccccgcccgccgcttctctgtccccgaggactgcttcgactacagggacatgcccgacgcgaccaccttggacagctggttccgatcccccgccctcgacggcctgcaggagctcgagttccaccacgccagccatccttatttgccgccgccgtcgctacctgcatcagtgcaccgcttctcgtcgacccttcgcgttgccagcttcggcggcttctgtttcctgtatggagacggcggcgggctgcacttgccggttcttgagcagctaagcctaacggatgtcataatctcggagaggtctcttggagtcttgctcgctgcctgccctgtcctgcagagcttgctgatagatggtggaattggctgctccagtgtcgaaattgtgtcccccacgcttagaagcatcggcataagttctggcatcgggctacaacggctcatcatcaaggatgccccctggctagaaaggttacttcttgatagtattggtagcaaggaaatcaccgtctcggtcatctcggcgccaaaattgcatgctttagggccattatcggctcacaatatcagactcgagtttggcaccacaatttttcaggtatcaccgtgctgcttctcactttgtattcagtattcacaacggatccattccaaagtccggccctttatctgaataaactgaccaaagtccctcgtgaaggtcttgtcattaatacaggcgcatcttagtttggatgcggttattgaatccatgaaatgttttccctgcttggagaagttgtacatcgaggtgactgtcttccttaattgagtggccatctctaaaccctaaaccctaaagtccgaaggatactttatagagatcccagaagtgcttggattgacaaacaacacagactgcttcagattaaaaacaaggcttcaagggatatgcagcttgatttcgcatctagttatcggtcatatttccttatttgcaatgagcaagtacatgatttgtcaacagccgaccccttttcatgataaggcagcaataattttttgatatattggtcgcagaaggcttgtccaaggggcgtgcaggatgtttgaactcttctctggtccaaaaatacacagagagttcaggtatcacaacaacaagaaggtgtcttatgcactgcaagctgtatgtcttttgcttgtagcatatgcatggaccatgcagtatgcatggaattaaacatgtataagacgtgtgtagtttaatttatttcatcttggtaccagcttgaaatttctagtagataattcataaatgccggaaccattaaaatatagtttgattttatatgaaagtttttaagtgtttttacctgtttttaaaaagcttcttgtgtcgaagattgtagcgttggcatgctaaagactagaaatcattagtactttaaatgagccccatccagtacagaataaattctacaacctgctagcttttgctggaaaaaggtatatacttgggtttaaatatgtgtcctttccgcttgttgtcagtctgtgtgaacttcagaagtggaaagggatgttgcatgctaggctaaatactgatgagttagagcaactccaacagctttgctattcttattatgaaggtcttttagaacttttgtagtagaaaaatatgctccaacagatgtgctatttggttttgtaaaatagaaagtttgctatcccttgagtttcgttggccatatatagccaaccactggcactagctatctgatagcaaggctgttggtaacctcttcttttttaagaagttatctattttataaaatggctaaatattagaatttagctactcattttagctaagctcttggagatgctcttaggacatgatttgagttttttttatagtttccaatggtaaccaaattaagccctgatggcaattgaataatatcttcttgaatataaggtattgtgttagggcgatccgtgaagaatcaataattttatttataaagaaagaagaaatcattgtagagcaatctatcattagatttcggtgatatatctcaaggtattcggtcaattaagccgataatcgcaggtccacatctcttcttatataaaataatatcaattaattgacagtaaaatggaaatccatggagctctagttgaatctcgagtatagacaaagtagaaatccatgatgactttcgaggatctacacaagaagtttctttcctgatgtgacctgtaccttgtgactatcgatgacgatgctaaaattgacagtaagtattaacaaggaactagccactacatttaccgtcgcgaccacgtacgtacaagattttggcagacgaccgaaaaacatatttctacaggtgggcaagcagtccgccttccacgcctgtgtaaatcggaatttccggaggtagccaaatgtgcccctgcaatagattaaaacaacaactttttttttcgaaaggcggcaaaaagcttttgccgaaattttattagacgaggaaaaatacaaaagaaaaggtgaaaaacaccgaaaaaggtcaagaaaaaaactctactccactactgacgaccaccctggcaccctaaaggtcctgcggtgccaagaggaagaagagagaaaaaccaaaaacactaggagctactgactaagaggaaacaccgtcctctgaagctgtggccatcccgaactgatcgaaatcttctttacagagaaaggccacttcccttggctgacggtttttattttgaaacattcttctatttctttcgctttggtatctaacatattcgcctgctgctcccatcccaactgctgaccatccgcctgatgctgcacccatccgcgcctgctgctcccatctgcgcgatgctgggataatagagtggagcagttgggatttccccggcgctcgacggagacgaagctgatccagcggtgcagtggggtagcgattcagaggacctgtccatgaggaagcggctcacagtgaagaggaaaaaggcaattcggagtgagccgcgatgagctgctccggctgtggcaggagcgggtgagaggacaaggcgatggacggggtgaggaattacggtattcagcggttccatctggatccccacgatgggaaacttcacagcacgcaggaaactcttctctgcgcgcgggaaggattgcgggcaagcagacgtggcgagcgatttcagggatggcgagcggcgcaggattgctttctatgccgagcaaagtttctagatagcccaacttgctattttagcaaactagatagcatatctgttggagcttttttttaaaaaaaattctaaatagagcatacacaacaaagatagtatatctgttgaaggtgctcttatcagccaaacaaataagttggtcaaaagaaccgctggatagccagttctcgagggaaaaaaattctctgcagcgacatccatgatgggtcaaggacacatggacgccatccaagccgtgctgtataggcactgcaaggctattttttatatttgaaccctttttttaataaatattgcaatattaatcttttgaaaaaaaaatatattgcatcacatagtccttttggtcgtgccacatgcgttggcgtggcaaaatacgacacattcgattaatcgcgccacatgcgttggcgcggcaagatacgatacattcgatggcgtttccgatgtgggaaaacttatcacgccacatgtattagcgtgattggatggtcttatcacgccatcgggaatggcgagacaagaccaaactttcaaaaaatcataactcttttatacgattttggatgaagattgtttttatatgaaagttatagatctcgatgagatctacaactttctagttttgagtttttctatttaacgatgttaagttgctcaaaaaaattatataaaattttagtactataataatcacgcttgtcgtattataaaatcaatattttttttacattatggtgcttattatgtacacaaaaagtgctgtgttcacaacctggacgggattaagtgcatatggttttcttttggacgggagaggaccgaatgaagtgcatatggttttcttttggacgggctctggccctaagcaataggctggctaatccgttgggtttctgctcatggcccacctcaatataagcagcccggcccattacttactgtcactggcaaccctaatcgagtcatatattcttggcagtggcagctcgtccctctcctctcccaaaaaaaacctgccatcactttcttccatggagatgaggtcgccgccaagcgcgcttgctccaccaccgtgggggaccgaatcagcgcgctccccgacgaacttctgctcatcatcctcctcttcctcagcaacgccgcagacgcagctcggaccagcgtcctctcccggcgctggcgcgccgtgtggacactcctcccggatctccgcgtccccttcttccccgagcccctcagcttccgccgcgcactcactgcgagtcaactgcccctccactacctccgcctcgagggcgaccgcgccattgctgagtccctggcgatctggctccccgccgcggcgcgccggctctccggcaccctgttcttcttgaaccatgcgccggatcccaaagatatgccggcgttgtcgaggttgaacaagtggacgagcaataggacaagaggaggcttctttgagatgccctgcttcgagaacgccgctgagatcatcctcaacctagggttcctccgcgtccagatgccatccggcggcgtgttcgtccagctcaccgtcctcgtcctagaacgcgtctggttctgccgcccgtgcaacctcggcgccgccgtctcctcgccacgctgcccccgcttgcaggtcctcagggtctgcaacacccgtgggctgttcagcctcgacataaattctgaatctctcctggaactagagctcaacaacattgttgccttgtatagtcacagcatagaagcggcggtgctcaagaaattaactgtaatgaactgcttctgccgaatcgacaagaattttgccactatttcagcacctcagcttgtgtttctcagctggggaaatccgctgggtcagcagaagtttctcagcctcggccagatgccacatctccagtccattggggagttctcatatttggtatatacagaccaaagttcaaaaatagtatatacagaccaaggaccaattggcattccagacaactcagcttttatggagctcttgcagcgctttaagtttaaggccatcgaatctcttgctctggctctgatctacacgagtgtgagttcacttctgccttcattaatttggaaccatatatgcaaaacaaagtgatgtgcgcttgcagctctgcagatttatatttacttagtaattacccaggcaaatatatgagaattggacgtttatgctcatccaagtagcagagtatgttacacaataaacatttgtacattatcataatatttgagtagagtagccatcatgaaagtactttagatgatcaattgtttgaaaataaatgacaagtcttttggccatatttaagaaaaaaaatagattctctctaacacaggaacaattgatctagtagagtaaaaaatgttgcacttgattcttttgtcaaaaatgtggcatatttagggacatacataacatatatttgacaatattcacatgaagacttgtcttctgtttgctttgcacaagtacctgcaacactgctgaccacactcaattagcactcttttccaacaacatgtcctcctgccggtatatgagattcaaacaattttctagagaattattttaatttgttaagcatcttgtaatgaacaggttcacatgtgtgagtaattagctagttaccttatacctctactgtttccttggtgccgctaactgcaaacaatggtggccatgtttttaatcctatttttgccatttttctgaactgtatccgaaaaatagacccacaaacaaaaactgttcctggaattgattctgaactgagggccaatgtcattcgcgctaagggtaacagttcagctccaacaacattggtattgaccaactcggtccaacaaacatgggccataccccgcgcatggaggtccagttttacaaactccattaggccttgtttggattgttgtcggattcacttcaatacatgtgtgttggtgtggattggggtggaatttagttcaagttccactccaatccacctcaacacatgtggattgatgtgaatccaactacatccaaacaaggccttagttgtgtacactatcaagtacctaagttttaggagctaaccaatggctattttttactgtatagtccctggctccctgctcaatttagatgcaagctcaacctgaccaaagaacttaatctcaataactatatatatatatatatatatatatatatatatatatatatatatatatatatatatatatatatatatatatatatatatatatatatggtgctgagctaagaattggccaatttttctaggccgtgatctaaaaatcatccatgccttttgcactaagacattcaacctagcaccaatcgaacatggtgctaataagatggtcaaagtagaaataattttgaagatggacagatgcttcatgttttactcgttttagaaatattttgcagtactaatatattttgtctctttgcaacagtctaatatatcaggtttttatttttctatgaacccacaggatctagaaaactgtcaatacatgatggaagacatgaaagtgtttcctgaccctgcaattctgtacctaagtgtacttgcacatgggcattcctttggggccagctcattccatgttttcaggaggtgtcttggaataaaaaggctggtgttggtattattagacaatgctgttagttcagaggtaaagttatctgctatttatcttatattctagctacttgaaacattaaaaaaagctagcattttggacactgacgcagcacccatataacacaaatctgaatatctgaccattcattcaaacaaaattcaagccattgcctattcaaactatgggtattatgaaagtattttttgacacaaatctaagtagtagtcaaacatatgattggttgactgtgcacttgacactacaataagtaacatgccacttttgtgggtatggcagggagtagtcggaagaaatatgctcttgcagttcctgccatgccaaggaccgataaattgttagttgctctaggcactggttttatacttgtttgtttcaaagtttaaccatgccaaatgtatagtatatgtacctccttatcaaaacacactattctagtttgggtggagatatgcgtgattatttagttggacgttctgtttgaaatatatggcaatggatagcgcaagttaattgagtttttgcagtgcaggcttagtcgtgatattacagtaagagttaggaaattgtaagattttgatatgtatttaatcaaggattcctcgcttccatttgatatagccttgcagaatatatatggtctattgcaagaaaagtggctcacggttctttacaattctattaaaagaataacgtgcattatattgcatcaatttggtttaccatattccaatcacaatattgcagtcaaatcaatttaaaggttgaattcgcgcacatgttgttgatgtcttgttgacacatctcaagtatccgtgcagtctgtttctctccttctattccagacaacattatatgttattaattactatgctaatatgctgttgtatcaggcacaaactgatgatccatgcccaccggattgtgtttgtgatgaacaaaacaactggaaaaccgaggaacttttgttgattaacctgcaagaaatagaaatccaactattgggaggattcgaacacgaagtttcttttgtgaagcgactcttgaattgggcgacagcactgaacaaggtgacagtaactttaagctcatcaacaactgaaaacgatgccaaggagttgttccagatgttcaaaagcctctctaagccagaagtatgcatcaaattgatgtatcataaccataaggaggtgttatatgcaacctgaagtgtatcacaactttaatcttctgttcgtgggatatgaaccatggaaggaatatgaataaaaatattcatgtatcaacacttttgtaatttattttttggtaccatctgtggtgaatacgatatgacaatgctaggagatcattgaagaaagttaaatccattgtgttctattctgatcattccatgttttgtttttgcaactcaaaatctattatattttcaagatagagaggtggtattctctagtcttgccatttttctttcccatgtttcaatgattttttgtgtagttgagcactttagactttggagctccgattaggtaacatgcatggaaatgaaaaccactagtgggtgttgaaagcattgctttattggccgtgtcatctgttatgatgacaaactgttttattcgtatgggccaagatatgtgtgcaaattgggcacaactttgttaggctgtctacactcacctatactcagtataaataacaacattatggccccatgcatgtggacatcgtttgcatgcatcctcaccaaggatgacagcctaacacaagcacaagtcatctcttgaagtgccctcgtcccaacatggctgtgtgggatgtcctgcgttcgctcaccacttctccatccccatgcattacttgatggagcttagtgaccactctcctatattcccagtggcggagctagaggcctagagcaaatatgagggggcgcgcctgtcttgtgggcgcgtagaattttactgtgtagatacggatatggtgaaaatttaactataatcactgtttttgatatatttgtgggtgcatctgcacccagtatgccctatatagatccgcccatgcctattcccatgctctgggcaggatgtgaggctgatggtctatcacccttgactgcctcttgatgtgaggccacacatatgcctccatgccgcacttctcccctaatcttggcatccccactgaaaggagagttagcgcatagtcacttgatgttgtggcttcctttttcttctcaggacattcccacactattaaaagaaaaagatttatagtgacgcctcttttttatttgtgagccgtaagggcagctctatataaactcgcccttacaaatagacgttggatattaaaaattaagtgctaaaaatagaaagttttttaaacgacttcagaaaattcaatttataaattgacgaagaactatgatttctttttttttaatttctagctaaaacttgtaactaatctttcttcctcatactagtctttcttcctcgccatcctggtgctcgtcctcctcgtgccgcttcgatgccaacagctccgatccatgacgaggtacatatggtgtcctgcaccaaggacacgtcatctcgtcgttgtactctcctgtctccgggtacagcagcttctcctcgaacttggtgagagcttgatgcactatggccttgtttagttccccaaaatttttacaaaatttttcagattctccatcacatcgaatctttagacgtatacatggagtattaaatatagatgaaaataaaaactaattacacggtttggtcgaaattgacgagacgaatcttttgagtctagttagtctatgattggacaatatttgtcacatacaaacgaaaaagatactgtagcaattttgtaaaaaatttgggaagtaaacaaggccatagcttaggacgacttgcagagcggcgcttgcaggccgaggcaccccagctagcactgggtttacgtgttaatggcaaagcaaacgtgcatagctaggcttgctcgaacctcgcgactgccatgcatgaaaggcgtctgtatttggggtgaaggggatggacatcaagggtccacgttaaagtgccacttacgcaaaaccaaaaccttaatggaagcctttagttgtctgttgacagatttttttttagttagatctgtcagctttttccactaccgagaaaaaagaaacaactacgaaaaacgacatatttcctgtcagattctaataacggccaaacaggttaccaaaaccaaacacgttaaagaacttccggtacgaaaagcacataataaaaaaagcaaaagcccatcttaggaagccagcccaatccaataaaaaaaagcaaacaagatatcttgtacgagaagaaagaaactagatctgaaaaaggagagcaaacaaacaactcatggcgacaggagaaaaagtacatccaaaagcacaggagattgcaaataaaggtacgcaagcatcccaaaaaattgtgtactcaatcaagtagacttccgtcttctcacacaaaaaacctgaaaaaagagagacaaaaataggtatttgcttagaattgtagatgtgttcttatgaaaaccaaacaaaaaattaacaaaattgtagttctcaggctgaactcttctaactcttttcaaaaacatggaatagaatacacgattgttagtagcagggcaattgtttctaaggtcagggaagatcaatgaaattctaagcctagagaatgtgcgtgctgcattgcttcctcaaaacaagagttccacgggcgtcagaaacctctttaatagcactctattgggcatgtctgactgtattccaacaagcagtataagacaactaacaaatgataaaaagcaattaacactgagaagatccaaaggaaataagacaaggcagagccagaaaagatatctgagatcctgagcataaagagaaatatgggaggcaatgcgaaagataaatgcacaaatttgattcaaccattggacaacctaaacttcatttaaacacattctaacaaaacattgaaagaacagccatactacaaccaatcatgaccgaaagacttaagatacaagaaacataaaaaaacaccttatcattcattgaacaaccaaaagctgattgaagccttgatttgaagccaaactcattgtgtgcacaatcaaattcaccaacaaaaacaccctaaaaaatttacaatatgtcaacaacaaaaataaaaaaggaaatcaacaataaataaattataaaatagaataaaactaacaaaacaaaaccttttgatttttgatatccatcaaaacagaggctctaagctggcttttcaattcctttatcttctgcaaaaaaaaaatatatatcaaatactgaattaaaaaaaagcaaacaaaaatataaaaaacaaacctgcttcttaaagaactcaaataaagcttcatccatagaactatcatcaacaccatgagatgccatcttcaaaaataacaaaccagaagcaacatagagataaggtcagcccactacacctatgtaaaatggaactctgatgcaaaacacaaatgaataacagaacacaagcaacccaaccaaaaagtaaattacactcttgatgcaaatcacagattgataacaaacacacaagcaactgagacatcaagaacaaaaaaaacaaaagaaggagcagacaagcaaagtgcacgagtgcccacagcctgctagccagtgggtagcagtgcacgagcgctctgccgcatccacaatttggcacagcaccatcgccatcccctctgccacacccacaaaacacagagttcccctcgccagctaccgagaaaaataaaatttggagccggacggatctactacatgaccctcatcatgcatatatagaaaccagtagatccacaaacaaaaaccaaacatcaacgaacaacaagcaaggaacaaaaatacacttacaaatcctactcaaaacaccgctcacaacaggcacagggggagcacagcgcgtggagatagcacctgccccgcccgaagtccaacaaccagtcgccacgacacgacatagggacaacacctcacctgcttgacatagctcgtcgcagcagcagtcgaaggctccgccccaaccaaccgtgcgcggcgcaaggagagcatctcagctcctcagctggccagtcttgattggggtg

SEQ ID NO: 4783 - DNA, 2541 bp, Sorghum bicolor
  Intron number 4 from transcript Sb01g039915.1 (locus Sb01g 039915) derived from phytozome v7.0 (chr-ID chromosome_1; pos 63358975 to 63361515)
tctctgttgaagattgccgactttggatttgcaaagtgagttccatttctttcatttcttagatgaaatattagcacatatttctacaaatgtcctaaatttctgagtttatctgcaactgagttgcgtatatgcctgtttttgtgattttatttctactggtttggatgcaattaatataccagtactgctactgacagattgatcaaatggccttccatcttttccactcctccctttcttgatggtggagtcaactgagatccatgtgttgtctattgttctttgaaattgtttctggtagtgattagttaaggggctattgcgttcttacccttgtttcaaagtccaattgtgattttaccctcgcttttgttaccattgcgattttacccctgctttgtcaaaacgaagctttactttacccctactccgtgaactgccagtaacagtgttaaattggcttggcaaggacaactttgcccttgcaaaaataatcctacttttctgagtacattgtgattttacctttgtttttagaaaaaaaaaatgacagcaacgttagacaacttgttacatatatttccacacaacatgcaaatatagatagatacacagcgaatacacagttatcctcctaggaattacaccagcgaatacacagttatccgaatcgctttacaaagagaaactaatttccctacaaaatcacaccataggagctccaaatcttacctagtctcttcaccaacattgcgtaaatccatctcctgccgctcaccagcactagtgtctggcgcccacccgcacagggccctgaccgccggacgcagagcctcctggccgcccgatgtggcttctgcagcccacccgtgcggcgcctggttgcccgacaccacgctccagcccgacgcggcgcctgaagcccgacgcggctgcctccagcgtgacgcggcgcgcctccagcacgaagccagacgcggtgcgctcccgcctgaagcccgacgcagcgtgcctcccgctcaaagcccaacgcggctcctgtgcggcaattgctggcctggccctccgcgcgaccggccgtcgtgacgcccgctgattccgtgcttgcccagccgctagggttacatgggagagacacagaggatacggcagagagatagagagaatggggaattggggaaagatatgattggataaggggtattattgtcctttggtcttattgtgaagggttttgttgttttttattttttttatttcagaaacaactaacagagttaaaagtaggggtaaactgagccttagtagttacaaagcaagggtaaaatcgcaacgatgacaaaaacgagggtaaaatcacaattggactttgaaacaagggtaagaacgcaatagccccattagttaatgtctgaaagtctgaaacaacgaaggacatgaaaaaacactgtacatgggacaaactgatctgctcctttcctaacagatgtccccacatcctgcatggaatagtctcaagtctttatttgactgcagagtgtcaactattggactagatgctccctatgagtatgtatcatgtatatcatctggtcagaatgtggtagaaccgtaaaagttacactagcgcatgcaacattccgtcaacaaggctccaaatagctactgcaacatcgcataaggcgtttcacatttcaggcagaaaaaaattctgcaacatttcgaaataacatctgccacatgcctgcatttgaaactggcacctgttgcattttgaaagaatgataaacatttcctaactacatataacattttcagggtcctaaatggctaaaccaatgaatctggactttatgcaatgaacattaatgcagcactatatttcctttaggatcttttagggcttattgctagtagcgatctctctgaagtttctggcatttctaaacataagtatacaaaggtagaacacttctgcaacatatttatcctattacctattctttgttatagaaaacatcactataagtggttcacattctttgattttttttctttcggcaaaacagggcaccatttcataatgttacaaaattgtttatcttcatgaaaaacttcatgcaccagaatttagttaaaagaactatctcgactcctaatagcttgcaatattcaggcctgctgtatggttcatctattcaacccgtgcttgtttctgcattcaaatttacataaacaagttaaaatataagaatatgtggagaaaccaagtataagaatacaagactatatttcaaggtaacttactgtgaataacaatagataaggctcagggtagactttggctccttgcttctgtagttcatagtaacattcgcacagctttctctccatgcaacacgatttttgttggaccaagttcactttaaggggtggatgcctgaatgggctgttctgatatgtcagacatatgatagtttgctttccccttttccacgagcagatttttgcaaccgttcgccctagccgaaacacttt

SEQ ID NO: 4784 - DNA, 32841 bp, Sorghum bicolor
  Intron number 2 from transcript Sb04g012650.1 (locus Sb04g 012650) derived from phytozome v7.0 (chr-ID chromosome_4; pos 20123668 to 20156508)
ccgtacgcatccaggcctactaccgcgggtacctggtacgtatttgcgctatgtgtactagtagtgcctgcatctgcatgcctgatgacctgatggcgcgtggcaacgggcaatggcgtgcacggtgcacctaccagaccagccctaccgagctgagtaaagtgcgcttttatggggcgcacggcacggccggggggcggttccgttccttgtttgggtagatgggcgctgccgttaacattcacgcccagaatgtgtccaccgtacatacgtgcaccaccctacccaccgcaacttttgctctacttcacatgctctccgctatgtgtttaattcggccttttttactggctcctaactgaagtcgatctggagtagtaattctctgtcttctaagattacgtattaagatttgtcttggagcgctactactgcaaagcaattagtagtagtacgtacctttcttctgaaagagctatttaccctttcacaaactttagcaaattaaataggaccaggtatgtatgcttaccgtttcacacatgaagccagtatgccaagtcattatgacttcttcacctgtcttcgctctcaaactttatattttgtaaagacacgattgagttacgctaatgagtggtcaagctggtgcagtgttcatgtctcctcaattctctataataaattgccgaatgcaactatagttgctaccatatctatcctctagaagaaactctaccatcacatcagactcgtactgccagcgatcactctgatgccaaatatttaaattctgaattattaaaaaaatgtttaaattaatctttttagtaaaaattggctactgcttccttcgttctagatacatagccaacttttgttatatacttagacatatactatgatacatgataaaaataattatatttagaaaaacaaaaacattttataatttgaaataaaaggaatagtaacttgtagtaatataatcgtccctatcagcgggttctactaataaaactccaaattaactagaggaaaactagctactaacgaggtcgtagttgaatctggtactccctccgtagatttacaagtcattttagataaggtttggtgtggcagaagtgcccaaaataacacacctttggagtacttgtctttcattagacactaagtatccaaaagatagttattcaagtcagtttcgtcgagcacacccaatgggaaaactcaaaaccatctatgttttcatccagaatccaataatgagtagagcttacaatacttaatccattctatacaaccacaagtctcaaaatttatttattacagtaccaaggttcaaagtgcataaataaaacaacggaaataaatataccgaagcgatacaaggaaatccaactgtgcccaccagcggaatcctccacacaaagacaactcctcaagctgcacatgcaacagggtaaagtaaattttgagagacttgttcgaacggatatattcctaacccttgagtacacaatgtactcacaagacttgttcgaagggatatatttctaactctcaaggattatgaaaaaggctttataggttggtgtgctatttattttgcagaaagcattactaagacttcatccttagatttcattttatttaactgtcaattttactttcttagttaaccattctaggtaagcacctattctactttcaagcaagagttgagcaagcaaaaccattttaccaacattcacctttccagttcttactacggtgctagaccatagctaagtcggaccattgataacaacgacgattcgcgattcaatgtatcccagctaggtaccctgaaacacatgcctcatctgcaacccaggtacaaacaagactaacccacttcactcctaatgaggggtctaggtccctatccaaacttggaccctaagcccccacacataaggcccggccttactgcagtgcttagacctccacctgtccccgcctacaatcagttagtccggaaaaagccggaacccacgacaagagagtaatggtcttcctgctcctataagcaagtatgtgctcaggatattaagtctgtaacatgactaccatccacatcaatggacggtcctcaatcgacacggacaggaaaaacagtgtaaccaagataagccccatggccgcggaacataacttctcacacccaccggtaccccaaaccacatccctatccggtcaccactttccatttccttttatcatgaatgagtagtatttacctactttgtgagtaacgacgggttacccacgctaacgataagcctaagcaaagcagctactcgatcctgtactagtaagactcataggatagatatatttatgtatatggattttatatcattcctgcaacataaatgcacaacatatatatagtgacatcaaaataggggttatgcactggggcttgccttaggcaggcagagtgtcagaagtgtcaatcacgagtgactccggaaactcttcgagatcgaacacctccacgtactcctcgatgatgtcctcaaactccggactgtcgggagtcgtgtaccccatcacctcgttctctacatgtatgcaatgatgatgcaagacttagaaactaagtggccacaagcccacaacgctactaaagaaacacatatggtactctttttttggtactcttactaagctagctctaatgactaagatattatactgaccaggaaggtattttatacagatttcacttactctatcaagcacttgatttattaattaattttattttattgaccaagcttatatctaaggcatatttatctacccttgtaaatagtctagtcttatgctacaaaaattgcagaaagcttctaatattacaactaggctactgtaaaaatttcaagatcatagttattacaaattcatcacaaaaattaccacaagttaaacatttagttattaaagcacttttaaatgattttatgatttcgagaacaactaagttaggtactaacaaaacaaccaatagatagaacgtgatttttggaacacaacaaaattactttcactatttttggacatctacaagatttgttatgattttacaaagtctagcacagaaacttaattattaaagcattttctaatttttgcaaaaaagaaagaggcatttgacccaacgcggtccactaaggctcggcctatgcgacgatggggcggagcccgcgtcctctggatgttttgcaaaaatatctccgagctctagacaaacctcgtgacagacgactccactatttctacagagagggactttgcatctaagaccttagaaagacatgtctttaccacgggcacacccttggcatgctcgcgcgctacggagtggcatgggttgacacccaactattatgctagccaacttggggactgagagagcgagctaaggagccgatgaacactgaaaggatcaagatgcccaagaggagggtgaattgggcttctctaaaaatttaagcaacctataagctccaattcaaccccttgtgcctagtgtgacctggagagctaccggataaaaaggtttgcaacctagttctaatcctattctagcatggcaattctaagaaagtaaaagcacaaaataaatgctggaaagtaaaggagtagtggaagaaagtgctcggcgatgttttgccgaggtatcggagagtcgccactctccactagtcctcgttggagcacccgcgcaagggtcttgctcccccttggtccgcgcaaggaccaagtgctctctacgggctgattcttcgacactccgtcgcggtgaatcgtccaaaaccgctcacaagcttgacacgagccacccacaagaactccgggcggtcttcgtgcctccaatcaccaccgaaccgtataggtgatggcgatcaccaagagtaacaaacaaagaactctcacttgacccaaacaaggctctagagagtggtggatgcacacctgacttttggaactcactagagaaggactctctcaagagaacactcaaaacacaatcctctctaggctcttgctactctcttgctccacaacaagtttctctgatgttcaaatgggcaagagacctctcatggacgaggtggaggagtataaatactacccacgaagtccaaaggtcagccaaccgttttccactgaaaacggagtcaccggacgcacattatgttgcaccagacgcactgcaccgagcgtccagtgctctataacggctaactgtacttgcttctgacaggtcaccggacgctaacttccagcgtccggtgcaccgtccagtgctccagggaaacttacatgctccctgcgcatgggaccggacgctacccggtgcgtccggtgctagcgtccggtgctcatggcaggtttgcaacctccctgggtgagggaccggacgctacccggtgagtccggtgccagcgtccggtgcctaaccctaagcacgacactgttccaacgactaaggacctcaccggacgcactcacagagcgtccggtgcagagtccggtgcccccttgggcaccctaacttcgtcgaaatgcgatcgctccaaaacgaagtttgttcctctcgatctaaggactatctctgagctgcctagtgctaggtttaccaagtgtgcaccacacctaaacctaaaaccttgcctaagtcaagctactagatcaaacccctcttaatagtacggtcaaaggaaaacaaagtcctaaactactctaagtgcccttcttcaccatacgacacttagacctagtctagtcttcatgatgtccatccatcctttgaaaatcgaaacaatttccactattaagtgggcatgtacgtccctgtccatcgagtacctatttaccatgaccttacctatgactttgcctctgcaaaacacacgttagtcatagtaatcaacaatgtcattaatcaccgaaatcactagggcctagatgctctttcaatctccccctttttggtgattgatgacaacctcgagtatgaaaagagttgaggttttcaaatgacttggtttcaataagcatgttacaataagagcaaagggattagtcatgcttatatccaccaagtccaataccctgcatccaaatatgtgagtggtatacaacagtataataaacacaaggctcataagtacatcggagtaaaatgcagaagcaaaagaaatacgagccaaaacacatgacattaagatatcataaaaagcacaagtcatgtctcacaaccatagtatttcacacaagtgcaatgcataaacataaacatgatgcatggtggagtagcacacataaaagtatctcaaaagaattaggaccctctcaagctctctctagctcccaactcctatctctcatactcacactcactcacactctcttcccctttggcatcaagcgccaaaaacctaagaagtcggtggaggaggtgaagcagtggagtccctcggcacggcctcgaagcgagctgcatcgtctgaactgtcggccgtcgaggcagaggaggtggagtgaccctctgaagctgcacgggctggcgaagcggtccgggtctgctctgtaggtgcgggagctatcactggctgtgctggctgctcgagtcctgctgacgaagctggcacggactcagtcgctgtagctgatgtctctggtactgtggaagacagtgcaagctgctcggacgacgctacagacgacgatagacgctcagtagtggtgactggcgccgtaaaggcggctggagcctgcaggggtggaggcgtagggtcaccagtcagagcactgtaggagaagctgaggtgcgggtctgtcgacgagtccaacactagctgtgacgctgacgctgactgaggagtgaaaccagagcggagaggcgtgaactgcggtacctgctcaaagccagaagagatagcaccctgggagacctggtgctgaggcgtcgagaacggctgactctgagcgggtagctggaggggctgctgagacaggctctgagtctgaggcactggagtgggtggcctgacagtcaaagtggctggaagctgtatctgcggaatctgaatccctgaggcggccatgatagcgaccatcatcgctgtctgctgggcctggaacgcaagctgctgctcctgaaaggtgagaaactgacgctggagctcgtcctgcgtagcctgcatggctgcattaatggcagcctggtccctgtctctcctcgcctgctcctcaactgcacggcgctgatctgccctcataccctctaagatagcaagtagcgctgggtctgaagcactagaagagccccctgcctcgtggtcatgtgctctaggagggaggtctgacactgacggctgatattcatcatccgagctatctgaggcgaagtcaaactctcactcagcctctgcatctgcgaaagccccaatggctatgtcctgctgctcctctgtctctggtacagctgctgtactgtgagtacccctaggagaaggtgggggcacctgtccacgtggtgcacgaggaggtggagtagctctgaggtcgtggtgcgctcgcagcatctgcctggggtcgtagtgggggaagactgtgtctgactctgtcaactccctctgcaagtgagctggcaggggtagtggcctggcactgttgacaccgtttttgggcgcgtgtccatgatcggtaaaagtgtagatcggcagaataaggcggtggtgtttggtctgcagagagagttgccgatggagatggttgccgatggaagggtgagtgaacgtgattaagtccataagtggtgacatgtctgtgccgatggctacgacaaggaagtctgccgatgatatagagagaaagtctgggagttgatgatcggtatgtggaggtgttccagtttgtttcggagggatagttttacgttttccttagttatttaaatcgttttgtatacggattctgtgtaatttggaattcgagttctagtcgtgtctggttgtagctctttgagcagggtataaatgtagaccctagggccttgtaataaaaaatcaatcaattaatcaaatacacatttttactcatattccaagcatttactttttcgacggcttcgtcatactttttcctttccactatgagttcttaggaattcgtcgacttaagctcggcgtgttctcaagttccgcgtgaatacctcttggccgtgacatccgggcgcatcgctgctgtcgggaccaaagtattcgagttaccacctttaccgatagtaaggtcaaatcggctggcacgccttaacgtttaaatcgggtattagccctttgtgtttgcagatcagcttttgcaccaacacatcttttggcatgcccggtgggaccagattcaagatcaagatcaacatgtcgacttccgagtttgatcaagaaaacgtcatccccgtgacggaagccaatctcaaggatgagcagaagcaagctattgctaaagccatagaggattacaagcagcagtgcctgaggtccttcagcatgaacaggagcggcgaagtgattcagaaggatgcactgccggcgcctcggcaggtcacttttgaagccaatcctggcaagcttcaagagatggttgatagcgctatcaaccgtgctttgatcaaccaagctggcgtactgtctaatacggttttcaatgccgtggcaagaactttcaaggaaggacagatgccgccagattatgtgggccctacttatcatcagccagggtcaccagtggtcacagctccatcggctgctgcggccgctgcgggttcacaaactaccgttcctccaagtacgttgggagtcacgaatacacaatctacgccgatgacaaccaatccacaaacttcagatgggcagattaaactaactacagttatgttggcatcggcaatgtcaggattaactcttcctcccaactggtggggttatggtatgcctccagaattaacgccgggtacgtcgcagacaactgatatgagaggcaagactcctatggcatcggctcctcccaatgcgccgatgaaccagagtccccggtatactacaactactactgcaagatctcatatcgggaatcctcaagatccaatgttctagatgcctaatccatcggcggattcaatgctgatgcaacagaggtttacaactcaaccagggtatgtcagttcggtgatcatgcccaattaccagtcatcggcagggcctatgccgatgaacgctaataacggatggcttgggcagcaagtctttccgcaaacgccccaacagaatcaccaggctacagggttccagcaaggacaggtctttcccggattccagaatcacgggatccctaaccagccaatgaatctcgggcagcaagtcggtggacagcaaattgccgggcaacagcttggtggtccacagattggaggccagatgatcaacccaatgttccatgcagatcgagcaccgcaccgacgcgtggaggcgtaccagcaggtgccagttccgcaacctcctcatcggcaggatgccgatgcgtactggtccgataagattgctgaagtgatgagagaccaattcgggataaaacccaaagtcaatacttactcttatcggacaccgtatcctcccgcgtatgatttgatcccgcttccacatcggtacaaagtaccggattttactaagttttctgggcaggatgacacgtcgaccatggaacatgtcaacaggttcatcatccaatgcggagaagctggtaacagggacgagttgagggttcgcttattctcgtcgtcattgtctggatcggctttcacctggtttatatcattgcctcccaactcagtgattacttgggccgatctatagaagcaattccacaaatacttcttttctggggtccatgagaagaagatcaccgatttggttaaattaaggcaacgcaatgacgaatcggttgagagttttgtacagaggatacgggaagtcaagaacaaatgctatagcctggttctggatgatctgcagctagccgatttagctttccagggtttgttgccacacatcagggacaagtatgcatctcaggagtttgaaagcttaagtcatttggtgcagagaaattctgatcaagatatcaagcctttcgagcccaagagagcatggaacaagaaggtatcgttcgttgatgaagcagcaagctcggattctgatgaagaaccgatcatcggcttggcagaatgggtgaaaaataagaagccgatgtcttgtccttttggaaataaagaaccagagaagttcgcgtttgatactgctaaggccgataggatattcgactttctacttcaggaaggtcagatcaagttgtcacctaatcacgtgatcccatcggctgaagaattaaaaaggatgaaatattgcaagtggcacaatgcaacttctcacgacactaatgaatgcaaagtcttcagacaacagctggaatcggctatagagtctggaagaatcaagtttgatagttccaagacccagaagccaatgaagattgatcaacatcctttcccaacgaacatgttggatgctaagggaaaggccaaggtcctgacatcggaagcagctgaaagaagtgcatcggtggatcctcagcatcaggtcactactgccgatgccaaaggaagaggcttagtccaggaaggaactagctcgggaaggcctccccgatctggtatcgtgataactcacaaaaggcctcgagaaacttggcagcaacgtgaagaccgatataggcgccagcaggaggattatcgccgggaggaggaaagacgccgacaggagtggaatcggcatagggatcactggagttgcccgttcttcatccattgttgggaggaggatatcaagcttcccactgtcagagattgccctgagtgcaacggttatgatcggtacgacagatccgatcggtactatcgtgacaatgatcgacgcttcaatgggccgattagagggagagcatccgtccatgatcggctgggaggcaggctcagcgtgcatgataggcttggcggtcgtgtccaatattttcccaggaaccaggaagagctcgaagagatggccaatgtacgggttcccgatgagttcatcttctgcagggatgccaacacttatcggatgaagtcaggggaaaattgccgcccatcggtaaggcagcagcaacttcctccctggtgtccggagggattgaccaggacccagaagagaagattgcagctcgaaaggcgagaggaattgagcaaaggggagaactccggacagtctggggatcaacaacaatcagaccccaaggggggaggtccatcggcagatgtcaacatggtatttatgttgccgatggagttccttgcgccatccagtgatgatgaggtggatttttccgaccaaatagctcagttggctctagatccgatgacggctatatttgagaagcctgccgatgatgaaaggcagcacctcaaggctctgtttgttcaaggaaaagtggatggtcagccaatgaccaagattctagttgatggtggagccgctattaatatcatgccatatgcagtgtatcggaagcttggaaaaggggatcaggatttaaccaagaccgacatgatgctcaaagattttgaagggaacgtgtctccagtcaagggggcgatatgcgcagaattgaccatcggcagcaaaaccttgccgacaacctcctttgtgatcagtggaaagggtgcttacaacctgctgttgggaagagattggattcatgctaattgttgcattccatctacaatgcaccaatgcttggtccagtgggtaggtgacaagattgagattgtcccaggggattcttcttatgtcatcgcatcggcagaggcagatacctatgaaaggactaggtgtatttcaggagagatttgggaaaaagattttctcaaggttgccggttacgaaattccaccgatccaagcagtcggttctaacgaaggtttttaatggataggttcgccgatgatggaaagttaggccaggggttcacatcggccgatgatctagtagaagtagatataggtagtggtgataaatctagacccacttttattagtgctaagttagattctgagtgtaagcaacagttgactgatttgttaaaggaatataaagattgctttgcttgggattatactgagatgcctggtttggaccgatcaattgttgaacatcggttgcctatcaagtctggatttcggccgcatcagcagccagctcgccgatgtaatcctaacatcctccctgacattaaggccgaaatcaccaaacttattgaagctaagtttattcggcagtgtcggtatgccgaatggatttccaatgttgttccggtctacaagaagaatgggaagcttcgggtatgcattgatttcaggaatctcaataaagctacgccgatggatggatacccaatgcctgttgccgatctgttggttgacgccgcggctgggcatcggatcatcagctttatggatggtaatgcaggctacaatcaaatattcatggctgaagaagatattccaaagaccgcattcagatgtcctggccatgttgggttgttcgaatggatagtcatgacctttggcttaaagaatgctggtgctacttatcaaagggccatgaattttatttttcatgagttcatcggtaagttggtggagatttatattgatgatgtggtggttaagtttggagacttcgcaaagcatcttgctgatttacgaaaggtgttggaatgcacgaggaagcacggtttgaaaatgaatcccaataagtgtgcatttggtgtatcggcagggcaattccatggtttcatggttcaccagagggggattgaaatcagtcgaagatctattgatgccatcaataagatagtagcccctaccaacaagactgaactccagtccttgatcggcaaggtaaattttatcagaaggtttatatctaatttgtcttgtaaaattcgtgctttccgtcctcttcttaagctgaaggccggtcaagagtttgtttggggaaaagaacagcagttggctctggatgaaatcaagaattatttagtgaatcctccagttctgattccacctcagcaagggaagcccttcagattgtatttgtctaccgatgagatggtcattggttcggctttaattcaggggtttgaaggaaaggagcgtgtaatctattatttgagcagaaggttgattgatgctgagaccaggtattcggctattgagaaactgtgcctatgcttatatttctcttgtaccaagttaaggcactacttgttatcagccgaatgcactgttatttgcaaagatgatgtggtccggtacatgctatctatgccgattatgagtggcaggatcggtaaatggattttggcgctgtcggagttcgatctgcgttatgaatcgactaaggcagttaagggacagattatggccgattttgtaactcaacattgtggtatggtggaagctttggaaattgtacttcggacacttttctttgatggatccacatgtgaccggggggcaggaatcggcatagtactagtttcccctcggggaaggaagtatgagttctctttgccgattgttgccacgtcaacaaataatcaggctgagtatcaagctttaataaagggattagagttgttgagagaagttcatgctgatgctgttgaggtcttcggggattctatgctagttataaaccaattggctggaagctatgaatgccgaagtgaagttcttataggttattacgagaggagcatgcaactgttaaaggaattcaaggatttccatttagagtatgttcctcgattgcataatgaagaggcaaatcggttggctcagcatgcttcgggatatcagcccatgattaatgcaatatcggcaattggtgccgatgattggagaaaagaaatcgttgattatttgaaagatccatccaagaaagtcgaaagacgagttcggtttcaagcaaccaaatatgtgctcctcgaagatgaattgtactatcgaactattgatgggattcttctccggtgcttaggagatgatgaagctaggagtttgatgggagaaatccatgaaggggtatgtggagcacatcagtcggctttcaagatgaagtggatgattaggagaaatggatattactggctgaccatacttgaagattgctttaaatatttcaaagggtgtcaaggatgtcaaaagtttggcaatattcaaagagcacccgcatcggccatgaatcctattatcaaaccttggccgttccgaggatgggctattgatctgatcggccaagtttatccaccgtctagcaaggggcatcagtttattttggttgccaccgattatttcactaaatgggttgaagccattcctttgaagaaggtcacgtcggccaatatgattgattttgtgaaggagcatatcatttaccgatttggaatccctcaaacaattactaccgatcagggtactatgtttacatcaggggagttcgatgaattcgcaatcggtatggggattaaagtattgaattcttctccttactatgctcaagccaatgggcaggccgaggcgtccaacaaaggaattattaagcttattaaacggaagattgaagaaaatcctagatggtggcacacattgttaaacgaagccttatggtcctatcggatggcttgtcatggatcaaccaaggtttcaccttatcagttggtgtatggacatgatgcagtgttgccttgggaaattaaggctggatctaggcgactatcttttcaagatcagttggctgccgatgattatgctactctgatgacagacgagttggatgatctagcagggcatcggctaagggctttgatgagcatagaagagaataagaaaagggttgccagatggtacgataagaaggtaaaggctaaggagtttgccgatggagacttggtgtggaaattgattttaccgattgggactaaaagttcgaggtttggaaagtggtctcccaattgggagggtccctatcggataagtcgatcggcccctggtaatgcttacattttagaaactctcgaaggagtcgaatttcccagagcattaaatggaaaatatttaaagaagtactaccccagcatatgggtcgatgcataaaagtttaaatgccgataacactcctatcggctggattaacgcgtatctggggtcggacttagtgtttcaaaagttgccgataacagtcctatcggctagattaaaaacaacgagagaactggaagatgtatcgccgatgaaagcttcatgtgttcaacagcgcctggatcgtcgatatggcgcgcagccggatttggtcggcttcttctatctcctttacgtcgtcatcggcagagtcttctatcggtttcagcttcttcagctgcagtgctttgcgaccatgggcgtttcgttcttgttcaagaagtttgatggtctctggcaactgactctcttcctgtcgggcttgagatagagcgtcctccacttgcttgagttctgccagcaaggcttctctttttgccgataaatcagaaatcttctgtttcaatgcgtcgcctgacgacttcaaggtaccgatggtcttgtgcttctcatcggtcaggagcttctctttcatcatctcctcagaaagcagggtttgagcaactctatcggcaaggcgccgagcggccctctggtactgcagctgacgactctccaaatgtggggcctggaagagggtttcctcggcatcggcgggaatctggcctctgagggccttgaacagaaccttggccgggtcagaatcctcgaccagttgagccatgtcttgatgaaggagggctgacaattcttctagcttggctctgatctctgccgatgcgatcccaactgcccgagaggaacttgcttcttcaccttcgtcttcggagatatcaatggcgaaggagaataggctgtcgggagaatcttgttcctgaaaaggaaaacgaagtgagttattctatgatcagagcatcggcaaatagaattgattgagattggatggcttacttgcttcaaggctatctcttgcctctgactcgaagacaccgatggagccacggattgatcggccagaattgccgatggagctacgtcaactgaaaattaacagaaggggttataagaccggaaaagaataagttcatcggcagtaataaaatgtgttaccttgaggaagggcagttcttgtctggatggaagagactactgatgctataatagaacctgctggatcggcagttggttcgtgcacgtcagccggtgtgtcttctggctgaggtacttcttgttgaggttcttccacctgtggtgcttcttgcattggtggggaagatggtgcttgctgcgtctggacttctggagaagaaggggaagactccaccgggattggagatacctgaggaggagggggagttgttactctctggcgctttgcctgtgctctggtacctttggtaccctttctcttctgctggctggactggggggcatcgatacctttgcttttggtccttgctgatgcgctggtttgctgatgcaaaaaaaaagacttatgagtatcaatgtagcagatgtagaaggaagatcggtataaatgaaaaggtttggcaattaccttgaaggcctgtgccagagtagaagcagctaccgatggtgatgtctgagttctcttggtggtaaccttcttgaggcgtatgcctcgatgtacgatggcggccaaggtaggagcgttgttgccgattgaggagattggacctgatggaaataggtcaatcggcttgccactcctgctaacagatgggggggtgtcatcaacctgaaaagtcccacagggagtaagttaccaatggacataagaatataaaaaaaatgaaacagcagttcgaaaaatacttacagtgccatcggaaacttggtactcgggatcgatcaagccgcgatatgggagagccgatttgcagaacagatgttccttccactctgcccaccattgcttgtacgcctgagtgatgaaggcgaccgggacccactctgacaggtctacatctttatcggcacttgatggcagctgggctactcgaatccattcaaggaggctggtgatggtttccctgggctttatcacatcggcataacagagtgcaatcggcagctggccgaaagctaactgacgagatagtgccgatggattgtagaattcataagtctcgggggaggtttttccactgccaaagaagttcactggtatggctctgggagtcaccaatgccatcatcacttcattgtctttatcaagagcctcgtcgaacgggttgaaaaccagaggaaatacggtgtctgggtcatcataagctaaccatgctcgctaatctctggtcaaaccctcatacaaagtttggaagaatcggctgagctgatctggattaccccctgaaccaggcagaactatgacagcttcaccaaagtttaagggagcacgtgttgccgattcctcttcactcaacacatggttttcggctatgtcccttgggaaacgctgtgtgaacaggttaaattcgaggcgcttgtgcaggtgcagattgagccacatattgataaaccaccaggggcctcctaagttgccaatagactggccaagcaagagcttcctagttacttggtggaggaggggataggctgcaccaagcaggtatcggccgaggggaaatcggccaccattggccagattttctgctgctgctagataaacagaagttggtcctgccgatcggccacaaaacacgaatttgtctagccgcatgttcaggaagcaggtctgctcttttatgtcaacagggcctgttttgcggtatttttggatataccccgaccagccgccgatggtgcgggtttctaccttagcactgggtttggtgtcaaaaaagtgggtgctattggcagaagaaacgtccaggccagtgagcatagctacatcggcaagcgtaggggaagcagggccatggccaaagacaaaggcattgagggtgtctgaccagaaataagatgcagctatcaagagtgattcattcttgtgcatatcggcaatggacaacctaatgcattgatctagctttctctcgccccactgaactttgttggagttgccgaccctcaagaaccaatctttccaccccgcggtggggctgggccaggaacgaaaagtatccttccacaagtccaaagaaaaattctccgctctaaaagggatcctgttggtttctgcgtttataaggttggttggatctggatcccctagcgggccaaggcattggaggtgtggttgatcagtggggatgacaattttgttagccgattcctagtggttttggagatggaaaagaaaaacacaaagaaaaaagggagagaaaagttcagtaaaatggatcgcgaatgaacaggggtgcgagaaaaagtacaagagatagtgcgaaggactgagctcagggatgatgaagttgacggccattttaccacggaggagatgcttgggagtttcagagttggtgaagaaggggcttcgtcggagatcttggagcttttggatggcgccgctgccgggaaagtgaagttggagttatggaatgatgtgatggggaaggagtacctgagaaggaactatttatagaacaaaacgggcaagggcaaatcggacttatctctttgccgcatccgtgaaatccgagggtactcaggtagatatggtaactgtccgtacggtaatcaagggattgtgcaggtgatttgacaggaagcggtcattatccagagatattttactgtgtgggatctcctggtcggtccgcagtgcctggtaacggtcatattgccgataggagagaaatgtggagatagccgtttggaaagataagatacaggtgtcctggttagtacatcggcaagtccctgtaacggtaatattgccgatacacgactaagatggaaatgtccgtttagggaagttgaggatttcgagggatctgcggaaggataggatcagagttgttcagattaaggctgtcggttgccaggttaggggcattaattgcggaaaaaaggcatcattactgcagagaattttggagcattaatgattccatactccgaaattggggggcatgtgttgacaccgtttttgggcgcgtgtccatgatcggtaaaagtgtagatcggcaaaataaggcggtggtgtttggtctgcagagagagttgccgatggagatggttgccgatggaagggtgagtgaacgtgattaagtccataagtggtgacatgtttgtgccgatggctacgacaaggaagtctgccgatgatatagagagaaagtctgggagttgatgatcggtctgtggaggtgttccagtttgttacggagggatagttttatgttttccttagttatttaaatcgttttgtatacgggttctttgtaatttggaattcgagttctagtcgtgtctgattgtagctctttgagcagggtataaatgtagaccctagggccttgtaataaaaaatcaatcaattaatcaaatacacatttttactcatattccaagcatttactttttcgacgacttcgtcatactttttcctttccactacgagttcttaggaattcgtcaacttaagctcggcgtgttctcaagttccgcgtgaatacctcttggctgtgacatccgggcgcatcgctgttgtcgggaccaaagtattcgagttaccacctttgccgatagtaaggtcaaatcggctggcacgccttaacgtttaaatcgggtattagccctttgtgtttgcagatcagcttttgcaccaacaggcatagagaataagaagagtgatccaatgtgcatacggcaactgacgccgtcccctgaagctctctgagatggtgtcctcaatctctgagacgatcaaatcccacaagtcgaactctgtctgggagataaggtgtgcaactagccactgctggatacgagtgaatccatctctgtaacctgtcctggggagaagagtcttcctcaacacaaagtcgaggatcctagctggtcgtgtcaagtctcccactgtccgactggagccctctccaaaaggtggacggaaataaggagccacgaagtcaaccggtggtatctcaccaccatgaggatgtcggggaggctcaaagtttccgtagcacagctggtgaatcctggtgggagaagcccgcagcccaagcacctctctagccctctgtgttgtgaccctgtagtcagtccctgccagtgcgtagtggatataactgtgattcggggaaacccacaatgacgcgtagaactctctgaccctctgctcacagtaagtaccaggaagagctagtaactctgggagccgtggaggtaggtgaagtactgatggatatctgccccaaccacgtttcccagtatctcaaggtcgatcactctgtgctccctgaactgagactgagaacgaaccagtgcctcgtagatgtcctcctggacgactgtgtagaacctggcaccggctctgggatccctagcagctgggaaccaagtaggaaacgggacaaagcgtagctgctggatctcacgggctgacactagggtgagatccctgtgaatcctaactggccgctgacgggaagctggagtgcctctggctggtgtggcacgagcagtggaggtagactgacccagcgtaccagtcctaggagtggcctgggtacgtgcacgagtcgaccacctgaggggctgctcatgctcctgtccctctgctggaccctctgcctgggcctctgcctctgtgtctggatctggatcctcctgagctggctctatgacgttgatcctgacacgctgccctcccagcatgatcgtgcctggtggtgatccatgtcgagcctcggcctcaagtattgcacgcctctgacgtggcgtgagatcggctccaatccgtagggcacctgactgtcctcccctctcagctgcctctgctgctgctgcaactccctcagccacctctgcctctctgtcgctggccttgcgcttcttagtggccaacttctttcccttgcccttctctgccgctgacagacgacggggaggatcacctccaccatcaccccctggggaacctcctgagccagcagccggaccactgacgttcttggtacgagccattgcaagggcaaacaactgaacgaactgccgacaaagcccaactgacaacggagatcaacgcgctgcagagagtagagaagatagggtatatataaaagaaatcataatagctagaggtgagaaaaacctatagatcgcaagaatagataaggaacaggcgcgaacggcttacgatccaagacgggacgcgttccggaagagatatcgcgatcgaaggctgccgaagaacgcgaaacctctccttaaggtgctgcacaggggaaacggagaagatcgaggtcaacaacccttttctaatccattgagacaaaaactcaaacaccctaagggcatggataacgaaactcacccaaaccctagaactcttgcgagatcttggatccacacgagaagaggagggagaggaaagcttcttgggcggatctggcacgcggggggaaggccgaggtcgcctgcaggagctctcgacggcggcggcggcgctagggcacgggggcgaagagcacggctcaggcgggtttcggagacgagagaaaaactggccgtgagacgcccctaggcgtgggctttatgcgtccgccgtggggtcaccggacgctcttaatgtggcaccggacgcgtccggtgaccaccggactcatgcgcagagagttatgcaattcggcactgcaccggacgatgggcaccggacgctggctttagcgtccggtgcttcaggtcacgccaggtgagcaccggacgcacctcaccggacgctgtaggggcactgttcctgcatccggtgcgtgcagtctggcacactcaccgcaccggacgcacggaggcagcgtccggtgctcctttgagcactttttcaacgaagcacaacgtccgactatgacccaaccaagtttcatcttcaaagacacgcaaataaacaccaaatggaactggtatgagtgacttctctcaaaccctcaaattttcacaaatatttagccataggcttagtagtttttatgaaaataattcgagaaatcgccaaggagcatcatatggccataaagctaggggtttgaatcataatgagctttgaatgctccccctatctatggacgaacacagcggatgctcaaagaataaccgaaaagaaacggtcaactaacaagcatgcacatgatatgagttgaaatgcaatacttgatagtaaactaaaacttgtcaagtttgaaccaaggttaagttttttcacacacacaagggggttatcttaaccatgttagacaagccacatgcaagttgtattttagttttagtatgcatggaatgcaaaacaaaagttatttacaagtttcaacacacaacttttatcttttagtgaagttagagagatcaagcacattaagttcatttctcaacatacaaaacctagcttcatctagaggttttgtgaagatatctgccaattgattttccgttcccacattctctagagatatgtcacctttagcaacatgatccctaaggaagtggtgacagatgtcaatatgttttctgcgggtgtgttgaaccgggttgtttgcaagttttacggcactttcgttgtcacacaacaaaggtactttgtctagtactacttcatagtctagcaaagtttgtttcatgtatagtatttgtgcacaacaagcaccggcggcaatgtattctgcctcggccgttgacaaggcaacactattttgtttctttgacatccaagagacaagtgatctacctaggaagtggcaccctccggatgtgctttttctatcaattcggcacccggcataatccgaatcggaatagcctacaagttagaatcttacacctttgggataccccaaacctaggcaaggtgtgtattttagatacctaagaattctcttgacggcaatcaagtgagattccataggcattgcttgatatctagcacacatacacacactaaaaatgatatcgggcctagatgcggtgaggtagaggagacttcctatcatggagcgatagagagtcttgtcaattgggttacctccgtcatccaagtcgagatgcccatttgataccatgggagtcttgattggcttgcaatccatcatcttgaacctcttgagaagatcttgtgtgtacttctcttgagagatgaagactccttccttcatttgcttgacttgaaatcctaggaagaaggatagctcgccaatcatggacatctcaaactccttggacatcaaatcaccaaattccttgcaaaaatcttcattagtagagccaaaaataatatcatcaacataaacttggcaaatgaagatttccccattcattttcttggtgaagagtgttgtgccaactttcccaatcttgaagccctcctcaatgaggaagtccctaagcctctcataccaagctctaggagcttgcttgagaccgtagagagcctcggacaaccggtagacatgcttggggtacctagggtcttcaaaaccgagggggttgctcaacatagacaagctcattaatatatccattcaaaaaagcacttttcacatccatttgaaataacttgttatcatgactagatgcatatgcaagtaggatacgaattgcttcaagtcttgccaccggtgcaaaggtttcaccgaagtcaagaccttccacttgtgaaaagccttttgccacgagccttgccttgttgtgcaccactttgtcttgatcctccttcttgttccggaagacccactttgttccaatcactcttgcatctttgggtcgctcttcaagtgtccatacttggttgcgagagaagttgttcaactcctcttgcatggccatgatccaatccgcatcacgaagagcttcctctatggtctttggttcatcttcaagagacacaaaagcgtgatgttcaataaataaagcatgtctagaacgagtagttacaccacgtgatgggctcccgatgatgagatcttgagagtgatcttggaggagatgtgatgttcttcttggtgccacttgaggggtaggttggggagcatcaacatcttgtgcttgtgccaccgcttgctcaagagtgacttgagtgtcttcatgagcatctctcacatccttgtcttcatcttgtggactatgtgaggtggatggtggctcaatgacttgcacatcatcatcatcttcttttggcttgatgtcccccaccggcatgttcttcatggcatccctcaatggttcaccacctacatcatcaagattatcacttgctccttgggagccattagtttcatcaaattcaacatcaaatgtttcttcaaccatgtttgtggcatggttaaagaccctatatgcctttgactttgatgaatagccaaccaagtagccaatgtcacatcttctttggaactttcccaagtgttggcgcttcttgtagatgtagcatttgcatccaaacactctgaagaatgagacattgggcttcttcccattgagcaactcataaggggtcttctctaggaacttgtgaggaaagagccggtttgaagcatagcatgcggtgttgattgcctcggcccacatcttctccgaagtgttatactcatctagcattgttcttgccaaggtgatcaatgtctggttctttctttctgcaaccccattttgttgtggtgtgtatgttgaggagaactcatgcttgattcccacttcatcacaatactcttcaatgttggtgttgtcaaactctttgccattgtcacttctaatcttcttgatcttgacatcaaattgattttgggcattctttgcaaactttttgaatattgatgcaacttcggccttgtcttgcaaaaagaatgtccaagtgtaccgggagaaatcatcaactatgaccaagcaatatttgttgcctccaagactagcatatgtggttgttccaaataaatacatgtgaagtagctcaagcactcttgaagtagagagataggcttttgttggatgagtgtttgcaacttgcttgccggcttgacatgcactacaaagcttgtctttctcaaatgtcacatccttcaagcctctaatcaattctttcttcatcaacttcttgagtgtgcccattccaacatgtgctaaccttctatgccacaaccatccaagtgaagtcttggtgaataagcaagtcttgacatcaacttcatcggatgagaaatcaactacatataagttgttgtgtcggaagcctttaaatatcacttcattgtcatcttccttggtcactattacttccttcttcttgaataggcattcaaatccaagatcacaaagttgtccaaccgagagcaagttgaaactcaatgattgcacatagagcacattggtgatggagttgtcatttatatggcaacctttcctagtcccttgaccttgcctttagaattgtcaccaaatgtgatcttctcttggttgtcaacatcttcatcaagagaggtgaacatccggggatctccggtcatatgttgagtgcaaccactatcaattacccaatgtaatccaccggtcttgtagttcacctacacacaagagatcaagcttgagatttagggacccacatttgcttagggcccttgaccttctctactagttgctttggcacccaaatcttctttggcctttgcttgttgggtggccccatgaagctaaccttgaccttgccactcttgtcttttcttacaatgtagtgagcattgaaggcaaatggtcttgcatgcttgggcaagggtggtggtagtggtgccttacactcatgagcaaagtgtccttcttgaccacactcataacatctcttttgctttggcttgcttggttgatcatgagtggctagtgacttgatgagctttgtagccaatcccactcttgtccagcttcatgacggtgttcatgaaaagctcactttgaaggtccttcccctttgtgaactttgccaaccccatggttagatgttccttctctttcttgagcttgttgttctcttgagttagcttcttgatgattgggtcattgttgcttgctaactcatccaagatgaatgtctcatcttcttcttgcttgtcatacatcaaaccaagcttgagatattgattctcttccttgagcaacttgttttcatatgcaagcttcttgtcttgatcaagtgactcaattacgattgtcttgtgcttgacttggtcttgcaactctttcttaagcatgacaatttcatttttgagcttgatagtgtcctcatatctttcggccactaccactttcttgcccttgcaatcaacacatttgcttgtgctctccacaagtaagtcatcacaagatgtggctacatcaagcttagcaacattgttagtagcaacatgtgtttcatcaattgcaagttcataagcaattttaaggttgtcatagtttgcttttagagttgttagctcttccttcattgctctatatctagtgataagctcatcatgaacactctcaagtttatcatgtttttctttgagctcttttagagagagtttgagctccttgagcttagtggtcatgatctcattttggtctctaagctcatcactagactcaagctttgctagaagtgtttcattttcaagttcaagcttttcattttcacttctagattttcttttgacttttgtgtacttgttaagcaattttacaagttcatcataatatggtgattcatattcactttcactttcactactctcatcctcactttgtaccttccggtcacccctggccataaggcataggtgtgtagaggatatagatggtggtgaagatgatggtgatggagcatcgatggcaatggcggcaaccttctcatcatcactctcattgccggaggagtcaccacttgagctttcaatgtcggtgagccaatcaccaactatgtaagccttgccattcttcttcttgtagtgctccttcttcttgccatctttcttcttgtattccttcttgtcatttttctaatcatcacttgaatcatcttgctctttgttcttcttcttgtatttgtccttcttgggctttggacattgatgggcaagatgaccaagctcaccacaattgtagcaatccatctcggagatgggcttcctcttgctacttgtgaagaacttcttcttcttggagtcaaagttgactccattcttgttgagcttcttcaacatctttgtggttcttctcaccaagagagcaatagatgcatcatcatcacttgaagttgatgactcaacttcaatcttcttggctttgcccttgtgagaagctttgagagccaagtccttcttttctttcttggccgacgaggagccatcttgggggttcatgtgcatgtacatctcatgagcattgatcttccccaatatggcggttggtgtagtggtggagagatcgccttgatgaagcaccgttactatgtgcccatatttctcaatgggaagcacacatagtattttccttgctacatccgccgcactcatttgagtgagcccaagtccatttagctcctctacaatgacattcaagcgagaatacatttcattagcattttctttaggaagcatctcaaaagtattaagcttgttcatcactaggtgatagcgttcctcgcgttcactctttgatccctcatggagcgcacaaagttccttccaaagttcattggcggttttgtggctccgaacgcggttgaacacctctttgcaaaggcctctaaagatgtggtttttggccttcgcattccacttcttgttttcttgctcttgtggagtaagagcggtgtcctttgccggaggggtaaacccttcagtcgcggcttttaggcactttatatcgcatgcctcaaggtatgactccatccgtattttccaatatgggaagtcatccccatcgaacatgggtggcggtccatccccgttagacatcttttctctaggcggtgaagcctaaaaaaaatgagcactaggctccgataccaattgaaaggatcaagatgcccaagagggggagtgaattgggcttctctaaaaatttaagcaacctataagctccaattcaaccccttgtgcctagtgtgacctggagagctaccggataaaaaggtttgcaacctagttccaatcctattctagcatggcaattctaagaaagtaaaagcacaaaataaatgctagaaagtaaaggagtagtggaagaaagtgctcggcgatgttttgccgaggtatcggagagtcgccactctccactagtcctcgttggagcacccgcgcaagggtcttgctcccccttggtccgcgcaaggaccaagtgctctctacgggctgattcttcgacactccgtcgcggtgaatcgcccaaaaccgctcacaagcttgacacgagccacccataagaactccgggcggtcttcgtgcctccaatcaccaccgaaccgtctaggtgatggcgatcaccaagagtaacaagcaaagaactctcacttgacccaaacaaggctctagagagtggtggatgcacacttgactcttggaactcactagagaaggattctctcaagagaacactcaaaacacaatcctctctaggctcttgctactctcttgctccacaacaagtttctctgatgttcaaatgggcaagagacctctcaaggatgaggtggaggagtataaatactacccacgaagtccaaaggaaagccaaccattttccactgaaaacggggtcaccggacgcacattatgttgcaccggacgcactgcaccgagcgtccggtgctccataacggctaactgtacttgcttctgacaggtcaccggacgctaacttccagcgtccggtgcacagtccggtgctctggggaaacttacatgctccctgcgcatgggaccggacgctacccggtgcgtccggtgctagcgtccggtgctcatggcagctttgcaacctccctgggtaagagaccggacgctgcccgatgagtccggtgccagcgtccggtgcctaaccctaagcacggcactgttccaacggctaaggacctcaccggacgcactcacagagcatccggtgcagagtccggtgcccccttgggcaccctaacttcgtcgaaacgcgatcgctccaaaacgaagtttgttcctctcgatctaaggactatctctgagctgcctagtgctaggtttaccaagtgtgcatcacacctaaacctaaaaccttgcctaagtcaagctactagatcaaagcccctcttaatagtacagtcaaaggaaaacaaagtcctaaactactctaagtgcccttcttcaccatacgacacttagaccttgtctagtcttgatgatgtccatccatcctttgaaaatcgaaacaatttccactattaagtgggcatgtacgtccctgtccatcgagtacctatttaccatgaccttacctatgactttgcctctgcaaaacatacgttagtcatagtaatcaacaatgtcattaatcaccgaaatcactagggcctagatgctctttcaaacacctaccggtttgcgcgaaaagctgagcagtagttggaaaggcaggggacccatggatttaccttgccacggcagcactgatctatagagagagaggcggccttgttatggtgagtcaaggggttaaacggctagaagagaacatgagtgagcaccagtgacttaccaccgacttagtcgaagtgatggcttggtcggagatagcgtgtgcggggctggccacgtgcaactggcggtgcagcggcactctggcgatggcacaggtgtgtcaccggagacaggggcatagtagggcgtggataggggcgcgcacggggtgagggcagtggaggtgaagctgctggcacggccaatttgaaagggatggacgcacggctgagtggtgctcggtcacggccggctcggccttaatggcacggtgggacctctgctccaaaattggagcttgccaaagcgcgaatcaaggtggagtgaggacaggcggctgagtgacaggaaggcggtgctacgtacgtgacggctcggtatgaaacgacctctcctggccaggcattgaaggacgccatgacagggagaatcagccgagcacaagggcaaccgtgacgtgacactgcctcggcgtgaagctgagtttaggcggggttggtgctaggcaagggcgatgccacacggcacggcggcagcgcgagcagtgcagccagcacatgcaacagcggggcagcggagcagcagcacggaagtgcacgtgggcgcgagcagagacgcgatgccgaacgctgctcacgcggtgatcgcgcacaggagctgggaaagagtggtcgtgcacagtttttaaagcgcctacaatggctagccaagcaaccccattgctcaaccaactgcactacatgcaagaggacgcttcaagcctcccaacagtcccaaaacacgattctagtgcttaactagattgctcataattaaattgagaacttggtttgtctattgttaccaaaacaacacttaaaccctaggttttaagtgaaaacctatttcaagttcaaactttgggcaataggaagaactagttagtgatattattttttgacgccacaagttgcaacgttttcttcaagatttgtacttaaaactttattaagatgttttcaaacgttctatatcatttttgttcgtgaaaattacaagttcaaccctatgcaatattaagcgagacaaagatggatttttgtttacgatttctttaagcttttctttccttgcgatttcacacatgtattcacaaccataaacatgatgcttatgccatggttttacaggttgattatgcagtaacatcgagggtgttacatttgggtcaaacgttgggaatataaatcatcaataacttttaaattgttgagtttacaaatgtaaaaattatatgaatagatttgtcttggaaaatactctcataaaagtatacatatatcatttttctgaatattttataaaaataagagggtaaagttatattttagagactgtgtcgctgtcctaaacgacttctaaattctatgcggagggaatacgtgtagagcaccctctttgatgaggttcttgttccgatcttcacggcgtaggatcttgatcttgataactagctcaaaaatggctagataacttgcagcaagcatcgataactagtgcaacctgacaaacaaaactcaaagccaaacatcatctttaaccgacaacttgaatcgaggattcgcccaaccacgctctcaaagaaccaaccaacacaacttacaatcaatcgagaaaatctcgaatggagtaggagcaccaattggaagtggatgaagccgcggcttctgtagtcctgcgaaaaaatcacaagaacaaaggggtagagattactctctgagttttgttagcacatagctaaacaaaaagagttctggtttcaattgaccttctgacagactattgaccttttgaccagtcttcactaaaactggttggctctcacaatggaaattccaaacagcttggccttggtggcattgaaaattagacttaattagcttttcaaaatgtcctcatagagcttcatagcttttgggaatcaaaagttatgaaggttttttgtactggtatgtttttcactatagtggtccatttttgctattccattttccattgtagcggtccgatcttcatggtccgatccaacctcttctttgtgtatatacctaagtacaatataacattcttaaaagtatcaaaattaaaatcatttaggagtaaattcacttgctcttatggtatcttagtgtgacttcgtgtaagtggtccttgatttgtatccttgatgttggatggtgagttgttgtacttgagctacggttgaaatgtcctcatcactcttgagctttacttaccctacaaataatacttggaaatacatgaggaattatttttttactgaaataacagttttattatatcgtgccaaggtgaaaatcttctctcccatatctgattttttccttccccgaccttctttctaagtagggtgcatgtaagagaatgggactacgataagaatgagaattctccttttccacatcctaagagcatctccaagggttttgcatttgagttttgcatttgagtaatttgccaaaaagctccaaatgaggtatccaacggttttgcatttggagtttgcaatttggtcaacttggaaaatgagggaggaaacttggcaaaaatgccaagttgtggacgactttgcaaacccgatcgcatgagcaaagtcacgcgcgaggaaagcgcgcgcgcctagagacattctttttttatcctttgccaagtccaaatgtcagttcctttggagatgacctatttttatcctttgcattttgttatgggagtttgcaaatagcaacaaattaaatgccaaattaatagccaaatgattttagttgctgctgacttatgttgactatatgatttcacgatttggttgaaaatcttctcttccgcacttcaattttaagttattgtcaatttatattggatttacacaatatatttgtactagggtagctctggttaatttgatgtaatttctagatagaactgatgtaattaaaaaaatcaggtgtgatgaagaaatatttcacccaattcttcaaatatcttaaatatgggtgtataacttctttaaagacctggattttttataacatgctcacaaattttgggtgtaggagataagtttttcaaccgttcccttataaaatgggtgccttgtcaatacaacctccaaaatgagaccctagtaggattatctggatttccaataaaaaggaaaatagacatctaaattggagtcgaagataactcaaacatacatagttaggtgtgtggccacacatttcacccaagtaattgaggtagactcacttcttaatgtaatgtccttaagatatcatcatgggacaatattgagttttcttgttcacaaacaagtggttgactaatgttttcttcgggttagtatatacaaacaatccttttgattattttactacaccctccaatttactttttttttttactctacacccgtctgtagcatgtacctttggttactgatttcatcgtcaaagagtagaggagattttgtacatacatgtaaaatccaaattttggtttgtttcaggcccggcgagccctgcgcgcactacgtggcctggt

SEQ ID NO: 4785 - DNA, 641 bp, Sorghum bicolor
  Intron number 1 from transcript Sb02g043590.1 (locus Sb02g 043590) derived from phytozome v7.0 (chr-ID chromosome_2; pos 77376890 to 77377530)
tcgtgtaagtggtcatgtttacctgataattactgtccatactacttaattgattgaaatgatagtattggctattggcccttgttgcctatttgccatttgaccatgttactaaaatctagagaaaagagaaatgcgtctaaaataagaaaggaaatagcaaatacaccatgatatgtgaatctgtgaactctacttattttagctattattctgtctttttatgtctttatggttgttcagtttcggtgcacatgcagattttctctggtatctatcaatgatctgtactggatttgtttgcatacaagttacgttcttccatttttcactcaaatatatattcttgagattgagttcaaaagtggttcaagtaggttccatggtgtcctgtaacaccaatgtctacagaaaatagatgctttatatttttcgttagatatgacaccatgatgcaatggagatgacacaagtagttcttcagtttagatccacccttgtttagttcctctttaccactagcgtttctgtggccagactctttttctgtttttataaggccatatgtagcgtagctcatttttttcagcatttcatctgaaaaatgactttaacagtatatcttaacttgcagtcccgac

SEQ ID NO: 4786 - DNA, 6106 bp, Sorghum bicolor
  Intron number 1 from transcript Sb01g047080.5 (locus Sb01g 047080) derived from phytozome v7.0 (chr-ID chromosome_1; pos 70157818 to 70163923)
cgcgcgaccttcgctacgcgcggccgggcattgctgtaagttagtaattcctttctgaataatttgttcctgcttcttgcttaatttgcttccgatccattcatggtagctggtacttggaggaacgcgtgagattcagtacgtctgtgcgcccaacgcaaagcgacgacggcgacgcgaatctcatgcatatgactgccattggatttattctctagctgcgtggacgatttgccggcctgctatagctagctagctaggttcggaatgcaccagctggtgttcgtatcgcgcaccttgagacgatcgatgcatgcttcgttacgtaggagtacatgtcgcgttgtttgtgtgttttgattgatcaactgataccgtacctgtgaaacgggttcatccgtacgattttgataggataaaacgtaattaaccgccgtactggcaaactactgtaactaagtagccttgagctgttcgcttggtagaaaaattatgactcaggctttgtttagatgtgattttttttggatttcgctactgtaccatttctgtttgtttgtggtaaatattgtccaatcatagactaactagagttaaaagattcatctcgcgatttacaggaaaactgtataattagtttttgtttttgtctatatttagtgcttaatgcatgtgccgtaagattcgatgtgacggagaatcttgaaaactttttggattttggtggaaactaaacaaggcctcaaactatttgctgatttattgtgagtaaaacactgctaaatagctgacaaatgtgacagacaaatttaagccaacaacctccatgtaggccttgtttacttccttctcaaaacccaaattttttcaagatttcctgtcatatcggatctttagacgcatgcatagagtattaaatataaaaaaaataaaaacttattccacagtttatctgtaatttacaaagacaattttttttaagtttaattagttcatgattaaacaatatttgtcaaacacaaacgaaaatgctaaatgtaaaaaaaatcgctaaggaaaacacggccataattgaagccaagcatcgttgtgagacgcactgaatgaaacgcactacacggtcggtcagtgcgcttgctgggtacgagtacgtacgtcgtacatacatacatgtgccattaattgaagctgcacatgtgcccttatttagatccaaaaattatttagattttaacactttagtactttcgtttttatttgacaaacattgtccaatcatagagtaattagatttaaaagattcgtctcacgatttacatacaaactgtataattagtttttattttcatctatatttattgctctatgcatgtgccgtaaaattcgatgtgacaaagaatcttaaaaaattttggtttttgggatcaactgtaataaacaagccgatcgcactagcgtagtactccgtagtatatacagtagagtacgtacgtatagtcatgggtgcattcatatcacatcggaagatccgagtacgtagtggagcaggagcaggagcatgagaagccactagtcacagtatgtactgaacgtcaacgctgcaacttgtagctgggctgcttcttgcttgcacgtacgggatcacccaacacgcgcggcagcccaggcatggcaatgaacgcccgtgcgccggccgggcatgcatacccgggtctgatgattgatgaacacatatgcaagtgactgcctttttatttccctgctgtacacggcaacatgcatggttcctgtacgttttctgctagttagtacttgtagacaatttattttttagggtcctaaacgccgcctaacgtttggtggccgcgctaggtcagtggcttggcagctcaagactactgtacgagagtacatggcctagcagtccaatcaacagcagacacaaagctcacacgaactagagtcacaagtggagtgctctactaacacaagcaattatataattatttgccatggagagatcaggaagaaaccatgactcagtcagaatcagccagtaggcaccatcacaaccaccacacattgtttacactctggtcaacacgagattaattactgctggtaggtaattatttgccatgcggaggaggagctgctgcctgcaccgcaccgcaggcatcgctagctttttcgtccctcgatcgccatcgcaaagcgacgacgacggcgaggaaaaacctcacacggtctcatctcatctttatctttatctctcaacgcaaagacgtccgtgtggtttgtcaactcagcagagcgctcatcccaccgtctccgtccgattcccctcctttctccgtggtggtggactggcctggtggtgggtgcacagcacccatcgctgggcgccgttctgcggcctcatctgatcggacggccgccggcatgcgtcatggccttgctggccgggcgatggctaccggcggccggcggggcgcttaattttgttgggtgaattgtcccggtctgattctgatgcagttacgacactcatggggactggggagtgggcacacaccacaactacatgatcgatgatggtgctggcgcgggacggatcatatcatatcacgtctgatggcgccgcgctcgcgggggattaaactcgacgttgatcgccttcctaggttctggaatggatccatcgatccccagctctgaatatatctggggcttttcccacttcatattcagatatcagagaaaacagttttcgtttcaacatcttcatcattacggtttgtcaagaactcaagctggattaaattaaaattcgaggttcatggtcatggccttcctaggtactactcctactctagtttagctgtgtgcgcggacggacgcagagatcaggagcaccggagcaggttaaaggccattgaacattgttggttatttgtaacataagaaattgcaaaactttgtcggtgctcttgttaggtttactacccatggagtggacccaattctacgaataaaatcatataggtcgacactacgtatattgtccgatcctctctgtaaaagctacacacgaacgagtagtagtgcagtctgcagagacatgtgcagttcagcgcctggcattggttgcgacttgccggtgctatccccttcaatccttcatgggttgagcacgcacttgcaccgtcttctttccaacagtgttccactgaacaggagacttcgttcgtgctctctgctctcccagcactacatattactgtactgaattatttggtcatcggtacggcaactagaaagtatatagaaagggaacctttttctttgcctttgtctgaatctgatctttggttgtccacaatttttttttgacacatggccaaccctcagctgccattattaaaaagtttaattcagcgaacggtgttttcctctcatagaaacaaatcagtataagcagcaggataagtcaaattttagtgaaacaaacaggagagcacggagcatgcgccatctgagggagtactgttactacatactagtatactactgcatagtacacactagggtgtcgtcaaccaaatctaggggtgaagccaaacatggaaaccgttactgctcatcacgcaaaatctattacccacagtggattcatacaggatttactaaattttattggggtcagtaccttcacccctgaccaaatccccatcagttgcgcccatcggcgttattcagaccaaaatatcggatacaagtgcttgatttatttactgagagtagcatatattctttgattatagcctttcttccaagttccaaccacatctatctatctatctgatggttcatgatgtagcccctaccaacatcccaaacaatggtcatatccacaaggccatagaaccacgaagctacatatatatcctacactttgtgaagacgtgtcgagtaggagccgtactggggcccagacaaaatcccaaaattctcctccttttcctgccccgagaaaagattttgcctttattctccggcccggacatatactgtttgttgggatgatgtcaaagcaaggagggtttgagaccgacgggtaccctctagttttgttgtcgcttgaaccggacgcgtttcctttttcttggatgtgaagaaacaaagcggcagcaccacaccagtgagcgcgtcgcctcctcgccgccgcatgatagaactgggcacggcagcagtatagggatgagcacggagccgcaagctcccacgcgcaaaatccaaatcaccagagacatccaaatcaatcacggttccgtctctaaccgaagaagctcacgaatcgaatcacgatcaccgcacggcaaacggaaaaatgctaggtgtactgtgacaacgcacataaatctgtggtcatcaatttcgtaacactttcttaaattaaattagaaaaatgctccttccattttaacttatagattgctttgtatttctagatacataatttttattatgaatctagacataacgtatatctagatatatagcaaaaactatgtacttggaaaaccaaagctgcttttataatgtgacaaacggtgtttttagaaaagtgataatagtttgattatgtgagattgtgagagaatctatgtgaaaaattcatgagtagtcttgtcgtccatattgtaaggcatgttttggtgcaatatattcttcagaactatatctgtttgtacatttagcttctcttacttaaaatatttttaaaattaggtttagtagtggacatagtagaataattagtttttttttaaaaaaaattgtctaaggcgccacatcctctggccagcagatagcagcacgttcaagcacaactggaactggatggagtaggcgataggtgggtaaaaggtttttatactctaggattagagaattgcaacctgcatgcatattcgaaaaaggaatatagtatatatcagcaaagaaaccaaaatcatctgacttaaataatcgcccaccatcatcacccagaaaaatgggaactccactggggtgctcataagaaccaacctgcacatgggacccacacccaagtgacccaagactgaaaagcttgagttattattattgtcatgttctctctgtgccccacaggcccacacgctcacgcggctcccatgggccatgggcgattagcgatggcgacgcgccttcctcctatttagccgcccccacccacctctcggggtctccatgcctccagagtcctgaccgccaccgccacttccacttcgtcctccaccacctctgcttccacttccagccttcccaccgatccgccgcctcaatcgcgcgctcgcagcactgtggactacccgccctccccttcatcccctactcgaaggtgagcaaaccagtctagtctcactcggtcactcggatcataataagttcataacctagcacacaaacacctgttttcggcactggtgcatgccggatcttctatcgtcggtaagcccagatcttatccactgcaaaagacggcttgatccgcacccagattcccagggttaaggcaaataaaatcattgtttgggcatgtagggttttagtgttctactatctatctatctacaagattgttctatagttcagtagtaggctagtagctgcgatagcaactgctgctgagcccgaattctgggaaccttttgcctttttttttttagatttgtgaactgcgtgaaagctctgtattgataagggttcttttctcgcttcaattgttgcaggataacaccgtgagtaggcgtgatgggtgcttgtgataccaatatgtgtcctgtcccccgttttcgtgcagtctaacaccgtttgttgctaataattcgtttataatttatataagggatcaagaacctttttcttttttttctttttgctatggatcattaattgcaaatcttttgcatatttgtcacactcttaatactacttttgagctccttggttcacgtccgatgtttctttgtcctccaattttgcaggatcctgagttaagttgggcgaggagaggaggtgg

SEQ ID NO: 4787 - DNA, 2739 bp, Sorghum bicolor
  Intron number 1 from transcript Sb02g027290.1 (locus Sb02g 027290) derived from phytozome v7.0 (chr-ID chromosome_2; pos 62503898 to 62506636)
acgcaattccaggtaattatgtaatgcaattggtcagatttgcgtgggatcagttgactaacttgctgcttccaattcgatcttagatcagataaatcaagatagatcttatagcagttggtttctgatagacgaatgcaccaacatggtgatcaccactaaattaagagcgaccattttcccaactgatttttttacagaaagggcccattgttgatttattagctcgattcactgtatccttctatggaaattggatgtagggattccttgttttcatgaaggtaatcaatgccaccagagtgatttgaattgttgttgggtctgaaagtagaaaaaactatcttcagagaaaggtacttactctgatcagaaatactataaggcacttttttttctcgaatgatactattagcgctaaagggcagcggtgctagggaggaaggggaggcatatcaggagggggcagtacttcccaacgatggtgactcgtcgggtggcacatagggttgacgacaacaatgatgagtagctcggcagcccatctatgcccacatgagccgccctgacgatatgttgctacttgatgctaaggcggcagatcgattagatcccaggcaaaaaccttcctacgagtgggtgtattgtgtggatgtattgcattaagtctctcaagtggtgtatatagagtgtagaaactttgggggacaagacacctccccggatacatatggcaataccggattacaatcctaactaccaaatatatcaattgctattcaatgtaattcaggcttgtgtttagttgcctatttacatgacatcttgtgtgttcacaagaagtgtatggttctctgtggtctctatagttgggctgcaacacttatccccaagaacagaaggttgaatttctatagattggtgatgcctagctttgcagcatgttcctaaacatcatagaagggttttaaatcatttgtcgtcctggtggcatggtggatttggaagcatagaaattgtttgcatctttgagggatctcagtccaattttaattccatcatgcatgatattagagatgaggccaagttgtggtgtatggcgggagccaaagggctccgtagcttattgccatgactgatacgttggtctttggttttacttagtttttgtgtttttttctggtgtactggtcatgcccttctaaggggttatttgagtcacctagactccttattcttcttaatataatgttatgcagctctcctgcgtgttcgacaataaaaaagaatgacaacttcattttctttttgttcattgatgcttggatgactatgacagtatgtaaaaatgagtttatgtgagtccataatttagttatagtagtataaactaggaaggttatcatacccttaactttgtatattttggccttttgcttacaagtagctctcatccaagaggtactaaatcgagaggtgattgtgattcttgtggcattgctgcattaactggatgcttatctaatatgaataaccctattgctgaagaactttcttggtaaataaatggtaacactaatgaaggtaaaaatgattagtacctcttgtcatgaataccagacattttggacaaagaaaacaaaacgtcatgtattcatgactggatgcagtggcggacccagaaatggaccaagaggggggctaaataacataggctaaatttttttttgctcgctcaatccagtacactaaggccttgtttagttctaattttttttgcaaaataggaatagtagcattttggtttgtatttgacaaatattgtctgatcatggactaactaggctcaaaagattcgtctcgcggtaaactgtgtaattagttatttttttatttatatttagtgcttcatgcatgtgccgcaagattcaatgtgatggggaatctgagaaattttgcaaaatattttgggaactaaacaaggcttaatagatgtagctaagattgataattcaatattgattcaaagtgttcaaaggcaaagattcataaaataagcatagaaaaataccaaatacatagattcttttgctaaaaaagaaaacctgttaaaaaaaattgagcccaagaggggggctgcagccaccccagcccccctcgtgcgtccgccaatgactgaatgtagtaactttttaatttagtagaagtggtccccttaatccatttttcactatggtttttttaaatgtaaaaaagttctgcagtgacaatgaggacattttttcctttcttccggttgcattacagagtgaaaaataaaacttcaatatgttttttaatagtaaaatagtggatcttgctatttttggaagacatattgaagatttacttacatgcagtcgtgaatacataagtgcaagatcttcctaatttaatggcagtgcaagatctatcaccatgtggtctcactgacatgtggctccatgagccatctatctgagagaacatctggtgcataatccctcaagttctaacaaatgagatagaaaatcctgaaaatgcacccaattttggaattctacgctgacatattattctttgggattgagattattagggccaatttctgtttacatgtaattgcggaatgtttttataattcttctgtatgtcatgcaaattgatggtttatgttgcttgacaggcaagtggtaactcgagtgctttattcctcactgc

SEQ ID NO: 4788 - DNA, 1499 bp, Sorghum bicolor
  Intron number 1 from transcript Sb06g021420.1 (locus Sb06g 021420) derived from phytozome v7.0 (chr-ID chromosome_6; pos 50703970 to 50705468 reverse strand)
cgcccggccgatctcccgcctccgccagggcctcggtgagtggccgcccgcccctcccgttcggttccttcgatcggcccgcgctttccttacccttctctcactctctccattcctccgggaatccgttggtgctgtgttcgggctcccggttggtgtattggcgacgtggatcgccgcctacgagcatttgtggtgggcggggcagagctgctgcggtcgcgcgagatcatttgtggtggtcctgggatacactcatcacgctgtagggtttgtttcgtaataagtggttctgatctcgggcacggaatagtttgaccggaaatgaatcagcgtaatcagttgctaggcctcgctggtatctgaagtgtgaacatgatatggttttagatgtcaggctttcatatacacttctatgaacacttacatgacgagttccaacttccattgtagaattggtggtctagatgaattgttgcctgcaaccttgttgaatcttctaaagcaactgctgtgtagttttctatacagacacctttaaagtgttgttgatgggacagaatgcatattctagattctgtgttttttccttttttgtgtagttttctatacggacatctttaaagtgttgttgatgagacagaatgcatattctagattctgtgtttttttatagttgacatagtcacataggtaatttttactgtattaaccaagcaagaaccagattaggttcatgtgggtgcatttccctctgttcattccctaaaaaagaacaagcaaggttattcgcaatccagactgatgcaacacagcgatgctcaaaatggtgcacaggtgcagtagtatgttgcgtcatttgttgggttggatgccccagtctgtatagcatcagaactgaggttttcatatggtttgaagtttatatatgcggtggatggttcttctattttaagaaggtgtttactttatggaggattggtaattctattggcactatttgaatggcctctaccgaacttatagtccagttgtgttctgatgattgtattgtgaattatggccacatttggttcctcatctaaacctcacctaaccttgctgaacaaggattgatgcttttgctgctgcatttggatatttggctagcttgtctcggtaacttgtgctggcaagaattgccagcatttccccttgttacccgcagagagctaaaatggctctccggctaagcaagcttcttggggcatgggccaataaggtgaagcaatcttgcctgggaaccgaatgttccttaagctagctaactagctgtatatttatatggaagagattaaaattattattgctgttgtgcaaggccacgagtgctataattttcaatgccatactttatgttagaattttagtttctttttgctgcacattgtttgcatatttagatgcgatgatgccataactggaaatttactgtatttcagggttctacctggaaaggc

SEQ ID NO: 4789 - DNA, 1167 bp, Sorghum bicolor
  Intron number 4 from transcript Sb08g003460.1 (locus Sb08g 003460) derived from phytozome v7.0 (chr-ID chromosome_8; pos 3911158 to 3912324)
ggcaatcaactgtgtagattggtcaccgagtcgttagtaattattcttacatagttctgcttccatgatctttaatattctgtttgacttatgttattaatgagtaaatgttcttagaactttatgagttagccattctgtagggtcatgtattaggatattaagagaatgcagaattatccctcttctaatcaaagacataatgcattggttttacagcagtcatggggatttggggtatgcaatttgagatataataaggtggttcttcaacatgatacatttctctacttcccttatagtaaccaggaagcaaagtgggtgcccagtgctgtgctggtattaatgttgtaccgacattaaaatcgaaactgacaaattattatctataaattttagttatgagaagttttttttcccatattctacaagaaaatggcaataataggtgttgcacgggttgtccttccaccatgcaaacatggattctctactaatgctcttctggcattctcagtgttctcaacaatctagctactagccctagtagattagcactgaaccatctaaactcacagtgtgaatgatgatgctatgaaggtacacggtaatattgtaagtctaagaaaactacaaaaggttctcatgtagggatttttcaccttattgcttttgaatgcttatattgtaactctttagattagggaaggctatcaggactgaactgaccataccgaaattctgatcttatgcaaaccaagatatatcttctccactgtccccttgatcttcaccttcgattttgtacttctaatcttctatggaaatgcttacaatccttgtttcttggtaatttgatgtcaaatagggatgcttttgaaatattacatttggcaatatcttcatggaattttccttgttattcttcgtgtttcacttttaactcacactattaataatatggtgcacgtgtcaatttgataggaagtaccaatgcatgagatgagttgtttcatagaattaccagcttcaaattttgttggttggttattgacatacagtacaaaatacccatgatgattttgcatagcttttatttaattagtctcactcaatagacattcacaaagaaaagtatttgcagggcatcttcttgcttctgctgga

SEQ ID NO: 4790 - DNA, 5708 bp, Sorghum bicolor
  Intron number 5 from transcript Sb02g029000.1 (locus Sb02g 029000) derived from phytozome v7.0 (chr-ID chromosome_2; pos 64183043 to 64188750)
aaggtacattaaacctgttctgtaacagttatgcatctaaatctggttggtactaaaatataaagatatatgtagatgttcccattttccaacctggaccctgaaaagcaaaaacagaggtctataatcaaaataagttagacatcatatgggaagttctctgctatattgtgtaaacagttagatcaattgaatttctttacattgtggaagctatacagattttattgtagttaataagccctgcttcctaagcatttcttagataactgtgctagttaaatttctgtcattaaaggccttgggtagcccaagagttgtgcgggtacccaggcagctagtctgtctaattaaagctctagtgagctgtttgtaatcaatgcaatatctgtctttctctatatatatgaaggagacgcctggggctagtggcctcaaggctaatcaaaatctgtgttacctctaacatttggtaccagagctaggttagacaccagagagccacgaggccaactcctcacctcctccacccatgtcgacctctgctgagcgcgttgccaggctcaaggccgcgcgtttgaaggctgcagaggaagcagcagcgctggcagtccaggcagcacagcaggcggcggctgcggcagaggcggcagcaaggacggcgcaggagctgcgggccgaaattgctgctgagaagggagaagaagaggaggaagaggaggaagaggaagaggaggacttgaggagccagaggactccatcgcgggacaggcgccgttcgcagtcaccactgcgtaacagaaggcgtcgtggcggcggccgctatgaatcaccgcaaggcagggtggtttaccgcgactccggcagcagcacatcatggccaatgctggacaagacaaattactatgagtggagccagacgatgaagctcaggatgcaggcgcgcgatctctgggaagctgtcgaaggaggcccagtgcagtaccgcgacgacaggcgagccttggaggtgattgtcgcgtctgtgcccaaggagttggggctcccgctccttgacaaggcgacagcaaaggaggcatgggatgccatcgctgcgactcgaatcggtgtggacagggtccgccgagcgatgttgcagcggctgcgtcgggagtgggagaacatggatgtcaagcctggcgagccggtggaggattttgccctgcggctgtcaactctgcaccagcagcttgttcttcatggtgacagggacatcgacgagaagcgtgttgtggagaagtttctgcgcacggtgcctgccaagtacgcgcagattgttgtcgccatcgagcagttcctcgatttcgaggcactctcgcttgaggaggtgacaggaaggctcaaggcggtggatgaacgtgaagcgcaagctgtgacagagccggtgtccgtcaacggcaagctgctgtacaccgaggagcagtggcgtgcacgtttgaagaaggagaagcaaggcgcagaagaagctggcggttctggtttcaagaaccagcatggcggacgcggccgtggtggtggacgcggacgaggcagaggtgctggccgtggtggcggacgtggagaaggcagaggcgctggccgtgttggccccaacacctgcctcaactgcaaccaggaaggccactgggcacgtgagtgtccccaggcacgccgtgaagatgcagagcgcggcggagggggaaaccgtgctggccgcggtggtggcaaccgtggtggaggtcgtggcggcggaaatcaggctgggcagcgtggtgggaaccaaggaaggcatgaggcgcgcgcccagtacgctgagtgcgatgaagatggtgctctgtttctggcacatggcttcatcagcttggaacagagcacgccggcgcacagctacatggcgcagcacgtcgagttctctgagccacgcgctcgcgcctacctcggcgtggacgaagaagaggtggacagcggctggtacctggactccggcgcgacgcatcacatgaccgggcgccaagagctctttgctgatctgaacactggcgttcgaggaacggtccggttcggggatgcgtcgaaggttgagatcaagggcgtcgggtctattgttttccaagccaagaccggtgagcagagggttcttcatggcgtctatttcattccggcgctgaagaactctatcataagtctgggacagcttgatgaaggagggtccaaggttgagattgatgatggcgtgcttcgcatctgggacaagagtcgccgtctgctcgccaaggtacgcagagggaagaataggttgtatattctgcatcttgaggctgcacaacctgtctgtctcgcggcacgcaaggatgaagaggcgtggtggcagtggcatgagcgtttcggccatctgcacttcgatgcactccggcgactcagcaaggaggagatggcgcgcgggatgccggtggtcgaccatgttgagcaggtgtgtgacacctgcgttaccaccaagcagaggcggcgttcctttccggctgcagcagcataccgtgcccagaatcagcttgagctggtgcatggtgacctgtgcggtccggtcacgccagcgacaccggcgggcaaccgctatatcttgctgcttgtcgatgacgccacccgctttatgtgggctgtgctgctgccatccaaggacgcagcagcagaagcaatcaagaaggttaaggtggcagcagaggtggaaagcgggcgcaagctgaaggtcctgcgcactgacaatggcggtgaattcaccgtcgcagagtttgctgcatactgcgctgatgaaggtattaaacggcattacagtgccccttattcaccgcaacagaacggtgttgttgagcgcaggaaccaaacagtggtggccatggcacgagctctgctcaagcaacgccagatgccctctcggttttggggggaggctgtgatgacggctgtacacatcctgaatcgatccccgacgaaggcgctgaagaatgtcactccttatgaagcgtggcatggtcgggcaccaacagtcggccacctcaaggtctttggctgtgtggcttatacccggcgacttactcagcttcgcaagctcgatgatcgcggagaggctggcgtgtttatcggctatgcggaaggggccaaggcataccgtatctatgatccagtgtcccagcgcgtgcgtgtcagccgtgatgtggtgttcgacgaaggccgcggctgggactgggcatcaccagcagcaggcacaccggaagcagcgggcagtgagttttctgttgaattcccatgggcggaggaactccctgaagcaggaagttcagcgtcacctttactatctcctccgccacatcctgcatcgcctggtttctctccggtggatgcaggagagcctgcagcagaagcagaggagcccgcagcggaggcagaggcgcctgcgtcacccagaacacctacaccagctccagcaagtcctcaggttgagcatgtgactcccctggaagatgatgatgaaagggtggatgcctaccatgacgatgaagaactccgctatcggaagattcatgacattattggtgatcagccaacccctccgccagcgcagcggctgtttgcagaacttaatctcacccattctggtgagcctataagctatgaagaagccaaagatgatccagattggcaagcagcgatgaaggaggagctgagatcagtagagcggaatgggacttgggaacttgtttctccccgtcctggtcaccgtcccatttcactaaaatgggtgtttaagctgaagaaggatgaacatggagctgtaattaggcacaaggcaagacttgtggcccgtggttttgtgcagcaggaaggagttgactatgaagatgcttttgcaccagttgcaaggatggaatcagtgcgtgttttgcttgccttagcagcacaagagggatgggcagtacatcacatggatgtgaagtctgcatttttgaatggagaactccaggaggaggtttatgttacacagcctccaggttttgctgtaacaggagaagagaagaaagtgtacaggctgcacaaggccctgtatggcctgagacaggctcctcgggcatggaatgccaagcttgacttcactctcaagcagatgggttttgagcagaatgtgtatgaagctgctatgtacagaaagggatcaggtgactccttactggtaattggagtctatgttgatgatttgatcatcacaggagccaatcagcagaagattgaagctttcaaggcaaagatgaagcaaacctttgaaatgagtgatttaggtcttctgtccttctatctgggagttgaggtgagacaatcagaagggaacatcactctgaagcaaacccattatgctaagaagatacttgagcttggtggtatgacaggttgtaatccagccaccacacccatggaagaaaggctgaaattgagcaaggaaagcacagcaaaagaagtaaatccaactcagtacagaagactggttggcagtttgagatacctagtgcacaccagaccagatttggcttttgctgtagggtatgttagcagatttctggagaagccaacaactgaacattttcaggctgtgaagaggatcttgagatacctggctggtactctagatcatgggctttgctacaccagatcaacaggcaaagcaaggtttgtgggttacagtgattcagatttggctggagatgttgattcaagcaaaagcacgactggatgtttgttcttccttggaaccagcctggtcagctggcagtctgtcaaacagagagttgttgctctgtctagctgtgaggctgaatatgtggcgatgacaacagctgcaacccaagctttgtggttgtcaagactgtttgcagatttgttgggaagaaaagttgaagtggtggaactcagagtagacaataagtctgctctggctttggcaaagaatcctgttttccatgacaggagcaagcatattagaatcaagcatcatttcatcagagattgtgtggaagatggtagcatcaagacagagttcattcccactgcagatcagctcgctgatatactgactaaagctttgggcaaaaccaagctggaagagatgaggagcaggattgggatcaaggagatcaagattaattgaagcaggccttagggggagaaatgtagttaataagccctgcttcctaagcatttcttagataactgtgctagttaaatttctgtcattaaaggccttgggtagcccaagagttgtgcgggtacccaggcagctagtctgtctaattaaagctctagtgagctgtttgtaatcaatgcaatatctgtctttctctatatatatgaaggagacgcctggggctagtggcctcaaggctaatcaaaatctgtgttacctctaacatttatttcttcgtctacgcagtacatggatacttctgcaaaagatcatttgtagttatttttatacttgagaattgcttaggtcctgattgatgcgatttatacatgagctttctttgcttggttctacatatatgtatggcttgctctgttctacctccagaaatttatggcttcatcaatctaataacaatgccaaacatatgctccagttattgagtgcactgggattcctgaca

SEQ ID NO: 4791 - DNA, 1520 bp, Sorghum bicolor
  Intron number 1 from transcript Sb04g019560.1 (locus Sb04g 019560) derived from phytozome v7.0 (chr-ID chromosome_4; pos 45724538 to 45726057 reverse strand)
cgagcccaagcccaagcccggacagctcgccggaggtgactctagctgcaagcgattttttagtcgcctcttctgttcgcagattgtgtccgtccgtgttttgaatttgtgggaattggagcttgtgttctaagatctaccggtttccctcccttccttggtgctattggtagatttggagatgtcctttttttttttcgttacggaaataagaatactactagtactatgttggtgtcactgcggagattcgatgttgttgttttgtcttttactttaaatatttattatataggtggaatatataattttttttttgtgttgatttggattagaaattgcaactcgtaggcgatcgtgccgactctttcgactttggactgggagaagtgggcataaaaggttctagaagaatattataggctatctttatttctagtggtctatattctgtatagggttcagtggttcaaacctttagctctagtccatctttagaaaattgcaattttggaggtggcttgtattagcagcataactttctgggaacttgatgtcatattcttcagttccagaaacaatcttctatcaaactgtatcggttgcttgtgtaaatctgacaaactgcagtcaagagctttagattactttgtggatgatcaaatgttcatgctgttttgccattccgagttgccaacagggctagtatattcatatccggggcttagtgaggatattgatggtagtgacaacttggtggcgatctctgaacaattatttgctgccatgttaaattaggaaaaaacatcatatttgtggagacgtgcgcatccacacatttgtgggattagtacttagttaagatttatttgtatatctgttagggttcgcgcattagcaagcaattagttgaatggctggattacattgtggatttcactgttttgaattcttcactgaagcttaccccaacttgcttgtgaacaaaaggctttgttgttcttattacttgcttgtgaacaaaaggctttgctgttcttattagtcgatgtacgaccgccaaataatatagttttatttattatccaatgtttcaaagtgtgattctggtgattcatgtctgtgtgaagcatatgcttactttacttctaagtcgtatgtgaaaatttatatgtaaactgcaaagagcactcaattatcatgaattccatagatcatggcctgatcgtggtaattgcctttaggagtaactttctgcaaccatacacactatttttatgttactggtataacattctctaacataattaatatccatgatttggatcttagttggagggaaacatggacatgaattatcttgttctgttcagatgaaacaaaattatcaatcgatgcttgcacgcaaggtttcatatcgctgtgtttacatgtatgtcgatggtaggcctgatgagaattttattggttacttgaatggtgtagctgttgacgaagagcggcatttggcactagctcat

SEQ ID NO: 4792 - DNA, 4218 bp, Sorghum bicolor
  Intron number 11 from transcript Sb03g010220.1 (locus Sb03 g010220) derived from phytozome v7.0 (chr-ID chromosome_3; pos 11063079 to 11067296)
ggtatattctgaggaccatttcttgtttttggacattaaatacagcaggggaggcccccactgtagagatttttattaagagaggcaaaaaaaaaaaagttgtacaaacctgtctggcaagatggcaaacagcaggagctggactaaaaaggccaaaagaaaaacaaaacagaagtaaacaagaagctctacacaaaaaagaaaagcagctcgtttggcctcatcaagaaatctctgagcctgaagtttagcctcaagaaagagaacctaggaccatttcttgtaggtttgcattcttttctcaattaatctaggctcttttttatcagacataagacatggatacaacccaccatcagcctatccaagaattttccctctgctactagcaagtgagcttatggagtgttgctaattatctccccctcttctaaattaggccagttcatccaactacttctggtctctgtgccatatgtggaaatgctctctgtgccatatgtactatggcactattagtgttgcttttgtgcacaagttctttacatgttcaaaaacttagtcaccgggatcgcgggtcgacgcggcgatcctcgttcccgggaatgtcgtcccaaatcgcggaacgggaacgcgccgggacggctgccggaacgccggcggaactcgaccccgccgccgcccgcgggaactctctgcgccaccgcaggaacttgaccgcgccgctgtgggaactcgatggcgccgccgcgggaacggaaggccaagcgccgcatcgggaagaacaagaagtcgtgcggcgtgtctgctgcatcggggcaaggtgagggaggcgaagcgcaagcggtcagcagcccccattaatcaacatcgggaaggtggaaggagccgagcatctgcaggaacgtcgtccctcgttccttctcgtccctcgttccttctcgtcgttccgggaacgtcgtcccaaattaacttggatcacagttcatgttaatttggaacgtgctgaagctgtatactcgtcgttccgaacagtattgaaaattgacgtaccacgttcctcgtccccgttcctcgacccggtcgacccgggaacacggtgactaagttcaaaaatgaaaagcacatacaccgtccttggtatcacgctttgtagcattcaatgtcttattatcttgcagtagatagggtacagctactcaaaaattttaatcgaacccgtagcgtagagcttacatgtcatcaacctcagaaaagttaaaaagtataaaagaaatccatagtcatgaacttagtaaacagactattttagaaggtaaggacatgattatgcaacgacgtaataaacgactattttagagcaaaagaagatgagatacatttcattgaaggtggtgagaaactgaaaacacagttacatcttatgccatcacacattagcatgttgacatttaaactgacatcatgtaaatcaaatttttcgtcataagcaaaggaacctgattcaaactgaagccttttgacgactagatatcctgattaaccctatggcagttcttgcggatttctccattgtaacccatgaggggatttatgttccccattttgattattgaattcacataatgttcaaagaatagttgctcgttttctgcataactttttactagacctgctatttcggggtcttttcctgtccacaaaacttcatctgaattaaggagcccttttccctccaatatcagcttataatagctgttgtcaaattgcgaagggctgacaaaatctagggaccttatgttgtcatcaccaccagtgtgtgggcacgccgatgccaatgtgtgatagaaacttttttctagtgtgttgtctggtctgttatctctatgctgattgtagagtcgttgtttgaaactcacacatctggcctttccaatggtgtggcttcctgtcagtgtaaaaataaactctttaggaagataagaatatgcagacccaatagcaacatactatttattttccattgttgtctaacagatattcttgctgatgatagtgatgcatttatactatgtcctatacaatgtttttcttgctatactttcagccctaagcttataacaaggaaaatcgaagacattctgtacaactgaaccaattccattaactattttatatcatatcagtgtttttttagcattgaatatatcagtagaggtgttggttgttgtgtgtgtgtgcatgtgccttttcgttgtgtggcccttttgtataagggttttcaatcttctcaatacaatgacactcggtttccctacgtgtttttgaaaaaaaaataatttgagcattaagatgtgccagtactatacctgataatgcaacaaggtccaccttgtccagtccttgcctttggaagaacttgataagacgatgtagtgttgcatttggtggaggaaggttcttgtttgctagcttcatgtttgctgtctttgagtccctccttcctaatggaagttcccaatatggtccaccactctgtcaggtgataagattatattgattatgtaccaagtggacctagattaagttttttagggaaaatcttaattaaattttgcttgagactaccagcttttagtctttttattaaagaaaataaaacaattttttgtgagaaatcctgtatattttctcttctgtaactagtgcaggtttttgtcacttgaatgtagagaaatttaccagtactgttgaacctctggctgctagggcgatagtgtcagcacaagacactgtattcggacatgcttcctcaagtgcagctttgatctcgtctataacctcaaatcccctaatagaattcttattgggaatagcttttttctcacttacaacttcctcagcgtcatccaaaagaactgatgcatcacatccctgcaatttcatcacataactacataaaccacgagacaattgagattattgactagagaacatgaaatcatggttcttgcactcaacaatgttcaacttccaacacatgggtgaaccatgcatggtggctgactgacggatgacttttgtttattctggatgaaattgaaatgaaattgaactgtgctaacctgaacaaagcagtcatgaaacaggagcctgagaagggaagcagctatgcgtggttcctttgcaatagccttctttagtatgggcaccacaatctcatcggcttgtgggcatgtgaacttgtagtaatctgtagaaagacctgagattggaccatttccaattggatgggctccctcatcgtgaccaggagggaaggcaagggagccagataagtagaaggaagcaatgaaaattgcaccaagaactatattgattgaagccatgatttcttgaatgctgctgtgctttagtttcgtgatttctgcttcctatttatagatgctcatgtgattccactgcatcactccatccactccacttgtggaaagcatcatctgtttgcatcaggtgtacctgatctagaggttgcttttgtgtattttgttacttatctgttgccactgtcgcatgtcctattattgccatgtgtgacctgcctaaacccttgggatcattaagtttctttttgtaaggtgccttccatagcaagctccctgttgttttgtgtagagagatcttcagcttagtttgtgtgctaagtacatgctggaaacagaaactattggcctctgttcaacattcttctctaattaaatcccggtaatgtacaacatgaagtggtagtagtagctccacccactccaaatacatccttgtataattcagtagtaggatggacagagttgtgcaggaagtatgaagtaagatgggtacaactaaactcaattgtgcatctaggttagctcttgggatctatcttacgacactggacacttttggtggttcaatttttgtgtgaaacatatcgttagatttggcataattggaaaccttttgtttcttacagcactggattccagtaaagtcgaacttgtaatgggcttgggctcttggttgtttggctacttgcacacccatttttctttgacttattgtgtgcctcttaagttataagatgtacaagtacccaccacgtatactcagcctattctcctttgcaaaaacaatatgcacagtctattctgatcctgtttgttttgttcagtaaagcag

SEQ ID NO: 4793 - DNA, 3067 bp, Sorghum bicolor
  Intron number 1 from transcript Sb09g008140.1 (locus Sb09g 008140) derived from phytozome v7.0 (chr-ID chromosome_9; pos 15364694 to 15367760)
aaagctaagaaaggtattaatgaggcacttgggattcaagagccgtgtaattgctgcagatattatggtttaccgtgccttcagaaaaagtcaagcgaaggaaagatagaagtaccccaagatcaacagactgaaggtaacaagaaaaggaaggcaatctccctagagccactgttaagtgttgagccaaatctgagttctacatggcagttagatttagctccaaactctcatcagacacattcataccttgaagaattagatgccccttcagctacacttgctatgccagagatatgcctagatggatggaccatcacctatacagaatatcagcctcgaaagagtaatcaagctaagaagcgaaatagtgaagagactccattgaaggtgaaccctcagaaccaacaagttagtagcactctggttactcctgatacattaactcaaggaactcaacatcaggatagcacctacgttaaaactgttagcaatgcttgttaccagtgtcacgaagagggacatcacaagaagcattgtccaaagaagtacctagttcgtgactatgttaatggtagattgaaccatgtggatctaggtactgctcacgaagcacaaaatgtggtgtttggatcgattttagtcaactcaactcctgccactattttgttcgactcaagttcttcacattctttcatctcaaataaatgtgttgctaatcataagatgcttctgttggaaatgaagaaacccgtacaagtcaaatcaccaagagggaagataaaagcaacacacatgtgcccaaaagtcagtctcggtataaaaggtgtaaattttgaggtgaatcttgtagttttggaatcaatggagattgatgtcgttcttggaagaggatggttaaccgcttgtcatggaaagattgactgtacccaacactcagtatcattaaccaccccatcaggagataggtttgtgtatgaaggtattcaacctcacccgaaggattaaaggactaatggaaggattgtaccgacaacgaggcagtttgaaagaagtgtggaccttatacagaggtgatatattctcaacatctgatgtgaagcaagttatattaagggacctagatagatttgagctagtcaatggtggtatatgaaatctgaagtcagttgtgtctattagcttataaagattttgcattcaagtcacttgtaatcttctttgtaaaatgagatgtcttgttcattggaccttatcattcttaagcttccaatatgagttatgagttgtttgaccagatgttcagtctatttatggtaaccgatggaaccttggacgaagcgcatcgtgctatcccaacatcaatttgtagtgcttacatgtgaagtgatcttaaattcttcatacaaaatgagttgacatcatttgtgtagttctctcttgcaacattctcccgacactacaagtagtaggtcatgtctgcttagaacccatctatggagaccacaaagaagcactgagtgacctagaaaatatcatgcctgttgacctatcaaagcaaggcaataggaaaccgaggtcctaagctaagacttctttttcaccgtggaatatatgctggactatcacgtgacaaaatgcagaacctgaaagtcagatgtaaaaccataccgatatatgatcaatttcatcgaccccttggtttgttttgctgggaagtgttcaagaactttcacctggataaacttcttgtcttgtgacttacgtctcgcaccaacactaagaaaaattaagaacatcttaatatatcctttccaatcattgtgttgattctctccctgttcctcggaatctccatctgtgcagcgtgttgtcgaactagtaacctccaaaggaaaactttgaagattatctaccgacaagaagagtgttcttatacaggattttggaagataagctaacacttggtttaagtggggtagcgtccgctacgatcatcactctcgaaagtctcaacttaaaagacatggagaactatataagaatctttatcattcttgcgatgagctcttatcaattttgtcaacgtgtgatcttggatcttacgtctcataggactacaaataattaagcgtgagactaaaaaaaaaatctaaatctttgtcaacttttgtcatttctttatcctttcgtctactatctcatacaaatctggaatcaagaaaattgtgagcactataatctttatctcctatgtgtcatctcttgttagttctggctacttgcccttgcaccatatcttaattcaggatccaaagatcaactcttatcccatgcgtttatcttttcttgtcatcaatctttaccatactctttaccctttatgtctatatttaatcctttgatcatgtcttgaaggtctcgaaacaactttgatgatctactttatctttctctctagtttcttcaaatctcggggcgagatttatgttaagtggggtagatctataacactccaaaatttttaattttggattgttattagaaaacactaaattaattaaggatttaaaatttttttgtaaaatattccaagattttattcattgttgttattataaaaggggaaaaatgtggaattttaaaactcttataaaattaagtgaagggtgttttgttttgttattgtgtgctttgtgccctagctttgtttggcttgtgtaaaaaaaagaattacaaaatttccagcgagccacgattaagtcctttcggttttcggtaaaataaaaacactaaaagtcctttttgaaaactaatttgtaattgagttgaaaaacaattttaaaatgtgttattaagaaaatatgttttgttctaaaagtagtaaggaaaacaagctcttaaataatctcaaattaggaattaaaaagggttttgaaattttggtttagtaaaatagtttagaaatcatgtttataaaaagaaaaagggatttcttcctctctgggccgtcccattcttccccggcccagctccctttcccccctctctctcttgccgcgtgggc

SEQ ID NO: 4794 - DNA, 1260 bp, Sorghum bicolor
  Intron number 6 from transcript Sb01g043240.1 (locus Sb01g 043240) derived from phytozome v7.0 (chr-ID chromosome_1; pos 66492503 to 66493762)
tgcaaacaacaatcttggaagaagtgtcagtaaaggtaactacgaagtaggaacatgctttaagatttactttactggtgaattgaacagagtaaatgttctttggtagtttggcttcacttatttccatacaaatgatggtgtgctgcttttgatttaatgatttttactgtgattctgtggtatttgtaatgctagacgactatgtcatgcactgtatatgtggtagttgattgctagtttgctatctcaatgttttgctgttccagttttttttgcttcttttgtatggggaattttgtggcagtattcttttgctgtcacagttgctgtttgattgttggcttaattaagaaactatattttgaggtttaatcagttcaactcgttatggcgcattttctgttagcagaagtatttggtcaaaactcaaaagtccacataattgtaacttattctagtttgtgtcctggtcgaatgtcactgttctccagatatatgcatatggatgaattttctagcaaatcaacctaatactggcaataagaatttcattcttttcttatgctgtaacaggtcctctgtcgttatagtttactttgttgtctggtctattctggtctatctagctatgttaagatgtctggtacttcaacaaaatagcagcctcatgtcgaagctatatgttctcatcagtcctctgttgcatgttaatcattatgtgagtatataatttgaatgttgtgatccaatcttgttagtgccaacttgacaaaatcttttggcctaaataatctctgctgagccagcaattttaatcttcatgcatccctccctggtagatttcattactagaaatttcttgtcttattggtaagagatccaaactggccttaaacagcaactaggtgaacttactttattttgggtttgttacaatttatgtcaatactgacaacattttgtaagaatgtgacccgaaatagattctccttgagcagttttttgatgtcacacatattcactcttacatgtatcgaccttttgagtatgctaattaagggcaacatactttgattgtttaatacttaaatatgacaattcttccttgtgctctttactcggaaaagaactcttgtcattactttgttttcttatccatttgttgctaattatgtcctgtctcttaagaagatgtgttcagtgaaaagttttggttttgcaggaaatttctttagaatacgcagtgcttttgcgtac

SEQ ID NO: 4795 - DNA, 7531 bp, Sorghum bicolor
  Intron number 2 from transcript Sb03g030760.1 (locus Sb03g 030760) derived from phytozome v7.0 (chr-ID chromosome_3; pos 59001406 to 59008936 reverse strand)
gaaggaaggagtttggcgaggtgggcagtgctctggtatgtttggcctattgctttttgcatggggctcatgttgttgtttccatcagctctgttcgacaagagaggacgtatctcattgtgctgcaactcagcgtcgaggtgtgtagcagccattgttgctggcctcgatgtttttttttgtcaccctaacaatgttcaggtgatcttatgtcgaagatttgagcagaagatgggtgtttctgccgatggaaggggagggacctgaagggaataggatcagaactgacacaagctgggagttatatttttaggtttctggcgagtcaaacatggagaattttggtgctgcagtttcttttttgcattccagctgttttaacgcacatctgagtaacagcgggaacagtaactagcagtgcttatgtaaagcgtacggttatgaccgtcggcaaattcataattatggcccatatggctttatttttcttctacggggtaattggacatgccaagcaccaggagatggcttgctattgcgaccagatgtcggtgcccccgttgatctgtaaatgctttgacgataacatgtaaacgaatcgtcctttccaaaaaaaagagagagtaaagagtcgtggtgttatttggtaatgtagagaacatggacgggctgtagcctaaatacctatagatgtgaatcctgacatcgcaatagtatacttgacaagttgacagcagggtttaacgacactcccccaaccctgatctctctgtatttgctggtcattttctgtaactccaacgtttgtttgttcttgttttctctaaataggtaagctgtgaaactgaaaggatagaaggaattcaaggaaggaagtagcaactcagctagcttgctataaaaagcgacgccactattccacgaacgttcagtggaaatgaaagcaacggtcaatttccgacagccattttcttttcttttttgaaaactgtgtatgttactttctatttttggatagaacagaaaatcgtttttctttctcttttaaggtattcaattctcttttcactttcttttgctggatcacctgccctcaaatattttttttatttctttaagaagcatgtgctcataacttataaaacagaattaaaaagcataactttcacgataaacttaacagtcctaacttagaagtgtttctagacaacgtaagtttcagaaataactcaacattggtaacttagtcgttctcctgcattctcttttaggtttgaagagttgttttttttctttttggaaaactaaacattcgtgaaatgggaattgggtttataaaagggtggagggatgaaataaaagtaacttttgcaaattatactatataatacattccatagaatgataatgcatccttgaaaaaccaagataaataattgtttttttaacttgtgcagcgataatctcaacatctgtttcttcaattcgtagatctgtaaaataattaaattataaaatttaaaataacaaatacaaaaatagtaacttagacaagtaagttagctagcatgcaacacatgaaaacacgagttacttatataactttgtacactaaattaatctcgtaagttagtagcctacataaaaagaggaattagatacacaactcagtacactaaacctaatgaactaagttatgctgcatagccatgaaaaatgtaattgacttttctaaattgaatttactatgtatctagacacaactgtatatctatacacatagcaaaaatcaatatatgtagaaaaatcaaaacattttataatttagaatagagggaggcataagttacacaatacaacttatgtacataagttacacaactaatatactagtgtatatagaaagttatgccgttattatacacaaacagaagttatacaatacaatttagcagaataggttagtagcataacttaccagaataagttagcaatataacctatatgttataagttaatatacataaattgctactagaaaaataaaaatcttcgaaacatatagaagtggggtctagttttgtttgtctcgtcacgttgaacacaccagtatagacggaattaaaaataaatacatcattcaaaagttatagtaatttgaaataaatattttgctttttttcatgataatgtcaagtgcagagggaaaggaaagtggggggaggagggtgggagaccgatatgcattagctgtcggatcgttcgctggattgaaaattactgaacgaccgtgagaatggaattgggtataaaaggctaaaaacggaaccacggaagctgagacagggctcagcatttatgggccgatcttctgttgatcaaaagcccaagccaaggccatgtggctatctactgatcatctgaactcttattttttcctttcagcaaaatgaatagagatttcgttagctgggttacaagatgcagagcaaacgaaggtgacgagctggacggtgaccaaaacctcccagcttatttgttttttttccctatatatatttatggtctcctgtctggaattcagagcatttgcagtcagtctctagcgtgtgcgggtcagatagccatctgaacataagagcatgtcaccttgtctttgacaagctccagaagaacattgcaggtaagcattgcttccatcctccatgaaaaaaaaagagagacaaagatcatatgcttgcatgcatgtcttgtgcatgggaccataaagatcacgggcacaatccactttagtctccgacaagtaaaatgcttttcttaagacaaaaacctcctgcagtggccccagctgctcatccatcccagcatctttgctgacggcaccaaagataccagcagtccagcacactgcggcagcactcgatcaccaggagtctgggggaacattgtaaagtcgcccagagacgacagcgcacggctttaatcatgtggatctttctttccatccatcttgcatcatagcgtgatcatgtgtgtgcagcagttgtcctcagtgtacatataactctataaaagaaatactatattacctagatctcctagttaacttgccagctcgggaaaaacattcatatgagttttttagtggtaggttattcacgcatggccatatatcaagtttacctagttctttaaactcattctatcagactacaccagagttcagaagcagtcccaactcccaagtatctctttcacatgaagttcagaagcagtcccaactcccaagcatctctttcacatgaagcaccatccttgcgctcttttaaggtggccatgtcataatccacttcgcaacgtagcacatgaatgtcccaaagagtagtacacgtatccatcgctcggttctttttacatgtaacattagccttgtcttaagtcaaacattactaactttgaccattcatttccaaaattcttatagttttacaatatatgaattatatattataaaagtatttttcatggtaatctaaaacataaatcttatgttatgggccatacttttttttttgaaattgatggtcaaagatacaaaaatttgattttgggacaaaactaacaggacatgtaaataaaaacagagggagtatatgaggcaatcccttttgtgttttttttttgttaacaactcaatacacttgtataagaaatttgtcgatgataactatatgaaatgcattcgatggatatagcggagacatggagagacagattatagtcaaataaataaacatgactacttgaaaaatgttctaagttaaaagaaaatctaaattttgcagttttaaaatacctagctacctgtgctatttgcttgcgttagttgcctagtatctcattacaatagttttaaactaagccatcatattagctgagaaagtagaaattgccataatatttaggttctttataaaacttacacctttggatttatgatggtataaaggtatagataaactaaagcttccatgcattaataatagtaaattcataataacaaagtaaaaaaacaaaaactctggtttcatgagttctaagaaaatagacaaataaagagtacaaaaaaacacaactagtaaaggtaaaattcaaataaaaactattaaaaattaatagtttggtcaccaataaatttgggaacaaaaataaacctagataaatagtccacataaattattattagtaatatagttaaatagttaatttcaaaatttaaaataaaaaaataatagttggatttccataagttgaaaaggtacctaaatagaaagttagtgtacttctataagtttagttttttaagaaaatgtaatctcttttactgttgaagtctaaaaactaccacatgatcctaacattcaggttgtgacaatctagatgtatcaaaatatgtgcaataaacaaaaaaacaatcaaaaattgatcaactaggtataaaatgagataattgtgcaaaattgtggttgagtcactcattttaccccgatttcgtatgtccataaaccattcaatagtaagacacagggttaacaaactcgattgtctcttaggtcacctcatgggaagatctgggacatccatgtttctcacaaaaaccatatcccctaagtatttattacaaagtttttttcaaaccaaacacttttcaaatctaaagacgagtagattgaacatagctttacatcaaggctcaccaagaattgagaatacatagtggaagaccaaatagtacaaaccaaaaacaatttcttttacatcaggttacatagaggccgaatacataacaaaaggaagctctgcaataggttatcatgttcatgggactatgacactagctacatagccgcgacaagacacaaaagaaacaactgagtatgagtgctttgcatttccggtaggagttacgaacgcacaagaggggggaggggggggggtccaaaggaactgagagtttatggatgatactagctactaaaggtagtgactgaaagtcataataaggagtccttctatagagcgtgtaattatatgagtgataccctgcctctccttatataaatgagagatagaggatacaaatttgcataacccatacgtcacagagtacgctccaagggtagcgtagaggatggggatgacactcccattgtatgaagtcttgtagccacgtgccttggagatcccacagtatacatcaggtgaggaacagtgatgccacaatgaagtgatgtagcttcgtggccacccacaacgcataggacaaccacaatgtagatcgtttgtattcttgtcctttgtactgtatatattgtactcttatatgttgggatttttcatggtgaatattagagagattattacacaaatgcacaaaagctatctaagctggatatcagtgtgttggtacgtccataaaatttttgaagcgcttccgaactccaaacctcttcttcccttgccgtgctctacacacttcgccatctaagcttgatttcttgctatagtcccaacaccgcatttctagctactagaaagtttgggtattattattgacgttcacgaaggggaaacaaccaaagagaacacgccaattttataaatggcttaggtgtgatggctttctggtcaattttttttttttgtaaaaaagaaggaaaaaaagtcgttctctatattttcccgacgttgacgacaacaccgagagttaacggccaaaccaagaaaccctggcgcatctttctggccgaaaatttcatacacacagtagagtaggtagagcaagaaccagacgtactgaatgcatccaagtgcagtcgttttttgcatgcttttgagcccatccgttcagagaagtgcgttaaaacgtcgaaatcaaacttgatccctattgggaagtacctgccgccatttttcaacatgacggagttaggacgacggcgagaattgccctacaacgtgattaggatataatatcaccaactagtacgtggtccattatagtatatatatacaagttgtaccggtactcatcaacgcatactccataaccagcaaaggcattgtatatgttgtacttgtggagcgtaagattgacatggttcaccaagagagagactagctagcttgcatgtcaagttacaactatcgttagaaatattatatggttgaaaagaggtaaagctgtactatgttggagttgaaaataaaaaactatcccagtctcgtatgaaataaatccaacataaacttgatttgcatacgccacttcagatttcagaagtaaggtatcaactgaaaattctggaaggttttaaaggacagagagaaagtaaaaatgagatcgagaaactagaaatatttaacctttgatttgaccgattaccaattattaggactgacaatagcgtgaattaaaggccttgtactgtactgcagactattttgtcccatcaggtttgcaggagagaaacaggctttttagctagcttgttagtactaatctctactgtgtcggaaataaacaactcgtgatcttaatttggattactaaaacctaacaagtactcgtagtggggtccagccgtccaggcacatatgctttagcattttcagaaatggatttctcaccacctaaaaagcgcattgcgatgatgttgtacacttgtcagctagcagaactggagggagagtggcctccaactccaaaatgcaacaaccaattccttccacacatttaccaacacccacaacaaaaatatccctgcttttctaaagcttggcacgcaggcacgaaaaaaaccaaaggttttctgcatgcagcattgtgcgtgtttttcctttttctactgggtttggagttaggactgttcaccttagttctatacgcatgtgcatcttggcattatacgtgcatgtttacttaaacttatcagtatgacttatcaatcactatacaatattattctctcaaaacaaatctgatgctttgccgattcctcgcggtagactgcagacaggcatacatacatgcgtttatgcatgcgctgccacccgcgcccgcctttgtttgccacgcagaggtccggtccttgcacgtccttccctcatcgtggttgatctcagaaccagagaccgtcagtttcgttaatcagcaccaaaacatgctgaatatatatatatatatatatatatatatatatatatatatatatatatatatatatacatctctacatatctatatctgtgtattcactgtatagagagatatagacatatacatatagcgcgcgagcgagcgcgcgagctataactctatctatcgatagcgatatagatgcctatacatatatacatacaaatcaaagagagagagacactgcgagatactcctgcagactgcagtagtgtacgtccgtcctgcgcgcgatcaggcgatcagctgctgctgcctgcctgccagcccgca

SEQ ID NO: 4796 - DNA, 7966 bp, Sorghum bicolor
  Intron number 2 from transcript Sb05g018870.1 (locus Sb05g 018870) derived from phytozome v7.0 (chr-ID chromosome_5; pos 45693771 to 45701736 reverse strand)
atttcttcgtacgacgcctctacctgcgggttcaggtgagagtgagacgaatgcatccatcggattttgttgctcaattggtaatgtgatttctgatttgtcattatgatcttcgtcattaacttgacctgcatgcagttgcagttgtaattggtggtgtacagttgcagcccaatattttagcccaaatttttttagccccgtttagtttttaggccccaattccacaaaaaattttctctttgaaccaaaaaatttcaaatctaaacaggccctaaaagaaacaaccacagtgctatttaatagaggcaaagcaagaaaactaatacttaattaatcacttcttgattaccattctgttctaataaatgtgagccaattcgagtacagagagagtatggttttcctcggctttatttgcataaagcgcaaaacatccgatcattctaccgaaggcgtgtgccgccaactttctttgcattttcattaatgggcacgcgcttataggctacacatggatattttgcagcatcctagctatgaatgtcatgagtactacctcgctccatcctattgtataagagcaagatcatattcatttatgtagacgtttggataaagaaaaccgtgaaatggttcaatttatatgagcggctgtccaatgaaaatcaccggtgtaaattcgtttatgtatacggttggataaaaaactaccagtgaagctggtcaatttatatgagtggctgccaaataaaagccgctagtgtaatttcgtttatgcaggtggttaggtaaggaaaatcgtgaggacaaactttacatttttataagcggttttttttttacaacaaaacacaattcattcatatcagcagcaagaagctgcaagtaaccaaacagagtgcatagttgtggttacagacttcagtgcctgaaacataggacactgagattcatgagctctaaaggagcaatctaaagagaacggttgatgaaccgtgcttgctagaggcagagcatttctggcaagggaatcagccactagattctctgctctatttatcttatacaaattggattgaatggaggcagtggagttatcatattcttgagtgaagttcttcattctccagtctggagagtgactgtgatcatgagtagaaaggaactgcaccagctgactactgtctgaaaagaatgagacattggtgtagcccatgctcacagctattcgagctgccaatgcaagtgcacccgcttctgccatgattacagaggaagcatccttgatgatggcctttataaatagcttgttcccaggatcaccctgcatattgacaaagacaatacctatacctgcaaatcttggttgggtgttaggaccatccggggagatggaagcgtcggtgtaacaggtaatggtagagtgacaatcctgctcatcagccatctgcgtggaagttcctacaattgtagaattcataccttgaactgttacaggtggttgcatgcgctgaactgatgtattttggccaatatcgagtaggtgtcgtcctgccgtctcagttagtgcctgcaaatgagaatttaagtgtgcactagccgcgctggtgaacctgccaagatgtccaagtccttctttggaacctgttatcatttctagccttccatatataccataaaataaaaaggaatttgcataaaagatcatcagaagggttggttgtaagtaatattggcagagttacctgcaccccattttgttcaggaaggatgttatgtactaaaaaaggtgggttagtagtagcccaaaccgatttaggaagttcacattgaaagaataaatggaagtcattctcaatggcaccacagtgcgaacaatgttgatcaatgtgaattgaatacctgcctgctctctcacctgtggcaagggcatgtcttataagcctccaagcaaaggttttaagaataggaggaattttcttactcttccaaactttctgaagaattcggttggcctcagtagatatacttctagaaccgaaattgggcagaggtgtattctgttgggaagttaggtgcttgtagatggcttttgtagagcagcgaccatctttggcaggaatccatctaagaatgtcatcttgattactcataataggatgggtagatataatgctatgggtagcctgattgctgaaagtattagtgagaagatccacattccaagaacgggttcctagaagccaaaggtcagaaacagtagcaggtagaggcacagtggtgacaggaaaggtgagatggtcgtggatggtggcccatatagggttccaaggagcagaccatatggaggaattacctgcatgaatttggtaaatggagttgatggtaagctcatccctaacctgcaagatagatgaccaaaaaattgatctaggcccatgataagttgcattccaaaaagattcatttgagtagtatttagcttttagaacattggaaaggaaagggtttttattagtaacaatattccaagccgactgcataattaagcttttgttcacagtctgaaggtccctaacaccaagacctccatgttcgataggtttacaaatgtcctcccaagaccgataagcaataggactagaattgtcatcgtcttgaactcctgcccaccaaaatcttttgatgatagagttgattttttctataaaagatttggagaacaaaacagtagacatgtagtatatcggaatagaagaaagaacagacttaatatattgaagacgacctgcatgattaagattattagctttgattgttccaaatttagcccaatatttcttgtaaatgaaatcataggctttgttcttatccctgtgactaaaaaccataggatgacctaggtgcatggtattgggatgtaaatcagccacaggaaataaagatttgatttgatgcctaacagtgggagggacattcttactgaaaaggatggacgatttttgaaagttagggcactgaccagatcgaagacaaaattcacttaggatattctttattgtttgtgcttcagtagtattagccttcccacacaggattaaatcatctgcaaaaaggagagagtggatggcagggcaaccagggcccagcttgatgccatcaaggttactgctatgaagagcttcctggagcctgatagaaagttcattaatggccaaaacaaaaagataaggagataagggacaaccctgtcttagaccccttgtagaacggaaggtctcagatggttcatcattaactaagacagcaaaattaggggtagaaatacaagcatgaataaggttaatgaaattatcattgaaacctttcctgtgaagcgcagctaagataaagttccattctaacctatcaaaggctttagcaaggtcaattttaaggataaaagcatgatctttccaactttttaaattgaaagagtgaataatttcctgggtaacaattatattagaagatatgtgcctctgttcaatgaaagcagattgagcctgatcaatgtagttaggaagatgaggttttaatctattagccaaagatttagaaataattttataagcaacattgcaaagactgatgggtctataatcttgtggaacattaggttgagtctttttaggaattaggctaagatatgtcttattaagatctagaggaatgtaagcattggcataaaaatcagtaatcaccttgtgtatgtcctctttaatccattcccatgctgatttatagaaagctacattaagaccgtccgggccaggagctgcagtgttcctcatctgtctgacaatagtgtaaatttcggtgatatctggtatggaataagtaaattgataaatatcattgccctgattggtagcatttgcatcatgtgcataatcaaagtcagaaacattgactggaaaggaaacattaggactaggtgaatggttgtgagaggtaaaaatggttttaaaataattaagtaaggtactggaaatctgttcaggggtagtagagtgagaaccatcagtattgatgaggtgagtgatacgattcttacggttcctcttgactattgctctatagaagaaggaagtgttcctgtccccttgggtagcccatttcttcttggcacgttgaatgtggtaggtctcctcttttgttagtagatcttgatgttgctcggttagctgttgttggagactttgatcttgttgtgctggtggttttgattgctcatcaagaatttgattttctatttgtgcaagcaaatctgagtttctaggcttagcccttctccatttgcgaaggtcagcaactaggtatcttgttttttgagaaaagttgcgacaggaggatttcctccagctttgcttggcaacatcatggtagtcctgttccatcaaccaccagttttcaaatctaaaaggtttgttagtgcgattatgtttagaattttaaaccgcaaggattggagcatggtcgctatacatcataggaaggtggtaaatagtagtagcaggatatgtcatacaccattctgcattgcctaaacatcgatcaagtctttcataagtaggaatagaggaaaaacgtttgttagtccaagtatatgccggtccactataaccaagatcaataaagccacattgtttaacataagcacaaaattcattaatacgattaacatcagccctagtgggacctagcttttcattaacatgcatcagattgttcatgtctcccatgcaaaacataggcaagttgctattttgttcaacaaaatcaagcacttgttcccagatagctctagtagtgcgatgatgagggtcgccatagatgcagaccaagccatattgccgcatactagttttatttatgcacaaggcaaaaataaaattatggttgtgatcaatcacagtaatatcaacttcattattccacataagccaaagaccaccagactgcccttgagccgggaccacgaaagcatcgttaaggttgaaatgatttgtaatggaagttttagttatagaagaattcctagtttctgaaataaaacatacctgagctcttgtataaactaaaagacgagagagatgagccatggtagaactgcgaaggctccctccggagcctcggcagttccaggcaaggtgcgtcatggtgccagtggcgctagctctgacggcttgctgcaaatcctgagccttggcagatccaagacgggagtgccatggtgctcccttgcgtccttgaacccggagtcagaatctgtgcagtagcctgagggagacaacgaggagtatcgccgccaccattaacagtatcttgaatagatatgggatcgacggggagcggaggttgaacagagggcgttgaagtgggagtaggtatgaggtgaggagtatggggcagatctggaggaacaggagtatggggtagatctggaggagcaggcggaggtggatcagagggcacaacttccatggaggagacgataggagcgacgggtctatcgttgtccatggaggacaggggtagcaagaaacgagcaatggaggaaagaagattggcgctcgggacctcttcgattggatacaacatgatgacggaggagagaagaagaatgagaactgcgatttgtagagacgaggaacgacgcaaacgaaaacacttggagctggcggagcgccgccgcagcttcactggaatacgagagtcgccgccgtaagagatggatctgcgtcgaagagagaagcaggtgactacagctcagcagcagggccagcggatctccacatgaggaagagacagagatccggaagatagcagggaggggaacggattaatccgatggatcgatggatgaacttggcattacgcccgatactactcagagcttggtacagtagaacgagatatttttgcagtttcgtgcgtcgcaccaggcgacctaattatttgacgctggccctatataagcggttatcttacacaaatacctgtgtaagtatgtttacacaagcggtagagtcgaggctccgtcgttttctttctactggcacatgttcatttcaagccgtcaataaaaaaaagggtggcgccagtaaagctagactatactagtgataataaagtcaagtgcttggttataaattaagttataagtgctactatctttaatttgtctccataaaatattttttttactattatatggtatcatgtcttatattctatttattatttcttgtcacgtacaagtacattttcatttagactccccactatttatgttttcgtgtctaggttgcttgagtaaaagtcaagctctcctctctctttcatcccttctttcttcgacattagcaaaaatgctaactagctagactataagacaatttctggacttactctaaggcgtaataaatcaaatttagtttaaagatcaagaaacatgtatttaattccccatctcaacattggtactatgtacacacatctaaagagagcataccttatggctttgtttagatccaaaaagtttttggattttaacattgtagcactttcatttttatttaacaaatattatccaatcatagactaactaggcttaaaagattcgtctcgtgatttacagataaactgtgcaattagtttttttatctatatttaatgcttcatgcatgtgccgtaagattcgatgtgacggagaatcttgaaaagtttttggatgaagtaaacaaggcctatattatagaatttgaataaaaaataattatcgtatgtattaggacggagggagtatttaggaatctaggcatgttatagttggctatatatgtgtgttagggcatgtacaacccacagacgagggttcatctctaagcaccttgaatctattatacagacaagtataaagacaggtcgtacaacccatagacacactcggtctctaaactattttaatgctttgtatgtaactaagattaactataaataaatttttgtattccatgatgtggctatttgatagagaatgtataaagataaacaggagcaatataactacaatatattttttagaatctattaatataataattatgttatatatagttgcaacaccttttgtttcattttcactgttcctgctcagatacacagttgcaggtagcaattaaatattcgtatgttgcgaaagagatttgcatgttcttgcatctggatcggaccagggcacaggcattggctgtcaccgcggcccacgcacgctcggcgacctgcctgggatcaccacgcatggcgctcgtctccgtacaacgctgctggagcggacgtctctgcctcgggccacgggccttccccgtcgcttcacgagaggatgaggccttcgtggtctgccgtcggggggaggggggggggggtgttgacaaaaaaacacattgtagagacggatgaaaaagacctattgtacatgcccttaggttggtggtctaccagctgaccaccaaatgtccgaaattgatggcttggatctgctatcctgctttactgtagaactaaacagtccctatgtgttcaaaagattacatctttttatgttaatttgtttgtgagcatttttaaattaaatgcaaccttcccaattctataagcttcatgcctttgaatgtcttacgcatgcatctgacactagtgaacacataaatatgctaaggaatattattcattactctacacgaaaacactatgttctgaggctacaagttaatctcgtattccaagtccgttttgtaaagggaagattgagtcaatcagctacttcattgttgattgtattggaatatttggatataaccaatccgtcctttgtggttttgcaggattgcttcggtaggccaatcgctagcgcaccgga

SEQ ID NO: 4797 - DNA, 264 bp, Sorghum bicolor
  Intron number 4 from transcript Sb06g017680.1 (locus Sb06g 017680) derived from phytozome v7.0 (chr-ID chromosome_6; pos 47107004 to 47107267 reverse strand)
caattgaagctggtaagctccttctcctcaaattttacactctaaagctaaagataataagattagtctacaaagaatgaacaaatgtttctttactttactcagacttatttatcaaatcgaattaagacctgtacaaaattaatgttcttagggattattgtgtttagtatttgattattagtagttttactggaatcctagttctgactccataataaaagggtaatcaatctgaactctcactgtgttgtataggatttg

SEQ ID NO: 4798 - DNA, 2684 bp, Sorghum bicolor
  Intron number 1 from transcript Sb03g036380.1 (locus Sb03g 036380) derived from phytozome v7.0 (chr-ID chromosome_3; pos 64432506 to 64435189 reverse strand)
aggaggaggaggagcaggagcagctgcagcctggggtgagttgcctctcgccgtgccctaattcgctttgcgtcggatttcgcgatgtcggatcggatttgctgggatggtggggcggcgtttaggctagggttttgggctgcgcggggaccgaatacgtccagtttgtagttgattttttgcgctcggccttgcgattttggatgatttgggccttacagtttagtgattctgtcgtgttgaggtgtagatgaaccgcacggcctgttgtgatcgaggcatcgagctaagtgattagtgtgacctttttaatttagcgtctgttttgtttttgtttttgtttttgtttttgtttttgtctttgctgttcatcacttgttggattttccttgttgtgctattaaatgcttttctcgaaactatatctatatgaaagcactgttgttcgggaaatggacaccatgtgagcgtggttgctcgtcaattattggacagtgccgttttttctgaacacggacgaggttcctgtggttccctctgttaacagatttggagggccgatggctggtggcactgtcagctattggcaatgtctgccagtgaatgtttcagggctagagattgttgctgtagcaggaccagcttgcagctaaattgatgttgaggtgaacctgcaatggtgggttcttgggcaaagtgctattcatggtcaacagtggtgccgttgtgctgtgtgctgtttggcgagggatcatggatacgtgaatgtgatggtaattggttttgggtactgggtggtgatattgcagtcctggtgttggatgtatgcaacgaaaggtttggtttgtgatagaggcagcgtattgttctaagttctaactagcatatgctgcatctggcaacctgcaacatttttgcagcacacagccttgaaatcagatttacaagcggtatagatatatgttaacaaatgaatattcatttgtagtgtaaattataaataaaatcacactaagtcgaggcaagttgatgttgaaactttcagtgtcaatctaaaattttaaaattgaagtggtatagtaattaaaaaaatgaatatatgaatatttgaatgtgcaatgtgaattgtaaaaattatacacataaaccagttgagtttgaaatacatcattatagtgtttcccattagggtatgtgaacttccagttccaagagatgtaaggaaccttctcgagaaagctgcataactgaaaacctttccttttggtagaaattaatacctctgtaatagtggtccaaaaccacactacattggcctgactggattcttcaatgttgaaatttgactgctatgctggtatcagaccttgagagtggccactatcaaggtaatgaggtatgctatcaagaagaaaatatgtaccttattggtgagcaagtgccttcatttgctgcctcatggtggccaaaagtgcaagggttacaaagaggtggggaaaagagaaaaagagaggaggggtagttagatgcatctgccttcacttttccacagtccagacttttgcataagtgggaggaggaaaagtttaattttgttgcagctacctgtctaacctagtagtattagttataaaggttgacaataataattgtttttcattgttcagtggtgttttaggatagtaattagttactcacagcctgttttgcttgaaaggtaggccttgtttagttccctacgctattttttggttactgtagcactttcatttgtatttggcaattattgtccaaccatggactaactagatttaaaagattcgtctcacaagttacaggtaaactgcgcaattagttattttttatctatatttaatgctccatgcatgtaccataagattcgatgtgatggagcatcttgaaaagtttttggtttttgggtggaactaaacaaggccgtagatgaatcaaactggtttgatctggtgttattgttattgttgaacattaaatgctttgtgcaagtgctgtgacatgcaaatctgtccattgcttgtaggtttgtggcagctaatgctattgattaatctttgttttttctttatcgattgatcctcaattttcatatttctatggaaaattgatagaagcctctagcattaattgcttatgtttgtttggcaatatcaagtctttggatgcctgattcacttgagatggtgatgtttgttattgttggaccaatgcccttattttttgtactaggagtggaacagaaaggaatttaagagttgacatttttattttccagttttttcttgcatatcttgcattatgtattgctttgtttgtttgatcctaattggtcatttttgggggtgtaagcaaccagtgaaccgtatccagggtatccctccagcccaccacataacggcctgtttgattcagagcttccaggcagctctgttgccaggcaaggatgtcatcaccaggcgcccaaaatcagacgcctggggacacccacagtgcctgtcaaagctgcctgggagcaaagcaaacaggtcctaaatgttgtgagaaaaatagcatatagaatattttattttgtgtttcgagtcttgtataaccttaggctgtcgtatttcttatgttgctgaatacaggtcaatcaaggttgtttcgag

SEQ ID NO: 4799 - DNA, 2479 bp, Sorghum bicolor
  Intron number 4 from transcript Sb03g029340.1 (locus Sb03g 029340) derived from phytozome v7.0 (chr-ID chromosome_3; pos 57486704 to 57489182 reverse strand)
tacttggcactccttcatcagagtcactttccagggtcagttcactttccctgcttctagtataagaaaatcagttacaggtttggagagttggagcctcatcttttattcagaatctctcgcgacagaaaaaattaagattgcctcatcttaatgctaagaaacttattgttttacccctggcgttacattgcaaactaagatatactaaggttgtgtgtgtagattcagagctatatagcccaatgctgctgaggtatggttagagaactggataatttagaggtataatttgtacgaggaatagaattggtggaatagtcaattatgttgctgagcctcgtgggcagattacataagagtatattgcttaaggggcaagaagccccccttagagataaggaaagccaggattacatgatcctgatctaccacatttagaaatatcctaatatactccaacatccccctcatagtcataacgggagtggcatagatggtgagactggagaagaagcccacaattcaaaggaaatgttgatcaacgaccagtgagagagaaaaccccaatcgaaggatcaggaaaagactcccagggcggccaatcaacatgattggcaacgcgagccctaggtgaggacggtgctgcccctggcagagatcctcatgggtgatctccctaggacacatgtaaacagaagctttagtgtttgttgtctaggatctaaacctaaactcgtgaaaccacataggaggaatagaattgtttgaatagtcaattgtattgctgagcctcgtggacagattatatattagtacattgattaggggggaaaaagcctcctctttgagataaggcgaatttggattacatgatcataatctaccatatttggagataccccaatatatatatattttttatcaatggagataccccaatacagtctaacgcaattggctcatagcgtaattataacatttagaattatctgcacctcgaccagtttgctattttcgtcaactgtaaaggttaagcgcttacttaggtcatgactggctgcatacaagaatttatgttggaaccactgtgaaggtatatatcgtttattcagtttctccaagtttatattgcattggttatgaggctttttgaccttaatcaattagttaatgatttctatgcaatataatagtaaagctgtgtaaattagcagaatagatattacatgaacatagtcactttgcttttaaactgagaattgacatgcaaggccatctaaattcccatttcatgtgaaggaccagggtttttctattatttttctgtctaaatcatgtgaaaatcaagttttgatatgcaatgttaataatagttttgttgaaaaatctgtagttcacgatatgaagtccaaatcttatacatttgatttcagccatagcattggccatatcttgattaactgaaaataaacacccttgtatgttgagtttgggaaattttgtttacattctagaagaagaagaagaagaaaatgctagagatgtatccatcttcaaatgtaagaccaaacctgatttacttaaccagcatagactttctggacatttccatcttcaactgcaaggccacacttgaaatactaagccagcataggctctctggtatgcatgttatatgatacaatacattatggtgtgggtattgaatattttcctccagtttggctaaatttctggcctttcagctaccgctgtagtgttatttaagcaattgtagttgtaatggctgttttctatttttgcttgtctcatgtataagttgaactgaactcaatttgaatttagtaatacatagtgagtttcttgcccccccccccaacccacccaccaaacccccacataaaaaatatgagaccgacctaggaggaactaggtggtttttcaataaaaaggaaataggcacccaaactctagttgaagaggacttgagcctggatggttgggtgcatcaccatatcttccacccaaccagttgagttaggcttacttccttgtttcttggctccgattttgaaacaagttatataagtgtgtttcatttgatacatagtgtgttttaatttgttagcaatataccccctccatctaggaatgataaacgtattttgctcggggaaaattcacattttacaaattttgaccaacaattagtcaaaattatatgcaagtttaggtcataaaacttgcttcaatacatttgtattcacagtgcctttgagatggcgttgattctatgacaacctattgtaagagaaaataaggttcaaagtatactttgcatgacttttctttgatcaaaatacacttaccattcttggatgaaaggagtaatgtattccttttggtccaacaatgatagtgcaaccctttttgctacactaagctttttcacccttttatcatttgcagattcgaa

SEQ ID NO: 4800 - DNA, 4904 bp, Sorghum bicolor
  Intron number 2 from transcript Sb08g016840.1 (locus Sb08g 016840) derived from phytozome v7.0 (chr-ID chromosome_8; pos 45023321 to 45028224 reverse strand)
aggcctcgacgtcaaggacctcgtcatcctctcaggtaaagaaagactagtactcctattactacgtgcgtgacgctgacgtgcgcgtaatagctcggttatttttcgttttcacctgtgcaatagtagtacgtaatagtagctatgtggaatagacgcaagcaagatgatgacgcttaatgagtgcataccaatgcaccacggggcggcccagaaatccacgcacaaaacgtcaacgtctgtagtttgcttgcccagcttcactgtactcttcgtgtcgacgagatggcgcagagatatcagatcgaattaaaatgtcgatacaaataaaaaaaaatacacacgatcagtacggtggttacactgcggctagcatatgtactgtactatacatagagccaccactctagctatacaccaatcgagaggacgttagccggagcagtgctctaagagcaaagttaataatacagttcatttgatgactgtaaagttttctgcaactttattttagtcactcatataatagttagctattcattattactatatgattcatttttctctcttacaaatttttttttttggtttctaaccttacaacctgctcctcctctcttattttcttgtcttttttctctacctcagtatttaaccagcttataaccaattattatacttgcactgctctaagcgtgaccggtcggtggtcgccactgcgtggagcagcaatgcacgcacatgcgccgcgacggcgacgacggccggcgggcgacgcgcgcaacacggctttccgggctccggcttccagagggcccaatgctgcccgcgccgcgcgcgtcgccgtcgcgtggtggagtgcatgcacgtacgcatgcgagtgctggtacggtgtgatagatacgcgggttgcattgcaatgcaatgcaggtggatgccatgccatgccatgccatgccatggcatgagggcgccacggccaagtgtagagccgaaaacgatggtgcaaccaccacgcgcaccatgcacggcgcacacacacactggcagcggctcgtgatccgttgtcggtgcaccggccgggaacaacgctgatgcatttgtgcgccgatcatgcgtggccatccgttcctgataaagctaagctatagcctagctataggccctgtctagattagagatgactagacttatcctggagtaactaggtttaaaaaattcgtttcgcgattttcaaccaaactgtgtaattagtttatttttaatgtatatttaatgttccatgcatgtgtccaaagattcgatgggatggatgaaaaaattttgtgtggaaactaaacagggccttattattattactagctagactggataataaaatcatcaggagtaccgtacgttcgagattaattccagtttgactgaaacctgctactactccatcggcgtttgtcacgttcaactaaaactgcactgcaaattcagccatatgcatcggtcgggctgaatcttatcagccggcgggtgcgtgtgcgtacgtgccgccaaaagatttaggccttgtttagttgcaaaaatttttgcaaaataggtaccgtagctttttcgtttgtatttgataaatattgtccaatcatgaactaactaggcttaaaagattcgtctcgtcaattccgatcaaactgtgcaattagtttttattttcgtctatatttaatactctatgcatgcgtctaaagattcgatgtgacgcggaatctgaaaaattttgcaaaattttttggaactaaacaaggccttatgtagatttctttttgatgaggcaatggaagcccaccagatttgttgcatgcatgcttgccttaatttgcagcacgatcaggcaggcatcgaacaagaatgttgcactagtactagtgtgctagtgtacgggactcaataatgcgcgtgatgcgtgtcatatgtgtcatcaagactgcacacgtacggaacaagtttagttaggcgtagtgtatatatagtctattattatccatatattccaagtcaaaagcaaactcgagactactccttgattttaacgaaaaaaaggtgacgatcgagccacttgtactaaccatgcacgtactctcccacgagtaaacaaattaagtgtcatttccatttttctttatggaaagggagcttaggtacttattatagaatcaaaattacaatcatgagcaatggtaactttgtcaacacatgttggatggttgaaatgccatagataagttggttgggttccttgtggtgaaacctgtccacccgagtttaaatctttaacttgacacgagtgctcgtattttcctgtgtaattctaaaaaaacaagaagtcattttcgagacactcttagctaccaataagtaacgactagtaccttgtatataaacacataagtgagtggatgcaggaattaaggcactctttccgtctgtggatttatcgatctaggccttgtttagatgcgaaaacattttggttttcgttactgtagcactttggtttgtttgtggcaaagattgtctaatcatagactaattagggttaaaagatccgtctcgtgatttataagcaaactgtgtaattagtttttattttcatctatatttaatgtttcatgtatgtgccacaagattcgatgtgacgagaaatcctaaaaactttttggtttttagagtgaactaaacaaggccctatatttgcaatgtatgtaccagcgttacaactacacactgtgcctgccatactaaactgatgaatttatagagaggtaattaattagtaaggtagccacgcactgaagattatttgaatggcaaaaaaaggtgcaagtgtgtcaccattgaagaatgtgcctggtttagatgcgaaaagattttggatttcgatactttagcactttcgtttgtttgtggcaaatattgtccaatcataaactaactaggatcaaaagattcgtctcacgatttacagttaaactgtacaattagtttttatttttatttatatttaatgcttcatgcatgtgctgaaagattcgatgtgacagaaaatcttgaaaactttttgatttttggggtgaactaaacaaggccttagtagccagcagtagcaagtagcagcctgtgcaccgccactggtggttagagacggcatggaatctaatctctttcctgcagctgcagctagctagctagctagctagatagatagacagcacctcaaccggccgccctaacgggtaactgccaacaaatgctagtggccgccactcctaactaacatccatctctaatttgcccaagcatatcctatcctagcagcaatgcaattgcaagctgtagtgcaacagcaacagcaatgcgatcgagggtttcattgggctcatgaccattaattaattgattgaggttccaggggcctgatgcatacagtacagtagttgtcactgtttccacatacgcccaaaaacgagcacagtttgtacattccataattaattcaatggtttatcttgtatcgtgaactttagtatattgttatataattttttttttgttaaatttcaaatcctttgagtccttggaaagtaagaactgtattttttttaaacgggagcatgatactattgtgactcgattttgtacacttcatcagtatacaaaccgtaccaaatgccaagcggttggaccgcatttgccgataaccaggctttggattgggttgcacggccactagcgtgtgtactacctggaccaccgcgcgcgcacgaaatagtggctcaaccaccgaatccacggcgggcttggtcccacgcaaactccaacatgctctgctccggacctccgtccatcatcacacgttggacccactcacccactggtacagtccagtacaaacaattatagtaattagggtctagtttagttccaattttttttagatttagctaatttagcattttcgttttatttaacaattagtgcccaatcataaactaactagggttaaaaatttcatctcgcggtttacatgctgtacaattagttattgttgtcatcaacttcatgagttattgtaagctatttacaggtaaacttacaattaattataatatttaaggtctgtttgacacagctcataacagcttcatgagttattgtgagctattttattcaaacatttatttctaaaacaactttactcaggaaactatttttatccccatcacaaagacatgagttagaatgaagctgaaaaaaatttatcctagctctctttctcattttctcttctatccatgcataaaactgttggtgaagctgttttgccaaacagttttccaaaacagtttcgcttcacctggaaagttactcataaaattattctttgcaaaaaaaaaagttttactagtgaagctgagccgtgtcaaataagccctaaatactctatatatgtgtttgaaaatttgatgtgatagatgaaataaatacttcatatatatggccttgtttagttcaccccaaaaaccaaaaagttttcaagattctttgtcacatcgaatttttcggcacatatatgaagcattaaatatagacgaaaataaaaactaattgcacagtttagttgtaaatcgcgagacaaatcttttgattctaggtaatccatgattggacaatatttgtcacaaacaaacgaaagtgctacggtagcgacatccaaaatcttttcacatctaaacaaagccatgtttaaaattttgatgcgatagatgaaaaggttttaggtagaaaaataaacaaggccttatgcactgatgcatgcaggcgcgcacacgatcggcgtggcccactgcaacacc

SEQ ID NO: 4801 - DNA, 2255 bp, Sorghum bicolor
  Intron number 2 from transcript Sb03g010090.1 (locus Sb03g 010090) derived from phytozome v7.0 (chr-ID chromosome_3; pos 10878539 to 10880793)
atatcggggagaacaagaggggccgattcctcaaggtgacgtaacgttctctgtatgaacgcgtgcactttcaaattttgtcatcttttttgtgtgttggtacgagaatattgccgaattcgggaacttcgtacatatttggaagccaaactgtttagctcttacaaggggtaatttgtcacgctagaacgggatttgcttgtgtggatttatttagtaagtgaaaaggtcctattgttctcttcagattttcgttgattcaaggcatctaggtcctaaatgggtatcctgactaagttttccattgctatgtggagcatggacccatctgtcagtagcacgggtcttctttgaccaagcttcgagttcatcaggttaaatgtcctaaaaagatatgcttgggggttacttcaagctttgaaaaggtttaggtccaactgggcacaacacaaagatggatgaccaaaatgggactttcctctttagtagttgtgcccttggcaggttttggtttctcctattctggcagatttcacttttactgcttgtaactgccagttatttattagcctagtggcaaccaagcaaagtagtatcttgtgtttgcatttagtggcatattctgttgcgtagagcattctgcttgtgcaaaattacaaagtatttacttcttaactacaccctctagtgaaaaaaatatttatgttttggacgagatctgatctagcttttaaaacatttgccttcaataacttataaaattatttattttagacacataaaaatcttgtgatttgtcctggaaaatcactttttataatcttaaaatttagtatataaaatattggtcaaaattgcaccttgcagaccattataaaagtaaagaataccagagggagagtagaaatggctgatgtggtgctctaggttcaccaccaattagtgtgtccaacaggtcttgattgtttttttatggagagagaattaggccatttaattgttgatcgaagatatacacctgacaaattgatggtttcctaaatttgaattgtatggataatgctgcttgcttatgtgttgctgttacattgattttactatcttttatttacaacattttttttgggtaatcagtgatattattctttctggtgttgtgagtttatgttcagatttgttcttgaattttatcctggtgtagcacttgatgttccaaaatccaatgaaaaagggaaataaagcttgattggtcaatattcgtgtttttgtggcaatgtccaatttaatgttcacatactgatagatccagaaatcaatttatttctcatggtccttcaaaaaaacttttcagattattctcttgatttttatatacaaaaacttgagttacagcactgtatgcttgtgtcttaatttcattgggacaatatatatcagaaaatagagctacctgttcatagtgtcatgttgaaaatcgggtattgaagccatcaacaactgaaaccaacagaaaatggtgtattgctgtactttcagcaaaaacttgatgcatgctgcatgtatatgcattatggaccacagatctgggctctccatttggaaattgtttggattaaaaatctcaagacagtccttgatgcatgctctcaacataaaaggtcttacattttcagattgtggctccaaatagtgataggtgttgcattttagttttttagctggtgggttatcatgttgctgaacatgtcaccttgcttgcttggtttcctaagttttttttatttccttgattttttagggacataatgatcttgagcagtctttgtctgttgcattcttgaaaatacttaatgtgtagcttaatcttattgggtggtacactacacgcagtgatcctagcatattcttctggcatctgtcaatttcatgattcaaactaaatttggaattgaaatattatatgttttaatgctgccaactatatataatttgtgttagtttgttttcaacatccactgagaaggcggtttcacttaatattttccctagatataaatcgtaaaaggttatggtcttgtatatatagctggggagaagtattacactttttttttctttttctttttttttgctttgctttcttgcttctgaagtaactgcacagttttatgtgtgacataactgcaatagttacctgcttacgcaacattttgtatttaggtttccgaggcctctgtcaacaggaatcggagtac

SEQ ID NO: 4802 - DNA, 9706 bp, Sorghum bicolor
  Intron number 2 from transcript Sb02g030240.1 (locus Sb02g 030240) derived from phytozome v7.0 (chr-ID chromosome_2; pos 65322349 to 65332054)
gcgctctggctcagcagtgaggtatgttaacctcttgtttcctactatagtacacattatttcataggtcttaagtatttagtcaacttattcgcctttttatagtgttttgcactttattggctcaatatgtgctcacaagcgcatgtagttcctctggagtttggcctagaatgtctgcatagtttatagtatatttcccttggtaatagtgaaattcattttgcagttctgattgatattgccttacctgtctcattgtcttagtttctagtgtagtagtaactagtaaggtggcagtatattctgaaactgatggttggatgctttggctgcattttaatggttgttagtcatgctcgttttatgggtgtgattttggaattcaatctgattggatagcagttataccaaattgcattcattgcctaaagaagatttggatcagattcattcatccgatgtatatggactaataactaaggaatagactcatctagttgaaggttcttttctgaattcaaattgaactatgtgatgttttagacactgctaactgaagacactggatcacatgctcatattaaatctgtctattacctaagtaattttatttttatctctgagatcacctatcttcatgacctatgagcaaagcaattgggccttgcaaaagtttttagcatatatgacatatgagttagggcaatttctagaagatataggtgggcccctctctaaatcctttaacatgaacaaaaggacatcttgcacctacatcagtttttttcccccaaattttatgggttaagttctacatgtgattttatcaatttttgttgataaatgttaatgcaaaggatacacaatcaaattttccaattaggcatggtgcagctttcttcaagtattttcaatctgtattaaatctggatttatgctagtacctagcatattttggtatattactcccccagtttttaaattatagttcactttggctttgtcctaaatcaaaccttgaccacattttttagaaaaaacgtattgatatccaaagttcagctaggcgctaggcggattctaggcggtgaccctccgcctagcgcctaggtaggagtaatcgcgcctaggcgttctaggcgtttccctaggcgctgggaggaacaggggaggggagaggaagtagagcaggggaggaggagctgccgagggcggaggggagatgagcaggggatgtggcagaacctcctgaatgaagtggcccacatgcacccatcattgtctcaaagacttctgatcgacgtgcatgagttccaaatgactcaagaagtctgtcgggtgtcctcgtgaaacccgaatcatccacgttacattcttttcaggaattccctcattaagcattacagtattacaacatttcatagataagagaaatcagagtaaaagcggaaaggttacataacatagattgaaacttaagttcaacggttacaaaccataagtatttagtacataaaaaggttcggaactttatattacataaaccatagatcacacaacaagttttacttgcccaaggtcacacatcagattcgtcatcatcactctcctccacaagagtgaagaaacaacgaccatcaaaaggttgatcaaaaggttcacctgcaacatgggttaataaaccctgagtacaaaagtactcaacaagacttaaccgactataaaagagatgaagactcaggtatgcaggctatagggattcaaggtaaagctttatcaagatcaagcatttcttttgcataaaagcttactaagagtaaaacctactttcaagttttaactcaagatcatcatttatgactaaccaaaactattatcaaactttcatacgcaaaccatatctttcttatatcaaagattcatttattactacgatgatggggtgaggattgaggctccatatccgaggaaacacggcgattcgaatcgattaaacccagctggggattcagtaccacacgacatatgtagaacttaatcttgcatatgtcaaccttttctatagatcctcccatacaagaacaggtccagcgtcacccgagagtacagtacaccaccatcctacagccaatctagatgtttcccggtcatctcagatccgtaaggtgggtacacgctactctcgccatctctccactcccagtacgcggttagccgttctcaagtatcggaatagctataggtaaggcttaccaccgcatgtgggctgtactcaaaggtctcaatcacaacaggccaacaacggaacggtccttaatcgacacagttggagacactactttaagactccattcttaaagcaagtccaccgaccggtctcaagttgaaacattattaaccataaaagtattccacaacaacccttcaaactttctcatttgaaaacctatctaataagcagggctaagcatactaagagtatctccaagagactagccaaatcattttctaaaggtatatttggctattattgaaggaaaaacgtctccaacagactttgtaaatgactcttcaaatttagtaactcttcatcccaccatatttgctctctacttttggatagcctacctcactagccatccttttgcagagtctgttggagtactctaatatttttttgtcaaatctattttagagagtagctaaatcagtaaatttagctagtatttttggctaatctcttggagatgctctaagcattttcataaagcaagtatcaaggttaatattgaaatcatcaaggtagataatgcagcaaataggattcactcaactcctattcacctaatgcatcatattaactcaagtgatataaataactttatgaaaatacaaggattgggtttaatgtccggggcttgccttgaccggaaggaaggttcgacaactcagcaaaacccgaaggatccacaaactcggaagcaacccactgaggatcagattcttccggagcgtattctatacgtaaaagtgcatatgcatgattatgatatactcatagcatgataaagacaggttacatgttcttggatgataacaacaaacatgactacctcgagtacaacttaccttcatggtaaagaaacaaactaagctagctatcaaagcatagattactactaaacaaactttatcatttttattaagcaatattgggtatctatcaaacaataaagatcatatatataaaataagtcataaccagggagcatattatgctaagtgaccactggttgtcaatcaatccaaaataccactcaaatcctaaaaggattaattatttccatttcttttatacttattttaaatagctttattaagaaacagagcatactttatcaaaaagagctgaaaacattcctaaagctagataacagtaacacaagttcacatattaaatttcatgatttttgaatatacccataaattattaaaaatcatggaagatttatttattattaactagaggcaatttaaatatacatgcaaactatcataaaatagaacctaatatttttcttgggttctaaatatttcagggagtctatacaaaaattttcatcatttttggatcactacacaatttatagcataaattcaaacattaagcatttttaaacaaaaaggaaaaagataaaccacactgtgctgcgcccggcccacgtgctcggcccaagtcagcccgggagcgctctcccgcgcggaccgcgcgctaccccctcccctcatgcagacactgacgggcgggtcccgcccgtcagcttcgccttccacctcgcgccgccgctccggcgatcactcagtcgccgatgcgtcttccccggcgctaaccaaccgctccacaaggatcgccttgaccccctgagtgttctggcatgctctacatggtcgcagagagctcctatgctactcggccacggctccagcggccggaaccgcctcggcgcccaactcctagcacccggagccatgaggaagcaagggaaggggcatgggagtatcaggagctcactgcgacttcaacaaggcaagaagcggcagcggagaagctcggggtgatgctgaccacggtgatgtgctcacggcggagcttcggtcgggtttggggaagaacggatcgggtggagggctctggtgagttagcgcttgcgctcaggggcgcaatagatagcggagttcagggcggtgctgctggtgcttctctggtgggttggaagggagcgaggacgacgaatttggattgggacgaagtgctgctcctcggtgctccggtggcgaaaatggtgtcggcgagcgcaagagggaaagacacgtcgcgctccaggttgccagcagctgctccacatcgtcacggacgcgaacacgcgcgtggacgaggtaaaacggtggccgtgcgctggcattcaccgctccggactcggatgtccaccgccatgaacagaagccaaagcttatccccctcttccccaaagtaccctttctgaaaactcaaattactttgaaaatttgaatagaaagtgaaaatatgccaaaatatcaaatgttcagaattttgaatgctacaaaacatctttaaaggtccaagactgatttcaaatggaaagggatgaatttgagtcaaacagtttgaaatccaaatctcaaattgggaaaaattccaattttgaattggagcagattagaaattccaaaattacttttgattttccaaaacaacttgaaaaactcccaacatgaaagttgttcaacttttcaagccctataactttcatgttgaccatttttcaaaattccaaatagattttgaattggagatttaaattagaaaaggggacactttccggaaatctgtattttcaaaattactttgaattttgtattgaaactccaaaaactcaaaacaccaaagttgtacatcttgacaagacctacaactttgtttttgaactcaacttcaaattttgcttagtttttgaattgcacaaaagggggcaaatccaaggttttaaaattagggttttcccccccttttagctctcggaaaactttcacccaaggactttaaacaccaacaagtatccaaacataatataaacacactttaattccataagcacaatcaaccaaaataaacttatttttaggttaatgcataatgatgacatgtcacgttttagactacttaacaccagagtgttacaggggaggagttgccggcggggggagagaagatgagcaggggaggggactgagcttggggcggggtagcagccggcggtggagcaggaggacggcggaggcggcggggatttcgcgtgatttcccacggccgaagccatccgcgcgcgtgtgaaaggccacgtcgtccgcctccgcgccgcgccatcagcctgtgggggcgaaatttcgtggctcgcccagctctgcgaccgcctcggcgccgcccagcgcctagatgccgcctacccccctaggcgaggcggttacccctcgcccagcgcctaatcgcgcctaggcgccgcctagcggaactatgttgatatctacaagatcaaataaattctatatcaaattatatttgcatgaagaatctgattaaaccaattcgatgtctaggtgagtaggtattggtgtttttttctacaaacttggtcaaagttaaagaagtttgacttaggataaaaccaaagtgaactacaatttggaacggagtgagtacttggtttagggtctgatattgaactcaactcttacatgcttacttggatagagttgaaaaaacattgcctgtttgaaaactacatttgatatcaaagtcttgtactcttgttatatttggtacgtagcttggatgagaccattctgtattctatatttctatattatgcatataaatgaacattcttttaatttccgtttttggttgctggagggagaacaagcataaaatctttgtctgcatatcaccagactagtgctattctagtcagttttcatattatgtgaactttgcatcagtctcgcctattttattatgtgaatagtcactctgaaaagtgtgttgggttatttacggtttagaaattagaattaaggttcttgattgacatatttttgtgaatttatttacatggttgctatcatgtttgtgttttttttttcaattcactactttgtgaatccattttgttaatgcagtctccattttttttcttcctagtaccatcccagaatttggaaagctaatttcaaacctttttttatgcatctcatcattttgctaatccttcaacttggatctgtagcaatgacctatcatgctgacttcgttccgcatatgttacaaatcagttttatttgccttaaaatgtctaataaagtgatcatggcaaggatttcgatgtaaggttactcaatggtttagaagttgaaacattggttgtctattgaaacacatcggggaatggttaattggtttgaccctttccaagcaatgtgattttactgatatctgtactacttggcaaatattttgtgtcatttgcctaaatatgatcctgctttttcccatatgttggtgcataccatgcatctgtcagtaaacagtactcaaaatatttaggcaactgctagattatctcgtatggagtaagtattagttgataatctagcagttgctgcttcatagaggcagttatagcaacaggtccatggtttcagccatgactgaattaattcctgtaactttttatactttattcttgggtgatgattaaatttctcgtggtgtcttgtagtaagctattagcaaactgagtttctcttttcctgtagtgctgagtccacaatgctagattctcgaagcatttttccctgctatatagctgcgtcaccttttacatttttacctttttagctttatttaacaactactcgtactttatatgtggctcatgttgggtttctctctagcctgcaccaattttcttgggattaaaagcttgcttgcttgttgttgagtatagcttcagctattcgaggacttgcttctttttgctatataaatggaactgctggtcccactgatagggatgcgagtggtgtacccaactttatttcttagtcagctaatttttgttcattcactccctaaaagtttgtaagtcctaaagcccccaacaggtcacctagaacaaactctcacccaaacacatgaaaacagtagtatggtgctgttcaaaggcttgcgggttttctggttttctcctctctttatacacagctgagagcttagcccctagttattgcatacaagtatttactcaatcagcctattattatcctttactacctgctagaatgctgctagcactaaagcctgaacctggacacaattttgcacctggaactaatctggacacacaagataatttgataacaaatttgttacgtagtatgccattctagttcattttagcaagtttcacattgaccaaatgacccaaaacaagtggaacttgcatccatacccatcaacagacaggccctctgtgctgactattgacgtacctgaaactgagggggttacctaacaaggaccttctagactctagtgaagttctgggaaatctatggagcggttgcaccagttatctttttttctctcgaacaacgcaccttcgtgtcatttcattaaggaaaaagatgcaaactgcatacagaaaagggataggctaaaagaagcgcctcccagacacaacacacgagactacaaaaagccgtgccaagcttagggacataacgggtctgtttggttgggtggctaagtcccaaccaggctctaggaagccaactttcagttgtttggttgcctgtaaatagtctgaagccaggtccaactaagccattttggaggtcttagcctggctccaggagaacgaggtgtgtatccgtttttgtggagcctggcttggccagcgcccttgctcccgtcgtgtcacctcctggtcaccgatgcgggggtcgtcgccattccaagagtagtagcagcagcagcagcagctgagctcgtcgccccaggatgcagcgccaccggcaccactccgcgccgcttgcccctctcacacgcgtggagatctgggctggcatttcctggtaagcttcagcctccagctccgctctttagccgttttcccatcccaaatccggtccatgggcaaggctggattcagattagttgcaaatttgctgtttccgtggggttcgtagcggctccgcaaaatgcggtgttgctggagccgagtcggcgccgccgccgtctggatctagagctagcttcgtgtgtttcttcttgagcagaaaagtttctatttttcctctccattttcccgatttttagtagatttaactggccttgtctgcgagaggcagctctctctgtttccggtttggtttcctctgctcggtgattcgaaacggagagtgaaaatgggtgttagccatggcaaacgaacgagctccaggtgtttgatgaaatgactgagaggaggtagactttacctgttgaaggaagaggtgactctatgccctttgcacaacaaaccaaacacgtgctcatcctagctaggcttagcagttgcaatcaaccaaacaaacgtgagtggctccctgaaaacaggcttgtggtgccctggctaagattcctggccaggctacaatgaaccaacgaaccaaacacacccaacatgaccactaaccagcacacctccaatcaccctcaaggctcggggcttagcgatctaagaaggagctcatggaggacctaggcaccaaccaaacaacacatgctgctttcattagccactgtgaggaaagtctgaatgcttggtctagcaccttaaagacaatggagtttgtcattgccactgtgaggagaccaccagaaaattgccatatttactcttaaaatattcgaggaaattccctcattgccactggaatatatatgcattcccttggttgccattcccgttaaaatctgttaaattgagtctgtctcccacaatgaagcaccgcgccgggcagcgcaggctgcagccctggcagctgctgctctgcgtcgggaaatgcaaacttagaatagtggcagttcagggaagttggaaattttgatggcattaaggggatatgttccagtggcaaggagggaatttactcatattctagcctgaggattactggattaggctttcacttttcacccaaggaccaaggttacaccaggaagaaaaacatatattgtgcacttcatatattcatctctccttagcattactgcaaattgttgcattactttatcaatgctctttgatatcgaagattgcaactttatctttaaggcacagataaatgatgcaagacatagtgataagttcatgttattttgctaacgtaaacttgaaataataatgaaaccaaccatctctttactgctgaattgtaagggtaccttctaattactatgcagatttactggtatgtgttgatatttggagctgcacgttttgctacattattactacaagttttaccctatatctacctttccttaaaactgtatactttttttttgctctggcagagg

SEQ ID NO: 4803 - DNA, 6472 bp, Sorghum bicolor
  Intron number 12 from transcript Sb02g009290.1 (locus Sb02 g009290) derived from phytozome v7.0 (chr-ID chromosome_2; pos 13290554 to 13297025)
caaattcattacttgctgctaagaagccagatcaggtgtgtaaggctctattcaacatcgtaatagcattttcattttcggcttctgggatagtaattagtgttactaaccttgggtattattcaagctggtaattaatcattagttctgatgacaatatacatagattccatcactctattggaaatgtggtgtgggcctataatgtatactgtccttgatacagtcataattgtagattgattaatgctattaacaaactttggttagccacgacttggcttttgtagcattaataccatctgccttatctatggggggatcatctgatcatcagctatgtgggaagctagcctaaaacccctgaaagtcgtatttatggaaactatccgctcctgataattctgaccgtcaagtgattgcattgggcttgtgacatattgaagagaaacagggagagataacagcaaataccagtaactggagagcaccagcgaccttccagcaatgaccttgtgcctccagcagcactgaccttcactcctccattctccttcaccattcaccaagcatgaacagaagcaggatgaagggctgcaagggtatgtcatggtacatgacggccatgcgagccaattccatggacagagatgattccattatgggtggataagtgtctgaggttgaacttagctgcatggtgggatacagcagaagttgaagacaatcctggggcgtgacaacagactgggcaataggtggataggcgggaggagccaatctgatgaggtgttagtggtgctcggagtcacgtactatgataacgcactacgtgaggataaagccattgcacccgctgcaaatgcatctgctgatgcactaagaacttacaacacagcttgagaagtgggaaaagggcaacataattgccagcatgattattaaggaatcgatctctcttggcataagggagcaatttccgagtgtggagctgattgctacagaggtcttcagagctcatcaaagacttatgccagcaccctaatcatgaagatgtgcgcctcatgctatgatgggcaaggtagaattagggctcacattatgagcatgcgtgacatggatgctatgcttaaggcacttgatatgtccatttgagagtgctttcttgtgcacttcattatgacttcattgccacctcactacaccccttttacgataagctacaacactcaaaagggaaagtggtgcatttttgaactcataagctactgtgtagaagaggaacaaaggtagaaatctaagaagaaagacatggcttaccttgttagtcttggcaagggaaagcatcaagctgacagcaagttcataacaacttagtttgcagtttttgtagcttgcctaagtagaagcaatgccttggttttaagcaaagttcagctaggcgctaggcgctctctaggcgatgacccctagcctagcgcctaggctagcctaggccagcctaggcgttcctaggcgttttgctagacgttttgccaatttactaaataatatatatacatatatatattatatacagcagaaaatgctgaataaataagaagcatatactagctgaatctatataaaatagagggtagtagacataccttagtggcttaggctcaataatcaatagacatgttgttcttagtcctacagcaaggattgacagcttgcaaaactcaatacttcaatacacagcaagtagttcatcaaataaatagaaaatagcaagttgatacttatctgtttaccagtcatctcccatccattcaatgaacacagcatagcagatcagcaacagctagtaatcagagacaagtggacaggacagcagtacaagtgcacaacacaattcataaaaggtcttgttcagacaacacatagttctcagaaaagaagaaaaacagtcacaggtgcaggtgcagaatttgcatcaccttgttacagaatttgcacttcaccttgtccttgttcttaggatcaacaagaaccccgtattcccatcccacatcatctgaattccttttcaagagatttactccttcattctcaggtgcaggtgcagcagctgcagtatctgtttctgttgttgacatcctaaactcaaggctcaagggttcagtgagcaactaacaagtcattgacaagaaacctaaactcaagtagctgcagctaagctatactgctaactgctatacactagcttcagatttagtcatttaaagttcacataatccattcagattcagtcaaacacaaggacaagctatacactgccttaaccagaaagtatcaattcaggcaatgacaatagcacatcactcaatagcaaagcaatgcattcagaatcagtcaaaatccatccacatacaaaagcaggggaggggatcagaagcagccaatgggggggaggggattcaccttgccacctggggctgccgctaagggaggagtcgaggagatgaagaagtcgtcgggggaggggagcaggactgcaggagcaagcagacgtcgggggaggggtgcgcctgctggaggacgacgtcgggggaggggtgcgcccgctggtggacgacgccggcgggagggatgcttccaggcgggcacgagcacggccggcggcgaggacgagcttctaggtagggtcgcaggcgcagcagggaggtgagcagccgtccgagcccgtggcttcctttttgcccgcgcgcggcttcctttcccgcgctcgaagaaaacagcgcgcgcgcgcgcgaccgcgggagcggaatttttcgcgcgaccggctgctgcgtccgcctccgcgccgaatcgccgcctccgcgccgcctggaatcgcctaggcgccaccgtcgcctagagctccgcctaccccctaatctaggcggacaggcctcgactagcgcctagtcgcgcctaggcgcgcctaaggcgacgcctagcggaactttggttttaaggagtgacttaagaagggtaatgatcttgtctcatttgttgatgaatctttcttagctaattattcttttaatacttggtgcattgactacaagtattcaattcgatgagaactatataagaagggggagcgaagtcttagagtcgctgatgaacatgaagttgaagtcaaaggcattgggaacttctcattagaattagcaagactaggaacaagctgaagactgaagccactagctaattctaatgagaagctctcaaggcctttggcttcaacatcatgtccattagcaactcttaagacttcgctccccccttcttatagttctcatcaaattgaatatctgtaataaattggaaatatgcacattagcacctgagtcaatccaccaagtattaggggaataattagctaagaaatattcatcaacaaatgagacaaaatcattacccttcttcttaagccactccataaaaccaaggcattgcttctgcaagtgcttagatgagctgcaaaccatagttcctgctaatgttcttgccaaattattattattcttagttggcttgaacttctttttaggctgcttgcttccactagactcagcttgatgctttcccttgccaagactaacaaggtgagccatgtctttcttctcagatttctacctttgtttctcttctacacggtagcttatgagttcagaaatgctccacttcttgttttgggtgttgtagcttatcttaaaaggggtgtagtgagctggtagtgaagtcataatgaggtgcacaagaaagctctttgaaatggacatatcaagtgcaaagtttagcaaccatgtcgcacatgctcataatgtgctccctaattgcatcttgcccatcatagtgtgaggcatacatgagaaaggtgttggcataagtgttaaatgagctcttgaaattttcctcaacagacgcaatgaactctccttagcagtaaactccacaacatcttgattctttttcgcaaatgctccccttatgcaggagagatcgatcccttaatgatcatgctgacaattctgttgcttagtgttgtaagttcttagtgcatcaacatatgcatttgcagcgtgtgcaacaggcttatccttatgtagtatgtgattgtagtccgttacttcgagcaccactaacacctctttccatgtaggatagtttgtgccattgagggggttgatgatgctaacaaggcccgctagacggtaggccacgcgccattgggggcctgtccggtagcgccctcgggaatagtagagccaatgcctccgccattgccaccggagccttaggtgcatggctgccacgcttgccacgttactggtaggagccatcgctgaacccaccaccggaattgcccccaaaggtcacctattgagggcgttggggcggctggggccgatgagtggctggcggagtgtttgatggcgggtggggtctggcggcttggtggcgcttgtcctagcaagggtcgtggcgggttaggccttgtccatggtaagctgctccaagcgtagatcgtcgtgaatgggttgctacggtggaggtggtggctcatggcggtgaagcgcttgttgaggacgacggtgtggtcggtgatgtgttcgccgagatcgcaaagatcgttagccatccgcttgtagcggtgacaatacttggtgacggaagtcaaacataggagcatgctatgtcctcgggagttaggctcccgattgacagataccccggacgatcctcctaggatcgctcaggagctatacccatcaggtatgctcacgcataccctctggtcgaagactaggtggggctcgagctcacccaccgctttgctcagagctcagaggctcagcgaagcctcgaggttcaagtcgacgaaggcccgagcttggcccctgcccgagccagcagtcaggccaacaaccagcaccctaagcatcaaccagcccgctgagcatccaaggtcgagggctccatggcgttgccctgaccaatgagtgcatggcgccgtcgcccactcctccgacaaagccatgcaggcggcatgacacaagaggacaagcccctctatcagctctaggggcgcggaggctcatggacccacccattagcctcccgagccgggtgcctccaccaccaaggaagcctcgagaaggctcacccggtggaggccggtccaaggagacagccatggcggtcagatgccacaacatcgtagacgtcaaccggggcctacagcttccctgactccacgacaagccaaggtccatccatgctgctgcagcaccctcctggaccctggtgcacgaaggttatagactatagcttccatatctccttgtgccgaccttcctcggaatataaggggaaggtcggccctcgtagatggggaatccttccttccactttcattcgctaggacgctgtgtaattgagagctcaaccaagaatagagcaaccgagaggagcagccgagtgttcctccccccagcaacccagcaagagcgaggagcatttcctttacttgctagagaacttgaggtcactagcatgcttgccatgccaccaatccctctggctattgagtttttagcatgattgtgtcaaaaccacttagagcatctcaagagctccttaaaagaattccctaatttgtttttcggcgaaaagaaaaaaagaaactgcactcaacagttttgtatatgaactctctaaagataaccacttgttaatcttcccctcaactccaaatatgtgcatgcattgcacagttattatcgacacttggtgctagtttctttcctcacatggttttctttgctgatgctgggtttcttcacctagccgctccgcaccatagccgcacctggccgtggctggctgaccctggctgtggctggccgggagttgccagccaccagctaaggagctgcagtagcctaggctgggggcctgcgacaggcttggtgcagtgtgctaggaaatccttgtggtggccctagtttagcaaccaaatatggcaactattggagaaaggcaatcaagctacctacttattttgttcacttattacaatcattggtttaacaagtgatttttacaaaactattggatacactcttagtgtaaaaactgggttcaattgggcgcacagtgcttggtcctaatatttgagggttgtaaaatgaatgttgtatgtgctctatgtgatctacacttataagatatctttctaacatgccactaatatttccaagttgccattttcttcatattttactctattaagaaaaattccattattgaatgattataattctgcaacttggattctagttttgaacttctgattactcagacaaaaaaaaaccatgccgattttgatgaattaatgcatgctcaattttttgaaggcagttgatataattctgtt

SEQ ID NO: 4804 - DNA, 3870 bp, Sorghum bicolor
  Intron number 3 from transcript Sb03g012370.1 (locus Sb03g 012370) derived from phytozome v7.0 (chr-ID chromosome_3; pos 14252573 to 14256442 reverse strand)
gcgcactcattgtcagcgtcggtgacatcatcgaggcaagtatagtagtatatatatatatatatatatatatatatatatatatatatatatatatatatataaaaacttttagcttaatttgttgtctgtttcggctgaatcaaagaagtgctcaccatcaggtctaggccaaacgccgccgcctatcgtgacaaatggtttgatatgattttttataattccagtattctttatttatagtatatgcttagaaaaactaagtaatactagtcaattgcgtgcatggaagatctctacgattttaagcaacacaagaataaataaatcgaaggtactagcgtgccaactactctgtgctgcacttctgccatggtagtcagtatatattatctccattttcttttataagactcgtgatctctcaacaagtacactttaatcatttatttattttatgttgcattgtttttatttataaacttaggccccatttggacctttagaattgaatttattttagtaatcataatttagatatacatattaattaagttaatatagttatatatgaattatatttgtatatgttagctatatgagagaggtactatgtgttatattttaccataggggagcgagttaaagagcgtattataagttgcaaagtagaaacatatagcatgatgatctatagaattaatttctgtatcccactctatgaatttaagatagacatatataagaatgacaaattccatgccaaataacctaatctattaagtatatttcaatttctccaaacaaccccttatagtaattgaatagtatatttgattacaaaaactaatcgtataaagtttttatatattatggttcaaaattgttagccattttattgataattttttggagtttcaatcttgatatgcatatgcgccttacaaaggtacccccttcgtctctagatatcatctgtcgtcattgatgtacgtgccacaagtttgattcgatttgtagaaaatacttgcaacatttatatctccaaataattttcttaaaaaactaaatatgaatattttttaatatatatctagtcaaagttatttctcgggaagcgtaaatgacagttatttagggacataaacagtactctctccattccaaattataagtcattccaagaatcttaaagagtcaaagcatttttaagtttgaccaaaaatatagagagaaatataaagatttatgtcataaaataggtacactatgaaaatataactaacaaagaatataatgctacttggttggtaacaaaaatgttattattttgctatataaatttggttaaacttgaaaaactttgactcttcaagattctttaaatgatttataatttgggacggagggagtagtaaactagcaaagtggccctcggtagttactatttttcattataacttttgtgtttttttatgtgaaaccaattttaaatagttttatttatttgattatttgattgtagttgtcctctttccattcatgttggactccgggttttattcatcaacacaaactctaattgaattctgtatgctattatgtgttttcatacttgttccatttgtattggatttttttctatatattggatagttttgcaccattattatcttgatcaatatgatcaacgcagttgttgttaaccttaagagtgagggagatgacttttttaaaactttacttaatgtaaaacaccaacttttatttatgtgtttttagcatagggaaatcaaactattatatattttagtattttgaattttgactatagctatttactaatataatttttatgtattatttcattcggtatcttcttttcaatttatttgcagatcaaactattatttttcaaattgctatttttcttaatttattagtctgactatttattaactaaataaaaatattgactttatggtttaatccaagccattcgaattagatatatcataaatccaaaggcgtaccttattgttactaacataggggattctatcacaataggtcacataagggaaaaaagataacgacatggcattggagttatgaagagtgagggcaaagagtagtttcatctagatggaagatgtaactgaggcttcagtgttcgggaaaggaaaagcttttgggtattgtagcacatttgtaactatagcagttagtatttaatcatagactaattaggtttaaaatattcgtctcgtaaaatacatgtaaactgtgcaattagttattttttaatgagtaaagtctaccaccggtcccaaacttgtactgtcgtgtcatccccgtccttaaacatgcaaatcgatcttttaggtcctcgaacttatttgtctatgtcgttctagtctctaaacttgttcagctatgttatcccagcacctaaacatagaaatcactcatttaggtccttaaatttgtttaattatgtcattctggtcctaagcttggttttaagtctcatctagatcaaaacaaagcgatctaaaaactctatatcaaaacataatgcataactttttcatataaactcgaacgaagacaaattttatatcaaagttatagcccttaatgtgatctataactttgtagttgaaatttttaaattcaaagtcgtttagtttcacaacatttaattttaaattttaaattttaaaatctataaacttacaaaaaatattttgggatcctaaatgattttaattttaaaactttttgaatacaaagttgatcgtgttgctgactataattttgatataaagtttattttcatttgagttcgtataaaaaagttatgagtttttttcgatatagagtttttagattcgccttgttttgatccagatgagacttgaaaacaagttttttagggaccgggatgacacaacagaacaagtttaaagacctatatgggagattttcaagtttagaaaccaggataacacaaccgaacaagtttagatatgtaaacgatcggtttgcaagttgaaggaccagaatgacatatctgaacaggaccggtgatggactttactcttttttaatctatatttaatgctccatacatgtgtccaaacatttgttgtgacggacggaaaatttttgagtgaaaactaaacaaggccgagatgaaattgtgtctacatttttccaatattttaaaacttaaacaaaaaacaatcattgggcttgtgcttttatttcttctgtttgtgtccaatcccttgcatcgcaattaattcctataacctacctatggaacaataaaataaaactatacactaggcgttggtgttttcagcaacttaaagcactagattaaaagtattgcacgtgatagagatgaatggatatttttttaactaataaggataatatagacttagtggagaatgatgtggatatttcttttgtaatatataggggatcacatggactacgtgaaaaataatgtggacaccttgcaggaagtaatggattaaaaatgaaaagtattgcacgtgatagagatgatgtggatatttttttgtaattattaaggattgacatggatttagtagaataacaatgtggataatttttttgtaattagtaagaaataatatggatttagtagaaaatgatgtggatatcttatatgaaaagataaaatatctaagtggagtaatttagttgggaatattgcggacaccttgtttgaagagaaaaataatctagtgggatttaactttacaataatataagattacaattacttgtgctgattctcgtgagctactgtatgttcacagattctaagca

SEQ ID NO: 4805 - DNA, 3789 bp, Sorghum bicolor
  Intron number 2 from transcript Sb03g032740.1 (locus Sb03g 032740) derived from phytozome v7.0 (chr-ID chromosome_3; pos 61190626 to 61194414)
gctctgtccgtcgatcacaaagcacgtacacgaatccactgctcgttggtttcaatggttaaagttaccgtccgttacattaaatatttagacatatatatgaagtactaaatataaattatttattaaactaaaaatacagcttgagagtaatttgcgatacgaatcttttgagtctaattagtctatgattagacactaattgtcaaataagacaaaaatactacagtaaactttaacaacccaaaccaaacatccgctatatatatgcagcattagtaactgtgaaactgcatgtgtctttgttttagttcacatcaaaaaccaaaaacttttcaagattctccatcacaccgaatcttaggttgcatgcatagagtattaaatatagataaaaacaaaaattaattgcatagtttgtctgtgaatcgggaggcaaatcttttaagcctagttattttatgattgaacaatgtttgtcaaataaaaacaaaaatgctacaatatcaaaatccaaattttttttatctaaacaagaccttaagcccaccaatccactgctagttaagtcgtttttgcagcatttcagcaacggtgaaactgcatgcgtcttaagctctgttgggtttgtcttgttaaactttaactctcatcatattttgatacatgcataaagtattaaatataaattatttaagaaactataaaaacacaactagcgaaaatttacaaaatatatcttttaagtctaattagttcatgattaaacattaattatcaaataaaacaaaaatattcatgttaaactttaacagtttctaccaaatacatccttatactatgtttttttgctggttcagcccgacaggcaagacgagcgcgcaaggattgaggcggcaggaggacatgtcgtcaactggcatggtcatcgagtcgaaggcgtacttgctatgtcacggtcaatcggtatgtgaatcggtaatgctatagaccgggcgtccgtctgctccgcacgcaccgcttcgtagcccgcggtcggaacggacccgttttctctcgtactcgctttttctccgctttctgtctcgcacttcttcttctccgcctgttttcctccctgctctttagaccatctccagagcagagacaccacgcatacgagctcgctgcacgcccgccctcccgtgctcccttcctcgttccctcgctcctccgtgacctccatacatgcccctctctctgcgacttagatcccgcacttccaatggagactaggacgacggcggcggctccgatgaggtacgtcgtggagggatctggatctaaggtctaatcctcctcctcaggatctagatctgaacctttctcctcctcctcctcctcctccttccagtgagcccgcacgcctcccttccctccctgctctctcatcctcgtgcactgtgacctccatgtctctggagatgaggacgacgacgtggctccgacgaggtagttatagagggatctagatctgaggtctttctccccctcctctctcccactagatctagatctgctctcttcctgcgcctccttctcctcctcttcttcttcttccccttctggatccaagggtttggtggtagctagtgttccagcgagtcagatctcgttgttttgtaataattcattttcggtgttgcaacagatgatgtggaatgttgcaacagtatcttttttttgttgctgcaacaggtgtttctctgatgttgcagagcaattcttcgagatgtttcatttttgcttttttcctttgttgcagcaaattctcctccgatgttgcagtaaatttttttgttgcaacagatgttttttctaatgttgcattattagtgcttgagatgttgtaatagctttttctcattgttgcagcagattctctctcaatgttgcagtagattttttttgttgcaacaggcgttttttctgatgttgcattagtagtgcttgagatgttgtaatagctttttctaaatattgcagcagattttcacccgatgttgcagtagatgttttttaatgttgcagtagacttttttttatgtcgcagttacatatttttgttttgttgcatttgatgttttttcgatgttttaatagctttttccgtttgttttagcagtttttttttgcattttagatgtccttcaatattttgcaatagccttttttcattgttgcagctagaggacagactatggtggtgagttgatggtagggtgagaggtgttaggttgcagagtttgtggacagatagatctgtgcacatggtggtcgtttttctctgtgcgggcacggtgcgggagtcggtttttatgggtacgagtttggccgcgggcagatgtgctagggggcggcgaagtgaggggcagggcggatcccgtgctcgtgggggggggggggggacaggctccttgtgcgggggagcggacgagggtagtcctccacgtagggtgagttgacttttctttttttctctatgtggtgtgtgagtggagagcccagcgtccggacgcgctgttgatgccggacgtccgggcgctagcagcgccgtatgtgaattgcttcatgtatgcccgcaaatcgaatagagagggacagagttaggaagttgatttcttttatgttaacggagccgacgatgttaattttaaaaaattgtttgaactttataaaatttagcggaaaattcacctccactgaggggctacttgccccctgattcgcctttatttatgtttacagaacaggatggaaacctaaactttattcctatagtttattatatatgcttataatttttttattcaaaatacaggttttgctagacccaatttgtggaatattgggcttaactagtgcagtagtaacccaggcggtgcaatatttgtgcatgagacagtttctgctgaacatagcttatgagctcacaaattaaccagcttttatgttacatgttctcaaattaattattcatttcgaggatgctcgatctgatatttaccatctgagataaaataaagagacgcttcatttgaaaaaaaaacataggtgttgtttggttctctgccataatttgtcatagttatagccttagacaagtgtggctataaaatttgaagccatactttgttttgagacgttgattttgatgaaaacaaaatcctgtgtgttttttgggtacacaatggttgaggctctcagcgggggtgttttttagtggaccaagcatattctgttgaatgaattatagtagagactaattaaatatgagagcatatttttgcgtgtgcgcctagtgtaggttggtggacgaggccaatgggctaccatattttgttttgtattagtatatatgatttggtgataaaatagttggttattttatttgagtaaaatatctctcttcccgtgttcgagaagccaattaatctatatatatatataaagtattaatattcatgatactacgtaatatatcttcatagtaaacttacttttatatataaatattaatactatattctacaaatctaattaaatttaaactagttgggtgtaggttttaactacaaattatcaggaccaacactaataacagctgcagggaatagtgtgaagctatgcttcctgtagcacagtacttaatacggatgtgattcttaaaaaaaagcttcatcaggagttgatataatttcgattggcaatgcaggggacagatacataaaaccatttatcattccaaag

SEQ ID NO: 4806 - DNA, 20479 bp, Sorghum bicolor
  Intron number 5 from transcript Sb02g039130.2 (locus Sb02g 039130) derived from phytozome v7.0 (chr-ID chromosome_2; pos 73257057 to 73277535)
cgaccaacttcgtcgggaaattatctctggcgcaggtgatacagcaggagcagtgagcagcacatctccagcccttggagcacgaggaaagtttacgtgcctgtttctgcaaacaattggatcttgtagtaaggctttcgaaaagaattcggatttctgtactgtaacatttttatttttatttgtcaaatattatccaattatggactaactaggtttaaaagattcatgtcgtgatttacagtgtgtaattagtttttattttcgtctatatctaatctaatacttcatgcacgtgtcccaaaattcgatgtgatggagaatcttgaaaagtttttggttttttgggtaaactaaacaaggcctaaaacaggaacataactgctaaacttcaatgttaacttagggacttctaaatttcatgtgcctaaattttagtttccttttagtgatgtatatatatattagattagattgcagcttgagtttgttataatttttgtaggaacaatttataatttttggctttgagagtaaaaactctttagacaaaatcagaaatctgacaatatttgatttgagttgacacaaagacaattaataatttatattcgtttctatagtcagcaaggataaaaatttgatatactccattatgacacaaagtaataatttaattatactagttggtagtacaagagtgttgttgtcttaaatcatcttataaagttcacacacctaaaattgagaagaagtggttaattaaatcatgggaactatttttggtatagataatcttttctttttatcattgttaataaatggttctgatgtacaataatcagtcgtgccagcacaaaagggtgagcttgggtccaaaatattgggccttggccttttttacatctggccttgtttacttgcaaaatattttgtaaaatgtgaatagtaccaatttcgtttgtatttgacaaatattatcaaatcatggactaactaggctcaaaagattcgtctcgtcaattccgatcaaactgtgtaattagtttttattttcgtctatatttaatactttatgcatatgtttaaagattcgatgtgatggggaatctgaaaaattttgcaattttttttggaactaaacgaggccccgggtgattggttgcaacagaaagtttgatcaggctatgcaagaccaaagaaattgggttgagcccgtacacatggtctacgagacaagattgtgtttggttgcatacatgcatcaatattttaggtgtctaacacatggattcctacatcatggatgaatcaagtcatcctacaccatatgggaaagagaaatccacaatacggaggcgtgcaagatagagaaggttagataaataaaatatgcaggcaaaatatgcgagcaggagaaccaaacatagcacaagtgcatggagagatgcaagatgccccttcgaacgggctagtttgggcaaccaatcaccctctatatagtcgttcatgcctcatgccaagtacagtgaagtccacttttggtaatttggcccacccttctatatttgcacaagttttaagcggcaagtagtggttgtcagtgccctcgatctactgttataaaaaccttggagacttggaccagtactcttattgcgcgatctgcgaatccaagacagatacatatatttttcacaattgcaaactgaagccttttttagtttgtattttttaacactgtagcattttatttgtatttagtttatataacgtacttagcataaagaaataacctttgatagcaaacagcggatagacaactccaaacttcgggtattaacttcactctacaagatccaactgactggttgatcacaagcccaaaacttctcctgaggtgtgggggaaatagcaagagtgagcacatatcgtactcaaccagtataaccaggggttcatgaggctcaattagctgacactggtttgactgcatttagcttttatatgtagatagcatatttaatcattggatagcaaatatcaaggtagcatattaaatcccataaccacatgatcaattgtatacaggaattatgaataacacatataaacaacataataaaccatcatttattatcattaatcatgttcatcagtgtccatctattccgtcagttttccgggccgcccgtatccgtgggcacggctagtataccagatttaacactctgcagaggttgtacatctttacccatgagtcgtgatttaccctttcgcccgaggtcatgagtctcttaacccccttcctagggaggtcagcagggatcactatgaagcctttcaaaggtttcgtctaacaagttagggccattagattcactcggcaggcagatatagagccccccttccatggcacataactcgcagcctatacgcatggacagaggccacactatacccaacgtgtctagccattcttacgccatttaaggtaaccactaacaagctagaaaaaggtcctcatactgagctaaaaccagagccatatagccctcatggttgtacgaattgtcccagcttttgccaagggataagtccttatggagggtcaagatcaatctagcaaaagctagagttctttccaccctttatgttcaagttgctagaaagcttattttattgtttattgtatatccaaatattcatgttacaagatcatggattattaatcaagcactagcaagaactatccaaatgcatatccaaataggtaacaaggaattcaggataacaatcatctatgattttgctaaggtcatcaaggtggacacatgcatatgataaatattgtattaatggtgtataggtaacaaggatgatccccagttatacttgccttgatcaaagctctcctgagcccgctggtcttcaaaggcttgatcttgatcgccaacgtatcgctcaccgtctataaccgaaacatcaatcaacagcacgcaaacaatcggagacaaacatacacgaagcaaacaagctataattagaacaatacaccaaacagtagtaaaacaaatataaaagtttatcaaaatattctatgcagagctacgatcacacaaacgtaaagttcacgaaaatcggaattaaaacgagaaagatatgaattttctaagatttcctataaagaaataattaattaaatgctactgcagaattaaaaagtttcaaaacagtaaactaatatttctaacatgtagagatcgtaaatacaaatccaacggaatttgaatggacaaaaacggagttaaaatgaatattttatgagcaaaacactttcaatggcaaaactgtaattctggaaggcgcattttaactcataccgacaggaatacgctttctaaactgaaaagcgtaaaaacgaaagtacgccatggagcgcgggtggaaaactaaagaaacccaggggctctttaacataatttaccccgaaggggtaagttctatttgcggccgttgattttcaatccgacgatggagattgatcctggacgctgggcggtggtccggccaacaggctgccggctccggtgcggtggccaccatggccggagagccgaaactcgccggagctcctcgacttctcctttccgagcaccgtttttttgaaaggaaaataccgggagggcgagaagctcaccgcgaacgtagctaggggcttggctcgggccgagagtgtcgacgaaagctagtcggcagtctaccttggggtatacccacggtagtagtttatcggtagacggtgcgcaaactacgaactcgatggtgacgcaagacacggacaagctttttatccaggttcggccgccgagttggcgtaatacctacgtcctgcgtctggttgtattgatttgtgctgagagaatatgatgtcctaggggggtcccttgcccctccttatatagtctggagggcagggttacagatctggaaactaatcctagtcggttacaattgccatagataattcgatatcaattcctattctaaccgactagaatcctgcttgatctccacgtcttgtttccttgcccgaaactccgagctgtcggatcaagccttgaactcgtctcgtagtgagccgagcttcctggctgaagtctagccgtaagggtataggggtttatacccccacagctagtccccgagcaccatgtattgtgatgcaacacgccgtcttgagcttcttcgatcagcgaggcttggcgtcttcaataagtgggaggatcgcccaaacagttgcaacgattccttgaccaactcgaaagacagttgatcaacattgacatcgaagaagcagggtgttcgaagaatgcatggtgctcttaaaaaaaatttctttcctggtgaagtgtgcccactttacctttttgaaaggtaaaagcatcaaaaaaaaagcaagcaaattcaccgctaggtgaagtgtgcccacttagtccccgagcctggtagtaggtgacgtaggcacgtggtgccagggtcaaaagaaaattccccaaagtagttttgagactgagatgcatcgctagatgcatcgtaccgatgtagtccccgagcttgctggaaggcgaattatgagccttgtagcaaggtctaaagtgaatttaccagtccccgagcatgtcatgctcgcctgcaattgaaaaaaccaatcgaccagtccccgagcacttagtgtgcttcttggatttatatgttgctatactgtacgaccagtccccgagcatcgagtgctcagtggtcggtgcatgctttaaagctttgagctgatagactgagcgaccagtccccgagcatctagtgctctgtggtcggtgcagtccttgaagttccgagctaatagactgggcgaccagtccccgagcgtcgagtgctcggtggtcggtgcagtccttcaagttccgagctgatagactgggcgaccagtccctgagcgtcgagtgctcggtggtcggtgcagtccccggattgttgactcactggcgtatgtgtcttcttacttttgaaaagatctttccaattaaagttgtcgtgacgaggtctcctgacgatatgtcagacggatgcatgaaaagttgcgcctggcaactgtacaaccgctctttgcatggtttgagaaaaggaaaccatcaattggtacgaaaactccgccgcattaattgtctataatcattgtaaaccgaaacgccgcgtccgccgcatggcctgcccacttcccgagaatacaggaagtgggagaggtggagtcgcgggtttataagggcctaataggtccgcctgtaccgcttcgcctgccattgccttcaaaccttacgctctcatcttctccaatctcctgcatcttcctaactccaacccacaatcgcgcctctaatggcgaagagcgactccaggaaaagggccgaactgatggccaaggagtggaagaagtctcgcagcaccacaaaatctcttggtgacctcgtcgatatggggcttctgcacggcgcagagctcggcggctggagggcaccggagggggagagctaccccgaccctcgcgccggtgagatcgttgtttttgaagatttcgttaagagaggctttggtgttcctgttcatccttttcttcaaggtcttcttttgtactatgagatcgggatttgcaatctgcacccgaactcaattctccttatttccaccttcatccacctgtgcgaggcctatgttggcatagagccgcacttcgatcttttccggtatcttttctgcttgaggaagaagggagcagttggaggctccaaggttgcaggtggagtatacctcaaccttcgtgatgggataaagaatcgctacctgcactgcccatggaacacttccttgaccgaatggtacaggaagtggttctacatcagggaggaaccgggcagctccacgttctgcgacgtgggatacattcctgagaagaggacgagctggaccgaccgcccggagttcgacggtccagtggcggatctcatgaagctgatcgactggtcgcgcctagacgggcttggcgtggtcggcaacttcatttgccgccgggtgatgccctgccagaagagggtgcactcggcgtacgagtatgccggaagcgtagacccgaccaggatgcggtcggagatcttggagaaagcggaggtacaacagctgctgaacgagctgtttaacttcgcggatgggggcttcatccgtggcagtgatcgggtgcaagccttcaagttaggacgaccagcaccaaaggtatgtagcagattctgtttgatcattcgtatatcgtctgcagttgactcatctctgttgcttttgcaggtcggcgatgtcgaccggtgcacagtgtatgtatcactggcaccggggatggaaaatcctgcgggagaggtcccgccagaggaggacgctgctcggtgtactcattacaccagcagtgaggaagaccaagcccgccccgtcccgacctccgaggagagggtagcggggaaaaggccattgccggcagatcccttgccgacaccggagctgccggcagatctaccggcggagagcagccaagcaccgaagcgtcgtcagctcgtgcggatcgtcgacgacgacgacgacgaggaggctgcgccgtcgttggtccaacggcctcggagccgcccagacactgcgccggtcgccactgatcgagtggccagcggcgccgctgccccgcaggttgtcgagatgggggcacaggtgccgaccggccgggcgaggaggaggttcaccgcgacccatcgtcggtcggacctgtaagtgttcgacttacgtattttggactcctttttttttaacttttgttcctgtagtgcggcatcggatgtcgaccctggccgaactgccagcgagggaacgggcgagcctgcccgcggttctggggatgcggccccccagaccacagagcagccaacagctgcagtcgcgcctgggagcaccgaggggctcccgagcgcggcgccgactacaacaagcagcccgaccagggctggagaggctcccccaactgactcctcggagaagggaagatctccgaccgctcctcctgccggggggagtgaagtccccccgccgccccgagcaggagcctcttcggctgcgggctccccaggtctggtccaagggccagtaatacctgggaccaccaccgggggtgacgcagcacaggaggaggaaacccgggcagcctccgatgacgaggtggaagagatcgagggtcgtccccgtgatggccgccaacacgtgtatgtgtggcgccaacgcggggatcactttatcgggcatgaggagctcgccgaggccgaagaggccgccagggtggagcgcgcggccaagcgcctcgtcgacgaagttaaggtaagcggctttttgtactgctgcacattcttttgccttgtcttccatggtcgttatatgcttgctttgtaggacgtaatgaaaacggcgaagtaccggaaacggtgctttgaccagatagaaggcgtcatggccgagaacaaggcccttgccgcggaggtagaccggttgcgggcggaggtcggggagaaggtggtcgagatgagtgccgaaaaggagcgtcgtctcgacctcgctcgtcgtttggccgaccagtaccggctgcaagaaggttagtcacacgctccgagcagcttcgcgtacttgtatagtttgctttgctgaccagtttaggattcacgcagacttggaggaggaggtggcgagcctccgacaagagaaggagcagctcagccaacagctcgccggtgcgctggagtccgggcggcgagcagaagaggaatcgagtcgaaaagaccgggagctatctggtaatggttgccgccttgttggttgctgcctgcccctttgtttgtttagtatgccgaaaataacgcttcgtttcgtttgcagtgctcaaggtgaacgccaaaaagcacctggatgatctggtcaaggatcgggactcctggaaggtcaactgttgcaggatctggaaaggagtgtccccggtcctagacctgatcagtcccgagctcccggagagccagccccgcgcgccgcaattgaccccggtcgagaaggcgcaacgagcgtgggactggctccagcagttcgtgaaggacgccggggagtttgcgggcgcgcacgtcctcagcatggtgcgcgcccactaccccctggtcgacttgagcaggctggagaaggggtacccgaaggaagtcggcccacaggaagcggacgaactctggggtagtctgctggacttgtcgtcgacagtgatcggcgacatcaatctgtgcggcacggccactcctccagaccagccgagttcagataggtgggccagggagttgtcgggcgcgtccgttgcgggagatgggcggtcgacgcctgcggtctcgaccagccaggcgccggtggccccgaccccttcgtccgggcagcagggccaggcgggtgatcagcccgagcagctaggccaataaagtagtctgtaggaatagactagtgtctgcccgtcagggtatttattgtaaactttgtatgtaaagtttgtaataaagtttgctttttgtcatgactgttgttttgagcgctgtaagaatatctgagtgacgtgtcaccgtatttgtcttggttgtcgctaagagcatccgttgcaggagttttgccgagtgctgtgtgtgacaaggtatgggccaaaaatagagaatttcattatcgaaaattataagatacttacaaaagaaagtcattaaaactttatggatagaaacgtcgcagtttgtcgatgtgccaagagttaggcactcgtgttccgtctgggtatgccaatctgtaggacgtaggtcgtgtgacctcggtcaccacgaaaggtccttcccagggagtggatagcttgtgcattccctcctggcttgttttccatcgaagcaccagatcgccgaccatgaaagaacggtccttgacattcctgttgtagtatcgcctgactgctgcgagatattttgctgttcggagacacgaaactaaacgcttttcctccatgcaattgatttcgagttctctggcgttgtcggcggtcgcctggtcgaagtgctcggttctaggagatccgaagtgtatgtcggacggcaagactgcctctgcaccgtacaccatgaagtagggagacacccctgtgtttcgactggtctgagttcggaggccccagaccactgccggcaattctttcatccatcgaccgggtgctctgtcgttttcggtgtacaaccttttctttagggcgtcaacgatcattccgttagcacgttcaacttgaccgttggcacgtggatgtgccactgacacatattttatgactatgcctctgtcatcgcagaaatcccaaaaagtggtgccagtaaactgagtgtccaggtcggtgattatgctgttcgggatgccgaatctgtgtatgatttgattgaggaactccacagccttctcggaggttgctttgaccaggggcatgtatttaatccacttggagaacttgtcgattaacacgaagacaaacttgaaattgcccggggctggtttaaatggtccgatcatgtcaagcccccagcaagcaaaaggccaagacgacgggatggtttgaatttcatgggcaggtacgtgggtcctcttagcgaaaaactgacatccttcgcaatgccgaaccagtttttctgcgtcgccgaccgcggttggccaataaaaacctgctcggaaagcctttccgaccagcgttctagatgcggcgtgattgccgcaggatccggcgtgtatgtcctccaagagcttgataccatcatcttggggtatgcatttgagcagtacttcggagcttgcgtttttccgcatgagttttccgtcgaccaggatgtagttctttgatcgtcggatgaggcgctcgttctctgttttgtcgtgaaagcctgtcccgtctgatatgtatttgatgaacggagtacgccagtcacgtccaccggttgtcggagtggcgtcatctatgagcattgcctcggtgtgttgcttgtcgaccaggggggagcttacgcttggctcatggatgtcctgaacgaaaataccccgcgggatttgggcccgagatgagcctaactttgacaacgcatctgctgcttggttcttatcccggaccacgtggatgtactctatgccatagaagttagtttcccatttgcgaatttctttgcagtagagatccatcttctcgtgggttgcgtcccactccttgttgagctggttgatgaccaaagcggagtcgccgtagacatagaggcgcttgacccccagttcaacggcgagtcgtatgccatgtaagcatgcttcgtattcggcgacgttgtttgacgccggaaaaaggatccgaaggacgtaacggagtttgtccttgttgggtgatacgaacaatatcccagcacctgcaccgttgatgttcaaggacccatcaaagaacattgaccagtggtctgagacatctggaacggaaggctcgttgagatccgtccattcggcaatgaaatcgaccagggcttgagacttgacagtggtgcgactctggaactctagggaaaatggacataattccattgcccatttcacgattctgccattggcgtctttattgcgcaggatgtccccaagaggaaagctggttgccaccaggactcgatggccgtcgaagtagtgcttcagctttcttgacgttatcaggatggcgtatataagcttctgtatttgtgggtacctggccttggattcgtttaaaacttcgcttatgaagtaaacgggtctctggaccttgaaaacgtgacctggttcatctcgttcgaccactattgccgtggaaacaaccctgtcggttgcagcaatgtaaaggagtaggtcttcattgggctgaggcgctgtgaggacaggcggtgaagtgaggaaggtcttaagctgggtgaacgcagcgtcggcttcctctgtccaagagaatttttctgacgctttcaatagtttgaagaaagggaggcctttttctcccagtcttgagatgaaacgactgagggcggccatgcatccggttagcttctgaatatccttgacgttcttcggtggtcgcatgtcgagtacggctttgacttttgaagggtttggtcgtatgccgtcgcgactgacgacgttgccgagcagtagaccggaaggaacgccgaaaacgcatttcttggggttgagcttccacttgtacctattgagtgcctcgaaggttcggcctaagttgtcgattagggtgctcgcgtcccttgtttttacgaccacgtcgtccacataggcctcgacgaggtcatcgcgaatctcgtcgtggaggcattgctggatggccctttgataagtggccccggcgtttttaagtccaaaacacatggtagtgtaacagtatgcgccgaagggtgtgatgaaggatgttttgatctgatcttcttcctttaacgagatctggtgataaccagagtagcaatctagaaaggagaggagttcgcatccggccgttgagtcgaccacctcgtcgatgcgaggaagaccaaaaggatctttaggacagtgtttgttgagatcggtgtaatcaacgcacattctccattcattattctttttgcgtacaagaaccggattggcgagccaatcgggatgatacacttcttttatgaatccggctgctaaaagccgtgttatttctgtcctaatagcctcctttttgtcacgagcgaaccgtcgcagtttttgcttgattggtcttgcggtcttcgagacatttaaggagtgctcgatcaggtttcgtgggacaccgggcatgtctgcgggtttccatgcgaaaacgctcacgttgtcccttagaaacctgacgagcgcgtcttcctattttggatccaggttagccccgatgagggctgtcttctcggggttgccttcgaccagctgcacttctttgtactccttggattttgaattctttctggctgtctcctgctcaggtaatcggagctggtcgggaggcagctgtgcggcttggtttgctgtttccgccatgcggattgagaggtcaattgcctcggtgatcttgaagctttcttcttcgcaggtgtacgcagtgtagacgttgcctctgacggttaggacacccttctccgtgggcatcttaaggactaggtatgagtagtgcgggactgccatgaactttgtcagcgatgggcggcccagtatggcgtggtaggtcccgtcgaagtccgcgactacgaagttgatgaactccgtccggaagtgatcgggtgtgccgaattggacaggcaatgttatctgtccgaggggcaccgaactttgacctggcaaaaccccccagaattgggcgtcgtaaggttttagttgcgccggcgatatcttgagggcgggcaggctgttgcggaagaggatgtcgatggagcttcccccgtccacgagcacacgctcgaatctgatgctattgatgcagggatcaagaatcagtgggaaacgacccggctctgggatagcggcccactggtccttcctgctgaacgagatctccctgtgggaccacgcgggaaatttcggatctgcgatcagcccgtccgtgttgtctatgttgaggcaggctctctttaacagctttctttctcgcttggactcagtggagaccttgcccccgaaaatggagtggaccacgtcggtggggctgacgtattggtgtcgggggtccccgtcttggtcctcatcctcatcttcgtggtcgtgcccgtcgcgcttgttatttttcttggcggagtcctcttgggcggcccgccgtgtatagatgcttttgaggacgcggcactcttccatggtatggttagactttgggtgtagctggcacggtcccttcaacgttttgttgtagtcgtcttggtagtcccgtcgtccattgggacgtttaaccgtatttacttcgtggtcgtattcgcgagggcgctttcctctgtagtcgtcgcggctgtcgcgccgccgatcccaaccctctcggtgatcgcggttgtcagagcggcggtgatttctgttgtcgtagcgaccacgaccgtcatctcgccgggaaggctggtcggggcctctcgcatcgtcccggattagtttttctgcgtcatcagcatcggcgtaatttttagccatggcgaggagctctgctaccgttgatgggcgtttacgcaacagcttgttcctcagcgcttcatggaaacgcaagcccttgataaaggctgatatggcctcgtcatgagaaatcttcgggattttgaggcgcatatccgagaaccgtcggatgtaatcgcgcagaggttcattcttcctgtctcttatcctttcaaggtcgtacttgtttccgggctgttcgcatgtggcgatgaagttgtcgatgaaagcctggcgtagctcttcccaagagtcgaaggagtcctcgggcaagccgagaagccactgatgaccagcctggtcgaggactacggggaagtagttagccatgacgtgctcatctcctgccgctgatcggacggcgatttcatagagagtaatccagttctctggattttccttgccgtcgtattttttaagtttttcgagcttgaaattgcggggccacacgacctggcggaggtgtgaggagaactgtcttaggcccggaggaccgtgggttgcatcgtactcgatgcggcgcaggttttcgtggactgccctctctgcggcgcgcctgttgatgcggtcccgggcatctttgggagggatgttgtggcggagatccctgtgttgattttcttcttggccgcgtgcgcggttctgctggcggcggccatcggcgtcccgaccaccatcgtcgcgccgtgagtcccctcgacggttgtcgggggagcggctgcggtgacgcctgctgggtgaggcccggctacgattagtctggtcggaggcggcttccgtataagaaacgtcctggactctcttgagcagagtggctgtctgtcccattgcggcgatcaggtgtgctcggatgctggtccggactccctggcattcgggggtgtcaggaagccgatccaggttggccatggcgacagccacgttggcgcttggcgttttgtagaccggctggtccccgaccatgtcaaaggcatcgttgaggttacttgatggcatctgttgttgctcgtccgcacgccgtcgggcgcgatcggcgttacgctgttcgcggagttgcctctggtcatctgtttctccgtcaacagccggttcgtcggcgctgacattgaacacaatatcccctcgccggggggggaatatcgggaattggtcgaaacccggagggtgtgaaggaaagtccaggtcgtagccctcgtcttcggtatttataacctcggtggggacggagccggtgcttgagttggtgctggaaacctggccgtcccgtagttctcggattgtcaccatgttgacatggtgacgattgttccttgtcggcgaccagcccactttgctgaagacggattggacatgctgtgagtaaacagaggccgagttgttcaggccgcaaggatagtcttcctttttgagctcgacggatcgtcctgaggaggttgaggttatcgtcagggacgttcccagccgttcgtgtgtggcgacacgagttggccggcgggatttcgaaaaatccgctcgagcagcttggtcgggccggcgcagaactccatctattagttgggagacttcgagtagcttggagtcagcgcgatcgagcgcttggaggaggtccgagcagtcgatctcctttcccttgtagagcgggaacggtggtcgggagcttggtgccgtcatgcgtgtggtcggagacggcgtgatctcagattggttctggatctctttcggaaccgtggtcgcgaagccgccgctgcacgtcgtccacgtgatctggccgacggtgaacgtgaggccttcgggcacggtcgcggaagctgggatcgtgaccatcttgttcgccggaaaagttgcacgcacaccccctacctggcgcgccactgtcgacgaaagctagtcggcagtctaccttggggtatacccacggtagtagtttatcggtagacggtgcgcaaactacgaactcgatggtgacgcaagacacggacaagctttttatccaggttcggccgccgagttggcgtaatacctacgtcctgcgtctggttgtattgatttgtgctgagagaatatgatgtcctaggggggtcccttgcccctccttatatagtctggagggcagggttacagatctggaaactaatcctagtcggttacaattgtcatagataattcgatatcaattcctattctaaccgactagaatcctgcttgatctccacgtcttgtttccttgcccgaaactccgagctgtcggatcaagccttgaactcgtctcgtagtgagccgagcttcctggctgaagtctagccgtaagggtataggggtttatacccccacagagagctagcagaggggcgtgtccacgcgcggcggcgaaaagggctcccggcgagatccagaactcgcgaaacaaggcacggggactcggttttggcgacctagatgcgaaaacatgacgagggagcgatgctagaagctttatagtggtcggtttgcgcgcttggcaaggaaatcgcgggatccgcggatccgattcggcgaggaaacgtttcctgctcgagcacggcagggaggaagaaggaaagggcgctgacgtgtgggcccgtgctgtcagcgaccaaggaagagaagagagaaggggcgcgctgcggcctgtccactggctgtgcgcgctgggcctcgggggtttcctgggccgcgcgcaaggggaaaaggaaagggaggggtgttgggccggctagggtttcctcctttgtttttttttcttcttccttttcttttcttttgttttcttattattccaaagctattttcacatcatgtcaaaacattttgaattattttaaaattttgagttcaaatacactcatcacaataaatagaatgcaaaggcatgcatgctcaagcatgttttctacgtcctatgatgaattttagtttaatgaaaaatattattttcctatgtttcatgagcacaaaaattcataattaaatcattttagctctatttcccacaaaacaatttttagggtgttacaaatctaccccccttaagatgaatctcgtcctcgagatttggaagatggtgatcaaagagatgtagatactccgcttttgaaccttgttcacttccttgagtagctctttcttagtaaccattctatggcctttgtcactccgaacatctccatcaatggttcccaagagttcagcaatgtaattcgtatagataaggttttttttttactcatagcttatctggggtatatgttccttgcccatccatttaaaacctgatgcatttccaaccatgatatactcaactttctccttattactttcatcgtcccatttcacaatcatccttctccttcttccaaagtgagccctattaatttccaaatttgtagtgttagtaatatcactcaacctccgcacacaaatcctcaaatctaggtgttgtccaaacttttcctagcacactctttatgataagagctttggcatcgacatatacttctccataatcccaccactagagacaacatattcaatttagagaacttagttcactcaaaacttactagccatgcatggtgaaataataaggtttcataactctctgaagaatcatccgtagatgttcgatatctctttccaatatcattaatgtcatcttgtcttgggcatgttggaagttgaacctccatttgataatagctcaatgtggagaccaatcttgacgaatacctgaactcattggtgcaaagagtaaccactcttgagcaaagatatttgtggttgacagggagttgtccaccaaaggaataacagatcttccaaataaaatacttgaacacataaaacctttgtcttgcaacttctatagcttggctaccccccttaagatgagatcagctaggggataccaaggatggcttgaacattcttatgagtaggttaactaccataaaagagcttcttatatccaagagaactcatatacatagacaagaacaagaaatcagaaattcctcgcaagatgaaaaacagcaacttagtaaaccagctacaactaatgttccgtcaacctgatagagttatggtctacactgctggaaagcttatcaaattctccacaactttcttgttgatcacttacccatattcgggcgttaaaataaggtttgataatccaacataaaatctgtccaggaagtctgacaacacagacacagcatcttgaaacagtcatatcatgagccatagaaaccatataatgacgatccttacaatgttgaaaagcttatgaaatcctctgaaacttttgtatacaactttttcccagattatgaagttaatttggctgaaattaggaaatactaggactgtccagactttgaaatagaacagaaacatccaattgcatctgtcatatctcaggttctacttatccaaataagttgtagcttataccgttggaaagcttagaaaattgtctacaactcttctatagaacacttttccaaattctatagttatatttgtctagaacagtaggcaaccgaactgatccagattcctgacagcacatatgtatcatcttgtgatttttgtaacttccaaaccataatagatatgagggtgatccttgcggtcagagaaatatcttgaagtctagttgttcccagaaaaatttgatagacgttgcatgatcagaacttgagatacaccagaattattgcagtctgcttcagaaaacagcaaaggatagaaacaggatataaccaaacccaactacttatttcactactccttatgccttaggcctataaactaaatgatatcgtggagaaaacccacaagatcattgcactcgttacaaagatccaaatcaatcataagcataataacaaaccaaaccaagcatcaaaggttcacacttcaagcattaactcaacttgcggtactatcgactaactagacttaaaagatttattttataaattacagataactatacaattagttatattttttatttatatttaatattttatatatgcgtttaaatatttgatatgacgaaaaatctttaaaaaaaattgagaaccgaacaaggcctaatactatatcaaccccaaagccatgatagtttcgttttttgccttctggctgaagccgccacacgtcatcgcaagcagtcatgaatttttgaaaactcaccgctcgtacgagaaaaaaaaaagattgggtgggaaactatccccgccgtgcacacatggccgcacaacatgaattaattcatggctgtacgagggccaagatatactccagtacgtaatagtgcagggcgtcgtttctttttttttttagaaaactccaggctttgaggtggtatcaactatcaactgcgagctgcttctttggaactaactcgtctattggtgaggaggtggtgtcgtggtgaccatggcgcctggcctcttggccgccgccggcgtggtagccgcggtggcgtcgctcgcggcccacgtcgcgctcaactgccccgtgcagccggtgccgtcgactccgcggccgcccactccgccccccaacaacctcctccaggttaacgaattaatcgtccggcgagaaatccttgctgcccgtcaactgttgttgccgcgtttcgtgcgcgttcgtgacgctgacgcgcgccgtgctgcagaggcttgagaagctgggggaaggggcgctggacgcgccggaggacgtgtactttgacgcggcggcgggcggggtgctgtacacggccaccagggacggctggctgcagcggatgcacccgaacaacggctcctgggagcggtggcgcttcgtcggcggcacggggctgctcggggtcgcgccgtccgccgacggcaccatgctcgtctgcgatgccgacaaggtagggtacctacctccgccgacggcaccatgctcgtctgcgatgccgaaaacttacacttgtcacgatgaatagcaccacagcagcttgaaacatgtacggaagggaagaccgattaaaaaatgccaacatttgtttattactactgtatatgtaattgattgagcagggacttttgagagtcggggaggaaggagtgacccttcttgcgtcggaggtcgagggcaccacgatcaggttcgcatcagttcccaaatttcggatcgtgcggtgccactccgtaactgttaagccacccctgatttattttcccctcgccatgcgcgtgaccgttctctcgcgcccgcgccgcccgccggccaacaccaggttcgcggacgcggcgatcgaggcctccgacggcacggtgtacttcagcgacgccagcaccaggttcggcttcgacaggtggttctacgacttcttggagtcccgcgtcaccggccgactcctccggtacgacccgcgcaacggcgagacgtccgttgtgctcgaccgcctcagttgcgccaacggcgtcgccctgtcgagggacgagacatttgtggtcgtctgcgagacgtggaggtaactgaaccttcactagctcggaccatacagtacatatggagaaccaatcagatgtggagaaaaaaacatgcaggttcaggtgcctgaaagtgtggctgaaaggggagaaagccggcaaggcagagacgttcgtcgacctcccgggagctccagataacattcgtctcgggtcagacggtcatttctggattgccctccacgtcagccttccagccactggctcccgcctcctcgcatcatccatgcctaacttaccaacagcatcacctgacagttttgagtttctggtgtccaaaatgcagctgatcagttcgccatggctggatttcatcacgcgctggaccttcacgaagagagtggtggcctcgttccccgtgctcctcaagtggagcaaggcaacgatcaagggtgccatggtggctcaggtgtcggaggatggcaacatcctccgcgtgcttgacgactccgaagggaaggtgatcaactccgtcacatcggttacggagttcaacggggacatcttcctcggaagcctcgcgaccaacttcgtcgggaaattgtctctggtgcaggtgacac

SEQ ID NO: 4807 - DNA, 868 bp, Sorghum bicolor
  Intron number 9 from transcript Sb09g026144.1 (locus Sb09g 026144) derived from phytozome v7.0 (chr-ID chromosome_9; pos 55480124 to 55480991)
aactaaagaaagaggtgagtaattattggctccttgctagaatgggtgaaattagttttagtgtactctttacatcaattgttgtcaacaatctaatactatatttgtgttgatttgaaagcaagcatattttttacagaatacttttttcagtgtctttctcgagaaccatggcagatgttactattctcatatatatatatatatatatatatatatatatatatatatatatatctgaacaagttcttgtactcttctgtttattttgatcactgcaatataactgcttgtatttgtagtttggctttgttgtggtttgcaatataatttttgcactataaagaaataagctattgacaatggtgtttgaccatggtttatttgccatatgccatgaaattgcctatcaattatagttggtctattggaccagttgcattagattccaaaataacttgttagacaaacatgaagaactggattcttcatgttatttgaggcgtcacctaggcatccaggcatgccccctaaggcccgaatgacacacacaaggcaccacaaggcccgctatgggcttacactgtcacttaggcagtgcctacgcctcctggcatgctcccaatgccataggtgccacaacacgtaaaaaccatgtgtttcttttgttcagttactaaggctgttttgataacatatatacttatatacttatagataaaacttggtggggtagaattactatattggtcttgttcgctcactctgttgatgctattttttttttctgttgatgttttatgttagctataagtgtgtactaatgactaactgttcctacctaggcaaatactttatttaagcggat

SEQ ID NO: 4808 - DNA, 574 bp, Sorghum bicolor
  Intron number 2 from transcript Sb05g004610.1 (locus Sb05g 004610) derived from phytozome v7.0 (chr-ID chromosome_5; pos 5839583 to 5840156 reverse strand)
ttctacaagcctggtatgtgtgtttctttgattttacattgttcaatttggtaggtcaactgctgctgtttactgttgccattgatggttctgatgcaaggtatagttaattgctgtgttagaatgaccttttttttagtttgttattaaaacaacggcacttgatataatgtcgtggtcaagtctgatggatttggcattagtgctttctgctcgtttgtttttcacagaatgagaatgctatctgtcatattgatgacaagttgatattattatttgattttacgagaatggtaggagaaaagatacaaaactatgttgaagctcccagtttcattttggaatgggaatgagttactgaaactgttaatagaagcttacaagaagccatttgtgtttttgagatagtgatttatgaccttctactttgatgtgtttggtacaatggtacttgcaattgtactcggtttgactcttgtgttgctagatgttctcacttctcagtgccccttatgctaagattcttgatgatgcaagctgctcatttccatttccccaggtgataaattctctg

SEQ ID NO: 4809 - DNA, 926 bp, Sorghum bicolor
  Intron number 2 from transcript Sb02g001710.1 (locus Sb02g 001710) derived from phytozome v7.0 (chr-ID chromosome_2; pos 1596338 to 1597263)
ctgaagaaggtatatgcttaccatgtacatctagcaaagttcactgaatcacactttaattctgtgtctctttatgatctatttaccgaacactaagtttgatctctttccttgctcttctatacctgctaagtattctctagaatgcagtcttaaatcctaatcagtagtgtactcctgtgtgtttgcaaagtattagttgagtgttagaactaatgtctgcgatcactatcagcatttcataggattccatttcattgaagtgctatttttcttaacattatttgtgctattttagtatttgagtaggagatagcatatatattgatcatatttcaaattggacctggtttaatctattttcttgtatattgagtgctaagtatggagtgttacaactcatgtttttcattgcaatcagcattcagttggttcatcaaagtggtttgttttccttgaacaattttttgttgtctttagtaggtgtgttaggtgataactgataactagaaaaatcctttgaatgctcatgtattttaaataggtctgaattttgaaattctattctagatttgttattaaatgtctttgtacatgaagagatgctagtttaatcagatatgtacctttggtgcgcttgtgtcatttgattcttacgcaactagctgtataatcatttttcttgcatggaccaacttctacttagattcctgtttcctgttattgtgttttagtaacttattatgacttgcaaggcatatctatttgctttctgttcctgatgtatttgtttcttttaactagcagtccagtgctaacaatacccaggctgaattaatattgagtaaattgctggttatgttccatctgttttctttcttagtgtgataaatattgatacagttcattattaggtcaaaactcaa

SEQ ID NO: 4810 - DNA, 1242 bp, Sorghum bicolor
  Intron number 1 from transcript Sb02g032435.1 (locus Sb02g 032435) derived from phytozome v7.0 (chr-ID chromosome_2; pos 67211680 to 67212921)
agcgcccaccaggtgagttctcaaactgtaacctactacttggctattgatgcctactaacttctaactttttgcaaaaaaaaatgggtgtttatgtgtacacccatgcccatttactagatccgcccctgatttgatggctactaacttctaactttcgcaaaaattattgggtgtacatgtgtacacccatgtctctttactagatccgcccctgcattaacctgtgattgctctgctaatagagctattgtgcgttttactgattttttaatattcgagtctacagatctaattcattcactgttaggcaatgttggagaattttggccctctttttatgtgtgtgtcttgggtagcatatagttttttttcgagtagatctaagcagatctggttagttacatttacaaatttaacttaaaaagcacaatgaacactagatcagtcaaatacttcaccctgtcgaaagctactgtcactcacaatttgtgaggtcactgttgtatcgggtactagttgattgtgcctgaggatttttttttaggttgtgagtaatttattgaggatttttttaggttgtgagtaatttattgattggggcacgtctagagtaatttattgattggggcacttctagagtaatttattgattggggcacttctagagtaatttattgattggggcagtgctggcacaaattgaaaaatgcacacatggaactgatctgttcatcaacattagttaggttttagagggctgtcttcattctcaagtctcaagttgccacaagctctcatgtacttagaaatttctaagccagaaaccccagataattttgctgcccccctagactttctaaatgtgccaccttggttactgctctttctttcactttatttttctttttagttgttgacggatgattctcacctatatatctgattgctttatttatttttttgtggagtatgttgtgaaatattctttgctttgttaacttcatcttttccttctaacgttggcttgtgctctgtgctctgtgctgatgctttcttaggtgctctttctttctctatttttttccttttgtagttattaaccgatgattcacacctatatatctgattgctttatttatttttttggagtattttgcgaaatatgttttactttgtttatttcatcttttccttctaacgttggcctgtgctctgtgctttcttaggttcaaactgtaa

SEQ ID NO: 4811 - DNA, 5791 bp, Sorghum bicolor
  Intron number 7 from transcript Sb05g007260.1 (locus Sb05g 007260) derived from phytozome v7.0 (chr-ID chromosome_5; pos 12906863 to 12912653 reverse strand)
cttgtaaaggtccacttgcagtggcccagcaagaggttctttctgcaaccttattctcaaatggatatgctgatagttccgtctactgaaatagtacctgatccataggattttgcatcatttaaagaaacgtggttttgttagcgcttgattattttaccatttgtttttttacttgatttctttaaatattttctataaaataatagaactaagcatctaagcccttcatgctacttatttagttggtgtacctgttgcttccttgtgggtagagcccatacccgcaatatgtgggtgaggctgcatccatctgtgctctattactatcttgttctcttcaattactatcttgttctcttcaaagttagcttcactggttctaatcctgaattcctcgctgataagcattggatattaagatgttactgagtgtaggttgtgtaattggtggcaactggcagtgaaagcattgagtattgatgtgttgctgagtgttagttgtgattgtggatggtccaagggagcaccttgtggaatatgttagcgtgtgatgattaagatgacaagtgatggtgtgcaaaggcatagcgttggctaggcaactttgggtccccaacgctttatgcaacaaagggctgaccagtgcgagtagtctcaatctgtggcgacttgtgatgatgtgaagggcaactagagaagtccatggggcaagagttaagttgggaatgtcactttttcattgcatgcaagaggatagagctgtaggattaatagcttacttttctctataagactagagaagatggcatggagattgtccgttccaactcaatcaaattggctggtttatggaaactataatttgttggattgatcctattaactattgctttgtttaaaaggagtaactaagtcactaatataaaaagcatgaaagggtgtttggttattttaagtagattttgtactatacattttttaatatgctaattaactagaaactgagttctatttgaaattagtcttaaaagtgaatatttatagttcatatagaaataaggggcctagtagagatatataaataaaagaaaataagggactcacacaaagcaactagaagggagtttgctggaccctcaaaaggatggtctttgttgaaaaggctaaacaatagttttttctttttccttgtggtatggactataaagggtagaacaccttgtttttttctcattcaatatcattcaatacaatgcatttttttacagtgaaatactacacgtacattacatccatagtttttcgaccagctggtgagcaaatgtggtaatgaagttttgtgatagcagatagtgataagcgtgacatttgggtgaagaaatgctctgctatgctaaaaacttaaatcacattattcaaaatcaacaactccaggatgtgtttgcgcttgttgcaatttattttacttaacttttaaaggtttattgtgttgcaaatgctggattgacatttttctggatggtactatgtattgttctaatgctcatcttattgtttaatgctaatatttagtatatatgctataacagaaatgcatagttatgcctcctaagcctaaggatgcattccgctatgtctacaggaggcgcaaccggaaccatggtagcgggccaacccaatcattgggtttcgaacagcattaaaattggaaagataaatattataggcatatttgtttgttgaatcgttactatgttccaagatttaatacactatttgattttcttagcataattgttaggtacttgtagataggacaatgtggaattggtccacagaagagagagagcttattataagtattgtgagaatgtgaatattgtggatattggattatctgtattgagccctgtgagttggttaaacaatcatagagatagagatggaaactaatcctatcctaccataacaacttggattctcatggatccttgccataatcatagcatgagcaatgtgaatgcttagactagagtcgaaagcgacaaggttgttcaagtagatcatagcctctttttgttgccaatgttgccgagacctatgtgttgtttacatgccttggaaaacaaatttgcaggcctaaggcaccaacatgagcacgcgcgtgcaaataatcaacttgatcttcattgtatgccccactagcggctttgagggcggtagatggtgtttatttggatagtggatgtgttgcattgagcccttgggtagtttatatatagtacaagacttgggaggcaagacaaccacgacatatgaactaccaaatatataacatccctccacagtcatagcgggagcattgcagtggagaagagaagccaaaggctaacatccgtcccctcagagtagaaaccaacaaggagctcatgcgattatagccctttgtgccaatgtcgaggtagccaaacgcgagggtgcaaaaggtatggtcgaagaagctatgctggagatagccgaggttgacgtagttgtgaaatggtcgccgatgtcgagacagtcgcacatatgaagccgtaggcgcacaagaggcgccatggtggcgacgaagatgcgtcgaggcaattgtcgtggaagggggtgatgccgagatcatcgcatttagggccagcgtggacatagaagaaaggtgacgatgcaattgaggcaaacatggtgggaacgggagggtcgatgccgaagtcgatacagtcaagccacttgaatcgagatgtatgccaggtttgccagacctagcaacatgttggggatgaaagcacacgctggtgttgccaataccaggcgtacaagagagagggctccaaccaggagtggttgtgttggatgaagaaacaagtgctggaatggactcttccaacccgaaggtgtagttggatggatgtattgcattgagcccttgggtagttcatatgaattacaaggcttttgaggcaatgcaactgtagaaagataggaggggtgacctttaatatatatagcccaatggcctaggggtacaacatgtcccaataaaacgtatacaagactagactgtatatgtctaatacccgcccgatgtcgcagcgggaagtaagcccttgggcatgatgttcgaaaaccgacaagtcaacgggacatggagcactcgaacctgtcccaaggcaaccttgttgcggatgaagtgaatgtggatctcgatgtgcttcgtgtgaagatggtggacaggattagcggtcatataggcaacactaacattgtcacagtacacgatggttgcagaacccatggtgccgttgccagtggccggcaaggtgctcgcgccgaggacaggcatggagccgtcactggtggttcgcatggtgttggagccgcatgggagggagagcgcagtggaggtggatgtacgggcgtaagggtttcacgcgcgtggaagaggagtcgtgtgatcgtggggaagtcgcagtgctcgcgtgggcgagagaggaaagagcgaaagcggaaggttacgatctaattgtgaatgataccatgtagaaagatagggaaacaccacacactctcttggggggggggggtgacctttcatatatatagcccaatgggctgggggtacaacatgtccaaatacaacgtataccagactatattatacatgtctactggcaactcacagatacatatgaccgtgtacgatacacaatacctaaactaccaaatatactctaaaaagatagcccacaactgcgaaaagagtgagtaacatgaggcagacccattgcctggctgggtagtgatctcaacaatgatggtgttgactcatactttggttctcggaagtgcgacacctcatggttgtggatggtaagatagtgattatctagcgttggatgacaactgggtggatatgcacttggattggcgcaaatagggcttggcctaggcgggaggggcgactgcctttggcctacgcggctatggttgagaggggcccatcagccgatatgtgcactatgagggatagcagatgcaaaacctgcagaaggttcccaggcccagtaacaaaaaaaaaatgtcgcatgtgtagttgccttgcctgtcggcctttagtatgttctcagtgctcttcgccttgccttgatggtgccttaggctcctccgtccttacttgttcaccaccatagagaatagaattggcagcaaaaccatcagcaagctagttttcttcaaggttgtacggattgtttggattgtcgccgattcttttgccattgcgtgatttgatctgcgtttatttttgctgtttgtcaggggtttgaattctgagaattcaattttgggtgcttttgcatctctagaattgggaatactgatctgttgctactattttagttttaggtatacacattgtttttcaagaattaagcatactattattattacctgctttatcattttataaatgataatgcccattcaccctagggccctcgaactatagagccggacctagaagcaagggacgcagaccggtctatgatcagggaaaaacagagaaaacctgatcttaagtgtttggaaaaatgtctacatgttagcattgcactgtgttgacagcataccaatagtgtgcaaaccccatgaagatcatccctttgggggtggtgcaatgttgaagcatggagatgatagttcaggagctgtggagcggtggcgattgctttgataccatgtgagaatatgaatactatagagaaattggatgatttctattgggccttgtgagctggttgtatagtacatgatggcttggatgttaagatatcctagagatatagatggaaactaatgttacctaccatgacgacccagatccttgccttatatcgaacaagtattcctattttaccggcatggccccaaagaaagatctaccaaatttcttatacttcctctggatgttaatacttgatgctccggctagtagccgacctaggatttgtagttgggtgctcccaatagaagcttttatttcacgtgtaactaccgagctgggtgtagtagagagctagctcagtgggttctaggcctttacttctaaatttaggtttggttaactagccaactaaactttatttagcttccattgaaattgacatgttattattttattgtagtctcttgtgttgtttgataccaacttcaaactgagcttactgagccaagccaaaagttgaaagtcattcaaaatcacctaatttgattttaaagaaaaatgagttcaatcacaacatttttgaaaccagccaccaagctggcctgctgggtgtataactattcctaggtgctgcctatgggcatgcctaaaacctttgttcgtctatcttgagtgattggttaaccaccttgttgaatgaagaaataaaaaaataggaaaaactaaaaatgaaagatctagatagggaagtcagttataggactaggaatacaaaattttagtgctatctttagaaagatggagtacaaaagtaataaatcataaataaacttgcacgtatttgaagtatactggtagtagccgcaacatgcaatgtggttctaggtcaatgaagtgtttatctggcataatgttacaggataacagcagacgctctatagtggtaaattttgaaattttgatcattttacatatctaatgaatttattacttcttgcagaaaattattgaagatctggcgaaggactggaagct

SEQ ID NO: 4812 - DNA, 1241 bp, Sorghum bicolor
  Intron number 1 from transcript Sb03g039450.1 (locus Sb03g 039450) derived from phytozome v7.0 (chr-ID chromosome_3; pos 67135734 to 67136974 reverse strand)
ccaccgacgcggtaagtgactcctgcgcatcggcgtccccatctgttggactgggaatttatgcttatgatggaagtattttgtgggtttaaagcttgttcggaagttctggtgttccgtacttggatcgtctgatacaactaagattcaggatgttaactaaccgagcagagacagtgaagtgtgctctcgtgagtagtagtcggtgttctgattattctagtggtggctgatttggtcgaagttttggattaagttacttctagttgttggagagtggcagtaaactcatagaaccatgtgtggtatacagattttatatttcttatgaagctagctcgggcatgtgtgtagtgaatgacagcaccaaaccaatgacatttcaccagttgattacctgcttcagattgtgggggtcatggaatattattcaatcaacagacaatggttggcttggtcagagacatgggaattttgtcagaataactggtgtgaccgataataggcacgtctttgcatatcacctttttgtgtgtagtttaaaaacatattgtaagatacataggcttatgtgtttacatggtccttacagaggatttgtgtaatccacatctttttgcgtttatagcaccctcaatgcttggcattgttctcgatgaattgccaaatttgctgtagttaaaaaacagaacaagtttcctgagattattattgaaatgcatggaacttttgtaaatcaaattaccttctcaactcctagatactcggtatcttaggataactaagtgagactaatttccctatagttcaaggaaaatggcctaggtctatggcagataataacatatgcatctgacctgttgtatcaatacccttgtacctaactctctcggtaagaaggcatatgtgctatgctatcatcacatctgttgtgtaacctatgcaaattttgtctgcccttgtggaatggtttagggctggccggctggggtaatgatattttactgtttattggatttgctgtgttagtatacataaggtgtcagctggcagatgttaaagtgtagtatattctgcatggtagaaaattgttgttttatttattctattgatttgaaatcgccattttaacttttcctgcacctatttgcatgttttttcttaagttaagtgtggatgtttcgtatttgtgtttcattttattcatagtgatattgctaacttttgtagctagcaactgt

SEQ ID NO: 4813 - DNA, 1948 bp, Sorghum bicolor
  Intron number 1 from transcript Sb01g022180.1 (locus Sb01g 022180) derived from phytozome v7.0 (chr-ID chromosome_1; pos 27258489 to 27260436)
cggtacaggtaagcagctactttcgattgtaattttccaatcttggttggtaggacatggcatttcgtcattttggattgcccatttgtcgtttgtttgcttgtggtagtgaattttgactgattttagggtttcttaccagatacctagatgctcgagcaatagctaaactcatgatgagaatgtgcatctattcaaccaatttgggcacgttagaattatgaatgtgctatcacagctattaaccatgcagaagctctcttaatatttaggtgaagagggcaagtctaaaatatgctgctgcttgcagtttagataggtcacatagacagattttaaggttcgaacatagttgggaacagaactggctgatacctgttttcgaatggaaccatagttcatcagatgtcttagatggggagttgcggacggagtcagctagtaggcgtataattcgatggacaatttgacaagccatctgatttaaggtcagtcttagatggggagttgcggacgggggcagctagtaggcgtataattcgatggacaatttaacaagccatctgatttaaggtctttttgaatgttggaagctgaaaaatatgtggttagaagttagaaccatagacatctagataggagtcatcacaagaattttattttgcactgtttgccttttaatacatcttacctcaatagttggcacattactaaatactgtctaactggctttaggtcatccagctaaaatttctatcaggacccaatagtggaagcaatttgctccctttgtcagaagagttgatgtgaattgagttatacattttcgctactcaagcacaagcttatggttcatatgattctatagggtgggttgttccttgaagtaaacacaccgttaacttgactagttgaacctcaattgtggcaatcctgggtctggactttaaccttaacctgtttctattgtggtgcttggttctgcagcaaatacttttattgatttaacccgcaaccatgtttttttggttggtattcattctgggcttttgattccactttacttgggggaatctcatgcgtaattgattctttttgtactccatccatttcaagaaatctagccatcctcgtgaacataaaaccttttttgtcataggcaaattgagaaagttattaataataggaaactacttaattttgtacaacaagtattcaagtaatcaaatcatatgcaagtttgttgtaacgattcatatcactgtgttcgcactccaaagtacgtttaatatgatatcaattcttgaagcctacgtattaacttgtgtttcacagcactcgaagcagcagaagtgtgcttttgcactggattgaccagtgctagttgtatcacatgcatgcatgcaaatgtgaaaactaatccatccagctcgggtgacgtggcatgtaaaacaaacacgagcacggcacccaatgctaaattaattctcggacgtgttgtgcgctggtgtcttggtatctgaagtaacgctcgtaacgcctaaaatagagaatgtttattaacttatgtatattttgattaaaaaatggcaggatcaaaatcagctggttctggtactatgaattaaaatagaattcatgcgcgcgcgcgcacacacacacacaggcagttgagacattgcattgacttgaagctaacatatttacaccttgccacctgtgcaatgttgaccaaaatattgcatactcaagttgtcctgacaaactggtttttgagctgatggtaccaaatttcaatgagctcatacttgcaacacatcagctccttagagggcctcttgatttttcaggatttttttgaatttttctgtatgtctaattgtggttttgttgatttggtttgtttcttgaaggtaccgcatacagagtgatcggaaagtccctatct

SEQ ID NO: 4814 - DNA, 1617 bp, Sorghum bicolor
  Intron number 4 from transcript Sb07g004120.1 (locus Sb07g 004120) derived from phytozome v7.0 (chr-ID chromosome_7; pos 5215581 to 5217197 reverse strand)
cccagtgctcgttattcatgtaagtgttctctaataggatatctagcccttgtctatttacttcattattacttgtctgattggacaagtagcagtgaatttcaactaacatgcactgatctcttacgtgccattcttttgtacattttaccactttagcatcccttctgatggcagtgtgctgttgttgttcctgctacactagcagtgtatgtattggagcagtaataatattactggtagttgtgatagtgaataaattcattactcattacacactagttcaacacggcatcaaaacgtcctcttagtagaacagcaatttcatgtaataccttttttatgcaattttagatatgggaatcaaagatgatgaacagttgaaatctgtatagaagaaaatccatttaatatctggaatccctttgatcaggttctctcctctgaagtcttgctactcctagcaggacaattcatcatcttggtgctaattcttggcttttgaaatttttctttaaaccaaatgttttagccaatgtgtggcccagtacataggtttagataacggggtaacctccagcctctacactaaccagggatgtatacaataatacagccataggtagatggaaaaaaaatacataggtggtggggggaaaacagaactacaaaggccagaaacaaagtcttcattcagcctgttcgcttctacttgccgccgcaaacgaacacctgtgcagcactgttccttgtgctgctgttgcaacagccgcagccgactgttccaaacaggcccatatttcaactgaattcatgcccttttatgggctgggatgtcactagcagagtagcagttttagttccctagtgtgcaagttgtgcacatgtgatagcctcactctatgcccgtgggccgtgggacctcagtgacttgattcagcctgtaacccaaagaataattgggcattggctgttctggcatgggtggctgttggcctttcactgttcctgtcatagtgaacaacttatgttgtcttggctgagcccaaccaaatttatagccatttcaagctagtaggcccagaagatcaggatttttctggcccaaattttgcacaggcctaaatctacaggctacatctgagtttagttgtttgttgctgcctgcaagtacatattcttagccaatgatctcaaaacatgaaaggccaaatcgtagggcctgagccaccagtttacaggaaacagtcctgttaccagggttttacagtaatactatttcccagcttgtctgacatattacatttgatttgctcttacttatttacagtttcaggctgtcagcattagttagttacacagatcataggcatttcagttttacctagatcacttgtacaatcaatggatatatattttgggtgctaatttgtattatttagtttcgctagaccctgttagaacaaatgaacaatcatgaaaaactggtgaacatacatctgaattcatctatatgttccatggaaatgctgtatgttttgtcatagggttgcttgcattccaattgtattataagatattgtctaagttacacccgttgatgtttgcaggggacgg

SEQ ID NO: 4815 - DNA, 14925 bp, Sorghum bicolor
  Intron number 2 from transcript Sb01g019480.1 (locus Sb01g 019480) derived from phytozome v7.0 (chr-ID chromosome_1; pos 21002580 to 21017504)
ccaagctcctgtcccactactcattctacacagtatgcacgcgcgcacgttgttaacttaattgcgttattcgatcttgcaagggttgagattattactagaatcgcttatacgttatttcttgcatgtagtggcgatcactctaatgattctatagtctttattgtgtagcatatgcatgtacgttggcatgccgttgctagtctgcctatagctagtcacattgatggcgtgtgtggtggtaatcgcctgtacgttacgtggagaaggtccttcgatcgatatcccctcttgcgttttcgcaactcattagaggtttcaaagaaccgagcctaatataagacgtgatgacgacatggatgaaaggcaagaaaaatatagtacataccaatgatattgtcagcagggtcagggtcacgtatactgactaaattattaactacctgataccaacgcgcgcgcgcgtgcgcgcgcgcacacaatcactgtcaggactggaaacagttggcgttaaattaccattatttctagaaagcatatgcatggattcggtagtgcgtacgtgagagggacttttcttgacttctcgggcgcggcaacggcaacagcaggccagggcaagagagaattcatgcagcaggcagccgggaaggttggagcatggaggctaccctagctagctagccaccttattattcgacatgtctggtttgctgctgcgggccggctcgcccaaatggtgattgcttggcgactggggccatcgacgaaatggcccgatcgataggaatgaagtcgctaaaagcagtcgtaaattaatgctccagagcatatcatgatatttggtgctgtcattcaatcagctcgttgatggtttggttggaagatggacgtgtgtagggggacgacactacttcgtgccattgacgtgcgtgcatgctgcactcgggcgggtagctggacagtgcaccacgcacgtacagtttctggacagctagtacagagggtcatcaactcattatattattgttttggatatggtccagttattaaattattatacagtactagctagtcattacgttaaattataagttattttaagaatcttatagagtaaaaacctcttaagtttgatcaaaattataaagaaaactacaaagatttgtgacatcaaatgagtatactatgaaaatatacttaatagagtatctaatgatacttactagttaccatcataaatattattatcttataatataaatttgatcgaaattgagatactttgactctctaagtcttgaaatgacttataatttgggatggagctagtactttataacacaactagctagccattctacaacatctgcgcaaaatgtcataaattattctatagctacaatattacagtatccagcagtagtgtcaggaaaatgcttaaatatgcggtgatttttttttgaactaaatactagatgatattaattacagtaaaatatcgcggtcaaagtctgtcttaacgattgaattgtgaaaagatgaaaaacacccgttgtgtgttatggctctcctttgggccctcgttgttgcgaacctagagaagcccttacttttcagttctaattgttttatctccccgcgcaccccactcacctgctcgatgatttaagtccagctccaatcattttgtagagctagtgcatagtcccgcattacttgcattggtcatccttcaagcaatcagccttgtcgagacagactgctcaagaatcatggcggccatgaagtgctccgactctccgagagggataggagatcagttttgctgttgttctaaataactggcaagtaaattttttgaattatacgtttaagctcggatgctgagctcagaggacacaagagagtttatattggttcggacagaatgtccttaatccagtcgtggtgcttatatgctacccgctctgtgttgagtttgcagtaagagttacagacgggcgaaagaggaagatggctcacagctctctgtgttggatgggtttgttgttgctatatgcgtgtgaataaagagtgttaagatgatcttgagagggtctcatgccctcccttttatagcttaagggtgggacactgggttatacgctgaaaagagaggagaaaaagaggaaaataagagagagagaaacagaggatgcacagtagaagaagcttcagtgtggttccattctcctcggttaatgggccctactagcccagtcgtcgaggatggaggatggcttcccacgtcgtgaccctattcgccacttgtgggaacagtagcgtgcctttttaccagtcatggccttcctgagccgtcgtggtacgtggcgtggcttgcggtatggtctacgacacctctgaccggcgccatatgcggcttaaactgcaccatgccgtttcgccaagcactattacaggcgtgcactcctaaacatgtcacgttgtggctgtagatgatgcgagagcgtgccaactcctgcatcgtgacatggctacagtcgtacgggctcccacgctcagagtagttgggggacgtcccgagccctcgacggacctaggtgttttttgcccaacctttagacttgccctcagccgtcgagcggggcagaattctcccctagggtcggacgaggcgaaacctacagtcattgcgcgaggcggggcccgttcctaagggatcgggcaaggcgaggctcgcgcccgagaggtcagtcgaggcggagcttgcccccaactgtcggacgggccgacgagacctcttccgagaagggctcaggtcaaattctggccatattatgcatgactttggtggtttattaagtccctcagtccgggtgctctaacctttgtacagtacccgacagtttcattacttgggagaatctcccaagtaaaaagagatggcaatcaggtagcaaatgatttggctacttagctaggcattctaaattcaccgaggtgagatgggggtatagttggccatgcatcccgtggtccgttgacccggcccggaggctaccgggcctgccctggaatggcccgagataccaggccgtgccaaggccaccaccgtggcccgtggcacggcttaggcaaagcccgacggcccggtgcttaatgacccagtaaaaaatgtaacctgttaattctcaaaaaaaaaatataggcctactgacccatccagccattctgagtggcctgctaagaaatgtaacctactaattcaaaaaaaatgtagaccgactggcctgctactggcccatctgtagcatcaggcacgagcttggtccagtggcccgccgactgaaaggtcctaatatggctagaggggggtgaatagcctatttaaaaattctacaaactcactagagcaagaggttagtaaataacaaagcgaagcattttgctctagcttctaaaggggtgtttgcaagccacctatccaacaattctagttgatataatctctaggcacacaagagctatgtcactacttacactagatagctacctaaagtttctatacaagtaagtaagctactctagtttgtgggaatgtaaaaagacatggtttgatctttataccaccgcgtagaggggatgaaccaaataaaatatgaagtccaatcaccgagagaaatccaatgaacaatcacaatggagacacacaattttcttccgaggttcacgtgcttgccggcacgctacgtccccgttgtgtcgaccaacacttggtggttcggtggctaagaggtgtagcacgaacctcgtcctcactaggacgccacaagaacctacccacaagtgaggtagctcaatgacacgagcaatccactaatgttgcctttggctctccgccgaggtaggcacaaacccatcacaatcaccgggagatggccacgaacaatcaccaactcgtgccaatgctcctccgctgctccaagccgtctaggtggcggcaaccaccaagagtaacaagaaaaccgcagctagaacgatccccaagtgccactagatgcaatcactcaagcaaatgtacttggaatcactcccaatctcacaaagatgaataatctatgaaggagatgagtggaaggtgtttgcttaggctcacaaggatgtcttgtagtcaagaatgccaagagagtgagccctaagccggccaacaactatttaaaagcccctcaaacaaaaagagtcgttggctcttttcactggacaaactgcggggtcaccggacgctactcagaaggcaccggacgctggaacagagcgtccagtgccccaaaagcagccacatgttagctctttgaacactgcgcgttgaactctaacggtaacctacagagcaccggacgcggtcaagttggcaccggacgcgttcggtgcacaccggtcttaaacacagagaggtctgcaaaacgcgcagaccaccggacgcacaccaccggacactccctgagcgtctggtgcttccagtcaaacacaccggccaaagtcagatagcaccggacgggaacaggagctcccctacgtccggtgttcaccgtctagtgcttaaccctagcaccacaacacaccggacgcacagcctctgcgtccggtgcctcagcggccagcggccggtgagtgtttcttagcgagaaacactcccgcgacttctccaaaatttcccaccggcgcaatagaagataagcacttcattttatcaaaaagcgcagaatcccgccgagctttatagtattcccctctttatagtacggctatctattctaaatgtgatcacaccctctatggtgtcttgatcaccaaaaccaaaaccctaaacaatacctttgccttgatctccatagggttttgtttttctctttcttcttttccaagttgagcacttgatcatcttgtggtcatcaccattatcaccatgatcatcacttgctccatcacttggcatgtaccaacctcattaagtctacacatacttagcatagaggttagttttagggttccatcaattatccaaaaccaaactagggctttcaatctccccctttttggtaattgatgacaaccctttttacaaagattttcaataaaattttcttagattcatgttgcttgcccaagcattttaccatgtgcaaaggttatggacaactttcataaacccaaattggtagcaattgctccccctacatatgtgctaagagtttggatttgatagcttgcacatatgcttgaataggaaatataggagtcaatttctaccaaatgatgctaaggtgtaaggaatggacctttgaagcgtgataccaacggagttgccaatgtataccatccttagcaccattagtaactagacattcacaaaactagaacaccccgtgagatcaacattataaacaaggttctagtaccacttgtgaaacaactaaaagtctagttacactacatatgcatgctagttcttcatttcatcaatcaaacatacaactagcatacaccacacaagcaaggtatcggagagaaagcttctaaagctaatgcaaatgcaagcaaccatatgtgatgcacaatcaaatgcaacatacaagtttacgagcttgctccccctacttgtgtgcttcaaaattttaattgatcttactcccctatcttaaatttttgggaaattctctccccctttgtcatcaatgaccacaaaggtgagctcaaattttagatagattggtgtgagaccatgtgaagtgagatcattttaccaaactggttcaatctagattacttgcctaagatatttaactcggtttgatccaaggacaagcttcttcacacctccaaataagggttatcttgtatcatgttgagttaaacacttatggctcatattctagatcaaacactaggattgcaagcccacaaacatgtcatatgctaccactagatcaagttaagcaaagaagcaatagtggtaccatacaagcatcaaattcatttgattttcatgaatgagcctaagacatgtaaggaatgactaaatgcactacacatgtccttagcaaagaatgaatgacatgtcaaacaattttaccttactttgctcgaaggagaggcatgtcatatattgggggtgcatcaacacatatttgagaagtcaagtatgttcaattcattccttagcttgcaaaacctcttctcatcaagtggcttggtgaatatttcggcaagttgaccatcggtgcctatactctcaatgcaaatgtcccccttttcttggtgatctcttatgaaatgatggcggacatctatgtgctttgttcttgagtgttgaaccggattgttggtgagcttcacgacactttcattgtcacatagcaatggcacttctttgaaattgattccaaaatccttcaatgttgccttcatccatagtatttgtgcacaacaactaccggtcgcaatgtactccgcttcggcggttgatagtgctacactattttgtttcttggatgaccatgagacaagtgatcttcccaatagttaacatgtgcccgatgtgcttcttctctcaactttgcatcccgcatagtccgaatcgaaatatccaacaagttcaaactgtgcacctttgggataccacaaaccaacattttgtgtatgcttcaagtacctcaatattctctttgttgctttcaaatgactttctcttggtgaggcttggaatcttgcacacatgcatacactaaacatgacatccggtcttgatgcggtcacatagagtaggcttccaatcatagaccgatacaacttttgatccaccatatttccacttgaatcactatctaggcttccatttgttcccattggagtgctaattgattttgcatcatccataccaaatttcttgagcatgtcttttatgtacttgccttgactcacaaatgtgccattctttaattgcttgatttgaagaccaaggaagtagctaagttctccaatcattgacatctcaaactcattagccatcacgttgccaaactcctcacaaaattcttggttggttgatccaaatatgatatcatcaacatatatttgcaacacaaacaagtctttgccaatcttcttggtgaagagagtggtgtcaaccttgcccatcttgaaacctttagagagtaagaaatctctcaatctctcataccatgctctaggtgcttgcttcaaaccatacaatgcctttcttagcttgtaaacatggttgggtttcttgtcaccttcaaaatcgggtggttgctcaacatatacttcttcattgatatagccattgagaaatgcactcttgacatccatttggtatagcttgatgttatgagcacaagcataggccaacgagatcctaattgcttccaatcttgcaactggggcatatgtttcaccaaagtcaagaccttcaacttgagtatagccttgtgctaccaatcttgctttgttccttacaactatcccatcttgatcttgtttgttgcgaaagacccatctagtaccaatgacattgtgatcactaggcctctcaactaattcccatacttgatttctcttgaaattgttaagctcttcatgcatagcattaacccaatcaacatctctcaatgcttcatcaatcttctttggctcaatgtgagacacaaaggagaaatgctcacaaaatgatgctaatcttgatctagtttgcactcctctttgaatgtcacctatgatatgatccaatggatgatctcttgcaatatttgttggttggagtatttgcacttgattgcttgcacttggttgatcatgagatgatgtactagcttgttgatcttgcacttgagtaccacttgtactagcttgaccactagcttgcacattagaagtaggaagaacttgatctttgtcatcttcaacatcaatcacctctctaggccttaaatcaccaatatccatattcttcattgcatcggccaattgagtgcctctcacatcatctagattctaatcttcctcttgagagccattggtttcatcaaactcaacatcatgcacctcctcaagagtaccactagccaaattccaaactctataagctttgctagtagttgagtaaccaagcaagaagccttcatcacatttcttttcaaatttgctcaatctagtgcctttcttcaatatgtagcatttgcaaccaaaaacccgaaaatatgcaatgttgggctttcttccattcaaaagcccatatggtgtcttatccatcattgggtgacaatagagtctgttgctatagtagcaagccgtgttgattgcttcggcccaaaaagaatgactcacattgtactcactcaacattgatcttgccatgccaatcaaggttctattcttcctctcaacaagaccattttattgtggagtgtacttggccgagaattgatgcctaataccaaattcatcacaaagctcatcaactcttgtattcttgaattcacttccattgtcacttctcactttcttgatggttgtttcaaactcattgtgtattctcttgacaaatgatttgaaggtcgcaaaagcatcactcttgtcactaagaaagaatactcatgtatatcttgtgaaatcatccactatcacaaatccatatttgtttccaccaatgcttgtgtatgtggttggtataaatagatccatgtgcaacaactcaaatgccttgcatgtactcatgatgctcttctttggatgagtgttgccaacttcctttccagcttgacatgcactacaaagtttgtctttctcaaatgtgacatctttcaagcctctaacaagatcatgattgactaacttgtttaattgtttcatactaacaagaccaagccttctatgccataaccaacccatgctagatttagtgagcaagcatgttgataattgagcttcactagcattgaaatcaaccaagtatagattctcatatctaaagcctttgaatatcaagttagagccatctaaacttatgatctctacatcatcaaccccaaatatgcatttgaaaccaagatcacaaagttgagctacggatagcaaattgaagttcaagctctctactagtagcacattggaaatgatcaagtcattggatatagcaattttaccaagcccattgaccttgcctttgccattgtcaccaaatgtgatactatcaataccattgtcatcatttggattgattgaattgaacattcttgagtcaccggtcatgtgttgtgtgcacccactatcaagcacccaatgccttcctccggctttatagtttacctacaaaacaaatcaatatttcttaggtacccatacttgtttgggtccttggaggttagtgactaagctttttggtacccaaatggccttcttatttggacccacaattggtgtaccaacaaacttagcatgcacacccttctcacccttggtaagcacataacaagaatcaaaaggaatgtaaggtacattagcaattttcttgttcttgttcattttattacaattaagctctaggtgcccaacttgcttgcatttgttgtaataccgaccattgctcttcacaaagctaggcttgtgagttgcaagggctttcttgcccttcttgggggtatagcctaatccctctgttaagagaaaacctttggctacccaagcactttagcaagcgggactcaccaccataggatttgcctagggcgtgagtgagctcatccacctctctcttgagagtctcattctcaacctttagtgaggtatcacaagtgacactaacactagaagtagaggtagagttagtggtggtggatgaagacctagatgaagagttagtggcaacaacaataagtgggttgggtgattctttaattaagtcacatgttgtgcccacatcacatgatacaacaacattttccttgttctcttctaataacaaggagtgagctttttcaagcttggtgtgagccttgccaaacttctcatgggcttccactagcctctcatgattagcattgagctcatcaaaggattgctcaagagatttaacttcttggccaattctttgcacttcttgtttttagagtgaataagtaaatcggcttgttctagcatgtccatgagttgttcattagtgaattcattttcatcatcactatcactatcatgttcatgttcactttcactttcactctcatcatattgtaccttgtggctcttggccatgaagcatgaaggagtatcgaagagtgatggcttgttgatagcaatgcttgcaagcgccttgtcatcatcactagaatcttcatccgaagaagcatcactatcccatgtcacaacataggattcacccttcttcttcttcttgaagaccatcttcttgtccttcttttctttcttctccttcttgttcttcttctcatgctcatcatgatcactattgtatggacaatccatcacaatatgattggggctcttgcacttgtagcatagcctcacatatttcttgttcttggagttgtcccttctctttcttgtatggtagcccttcttcttcatcatcttgccaaacttacggacaaagagtgctagtgcttcatcatcattatcatcattggagcactcgtcatcacttgattcttctttcttggccttgcccttgttcttgctcttggatgaagagctagctttgaatgctacactcttcttcttcttgtcatcctcatccttcttcatgaccccatcatcatcattatcattgtattgatcttcggtcatgacatctccaagtacctcatttggagatacacccatcaatccacctctaaagatgattgttctcaatgtcttgaacctcttgggcaagcacatcaagaacttatgaatgaagtcctcatcctttactttctcaccaaggctcttgagatcattgatgatgacttggagcctatagaacatctccgggattgactcatcatccttcatcttgaagttggatagcttatccttgagcatgtacaacttggcactttttaccgttgtagtgccctcataggtttcttctagtcttgtccacacttcacttgccttctcaagatctttgacttgttcaaacacttttgaatcaatgccattgtaaattgtgttgagagccatagtattgcattgtttgttggctctctcattgtcggtggggttggcggggtcaaggatcacaaaatcattctccgtgacttcccacactctatcattgattgatccaatgtacattttcatttttctcttccaatagtcaaaagaacttgtgccatcaaagaacggtggtttgcccccaacatggttgaacactatttgagccataatttgagcactgaggttgttaagccttcacaaacggtgaccacggctttgataccacttgaaaggtcctaatatggctagaggagggtgaatagcctatttaaaaattctacaaactcactagagcaagaggttagtaaataacaaagcgaagctttttgctctagctctaaaggggggtttgcaagccacctatccaacaattctagttgatataatctctaggcacacaagagctatgtcactacatacactagatagctacctaaagtttctatacaagtaagtaagctactctagtttgcgggaatgtaaaaagagatggtttgatctttataccaccgcgtagaggggatgaaccaaataataatatgaagtccaatcactcggagaaatccaatgaacaatcacaatggagacacacaattttctcctgaggttcacgtgcttgccggcacgctacgtccccgttgtgtcgaccaacacttggtggttcggtggctaagaggtgtagcatgaacttcgtcctcactaggacgccacaagaacctacccacaagtgaggtagctcaatgacacaagcaatccactaatgttgcctttggctctccgccgaggtaggcacaaacccctcacaatcaccgggagatggccacgaacaatcaccaactcgtgccaatgctcctccactgctccaagccgtctaggtggcggcaaccaccaagagtaacaagaaaactgcagctagaacgattcccaagtgccactagaagcaatcactcaagcaaatgcacttggaatcactcccaatctcacaaagatgaataatctatgaaggagatgagtgggaggtgtttgcttaggctcacaaggatgtctagtagtcaagaatgccaagagaatgagccctaagccggccaacaactatttaaaagtctctcaaacaaaaagagccgttggctcttttcactggacaaactgcggggtcaccagacgctactcaggaggcaccgaacgttggaacagagcgcccggtgctccaaaagcagccacgtgtcagctctttgaacattgcgcgtcgaactctaacggtaacctgtagagcaccggacgcggtcaaattggcacaccggtcttaaacacagagaggtctgcaaaacgcgtagaccaccggacgctccctgagcgtccggtgcttccagtcaaacacaccggccaaagtcagatagcactggacgcatgaacaggagctcccctgcgcccggtgttcaccgtccgctgcttaaccctagcaccacaacacaccggacgcacagcctctgcgtctggtgcctcagcggccagcgtccggtgagtgtttcttagcgagaaacactcccgcgacttctccaaaatttcccattggcgcaatagaagataagcactttattttctcaaaaagcgctgaatcccgcctcgcaagctcggcgggagggagagaggaacccatcctctctctacccttcaaactccacctccttctcaaagtgtgccaacaccacaatgtgtaaaccaacatgtgcacgtgtgttagcattttcacaatcattttcttcaaaggagttaagttagctcactaggttctaaatgcatgcacaagaacaatgacacctagtggcacttgataaccgcttagccaaagaatttccctctttgtttttctctttcttcttttccaagttgagcacttgatcatcttgtggtcatcaccatcatcaccatgatcatcacttgctccatcacttggcatgtatcaacctcattaagtctacacatacttagcatagaggttagttttagggttctatcaattatccaaaaccaaactagggctttcaccgacccacgccggcctatgggccgtacccccggcacgaggtatggtgatggcacggcatgaccggcaagacggcacgatacagacacggcatggcacggcccgattgccatctatagatggggagtgcacctccgtgtgccgaagcatcccttacaccggttgtattaatctcttgcatagttaataaaccatctttttactgaaaaaaacaatcagccttgcatcttgcttaataactaacctagtgtacggtcaggtctctttcgatcggtacagcagaaatatgataggcgctctacatctagcgtggccacattttttccttgtaacacattttagcatgcgttatattgtaggggctagtttgtagtttggtgccctttgcttgtattttaacttaccttcaaaggaaaatgtgaaagctagtagtcaactgacgatgtatatgtatattgagaatcagattacaaactattctaacataaaaaaaaatatcgtttagcagtatatatttagcatatcttcattattttaatttgaaaaccactaaaatctctcctgccacacatggttcatcagaaaaaaaaatatatataaaaagcataaaaacagagcactcgcaacatcaatggaagactgaacggaggatagaagtgagcccctacagtacactatcagcgtactccctataataaataaagaaaaggaaggtaccaattcagttaaatgcacatcttcgcttatctactactctatccatatccatcgcaaaatataggtgtcttgggattacaaaaggtccaataattactaaaattatatgcatgattactacataataatataagttgtctcaagagatttgcattcaatttatattttaataaaaactgactcggatgcaatctattgtaagaggaactgatggtgaaagtatacttctaaagacctccaaatcttatacacctactccctctgtctaaaaaaaagatatggaatacatgctgatcagacttttcaagtttaattagctttatagaaaatattagcaatactatttcattaaattaaatttattataaaaaaatatattccatgattcatcttaccaattatgcattataaatattattatttctttatatataattggttaaagttaaaaacttatataaaatgagccgaaggagtactacaatatgagatacgtggctcgcttacatgctatgtcatgttaatcctcaggtggagctccgcccttaagcctactctcacagagggggatgtaagatttcagctgaaaaatactagtttgtcttatctccctgttttctatagaaaaactattttaccaaatgtcaactttatcacagtgaagtttgcttgtagagacaaagccaaaagaacacgctcaatcaacttaagcagagttgtactcgatcagcgggggcctaataatactcagagttgacggttgcaaagatgttgctttcgatttgttaattaataatatcatcgtcatgtgggtgtcattttcccaacgtgcaggtaaacgagaactcggacaacccgtcctggaaagc

SEQ ID NO: 4816 - DNA, 2048 bp, Sorghum bicolor
  Intron number 3 from transcript Sb05g008460.1 (locus Sb05g 008460) derived from phytozome v7.0 (chr-ID chromosome_5; pos 15800036 to 15802083)
ggtccatcatcgtcaacgtcggcgaccacctcgaggtttgcatatgtgtactgttcatctacttcagtcccaaaataaatagtacgtattcgactttaatgatttaatctataccagtttatgctaataaagaacactatcagtgttcatagcactaaaccaacgttgatagattcattatgaaatatagttttacaatgtatctatttttaccataaagtataattaattatccatttcatatatctggttaaaataaaaaatagttttaccaaaactaaattgccattcctttttggcggagctagcaatcagttactcatatttacgcacattgactaaaatacatatatgttatcagctatatatagtcaattattatatatgttatcagccatgaatatgattttttgttctcaaatacatatactgctggtaggttgcttttaaattttgacttttcacaagtggagaccgatataacctagaaaaataaacaggactctcagatccaataggaagtagacaaatgcagagtaaatatgtggagcgagtcagcaggtacaaaatgtttaaactactaaactagttgttttacatagtagttgagttagtgttttgagacaaaatgctgatggagcacttatacataaattacaagttggaacagtgaggtgtccccaggtatgcatcatccacttcaacttatccaaggattaggtggctaggtcatcatccaacttaaatttcataataggtcgttcagtttaacaataataaaaacaactttccaatgtgtctacaccacacacttgtcaaaagcttaggcagctctatgtgtaactggtctcctcagacctgcatacatccgtccgaaaatatcttggtcggcgcagacgattcactagaaattgttatcctctcccattacatggccgacccaagttgtccaacaaatattgtaacttacggcagcccatgttgctatcatagtcaaatggaacctataataataagaaattgcaaacctaacggtagaagatatcctctagctttgtagcattgtattattaaaagttggtgaagcgcggaaggcaatacgtacagagagacttacatctattcttttttagcaaacctagcgcactgacatccagccctaggcctgtgttcggacgggctccatcccgcctcccgctcacgtaaaatcgaatcaaaatagaaattgtgttcattgtgcccacacaaacaggaaagcacgccccgcctcaccccacatcaccacatgcctatgcccctgcacccaactgcgtgatgcaacagaaggtgcaaggaggagagatacaattgtaacatgtctctaaaaacaattataatatgtgtaacatctcccattatacttttgcaccatccatataattcaactgcaacatatacctctaaaacgtctgaaacaattgaaacataaaattgcaacatatggagagagagagcgcatggcctagggagcggtatggtcgctagatctgagagcgttgagacctccctatgggggaggaaagccagtgtcaggggagggccgccgtaggggtgggggaggaggacgccggggtaggggaaggagccgccaaggttgggagaggaggacgtcagggtgcgggaagttgctgccggtgtgggagaaggcaccacaagggtagagaaagaggatgctgcgatagaagagtgtgctgccgccagcttgggatggaactagcggcatacaccaggagaggatcatacagctgccgttcatgggaagatcgacgcacgggatggagaagcgggtgcacgcgatggagaggaacagagtcggcacacagctagaaggaagaaaaatgcatcattgggagaggaggacggtcgcccgtagccaattaatcattaccgattcatttttttcaggatacaaaggaaagtttcctgtcatgcattgaatttttacttagactgatgatgcctaattggtagcagatctacagcaacggactgtacaagagcaagttgca

SEQ ID NO: 4817 - DNA, 6860 bp, Sorghum bicolor
  Intron number 2 from transcript Sb05g006980.1 (locus Sb05g 006980) derived from phytozome v7.0 (chr-ID chromosome_5; pos 11966496 to 11973355)
gccgtcgccaacgccgtcgacgccgccaaggtacggtattgttcaatcgcgacacactaattaataatctgagattgttatattattttatttatacagtactacggtattagctaaggctttgagatcatgcatcatcatcactaatataatatatatggaatccaagtagatcgatgtctagcaaactgattattctaagatttctttttcttttttccattccaaaagtagtatagggagtaacttgtttactttaggtcgaaagctagtaaggctgatgaagtgatcattaacacaacggaagggctgtgcttgtggctgtatgtggttaataaaaagctagcgacctgctttggtagtaactttgctctaggactatatagcactttatgtccatgtgacttggctaatcaaaaccgcctttaattgaatgcaatgcgagtactatttgtttcatctgactagctaggaataatgcaaatctacccaggccaagtccgtccacatatttatttcgatcatacatagaagattttttttcttctaacgacaagagagctatatatatgttactatcgttatgatcggagaaaattttgtttcaacaggacaacatcgacgaaacattttaagttattttaaattttttagagtcaaaacatcttaaatttaacaaactgtcaacatttatatccctactatttctctaaattttaataaggccgtcagctacctaggactcaaggaaaaaaattaaacagaggaaaaaaaagtagtactatcattttttttgtggtaataaaaagctggcgtctggcggtgccggtgaatgaattgaaaggtcttgttagcaaaaattttcaagattccccgtcacatcgaatttttagtcgcatatatggagcattaaatatagatgaaaataaaaactaattgtatagtttatctgtaatttgtgagatgaatcttttgagtctagttactctatgattagataatgtttgtcaaataaaaacaaaaatactacagtgggaaaaacggaaaatttttgcgaactaaacaaggccaaaatatggtggtagctagatcagatgtcagtaagtaattgtggctcgtgactcttgccggtaaataaataaaattaaattaaaacacatgcaccgtggtgtgaagggaagccctgctgcgacgtactacaccacccgtgattctaaagcttttttttgttgggaagcaggcaccgtccatgggtcagttgtaacaagagttctgtgagtggccttttcagctttatttgggaacttcaaaccgaaaatgtatcttcaacacaatatctatagcctagtatcatacagaagacctattttgagtatcagaagaggcataacccaaatttgggtgtcttttcttctcgaaacccatttgtagagagtgttgtcttttaggtcttgttgttgaagaagcgtatgaaaccttttacgtgtagcgctacccaaaggacaaatgtgtcttgtattttggatgatgattgttgaagatagtcttagcttgttactatggacgcttagaatattgcctgacagtgggttgagatccaaaccaaacccacaccaatccaaaacatatatatgtgaaagtcaaatccaaaccaaattagactatgacttcaatcatccacaccaaaccaaaccatttatacgctagacccattaaaatatatttccaacccaccatttcaccggcacctcatgctattgtttatatttagccataaacaaaagtaaaaaataaatagatagaataaaaaatcattgtaaactctattatttacagccaaaccagttcagcccattttaatagggcccaaaccaaactggcccaacagccttttcagcctgtttcaatccaaaccaatacagcccaaaagtaaaaccaaaccaaaccagttttaaccgaaactattgtcaggtttagctggaaatgagctttatggtgaagaaactaaacgtttagtagggctacaaaactgaaaattgtagtcgtccacaacaattgcaataacaaatacgtacatgctgtacatggacgtggtttctcagtgttttcttgaggacattgagcaaggccacacacataatatataacaacaaaaaggctaaaagaaacgaaggaaaacagttaaaacctaccacaaggcgcgtacgtacgtacatttacttgcacatatgacatgttgaaacaattgacacctgtccctttgagcctattcgtttgactgaatttattaagcactcaataattttttctcttataataaatcaataaatagtactttcagccataaattatttgccgcctgaacacgatcgggtagttggttcctaaaactaaaagagtacttgtaactgtgtataatataatataagaaaagttaaagagagagaaaaaaatataaatggtcaagtaatagcactagtagtgacaagtgagcagtagatatatatattatatatgtaccagaaagccgttgtggtaggagaggacagaggagtaggacgactgtacgaggatggtggcactctgctacagtagtgattacctttgattaggttcgtgcgtgtgaatgaggcgttgtttagttcgtaaaaattttcaagatttctcgtcatatcgaatctttggtcacatgtatggagcattaaataaagataaaaataaaaactaattatacagtttacctgaaatttgtgagatgaatcttttgagcctagttactctgtgattggacaatgtttgtcaaataaaaacgaaagtgctacactagccaaaaaaccaaaattttgccaactaaacaaggcctgaattagaccttgtttagttcccaaaaaattttgcaaaatttttcagatttcccgtcacatcgaatctttagacgcatgcatggagtattaaatatagacgaaaataaaaactaattatcggaattgacgagacgaatcttataatcctagttagtccatgattggataatatttatcaaatacaaacgaaaatgctacagtacccattttgtaaaatttttttaactaaacaaggccttaatacaatgcaagtttggggtgggtagatgcgttcgctgcaggcgtgcatcggtgcatgtgaccgcacgttgagccacatgcatgtgctctctgctctgctctgctctgtttcgcgtccgctcccaaacacttattatggccttgtttagttcttaaaaattttacaaaatttttcagatttcccgtcacatcgaatctttagatgtatgcatgaagtattaaatatagataaaaataaaaactaattgcacagtttagtcgaaattgacgagacaaatcttttgagcctagttagtccatgattggacaatatttgtcaaatacaaacgaaattgctacagtactcattttaccaaaaaatttggaactaaacaaggcctacgaaactagacacgctgggttttaggccttgtttagttccgaaaagtgaaaacttttcggaactgtagcactttcgtttgtttgtgacaaatattatccaattatgaactaactaggattaaaagattcgtctcgtgattttcagctaaactgtgtaattagtttttgttttcgtctatatttaatgttttatgcatgtgccacaagattcgatgtgacggggaatcttgaaaactttttggttttctagggtgaactaaacaaggcctaagttaaaacttaagagaatcgagtttgaacgaccgtccggttgactttgaatatcataccggacggtcctctagtgtgtgtgtgtttcaaccatgagctcactctaacatctccgactttgattaaaattttaaatgaacagactactgtgaacacgtattttattaggtgtagagatttagtggaactaatttgataaacatttttatgtaaaattaatcaaactataagcttgatttagaacaatgccgaaatgaactagctacacggctgacagaaaggggaagagcatgccggccggctgtgtttagttgtttcctttttcaacacttatgtgccaccaactaatacaagtaaattgttatttttatgatttgttgtctttgtgtataacatattaattttttatctttttctttctatagaaataattgtaaattgttaattatctttgtgccaacacaaatcagattttgttgagcttgtggtttttttaactgggtttttattctcagtaccgaaaattgcatattgtgtctacataaattgcactgatgaaatctataattttagtataatataatatatatataattatcatcgcctgaaaggaaactgcactttagacacctgaattttaacaagttcctttcttttttgttccgtggcttagctttgcttaaattgagctagaagtacatgatactcggactcggtatctttatgtaacaagagcgcattagcaattaggcagttactaactccaatgtcaaaaaaaggcttatagaaaaaattttaaaaaataaaacagcacatagtgaaactacatagcaggtggaagatgccaggtcacgctagaccttgacaccacaacatacttacaagatactgataacgtgggtgtggcaggggaatgaccaaatgagtacacttggactcgcaacgtcttgtagaaactttttgcttgccacatgggaaatgaggccttgtttagtttgagaaaaattttggattttgctactgtagcactttcgtttgtttgtggcaaatattatccaatcatagactaactaggaccaaaagattcgtctcgcgatttacaggtaaactgcggaattagtttttgttttcgtctatatttagtgcttcatgcatgtgccgcaagattcgatgtgacaggaaatcttgaaaaattttggaaactaaacaaggcctgagtgcacagactgcaggcacgtagtaccagccaccaggctgggccggtttccatctggcgctagagaggctcttaccactttttcactttttgggccggtacctaataacaggccatatgctctgtcgcattaccagtgtccttctaccgagctactcctactcttctagtataggtacaataattagctggcagatcatggcagattgcttggttaggaacgctacctatagtcacaaacttgtagttgtagtagctgtccgtcgctaagtctttatataaggcctcatttggtagaattccccttcgactctagctctgactcatcacctttgaaaaaaccttaccaaacagtttaatcggagccattttccagttaaaagaaagagtcagagccgttttgacggctctcgcgaacacgtcttaaataggctttttaataatgtaataagtagcaggtagccaggcctttgttgttttaggagtatccaggcttttttttttgtttctttgaggggatggtatccaggcttttgtagtacctgtgactgcgatcgtgggccaacaaaagccggcccgccccaaaagtgcattggataggcttggactctgattttcttacctcaaccgtatcaggcttggccgtactccccccccaccaccccccacacactagcaaattaattgtcatttttggtttctgtacaacaagtttaactcgatttgtaaaaaatatattaaaaaactgaattgaaagatgtttccaatgatactaattatgtactataaagattaactttcttaatatatatttagtcaaaattgtttattggaaagcgtaaacgacagttattttagggcggaggaagtatgatatgtaagagtaaatattatagtagcctgtaagccggctaaatgctaaggtagactgtaagcttatagtcagcttaggcataggcaggggcggatctccacctagggccactagggccttggccctacttgtggatcaaaatttcttaatacttatttttaattttttggattatattcatcaccatagactgcctcgatcatcctctctcatctcttgcttgtgcccgctttgtagtgtgttactccttcctggttccctcacgttttcaatcccagctcatagtgtactccagggcatcgtggttggctttgttgttgttttctagctaaacacgtccttctttgcagttattagcaaagacataattctatcattccaaccaaacacaataatagttattccatccctcttccacgctctccaaccaaacgcaccctagatggccgagcgcgagtggatttaagtttgaaattaagatttttatccactttcatgttatggatttaagtttgaaattaagatttttatctcgaactatgtatttataagctatttttgttatctatcggtattagacttggtacaactgatatcttgattcaacgtaaacggtgtgtgtgctttattagtggccctagacgtcaaaattgacgagctccgccactgggcataggaaccaagaaactttatgagagagatgagtagatcatgtattaatagtgaatagctaactattgtatgggtaggctgagagaagactgtaagaaaccttgtattatgaaacttgctctaagtgaattttggccggcagtagctggctggggccaatcaggctgatgggctcatttcgaatctcaaggaaattttgtatgaaacagtttcaattccacacgaataggaagtgtttattttgcttcaaattaaaattaacatgcccgcgttttgttttgttttgtgtgtttttgtgcaaagtgcagcagtgggagtcggaccagctggtggagtcatccta

SEQ ID NO: 4818 - DNA, 12337 bp, Sorghum bicolor
  Intron number 1 from transcript Sb04g024240.1 (locus Sb04g 024240) derived from phytozome v7.0 (chr-ID chromosome_4; pos 53978284 to 53990620 reverse strand)
gctaagggtgaccggaaggtacaaagtgaggatgagagtagtgaaagtgatagtgaatttgaaccaccatcttatgatgaacttgtaaaattgcttaacaagtacacaaaattcataagaaaaactagaagtgaatatgaaaaactagaacttgaaaatgaaacacttctagcaaagcttaagtctagtgatgagcttagagaccataatgagatcatgaccactaagctcaaggagctcaaactctctctaaaagagctcaaagaaaaacatgataaacttgagagtgttcatgatgagcttatcactagatatagagcaatgaaagaagagctaacaactctaaaagcaaactatgacaaccttgagattgcttatgaacttgcaattgatgaaacacatgttgctactaacaatgttgctaagcttgatgtagccacatcttgtgatgatttacttgtggagagcacaagaaaatgtgttgattgcaaggcaagaaagtggtagtggtcgagagctatgaggacactatcaagctcaaggatgaaattgtcatgctcaagaaagagttgcaagaccaagccaagcacaagaccattgtgattgagtcacttgatcaagacaagaagcttgcatatgagaacaagttactcaaggaagaaaatcaatatctcaagcttggtttgatgtatgacaagcaagaagaggatgagacattcatcttggatgagttagctagcaacaatgatccaatcatcaagaagctaactcaagagaacaacaagctcaagaaagagaaggaacatctaaccatagggttagcaaagttcacaaaaggaaaggatcttcaaagtgagcttttcatgaacaccgtcatgaagatggacaagagtgggattggctacaaggctcatcaatcaaagctcaccaagtctctagccactcatgatcaaccaagcaagccaaagctaaagagatgttttgagtgtggtcaagaaggacactttgctcatgagtgcaaggcaccactaccaccacccttgcccaagcatgcaagaccatttgccttcaatgctcactacattgtaaggaaagacaagagtggcaaggtcaaggttagcttcatggggccgcccaacaagcaaaggccaaagaaaatttgggtgccaaagcaactagtagagaaggtcaagggccctaaacaaatgtgggtccctaaatctcaagcttgatctcttgtgtgtaggtgaactacaagaccggtggatcacattgggtaattgatagtggttgcactcaacatatgaccggagatccctggatgttcacctctcttgatgaagatgttgacaaccaagagaagattacatttggtgacaattcaaaaggcaaggtcaaaggactaggaaaggttgctatatcaaatgacaactccatcaccaatgtgctctatgtgcaatcattgagtttcaatttgctctcggttggacaactttgtgatcttggatttgaatgcctattcaagaagaaggaagtaattgtgaccaaggaagatgacaatgaagtgatattcaaaggcttccgacacaacaacttatatgtagttgatttctcatccgatgaagttgatgtcaagacttgcttattcaccaagacttcacttgggtggttgtggcatagaaggttagcacatgttggaatgggcacactcaagaagttgatgaagaaagaattgattagaggcttgaaggatgtgacatttgagaaggaaaagctttgtagtgcatgtcaagcgggcaaacaagttgcaaacacccatccaaccaaggcctatctctctacttcaagagtgcttgagcgacttcacatggacttatttggaccaaccacatatgctagtcttgggggcaacaaatattgcttggtcatagttgatgatttttcccggtacacttggacattcttcttgcaagacaaggctgaagttgcatcaatattcaagaagtttgcaaagaatgcccaaaatcaatttgatgtgaaaatcaagaaaattagaagtgacaatggcaaagagtttgacaacacgaacattgaagaatattgtgatgaagtggaaatcaagcatgagttctcctcaacatacacactacaacaaaatggggttgtagaaagaaagaaccagacattgatcaccttggcaagaacaatgttagatgaatacaacacttcagagaagatgtgggccgaggcaatcaacaccgcatgctatgcttcaaaccggctctttcctcacaagttcctagagaagacaccatatgagttgttcaatgggaagaagcccgatgtctcattctttagagtgtttgggtgcaaatgctacatctacaagaagcgccaacacttgggaaagttccaaagaagatgtgacattggctacttggttggctattcatcaaagtccaaggcatataaagtctttaaccatgccacaaacatggttgaggaaacatttgatgttgaatttgatgaaactaatggctcccaaggagcaagtgataatcttgatgatgtaggtggtgaaccattgagggatgccatgaagaacatgccggtgggagacatcaagccaaaagaagatgatgaagatgtgcaaattattgagccaccatccacctcacatgttccacaagatgaagataaggatgtgagagatgctcatgaagacactcaagtcactcatgaaaaagtggtggcacaagcacaagatgttgatgctccccaaccaacccctcaagtggcaccaagaagaacatcacatctcctccaagatcactctcaagatctcatcatcgggagtccatcacgtggtgtaactactcgttctagacatgctttatttattgaacatcacgcttttgtgtctcttgaagatgaaccaaagactatagaggaagctcttcgtgatgcggattggatcatggccatgcaacaggagttgaacaacttctcttgcaaccaagtatggacacttgaagagcgacccaaagatgcaagagtgattggaacaatgtgggtcttccggaacaagaaggatgatcaaggcaaagtggtgcgcaacaaggcaagacttgtggcaaaaggcttttcacaagtggaaggtcttgacttcggtgaaacctttgcaccggtggcaagacttgaagcaatccgtatcctacttgcatatgcatctagtcatgatatcaagttatttcaaatggatgcgaaaagtgcttttttgaatggatatattaatgagcttgtctatgttgagcaaccccccagttttgaagatcctaggtaccccaagcatgtctaccggttgtccaaggctgtctatggtctcaagcaagctcctagagcttggtatgagaggcttagggacttcctcattgagaagggcttcaagattgggaaagttgacacaacactcttcaccaagaaaatgaatggggaaatcttcatttgccaagtttatgttgatgatattatttttggctctactaatgaagatttttgcaaggaatttggtgatttgatgtccaaggagtttgagatgtccatgattggcgagctatccttcttcctaggatttcaagtcaaacaaatgaaggaaggagtcttcatctctcaagagaagtacactcaagatcttctcaagaggttcaagatgatggattgcaaaccaatcaagactcccatggcatcaaatgggcatcttgacttggatgagggaggtaacccaattgacaagactctctatcgctccatgataggaagtctactctacctcaccgcatctaggcccgatatcatgtttagtgtgtgtatgtgtacaagatatcaagcaatgcctatggaatctcacttgattgcggtcaagagaattcttaggtatctaaaatacacaccttgcctaggtttgtggtatcccaaaggtgcaagattccaacttgttggctatttcgattcggattataacgggtgccggattgatagaaaaagcacatccggagggtgccacttcctaggtagatcacttgtctcttagatgtcaaataaacaaaatagtgtcgccttgtcaacggccgaggtggaatacattgccgccgatgcttgttgtgcacaaatactctacatgaaacaaactttgctagactatgaagtagtactagacaaagtacctttgttgtgtgacaacgaaagtgccgtaaaacttgcaaacaacccggtttaacacacccgcacaaaacatattgacatccgccaccacttccttagggatcatgttgctaaaggtgacatatctctagagaatgtaggaacggaaaatcaattggcggatatcttcacaaaacctctagttgaagctaggttttgtatgttgagaaatgaacttaatgtacttgatttctctaacttcactaaaagataaagttgtgtgttgaaacttgtaaatagcttttgctttgcatatcatgcaaactaaaactaaaatacaaaacttgcatgtagggcttgtctaacatggttaagataacccccttatgtgtgtgaaaaagcttaaccttggatcaaacttgacaagcattagtttactttcaagttttgcatttcactcatatcatatgcatgcttgttagttgaccgtttcttttcggttattctttgagcatccgctgtgttcgtccatagatagggagagcattcaaagctctttatgatcaaaacccctagctttatggccatatgatgctccttggtgatttctcgaattattctcataaaaactactaagcctatagctaaatatttgtgaaaacttgagagtttgagagaagtcactcataccagttccatttggtgtttatttgtgtgtctttgaagatggaacttggttgggtcaaagtcggacgtaaagctaagtcgaaaaaggacttagaggagcaccggacgctgtctcggtgcgtccggtgcgatgagtgtgccagactgcactcaccgaacgcaggaacagtgtccctgcagcgtccggtgaggtgcgtccggtgctcaccatgcgtgccctagggcaccggacgctaaagccagtgtccggtggccatcgcctatcagcggcagaaaaaggcaagggcaagaagctagccaccaagaagcgcaaggccagtgatagagaggcagaggtggcagaggcagttgcagcagcggttgaggcagctgagagaggtggatgctcagttgctctgaggattggggatgaccttacgccacagcagcggtgtgcagttcttcagacagaggcactccatggatcccctccaggcacagttatgatagggggccagcgggtcaggattgtggtcagagatctagcccaggaggatccagagacagaggcccaggcagagggtccagcagaggcacaggagcagctccttaggaggtcgactcgtgcacgtgcccaggccactcctcggactggtacgccgggtctgtctacttccactgctcgtgctacaccagttagaggcacaccagctgcccgtcaggggccagtgaggatacacagggatctcactcttgtgtcagccagagagatccagcagctgcagttcgttccgtttcctacttggtttccagctgctagggatccacgagccggtgccaggttctacactgtggtccaggaggacatctacgaggcactggttcgctctcagtctcagttcagggagcacagagttattgatcttcagatactagggaacgtggttggggcagatatcagacagtacttcacctacctccacggcctcccagagttgctagctctccctgatacttactgtgagcagtgggtcagagagttctatgcttgagtgtggatctctccggatcacagctatatacactacgctctggcagggactgattacagagtgacagcacagagggccagagaggtgcttggcttgagagcctactccaccaggattcaccagctgtgctacgggaacttcgagcctcctcgtcgtcctcatggtggtgagataccaccggttgacttcgtggctccttatttccgtccgccgtttggagaggctccagcaggactgtaggagacttgactcgcccagccaggatcctcgactttgtgttgaggaagactcttctccccaggataggctatagagatggcttcactcggattcagcagtggctcgtggttcacctcatctcacagacagcgtttgacctatgggatctgatagtctcagagattgaggacactatttttgagagcttcaggggacggtgtcagttgccgtacgcacattggatcaccttgcttattctccgtgctaggccagttcccctaccagctcacctccagagagagctgactgactccgacaccgtcttcccccactacgaccccaggcagatgttgagagcacaccacgacctcagagctactccacctcctcgtgcaccacgtggccctgtgccccctccttctcctaggggcactcgcagtacaggagcagtaccagagaccgaggagcagcaggacatagccattggggcttttgcagatgctgaggctgagggagagtttgacttcacttcggacagctcggatgatgactatcgtcctccagtgtcagaccttccaccgagggcacacgaccacgaggcaggaggctcctcgagtgcttctgaccccgctctgcttgccattctagaggggttgagagccgatcagcggcgggcagctgaggagcaggcgaggagagacagggaccaggctgccatcaatgcagccgtgcaggctaggcaggatgagctccagcgacagtttctgacttttcaggagcagcagcttgcgttctaggcccagcagacagcgatgatggccgcctcagggattcaaattccgcacatacagctcccaggcacttcgactgtcaggccactcaatccagctcctcagactcagagccagtcacagcagcctctctagctacccgctcagagtcagttgttttcgacgcctcagcaccaggtctcccagggtgctatctcctctggctttgagcaggtaccacagtttatgcctctccgctcaggctttacacctcagtcagcgacagcgtcacagctagtgttggactcgtcgacagacccgcacctcagcttctcttacagtgctctgactggtgaccctaagcctccacctcagcaggctcctgcagcctttacggcaccagtcaccaccacagagcatctgtcgtcgtcagtagcgtcgtctgagcagctcgcaccgtcgtccaccgtgcccgagacttcagctacagcgaccgagtccgtgccagcttcgtcagcaggactcgagcagcccgcacagccagtgacagctccagcacctccagagcagacccagaccgcttcgccagctcgtgcagcttcagagggtcactccacctcctccgcctcgacgaccgatggttcagatgacgcagctcgctttgaggccgtgccgagggactccactgctccgcctcctccaccgtcatcttagttttttcgcgcttgatgccaaaggggagagagctgtgagtatgagagttacggggagctagagagctgtgagtatgagagttagggggagctagagagggcatttttattcttttgatatactcttgtgtgcattgcatttgtgtgagatacactacttgtgagacatgacttgtgcttatttgtgatatcttatgtcatgtgttttgactcatattacctttgcttctgtgttttactccgatgtacttatgagccttgtgtttttatcctgttgtgtatcactcacatatttggatgcaggatgttggacttggttgatataagcatgactaatccctttgttcttattgtaacatgcttattgaaaccaagtcatttgaaaacctcaacctttttcatactcgaggttattgtcatcaatcaccaaaaaggaggagattgaaacagcatctaggcccctagtgatttcggtgattaatgacaatattgattactatgactaacgtgtgttttgcagaggcaaagtcataggtaaggtcatggtaataggtactcgatggacagggacgtacatgcctacttaatagtggaaatcgttttcggttttcataggatggatggacatcgtcaagactagactaggtctaagtgccatatggtgaagaagggcacttagagtagtttaggactttgttttcctttgaccgtactattaagaggggctttgatctagtagcttgacttaggcaaggttttagatttaggtgtggtgcacacttggtaaacctagcactaggcagctcagaaacagtccttagatcgagagaaaccaacttcgttttggagcgatcgcgtttcgacgaagttagggtgcccaagggggcaccagacgctgcaccggacgctctgtgagtgcgtccggtgaggtccttagccgttgggagttctcggtgcttagggttaggcaccggacgctggcaccggactcaccgggcagcgtccggtcccatacccagggaggttgtaaacctgccccgagcaccggacgctagcaccggacgcaccgggtagcgtccggtcccatgcgcagggagcatgtaaaacttcccggagcaccggacggtgcaccggacgctgagagttagcgtccggtgacctgtcagacgcaagtacagttagccattatggagcaccggacgctcggtgcagtgcgtccggtgcaacatgaagagcgtccggtgaccccgttttcagtggaaaacggttggctgacctttggacttcgtggatagtatttatactcctccacctcgtccatgagagcactcttgcccatttgaacatctgaaaaacttgttgtggagcaagagagtagcaagagcctagagaggattgagatttgagtgatttcttgagagaatccttctctagtgaattccaagagtgtgcatccaccactctctagagccttgtttgggtcaagtgagagttctttgcttgttactcttggtgatcgccatcacctaaacggttcggtggtgattggaggcacgaagaccgcccggagttcttgtgggtggcttgtgtcaagcttgtgagcggttttgggcgattcaccgcgacggagtgtcgaagaatcagcccgtagagagcacttggtccttgcgcggaccaagggggagcaagacccttgcgcgggtgctccaacgaggactagtggagagtggcgactctccgatacctcggcaaaacatcgccgagcactttcttccactactcctttacattctagcatttactttgtgtttttacattcttagaattgccttgctagaataggattggaactaggttgcaaaacttttatccggtagctctctaggtcacactaggcacaaggggttgaattggagcttataggttgcttaaatttttagagaagccaaattcaccccccctcttgggcatcttgatcctttcaacgagggagggagagagctgccaaagattgagacgagggcggcgccaacaagctcgggtggaggcacaggcgtggtgctgggcttccgggctgcgttgggctggttagcatgtggagggaggaagataaaagtggtgggagggagggttggcgcgctgctagtggccacctagttagacgctaagattctcagtgccatacaccactctgtagatgacatccctcaccattgctctgtagccatgcatgaacccaaaattccccacaaattccccattcctaatgatttgaacctggaaccttagctttaccaaagttcatggtctgaatctgttagaggtgtgcggctcaccatagtagaagatagagcactaatcttttgaccgagtcaataggagagtctactacctatttttgtttctttttcattagataaaaaataatatttacaaattgcacatgaaaaatggagtacaaggcttccaagcccaaaaaggaaaaggttgtgactataataagtagttatctctccaagcaatgaggggtgcctgtctacttggcttggtcttagtgcaaacttgttcaagctcttccatattttaagatatcaccaatctcaaatccaaagatagaaaattcaatggcttttataactctctaaactactagtcaatttactaattcacatgtactgtatacatggctagctcgacatttggcgcggcaaaaggccacatacacgcaggcgtttttaggattactaatcgagatgaatggttgttcggttaatttagggctgaattatagctagcccattcctagcattttttctgtgttattccacacaggatcaattccgggggccctactctccggaagaaaaacaggtcgttttcaatatgctcaccaggtttcggtaaaccactgagaatcacccaatccagcccacgaagagaaacagacccgttttggatacagaagaaacgaacaaggccttattgatttaacttaaaaatagtctaaattagctgagtttggttcactagttggttaacgagcagttaaaaagcttgatctcaattagataggctacagcaaattttgactaacttttagctagctagcaattagagcaagtttaataatacagtccacttgctggctgtaaggttccttacagcgttcttgcagctcactcatacaatagttagctattcactattaataatacatgactcacttatctctctcacaaagtttcttggtttttatgtctaagcttgttgtaaacttacagcctgcttctcctctctctctcctcccttctctcctctacatcagcatttagccagcttacagcccaccataatacttgctcttaggcaagtctcaatacatagtttcatgacacagttaccaagactataaactaggtaaccgagccacaagagtttcatggggatgaaactcctctctcatctaatgaaactccttcatttaatgaccctaccaagtcagcaattttgcttacgtggcaacctatttaatgtgcatgacactctcatgaaacatgcattgagactggccttaggctttgtatcgaacagtccttaaatgtcatcaatccaaatggttgacttgacttggagctcaagaggctcttggatcagctcccacgtagtaacattaattattcagatcgagaaccgaccgccgtcatcaatcattgaaaaccagggaggcaccaaccacagaaaaaatcatctggaaggaaagcgcacaggacgatcgaccttggttttggtagtatgcgcaattaagccagtgaacaagaaaaatcatcccatcccagctgtgttgaacaagaaacgtacccgcatttcaagcccgatcacgcgtcatccgtcacggcatcagctagcgcaggagagattattattcgaacgtcttgccgcgcgctgaacggccacacacacatttgacagtggatcggaacgccgagagagagtttagcaagcatgtcgttgccggccgtctgccgacccaagagttatacaacgtgatttactagctactaacagaattgcggtattgcgaatacagagagttctgagagctagcattagagaaaaactacagcactcacacagcgggagtttgaggattagcatgatgatgatcattcgcattccagatggaggaaggaaggaacatgtggtttcgccgttcgccggatcggaggaagaaacgtcgtcttcaccctctgagccacgtgcatgcatagcttttaatctctccatcatcgcacctagaaaaaaatattcgtttgaatttatctgcaaaatcgatcgactagtgttttttttttttgacaataaatcgtagccataggtttactgctggagtagtataaatactacaccacagcacgggttctgctctcaggtcgcagcacagcaaactccagtccccacgcacttcgtctctttctacgtgcaacaacgtaggtacaggggtctcacaaaaaatcctcgattacataccttcacaccgctctgtgagggagcctcatcgatcagctaagcaaaatgaaggtacgcatacgtaccatagccggtgctgatctttttctcggctcaaacgctaacacatacacacgtcgtcgatccggacgcgcagcaaaagatcgtgatcagggtgtgcatgtgctgcgacaagtgccggtccaaggcc

SEQ ID NO: 4819 - DNA, 5221 bp, Sorghum bicolor
  Intron number 1 from transcript Sb05g018933.1 (locus Sb05g 018933) derived from phytozome v7.0 (chr-ID chromosome_5; pos 45802417 to 45807637 reverse strand)
gctgcttgaaggtaaccaagtgattctgttaaaattgctccaagttcttttgatatactgaaattatagctagtctctttggctcaagaagagtgcacttctagtttggggctaagtcaatttttcttaagtttgacaagatttatagaaaatagtttcagtattatgtctcttaaggtttactatgaaaatatattccatgattaatctaatgacacttactctataccatgaatgttagtatctttttgcataaattttgttcaaacatggaattgtttgacttcttgaaaagcgagaaatgcactcttttcgatagagtattcaattgtaaaagtaattcgtaattaagatccaatcatttccttgaaaacatccctccactaaaaggagcctgttccactattcttgttagtgatttctatatattatagttagtattgacttccttaactaccaagctatatatggttacttcgttacttccatatctcctgtaatctgtagtgatctttaatcactgactaatcccttggttgtgtattgctgcatctctccctctgtcaactcttgcttgcatgtatcaaatttgatctgttgaacctgatccccttttgctgctctagccatatttttttcccaccacggacgaatcaaatttattacctaaaagcaacacaattacaagagtttagcattctgtgaaagcataagtctagtgcttacctacctaggatacttatctagagtagttggtggatgccgtgttactttagcatctctagaatatgccttaatcttttcttaaggaccaagcaagctaccctatatgtatccccaacctgccatagttgtggcaaggctaatggaatagaaaaactagccccaaatcctatgatttgtgtccaacaattggtaactagagcctagtctcttacataggggttttcccctttacatatccataatccgcagccatgtcaaaccgttccaatcgttccccttacctctcctcccatggcctcaccacctccaatggacggaacatcaggcggtcggcggctagcgctgagggcgatggcgacgcgactgccgatgtgcgggtcgcgtgggaggcgcaagcggccgcgcgaggatgcaaagccacgattgcaggcggccacgagggcagcgcgtctcacggcagggaggccaaagccgcgtgcgccgctgaggcggccaagcaagttgccgttgctgcagctgccctgcgaacaggagaaggcgtagcaggctgacctagagcaggcagacgagggcggcacggatgcaacctcgacgctcgtcgggattgagcccacgtaagcgcatggggcgagtaggcggatgcggacgtggactggctcgtggaagggcacaacttcgacctggcggacgcaatgtcttcgattgtggtagaaactgacgcaaccgcgatggggatgcggccctacggggcacaagggaccgatgcatcttcaacgcagacgcgggcctgcgcggcttcggcggacagggtgcgtgggtgcaggatgcatgggattggcacgacgccaaaacctggctagagcgtgaccctcggatcgaccgtgccctagaggcccagcgactccgggagcaggcaacagcgatggaggcgagtaggcggacacagatatggacgagctcatggaagggcacaacttcgacctgggccccgatatgctgcgattcatttttcagagaaatcgttgatcgacatagaggtataaagcaggaggtactgatgtttgtatgtgcaggtgctatgtggacattatggaaagctcggaatgatgtggtgttcaacaagaagacggtggcgacgccggcggtactggtttacaagacgttttccctggtgaagacttggatccctttactaaagcctaagctgaagcccttagcagaggagatgattcaaatagccacatctagtgccaacaatctgtaattcggcttcttggttgttttggttcctctcttttgtttaggctgttcctctgtttggctgcagttagagttgttagttgtgaggtgttctgacgtatgctgtttggcccttttttgtaagctggtatccccagcagactatgtttcgtcttgttacgctttcaatcaaagtcgggcaatgccttttaactaaaaaacttgggcggatgcagcgtcttcgatcgtggtagatactgacgtaaccgtgttggggacgcggccctacgtggcacaagggaccgatgcggcttcaacgcagacatgggcctgcgcggcttcggcggacatgatgcgtgggtgcaggatgcatgggattggcgcgacgccaacacctggctggagcgtgaccttcggatcgaccgtgacctggaggcccaacgacttagggagcaggcagcggcaatggaggcacatcgtgacttcgaccgcaggcggcctgactcaccttcctcggaccgatgtcgaggtcgccgtttcaattcggctcctctctcgtcgtgtagaccatcgtttaggacgccggtggcggatggcccatgctcaccaagaccaactatacctagtggtccatggtgatgaaggtcaagatgcaggcgcgacacatgggacgtggtctggtacgggacatcgactttggggaggatcgtcgggcactgggggcgcttcttgctgctgttccgacggagatgcagtcctcccttgccaaggacgcctgggacgccatcgcttctgcatacatcggcagcaaccgcgcacgtaggtccacgcttcagaacctccgacaggagggggagaatctggctttcaagccgggtgaggacaacaatgacttcgttctctgcctcaactccttgcagcagcagttggtgcggttgaacttcgaggctttgaagcaactcggcaacaaggagatgttgcagggcatgccgcgagtcgagcacatggagcagttctgcgacatctgcgtcctcaccaagcagcggcgactccccttgttgccgaggagaagctgggggtcgtgcacggcaacctctgcggcctcatgacatcggctacgcctggaggctggcgcttcttcctgctgcttgtcgatgacatgtctcgctacatgtgggcggtcctgctcgacaacaaggcagcggctgcggatgccatcaagctactgtagaggagtgcggccgcaagcttcgggtgccaacgatggtgagttcacagagtctgagttcgtggcgtattgcgctgatgaggggatccagtgccacttctctgcgccgtacacaccgcagcagaacggcatcgtggagagccgcaaccagatgatggtggccaccgctcgcgccctcctcaagcagagagggatgccgcccatctactagggtgaggcagtgatgactgctgtccatctcctcaaccgcttgcccaccaaggcccttgatggcaagacgtcgtacgagacctggcacgggcgcaagccggtggtgagccacctccgcgttgtttggctgtctctctttcaccaaggacaaggagctcaaccatgtcagcaagctcaacgataggagcacgccaggagtcttcattggctacacggagggcatcaaggcctaccgcatccttgacccctgcaacacagcgcgtcgcatctctcgggacgtcgtgtttggcaaagggcgaggcttggtttggggcaaggcgctggacggcggctcgacttcgactctcagagacttcgtcgttgactacgtccacttcgacggggtcggtggagcgagcagctcatcctcaccgagctcgtccaccttggcacctggctcaccatcagctctggcaagtcctccaccacctacaccaccagcgagtctaccaccggctacgccctgctctcccagaccggcggcgccccactctcctacaacggctcctcacactcccgcattggcacaggcacccacacctccgggattggcactggcagcttcagtccatgacggacagcgtacagtagagtttgcttgtccggcgacgattatagtgtcgatgcgtaccatgacgatgagcctctgcgctactgcaccttggacaacatctttggtgatcaacccttccatggattggcgattcacgacttcgaggcagagctacacctggcacacgaggatggcgagccccgctcctatgctgaggcggagggacatggtatgtccacactgttctggactgataattggttgcaaggaaaatctctgctaggcatagttccacgcatctgtttggatcggtgacaaaaagacaggctaacaagcgaatagtgaaggctggtatagatggaaatcagtggactaaggatattagagcagcactgtctgtgtctgcactctggatttttggtggcttgggacttggccactaaggtaacagaagagcctgatgttttacgttggtgattcagtgaatctgggcaatacacggctaagtccacgtacttggccctcttcattggtgctacctccttagagacattggcattaatctggcaattatgggtaccgagatctaagtacctttggacaatacactttttgccatgcaattgtataatgccttccattggccacctttcttccactccctaaaaatccctgtcaaattttttcaatcgccttaagagcccattgtgggagatccatggcaatggcaaggtatatgaccatctcagtgagagcatccttgacctgcacaagcctctctgacctggtcatagatcagctttccacccagtgatttggtcaataacatgatcaatgattggttgcacttgtgcctttgggtgttggtaattttgcccactgtgtagggttggccattgcttttgttgcctaattgctgttcagtaaagtgtataactctgcaaacaatttcatttatttgttaacagtacattgacttttgagttgtcagctaggactatgttctttggttagaatcttgcatttcatataaaacagataggacaggcaggtgcattttgcgtcaagcttacatggttgtctacaaacacctatttactataagttttggggatgtgaggaagcaggaaatcctatagttccccaagtgatgcattttggtaacaaaactgcaattttagctaataatgatctgtttactcacttgcaggataattatttggacg

SEQ ID NO: 4820 - DNA, 2209 bp, Sorghum bicolor
  Intron number 2 from transcript Sb08g006300.1 (locus Sb08g 006300) derived from phytozome v7.0 (chr-ID chromosome_8; pos 9438407 to 9440615 reverse strand)
gatctcccagtcatcagtaaagccagccctcactcaaactcattttcccatttttatgcatgtcattcttctgatcgtgcagacaatagaaatcctcagaatttgtaatactaccatttttctggatagatgcgttgaatggattgattattataactcaacagagctattggttatgaaagtttgggtaggatatcaataaatgatacatatgccaatcacaaatcttgatttttttggtgcatgtgttcagatacaatcaagctaataactgtttgtgttcttgttttgtatgtcaccatctgttcctaagtgctaagtacaatggagctggctacttcatttgtagcttcatattcacagtttgtttgtaagcattgcatggaaactaaaactctgtccgttctcgaagtccattagactgttaatttttgttcataagcgcattatcagcccagtaaaattatttttttatacttatgtgtgtatatgtttacagccaagtcgacctctcattgatgtttctagttttagttttttttgaacagcgcaggagaactgcgcgtcatttcattaaggtagaggaaaaagatacatgggtcaagagacccaactcacccacccaaaactctagttttagttaggtttccctatatgtaattaaattttcttatttgtcgttttgtgcactaccattggttggtttgtcgaaaagaaaattattttgccaaaaaatccttaagtactaccatttggtcaaaaataaatttcacatttgactttgcacggttcatgatgcatatatttgtttcactaaaaggtcaatgtgtatctttgacctctaatttgttctagaatatttcctaaaattctttgaattcatgagcttttgcaagtgttttgaatacaaatctatacatataacttatatcttaagagtcattaacttaaaatttaataatgtttgttgttttcgaccaaagcttacccaaaatgacatgattttgcaaccggagggagtatctttcttttggagttgtattgttgttatacactttgctgattcagtaagcaccctttcctatgtctaattagtcttggggtagatttatcgtctaaaccatattttttctttaattttcttgcacttaagaggggaaaaagttactgtccaaaccagctactcgttctagccataaccgaagattgtccactagcttgtggcctagggctaacgaattgtttggttaagaactataacgtaaatgtcaatggtaataattcacactcgagtgcgagtggaaacaaattttaataggctggtatcagttccctgcgtgatatctgattacaactggacttagacaaacatgatttaacatcatctattacccatcacattacaaaatatgtcgaccaaacaacacataagttgtaaatgcaaagtaggaagcatattagtaaaccatttagaaatttacattttcagatttcatctaagtttttttactacaatttggatcaaaactagaattccattaatttcagctgcaaaagaaattttcaacaaatccaaatccaaatcactgagtcaatctagctagaaaactgttgtttgttgttcatttgatatgctactttttgtttgtatgtagtaggagcaatcagtaactactaaatgttgtttcttgtagtttcgtgtcctaccatttgtccatatttaagtgataggagcaatcagttaacaattgaatcatgtcatttatgtgcgcgcagtttcatacgttgctatggattagtaagctctaggtgcaaccaagataacttccgaatttctcacctgcagtttggttcattactatcgattttcgtaataactagtcatttccataaggatgtgaacaatgccccattctaataaatttgtaaagtttcttttatgaagttatttgaaatgataaaagtggaaatgacaaagaattgcatttactaggtatatgacatattttgttaaaaatgaaagtaaacgacaaatgtaatgcctaaagaaaacagagattgaaaaatgtgactagtcaattgaacatgaagcccaccagatcattcattgttgtagtctattgaccttgttgacttctgtatgagataatttacatatgttgccttatgtcatgcagtgctatccgcaaacagcgagacacaaactatt

SEQ ID NO: 4821 - DNA, 8994 bp, Sorghum bicolor
  Intron number 2 from transcript Sb04g010990.1 (locus Sb04g 010990) derived from phytozome v7.0 (chr-ID chromosome_4; pos 15714303 to 15723296)
acgtcgacacctacgagatcgtcgccgtcaagatagtgagcaccttccctccctcagccttccctgttttgcttgattttgttggaattcgtctagggtttcgcgccttctggtgatgcctattgcgtgccgcagtaggttgtgaggtggagcttgaaaattgcgtaatgttgattccacgtcctggatcccaagtttttttttgtgctctaaaaggttacttgcagcctcgtgtgcatgtatgcatggtccggcgattacaagtgtttttagtcttgagttcattttctggtagatattgaagtatcagacctggcaacatgcctttgggttgctgtttataggtactgtggagctgcgaatttcacaaaggaaagtggagctctgttgtgtcgaatccgatcattgttgtttttgactatgagttgctgctagtaagaggggcaatgtttttggaggtgtatgttaagtgttcttttagctcccagactttctaattttccagtggatatgtggtttcaaatagttttccagccaccacagtgatacttttgtgttactgttgccttagtctgatagatggaaacaatgctatctaaaaggtcgtctgatatgaatctgtttttaattttatccagtttctcttcatgttattttatattttatatcaacatattatgtttatctccgatgcttgccgccttgcactgaagcatgtactgtgaatttgaaataggaaagtacagtgctatgtttaacgtaggggtagtgttcaccaggaagaacttgaaatggatccctgatttttagtaaataataatttgtcatttaaatgctaggaaacacctctaggccatgggagtatcaggtcaattgtcaaatattctattgttggcatgcaatcttgtgacctaagcttggcggagccatcacatgtctgtctattctgcgaaattttatccagaaaatatcgaccggtgttgttatttgtttctttgatttctttattttgtaaaaatctcaaaacattcttgctcacagagttgtcatgtggcaatggcgtagtgtaatgcattgtaagatttatttctcttctgtcagagctatgcgggttgtgttaagttggcacttcatgacatatagtttttcttctttggtgttttgcttgcacaacatactcgcagtccaacttttagaagtttttttatgagttgaaacactgttagagattgaagtattagaactgggtagcacacctttgtgttgctgtttaatattgtgaacctgtgaggttaacgaagcaatgtacctttccattgggatcatgggtttggcatgatataacctgttccccactaaaagtagtgttctttggaggtgtgcattgctttgcttctatgtagggttctgtacttttatgttttccaatggatgttgtggttccaaataattttctcatcactgcagtcaacataaaggtcttgtgatatgaatctgtttttgattctatccagtttgtctttagctagttcatatcaatggactatgactatttgtgatgtttggtgccatgcattgaagcatgagactgaaatcggaaagtgctagtgataagttgcatgcaggggtaggtatcatattcattaataagaattgaactggcctaataacaatgtttttggggcatcgcctagtcgtcgcctaggcgacaaggcgtggtcaagggtctgggcattggggtcaccacgacctcaatgtgtatggcgtccgcctcatagaattaggcgtcgcctaggcgcgaacggcgtcgggcggacgcctacagccgcggacgctccatcaagccagtaagctaaccttttatgacccacgacagcaatcctacctttccttctgcgtacaggttgccggtcgcgagggaagggcgccaaaaggagtgtggccccgcggaaatcgattgcgtctccgcctagatagcctcttagcacgggaaatctaccgcacaagtcatttaccgcgagtgcgggcgaggggagaggaagagagaaggcggcggacggacctcgacatccgcttggctgctcctttgctcgtgtccaccggccagccaccccttctgcggagccggccctgcatctctgcttggccgtccactcctgcaatggagcctctccagcatcatcgcacgtcgctgctgcagtccgcacctgcttgtgtgactctgcctcgagtcttcctccgtcggcccgcctgttgactgcgcctccatcgggtccgcccctgcagctccgcctggctgctcgagtccaccaggagtctatccacaccgcacttgctcgcccgccgccgtcgaccatctgcctgtctgcctcgtatgctccctgcctcctctcaggtctctgcagccctgtgtccctcctcttcctctgttcctttccctcttcctctgtttctttccctgtctctcgtgctctgtttcttcgtcatggaacttctcgatggagtgctccttggtgaggtcggtgtcgccgtttaacaccatctgctccatcaggttggtcagctgcgcgacgaagtccttgacttgcttgcggcgctaaaaggcgagtgcttcccactctgccctgagctgctgcaacgtcgcccgtcgcacgcggccacctctgatcctccgcagcgcggtggcgtcccatgccagcttcaccgttgtcttgttggcgatggaggccgtgacgttggtgggaacaaaggcacacatggcctccaaggcccgtcgatcctcgttgtagctgacgccaccaacgcgcactgcatcccaaagatggcaaattggcaagcttgcagctttaccttcatctcgagaccactcgtggtagttgctcttggtgagcattggccacgacgatccagccctggagtcgtggtagacggtgtgcagcgccggcgatcacccgcgatgaccacgacgccgcaacggggacggcgactggtggtggcgatcggggctgcacgaccatgatcctgcagtcagcgcaccctcccgctccatctccacgtgccgctgcctctgcggcagcaatgagtgtcctgcggtcatccactcctgcaccgtccgcgccagcgcccaccggcagcactgtggtggcggcggcagcggcagcggccttggccttggagctctcggtggacatggctgcactttgggtaccctaaggctctacataccaattgttgcccaacatatgaactcagatcagatctgggtaacccagaggacaacttggcacttaggctgcttggattgaaagatgaaattacaacacttagttctctaaggggggtctgtcactgcttatatagcctaagtggacagccacctaccacagcatattctcaggctaaaagcagatgcctgatcctacttggttgccaaggcaccaacatttagtgaacagtgatatgacatttatatgctaggaaacatctcaaggcctcgagagtattagactaataatcactaaacattctattattctattatagtattattggtgtgcaatcttgtgacctaagcttggcagagccataagccacatgtgtgtctattctaggaaatcttctcccgtaaacatcaaatgatgatgttggttgtatctttgatttctttattttgttaaaatgtttcatacgttattgcttgtagaattgtcatatggtgtggtgtaatgcagtactagtttaatttctcttgtgtgggaactatgtgggttgtgttgagttggcactccatgacatctagttgtgtcaaacatgttctttctgatttcaggattgtgcattctattcgtaatttttcttgtacacacaatacattatattatattagagagtcctagaaaaaaagttcggtaattttgcttgcaacatgtgctgtgcagtaattttaggagtttttgagttgagatgctgttagaaattgaagtaatagaactgggtagcacacctttgtttttctgtttaatcgtatcatgaagctgtgatttaacgaagcaaagtaactgttactttgggaaattagaagagagacaactccattagtggagatagcatgtatatagagcctcgtgggccatattggactagtatagatggaccttcatacgcttaacaccccccttcaaactcaaggtggaagtgaagccgatgctgctctcgagtctgtgctttagtgaaaaagtcagtccaactgcaactctgagagcacataccagagagcactggttttctgatgacaatgagatgtagtaaagaaggcatcaacgctgacatgctttgttagttcatgctttcacaggatcattggcaatttgtatggctcttgcattgtcacatagaagaggtttggcaacatcacaagaaataccaaaatcagcaacaaccataggagccatacaatctttgtggcagtagtgcaagagggtccaagaagaattcatcatcctgtgatggaatgacgatctattgggtcactcgcccaagtgtagtctgagtaagcatgaagctgaagtggactatcacgagcacagaataaactctgagatgatgtcccccgtgagtatcgtagtacgcaaagtaaatgtccaaaatgaatggaagtttgtgcacacaaaaactgagtcaaaatatggactgcatgagcaacatttgaccgggtaacaatgaaagagataaggctgcccacaagatagcgacatcgagaaggatcctcaagagcgacaccatcaatgggatgaagctgcaaatgaagatccataggtgtggaagttgtccgattatcagtaatacctaaacaagcatgatcgtgtatgtgtttggactgagagagataatatcccttcgcagaccacaaaacctcaatccataagaaataactcaaggtcccaaatcaaacatttgaaattgcttactaagtttcttcttcacatgagaaatatgctatgcatcatctgaacatatcatcaacgtataaaagaagcaaagtatgtccacgaggagaaagatgaataaagaaagtagaatcatgagcactaggtgaaaaaccagaagcctttatcacataaacaaagcgctcaaacgaagcacaaggagcctgtttcatataaagcaacacgaagacaatagacatattttgaaggagcatcaacaccaggaggtggttgcatataaacttcctcatgcaaatcaccatggagaaaagcgttcttgacatccatatgagacatagttcatgaagaagtagctgccaccgcaatcaaagtatgaatagtagttatatgagcaacaggggcaaatgtcttgtcataatctcatccctgagtctgctgaaaacctctagcaacaagacgagctttatatctcttgatggaaccatgtgactcccagttacatgtgataggcattgcatgggacggtagtggaacaagatcccaagtttatgtacgatttaagggcagcaagttccttggacatagctagatgccattctggaatacaagaaacttcctaataggtggatggttcattaacaacaacatttacacggggaaacccatacttgtcttcaggatgaatagtactatgatctcgaagattttatcgtggaccatcctggcagagacgatatgtgattcatcactgttcttgtttgtagtatcaacaatggggttcatcagaactagccaaggtgggagagctagatggaagggcagtgggggtctttgggacggcgatggaaacatgtgtgataggtggtttggaaaaagagtgaagtggctgaggaggatgtggaggtggagatgaaggtgtcacatgtacatgtggcgtgatggaaatagaaggatcaagaatgactgtaatggatggagaaggggtagagacatcatcaccagatggaataggaggaagatacaaaattgatgtggactctatgggtgaatatgagggttaagttgagggatgataaaagaaagtgcagttctcaacaaatgtcacatcacgattgatatgtatgcgatgagaaggatcataacactgatcctaggaaaacacactcattagattgggcagtaagctcagaggtgcaaacaaaacatatcatgtgcatccaaatatagctcggaggggtaccgaaaagaacttcactaggacattgccaaacagtttggaagatggttgtctattgatgagatagacagcagtagaaacaagtaaaccccccaaatgagaagggatagaagatgaaatcataagtgtgcgagccatttctataggatggtgatgtttttgttcaacgacaccattctgagcatgagcgccaggacaagagagctaagcaagagtaccctttgaggacaaaaattgtcaaaaagcatcagacaaatactcaccacccagtgagagcgaaaaactcaaattggagtagaacactgtgtgtgaaccatgtgaacaaaggaatcataaatagaacacaactaagagcgatgcttcatgaagtaaatccatgtatagcgggaatgatcatcaataaaaacgacataacatttatggccaccctttgtcgcaaattgtgatcccatatatctgaatgaataagatcaaatggcttagcagaatgcaaatttgcttcatgaagtaaatccatgtgtacccagcttgcaacctttgcaatgaaaggtagactatagatacatgccccaaacatccttgttgaacaacggtggacaaatgagagccacatagatgcccaagatgacgatgccatttggcaaaagatgagggtggtgaggacatggctgatgacacatgagcagaaggaagatgtaaggtgtccaagacagagaggttagaagaatctctacgttgatgaccagtcccaatcacacctccactattaccgtcctgaataaaaacatgatgaatcatcaaatccaacagaacagttcatatctgttatttgatcaacagacatcagattcacagataactgattattagacatattaggcaggtctatgtgtgattaggcaggtctatgggtgattagctataattagcatctgccatgtacacttgattgtattccttgaatctgtttccagtttgtcttaaagctagttcatagtaatagattatgacttcctgcgatgtttgatgccttgcatgcagtggtagctttcattaataagtaccgagcgggtccccagcttcgacgtaaatagcgatttgagacttgtatgctaggaagcagctcaagaccatgagaacaatcacaaacattccattgtttgatgccttgcatgcaggggtagctttcattaataagtaccgaggggtccctaacttctatgtaaatagcaatttgacacttgtatgctagtaagctgctcaagaccatgagaacaatcacaaacattccattgtcgggttgcaatcttgtgacctaagtatgactgtatgagcttggtataaccatcagccactgtctgtctagtctgagaaatttactcccaaagccattgaaggatttggttgtttgtaactttaatttcttaactttattaatatctcctgaatgttgcttgtagagttgttgtatggtatgctttaatgcattacaagttcaaattctcctttgtaggagctatgtggtgtttctttacgttttcttactgtttcattctgcactactaagtatttgctctttgtacttgcactgttttattcccagcactagcagtgttacctggacacagttgcctatcagagttcgaattgggatattagtgttccgacttggcaaactctagaaaataggttagaggagaggactcatcaattatataaggtcaatttgaagtattttggcacaaaacgggctcctaatgaatgccataggtactaacctatatagtaattacttacggtgaatataggtccacaggataaatggggaaggcgggaaaatagagaaaaaacgagacgggcttccttgtacttggcttgctggcccatccagccaaactatagagaccttaataataatgtcgtaatccctctgctcctgacagacacacagtggcaccgctgcaccccccctccgccgtggtctgttgcttgttacccatcacagccatctcgcctcgctgccatagatcgcttccagtctcctagcgggtatcatctcacacctctttgcctacaacaatgtgttgctcatgcttgcttcatttctcgagtgctttcccctatgttggcccccttcatacttagccacttggactcaccagagagtgtactcattaaaagacctcattgtctgtctcatgccaaagcataggtctaaggtctggccctggtcgtggtcgttctcacatgggctacagtgctgccatgtaagggtggggcaggggttctcttgacctgcgtgaggtcttcttaatgcaatgccgggggctgtcttacgccccgcaggtcaagttttgtttttctctcattggtcacatatgttggtgtaatggtgtgtcagccacatatcctgcaatttccatatctttttgtcctgattagggaaacaagagtttcttcgtagtccctcgtatccaaaatcaatatgttcggcttgtgtacatgacacttttaggcagaatctgtcccattagctgtatgtgactactgatctcccactaatgagcaatgaatagaacaatcaagtgcaaacagttcactcagaaaacaaaaccatctctgtaaaatgacatctattaggataggataagtagttatttaatgaagttacaactgaatggagctatatgacttttcatgttacaaattaatatacgctgtagatgtatatttgacacatttatttttggaactttgttgcattattattatgtaggaaaacagcaaaaccaatcatccacagttgctata

SEQ ID NO: 4822 - DNA, 5437 bp, Sorghum bicolor
  Intron number 2 from transcript Sb06g015670.1 (locus Sb06g 015670) derived from phytozome v7.0 (chr-ID chromosome_6; pos 43673279 to 43678715 reverse strand)
ctggtttcttcagggttcgaggcgcctatactcaggtatacaaacatgcctcaccttcacttccgtagttccattaattcctagattttagttgagttccttcttgtccctcttatatactcttccacatctgcttcagaaccaacagaagttttttggtaagctgattatatacttgaataatttaaggtgtcaaatttgctgatataggttagaatcttgggaagaatactgtatttagaacaaatatatatacgtggttaaaataattggttttattgtcagtctcgaaaaagaaacgaaggaaagaaaatgccctgttgtttgtcaacaagagcgtcatcttcaatttttattaacaactgaacatgccctcagccaacttgcattatatatttgttactagctagtactacttgtttatttagcggatggttgttggagtccttaaataacgacattagaatgaattttcaccacaataatccataaagggtatacaaaggcgtgcatgtgcagagtactagattacctgaataaaaaaaaaaaaatataggaacacagcttcagactgcaaacagtcagctccttgcacagaattaaagattttcagtagcgtttcttttgttttactgcttccctgacattatcataacatttatgtagataacgattgcattatcagctaataacattctgtggacaaaagcagctgtccactaattgcgaataatcttgatgagcaaatttggccattccctgatcaacgaatttctcaccaaaataggcgagcagcaaaagacgccgtagttttcctatattgtctgtcctaattaaagaaaaaaaaaggaacacaaggcacgatctgttctcgtcaacgggagcatcttcagttttaagggacctcaaataaacaactgagcatgcacaagtactcaaccaacttgccttttgttagttagtacttctttatagattggatggtcgttggagttgtgcaataggcatgttataggctaagtatactttcgccacttactacctcggtctacaaacaatgcaattctataacatagtacttagtccaatcattttaattttaactaaattatgtataaggtagtgatatttatcatattaaataattatcaatagctttgtttgtaatatatttttatgttagtatttaattattacgagtttagtactattttctgtaaatttactcaatttaagatatatagtttgacataggttaactctagaattgtatcctttttagaatgaaagtagtaatgtacaacggttttgtagatgggtacatcaatacttgtctacttgataatcgtaaaaaatatagttactagaatatagcttctgtatgtttgtccattggcattgttgacacatttctaggtaacaattgcattaccatcttatgaatattctgtggacaaaactctaaggtgcatttgtgtttgtgccatcactttgggaaacttatggcgaatttgctcttgttttttttaactttccattttttgaaagacagattttgcccctattctagtaagtattaatgccaattgatatatgaaatgactattttgccgatgttgacttgaatttactttccttagttatttgtgtttttagtttttgcatcaaaagtttagaaatttttttgacaggtttggtaaagattcaaggaacaaaatttgacaccatttgcataaattttcaagtgaactttgaaaaaatttgacaaattttggcaacattatgacacaacttgaatatattaaatcatgaaaccatatgtcaacaataacattgtaacatgtctaggtcacattctaacacgtccaaatcacataccaatatatatgcttgcatcacattcaagcatctaatcttaacaaattagctagcctcttgatgttcctcctcttccttgtgctcgttgtctctgttccggttcccagcagtggcggacctaggaattggccaagactagggccaaatcttggtggccaaaatccaaaagctatagcctacggtatagtctataggaatatatatatatatatatatatatatatatatatatatatatatatatatatatatatatatatatatatagatagatagatagatagatatatatatagatagatatatatatatatatacacacacgtatatcaaaaaaaacaaaaaatctcaagcaaagtttgcaatatgagagaaattctcaaactatataattaaaagaatacatataaataaaaactaaaatactgaaaaattgaaagaataagtagtagacgcagtcctgctccactgctccttcggcatggataggccgagccgagggcccctggctggtggctgcaacccgcgagggacccgtcgagctgcgagcgcgtctggcactctagctgtctccgtctggacgaggtagcggtcgtcggtcggccctggcagcgagcagaggagggacgccgaaggccggagtggactgtgcgaggtcgtgagcccgcgacggagtgaccgcgactccgtgagggcgcgcgactgcgcgagcgcgaggcgtgccgcgtgcggcggcatgcagggggtggcggggcgcgtgcaggggacggcgcgaggctcggtggctgagcatgaggcctgagcgacttcccttcttagtctgccctagtgttttgcttaatgggcttctttcttaggccaaaactgaagaattgctcctaacatttctgggccacgactagggccacggccctactagccctagctgcccgtgtcccattccccttctagtagcattttcacttacacaagcaaagagtaaaaatatgttagtaaattaacaatggttaattaaggaaaataaatagcaatgagcatctggaacacctcatctatcatctatggcccctttattcctttctctgtatctatagtgatgagtatacctcgaacacaaatgcattttgtaagaaaatgttgaaacctgaaagatgcatgtagtgacttagaatatgatcatatatatatacttgtagaagtagaagtagccttcgttaagttattgctgaaccatgtcaaacattccttagactaacaattgtaccatccactaatactgcaatgacaattgaccttttaaccttcctatcaagtgagcagcacgcatggcaatctagggcattcaaacatgcaaaaaccaatgaatgcatggtttacgagcaacaaagaacctcctgaaagacacatctcaacagatttcttcagtgagctcaacaataatactactaaccttacaagctcagtttaataggtagaaagcatgtcatagctgttattccatttcccacacagtgtgtctaatgctccaattattcctctgacaactgtcatatggaatatccgccatcgtgtacttattttacccatcttgtaactgactttgtcctattttatggccatccctcagtaagtccaccactttgttagctacccatttattcgacgccattgtttcaccacatttgttgagtaaacttcagaagtacctaggtccactcatcttagccaacaatcatataatacacaaaagggaaaaaattatgagtgcaaagagaatgcaagaagttgacaacacttatactatcttgcatatagctctcagacttgtcttttttcatgatctggaaaataatgatcatcctagataccatgataagtaatttctggtttgcactgacgcacttctaggaagaccactttctcatcaatacatggatcatcaacatcataggaaacatagcatgatcatagttatggtcagagcatgaatcattagtcagatgatgcagccacataaggggcatcattagtgctagaagttaatgtgtcagtatatggcctcatcatcatatcctccttttccattggatttattgtttttctctatagttgacatctcacaaggattcaaaaaattcctgtaatacctcagctcattagaatcatgtagtagtagtaaagttggtcggatcatgtgacccttgtgacacgtgaggagttatagttagtgggtttaatactaccttagaaatttaggagggtgagggctagcttaaagtatcaccatttcgtgtgtgcttggttaccagtccatcgtctcatgcgtacaccacgagcctctgctgctgcaagcacctcaactatctacatgaaccagcctgctgcatttctttcagattagtctgagcaggcccatgaagccatgacagatacaagaactccagtccactccgtattgtacagcactgggcggctgggctcctgctaaagcgccaagggcatgcacagtttgggcctcagaatattgccagcaggtccttctctctcgcctgaagccgttgcagtgcagccttcagaacgcagaggcatttgaccctcaaataaagaaaaaaatcccacttgacaccgtcgtcagcatgagacgatactaattactggaccacaatgtaagttgggagggcggttcgtttgtgtatgggaggatcaatgtgttccagaatgcagagcgccaatgccgtgctgacaacgcaaagagttcctaatgctgactcctaacatgttgaccggcatcatgcagtttgccaacttctcagcacccagttctgaggggtaaaaatcacaattggccatcataggaacggcaagaacacgagtcacaaaaaaagaggaagggcaagaacaccaatctcccaaactcaaaatgagcagtccaataactaacaaaaatttcatctattattatacccgatgaatgaatatctcgacagtaatgagaaagtttgttgtacaatatctactccttttcttacttaatgtttcacttatgcttgatttgtgttcaacaataaactaaccatgcatgctttggattctttaaatttctcgatatatgagatacactacccctccctcttgccaaagggtgcctaactgaactggttaggtggccggccttagctgcccttcttagatcgtgagtttgactccttatgggagcaaatttcacgctagggttaaacaaatcctctcgtgtgtcctaaagccaaagcacatgtcaaaggtccgacccgattaaaatcccctcatttgtcccacggccaacgcacagatcaaaggccaggagttcgggggttttctcgacctgtgtgagaagatcttctcacttacactaatgcatggggtggcttacccccgcaggtcaagttttttttaatggtgcctctctagaatgcttgaatgttaattagttcttggttatgaatgcttgaatgctaattagttcttggttatgtttcataatacagaacgatcgccgataaagttgctgaggctggatact

SEQ ID NO: 4823 - DNA, 1405 bp, Sorghum bicolor
  Intron number 1 from transcript Sb01g042400.1 (locus Sb01g 042400) derived from phytozome v7.0 (chr-ID chromosome_1; pos 65660206 to 65661610 reverse strand)
ctccttgactgcagatacgacggtgagcaactgccccgctcctctccttctcccctcggttcggttgctttggcgtgcctcggcgtttgctgggcgcgaggcgattgattgcttcgtgttccttatcggtcaagaatgatatctttgcttctgtttcatgccttgctatggttttatctgtttgtagcccgggaaggcactgttttatgcgattcacgcgctcctcccgtaaattctggggaattctgagatgtcccgttgtcaatctaagaaacctcagaattctataacgggtgttttaagtaaattttaacgcgtctgtatttgggcgtagtttgatcgatggtatatatttgcatagagagatctgagtggatgcgttatatatgggaaatctgtgtacgtgcatagctactgctgctgcttgctagtcggagtgcttatgcatttaccaaagtatcaagattagattttgaggatttgccgcagctaaattcggattccaccactattgtatatgtagtgtagtatcggtgatgcacctgtcactacctcgcacgccctgatgatcatatattaggcctatgtttaaatgagaatactctttggctgcagacatgccatgttgcatttagtatgggaatatccatgtatatgaaacccacaaatccttgaaatgtttgtttcttgtgattctgttgtgggcgctagcaccacatgcgtgtacgggaaatgagtgggcgggaaccaggtttaacttcgttttgcagggattggtgatatcttatctttctattttcatttcctgatgtgtttgtcttcttctggacatatccttgtgcagcttgccttagaagctaactaaaactattgaacgcattatttcgatgctactgctagtttggtagaagatctaaaagggaaaaaaatactatgcatagggataggaccgtaaatgttagtcaaatgcaaagcatgagaaattactgagcaagcttttcttagccattgttgctcgtattgatacctgtcagctggatatgcatgactaagccacaacaagcatcaggatgcaatatgtttttttttccattaagttgcagttcaaatatagaatccaatacttgttgtagctatcgtggttttgaatctgtatttttttattctcgttgctccataaaactatattacatgctatggttttatttgttttcttttagatccacatttcaggaacttttttctatttcacagggacagaatctatctaggttagcttgttcttgaataatacggatgtgtcagtctccaattttgcctgatttctgttgtttaattttccttgttatgttctttaaagtttaaagcttgttgaccttttcttcttttgttttatagtgacaac

SEQ ID NO: 4824 - DNA, 3225 bp, Sorghum bicolor
  Intron number 23 from transcript Sb01g000330.1 (locus Sb01 g000330) derived from phytozome v7.0 (chr-ID chromosome_1; pos 196392 to 199616)
tcaaagtacaacttggagtacaagtcacatgatatacatgtgtttgactatacatatctctaatacatgcccacaatcacagcggtaggaaactagatgcagatattggatctaaattcaactaaacaactatacatgcagtcccttaatcatgatgtccatgaactgatgtgcagaggggacatggacgatacggacctaccccaaagcaaccttctcactgatgaagtggatgccaatcttgatatgcttcgtgcgacgatgatgaaccagattgactatcatgtagattgcactaacgttgttgcaatagacaatggtcaccgaaggaatcaagacatgaagctcctgaagcaactgtcgcagtcagcatcactcagcaactgcatgcaccggaacaggacactgtagtctgctgcttcaaagactaggagaccaagttgtcaccgagaaagatgcaatagccagaggtagaaaaccaggagtctaggcagttagtctagtcattgtcagagtaggtagtgatggaggacacatcaccagtgctaaagtgtagaccaatgttgagggtgtccttcatatagtgcaggatgcgcttgatcaaagcaagatgcggtagcaagtcatgcatgaagagacaaacctactgaacaacatacacgaggtctggctgaatcagagtaaggtactatagtgtgctagcaagaatccggtaccctgaggggctctcaacaggagcactagtcatggacagtttgacctgagagtcaataggtgttgctgtaaggtgactcttggtcatcctagcccgccgaagatcaatgacgtaatgttgctggggcaaaaagaggccgtcggaggagcatgtgacagagatgccaaggaagtggtagagagcaccaaggtttgtcatggcaaactctgagctgagccagttggtgatgcacctaagaagggccacaaaagacgccaaagacgatgtcattgatatagagcagcaggtaagcgacatcatctcaatctttacaaataaagagagacatgtcggattttgctgccatgaagccatggttgcagatgtacgaagcaaaccactcgtgccatgtccgaggagcctgcttgagaccgtacaaaaatttctacaaaaagcgcctgcttgagacctttcaaagacttctacaagagacagaatcgatgaagttggatggctgctggcagctgcaaggtcaccatgaagaaaggtgttcttcatgtggagctgatgtgatgctgagcatggcaagtatggtggctggcttgaccacgggattgaacgtcttgtcgtactgcgaacaacccaacgagccttatggcgggcatgagatccatctgagtggaatttatgcttgagaatccacttgtccatcacaatattggtgccaggtggtcgagggaggcactagtcaccatgtggttttgtcgatgagagccttgtacttgtctgccatggcagcacaccagctgggagtagccagcgcgctgcagtagctagctggcagcggcgaagtcgacgtagtggagagattctggtagttgacgcgctgcactgcccctgttctcaaccgagtcaaccgatcgaagatgaggttcgaggatgcagagctctgcatgggccgccgctcaggagcaggctgctggaggacccctgaggcgacccaaccagccagcgataggagccgtctggggcgcatgaccagcacgtggcagcgccgctgtggacacaggcagccggctgaacggagctgccgagcaccgcagcacagtgtcgacaccatggcatgaacgcctgctctggctggctcggtggagctgtggcgacgggggcggtgctgggcagcaccccagcatagcaggtgagggtatgatcgctgttggggaagacggctgggtcgggtcattcttgtaggcaatggtaccatcgctgttggggaagacgtccgcagcagcgcagtaggtggtgcggcggtgccgtttccggcgggcggtgctggtagacgatgccgaagcggccagacccgcctggagcagcaattccggccgggcgagatgtctagcgggctgaatagcagggccggccatgatgatggctgggtcctcgagcaacggctactcgaccataaaaaaaacacacctaaaggtcgagcaatttacgcagccaacaaaaagtcaagtgaagacgcaccagatggggtggcggctaacagaaaatgttagattatacatatctctaatagttatttttaatgagtctatcatatttgtatgacctttgaggtgcttttctcttagtggtggactatttccactgcaaacctggctgcaaattgactgggatcttgacctccctccccacgagatgctgacaaaagccagaataaattttggaagccacatcttcagagaaattttcatcacaacagcgtggacgatttggaaagtcagaaatggtgccatttttgacaataaagcagtctctcttactgaatggaaaatcctgctaaaggaagagataggcttggtgtgcatcaaggccaaacagaggattgctgactcattgaaactttggtgtgagaatagactctagtttccactgtatttttcgctttgggccttgaaggcctttgtattctttattctttgtacataaatcaataaaatgaaaaaaataggtaggggacttccctgccgattgtgtcaaaatatttccactgcagacctgcatttgagttttaggtgctcactgttttccagggtcctcactgtttttcaggattatcaccttaggtccacaaactctcaaagtgagaggttttaggtccttaaatttttttaagtggttcactctcaagttagaatccattttagcatcttctaaaaagctttgtatgttcattcttcctactttctagatcctgataccacagtcctgtactcctgtcggcctcaatgaacttctctagtgtgtcatgtacattaaacctatcttgtactagtaattaataaatagggggacgctcttattaaagtgcgaacagttggagcatttgtaagattgctagtaggatatcatgcgcatgataacatcatagagaagacaaaaaagaaattgacctttggtcatcactgagtttctattgcatggtatgtgcaggctgatttggaagaagctaagacacaagaaaataa

SEQ ID NO: 4825 - DNA, 1869 bp, Sorghum bicolor
  Intron number 1 from transcript Sb01g006910.1 (locus Sb01g 006910) derived from phytozome v7.0 (chr-ID chromosome_1; pos 5878988 to 5880856)
ccggcaaggtcttcatcaacttccgcgacgctaaggtgcctgtcaatcctagaaatgcacgcactggttacaccaatgtcgctccattctgttgtttggaccgcattgcaatctgtagtagtatccctgcaaatctgcaattggctaaaaccttagaatttcaggagacgaactaaaccgttgtggtcaaaatcgtgcagcacaaattattgttactcatatctgccaatgtgcttattacgtactacttatagtagtaacaatagagacacagaagcttggatgcctggcattaagacttctgaaagaaatgctgaagaagtacgaaaccaaaatggcgataacatggaatggaaagcttccagttaaaaaactactagtagcagtagggagtaactggcaagctcaagtaaacttttaaaaacaaagaatttggcaagaatgacaatgtggttagcttatatatagttttacttcaaatttggatcattttacaaggttagtgcagtggcgtagccaggatttgtagttagggtggtccattatttaagttttttcctcctctatcaatctaactacacaaacatgtgaatcgcgaaactcaatatgatctgcacaaaaagaaatcctataaatgaaataaagtaatccagcattgcacaaaaaatcctccaataacctaaaaccttagaagcctataacctaaattagtttttcataccctgtaccttgtgcacttttattgtccgtgcctatcgtcaatctccaatcatcggtcgacagcattgcctggctacctgctgacgctgagctgctgctcgacgcctcgtcgtctgcagtcgcattgcaaaggcggcaaggcgctgatgaccatgctcgccaccactgcccacgctcgccgctgctgccaacctgccgttgcggcgtcgccccaccacgcccaaccagccaactgcacgcgcaccacagaagaacatgaaggagaaggagcagcgagcacctgctcgggaaagaatacgaagagacaaagggccacggcactgtgtgaaggtgaaagaccaagcagcgcagtggacgtctccggagtcgtagtcacacactcacgactagccttgtttgggccgagcgcagggtggtccgcagcccacagggaccaccctgtagctccgccactgggttagtgtatttaccttgttttcccccaaaaaaagtgtatttaccttgcaaagtttagatataagatctatcttggcagccattggcagcagctatgtggctctttgcattatctttgtcggttttgtcaacttcaaaggcaggaggcgctaaggcactgaggcagctgtcatttggcctgctggtctgtgcggttgttatttctagtttactggcgagtgcaggcattggtctttgctgaaagtgtttgaattccatttttcagttgcttgaggaagaaaatatttgagttcgtcatggtctgaactgtggacacaaattttgtgcaaattcagtgctgtctatctgatctctgatccttttcacgaaagaccggagggattgggagcacccagaacaaatctttgtctatttcagaaagcagttgcattacagtcatgatattatctgcaatttggatagataatgcaaactgcggtgtcagtttataaacttcgtaaatgcctgaaggattatttccagcgacttcctcgtcaggctggtttgcacaagtatacaacacaacacccctattaatgtgaactgaaagcgcaacttgaatcaagtcaactgatctagttaaagatgtttatttgatcaactgtgcttactgaatattttcaaaatatgcaggagtatctgcagggaaatcca

SEQ ID NO: 4826 - DNA, 6533 bp, Sorghum bicolor
  Intron number 7 from transcript Sb01g031260.1 (locus Sb01g 031260) derived from phytozome v7.0 (chr-ID chromosome_1; pos 53823628 to 53830160 reverse strand)
aattttgctaaggtatgatgatattgctacttgctgatattttcttggtatttttacattaatttaatcttatttgagatgactcaatgaatcgcattaccggtaatgtgttgacaaccaatattggaagacttaaggtaggaatatgttgccactaaaaatctcaagtgacagatacttgggtagacatgctccatccaaaatgttatgcagttctagcattcaaattttgttccacaaagaatgcaatcctaggtaggtaggggctatctttaaagccatgcatgcaacatttttggtggactttatttcctttggaattcgcatgcaacattagttacctaggctaacaagccttccaatgcatgggaatgagtagagattaggagcatgcattatttcactgtcaactaatctgtctgagaatttctaagattgtattcctcttgggacagagagatatttttagcaagattccctgtgaagtttgttaggcctatggtttcaaaggtttaaattctttgaatgttaacaggtttactatatgtattgtggcttagaagacaatgtgttgataaattaaatgactataggacaagttgtctcgtgcaaggtaatattacatagcatattttctaaaatgtagataagggacaccgtatttgcgtaatataatatgaaaatactcccatttttgacatttacatgtagaaattttttttaccgaatactaatgtgtaatgttgagcataaattaccataaaaattatcttagcctgacacatattccaattttatttgcgaatccatcatgtgatgttactactaactaaactaccaccacaatatcagctacaatctttagatactggccggaaccaccgcctatgcagcatggatatggatacagatatgtgtgtcggtatctggctgatacagatacgccattttttgttttaaaaaactaatacgtggcatagtggatacattttactatttcttttttctaaaaattatgtcatagatgtgtgaatacatgaaagatcttagctttattgagacagaaacagagatcagccatcagctctaggcactggagagcctttctgcgtactgatctgaaagggacacatcaacaaggagcagcagcagttgtttgccgctgagagccaccgcagccacgtcaggaggggaagaaagatcaggagggagaaaaagtaagaagagtcatcactggcaacactagggaagacttaccactggctggtgctgtaggcagcaggcacatgcgtgagtgtgtgggaacgtctgccaccaccttcatgcctccaccacagggtcctctgccctttgaggagggagggaggggggggggggggtctatgtgacatccggcccattttggaatttggcccatagtggtccatgtgcatgttaatgagatgtcgtggagggtttagtcccaccttggtggttagggtgggttagaccaacatataaggcttctagagtccatcccaccatccttgggttaaaccttttatgcgaacgagcacgaaagcataagtgggacgatggtaggtgtagttcactcaacgtgcagagtgcatctaagccgtttacattgggtgagcaagagaagaaaattgaagggctggagaaggggaggaactcgccatggctcgctagcgactcgtcaccagcaggtgatggtggtgctctctggaccaatgactcgtcaccagcaggtgatggtggtgctctctggactctggttgctgctgcagcgtcgtgacatgttgcggcagacatattgggttaggtagagcgggtggctcataaccgatgctacccttctggtgcgtcgggcatatcagcgtgatgtatcggggaagcccagaactatggaccaatatccagaattactcatatttgtttttcacggatacttcgctcatacgtatctgccttggatccatggatccatatccgatacaggatacaaggtacatggaccgctgctatagttcctgcttgttatgaaccctagttcattaggtgtaaacaccactaggaagatagctgagacttgggttcttcattgtctccttcccttgatacatcactcacctttatatagagaggattccttgatcgctaaggatggtccaatcaaaccctaacaaatcatatctaatcgaatccctgattgatcctagatctctgttataatgaggaagggctgacaccccataacactcccccattgaactgtagttacatctcggcttattttatttacttctaaggtgagaaatcagaattgatgcatgtgtgcagtacgcatatcctggatcccatggaaattcagcaaacctggttgcctctatctagcacaatgtccatgtacgcacaatgctactagcaaagagcaggggtgtggggtgatatgctggtgcagatgtgatgttacaggtctggtgatgtgacacaagagccagtgaatcaacttggccagcaatcaaggcctacagaatgtcaaagaagaggttgttgtgatggagttgtgcgcgaggatgcatggtgttgtggtcgtagacggatcctgtggcacctgtcttgtgtatgcacagggaacggggtgccggtaacacatccagctcaccaagcctggagttgcttgccacgacacaccatccaattttggtgagtgtcatcggacctgttgaggacataagtgtctttgtttccacaatggaagattgtggcataggccaaggcaataccatataccactagtttgttgcccgtacttgacgcctcgccaggcatccacactgccgcctgtaggtgcctagcattcatgcccctcctctcctttgacttcccaatcaagtcttgtatttttgcacagccagccaacatgctgacacatacatccgtaattgataggttggtggcagcagaagcccacgagattggattgaaaccaatgcaatctgataccagattttatgaactgtagttcatcaagggtaaactgttgtgtggctgctggggatcaagggagatggattgggatcgaaggagcggcggcggctgatggcgtgaacagtacccacgctaccgtgcccgcgggtactgttcacaggatggtggctgtgagaacaagagaggaggctagggttttgggcgctaggaacgccggccgcggggctctgcccacggccggcaagagagaagggatttccttctaatctcttgcttgattagattgatatatctcctctatatagagaggtttacttgacttacaagcaagacttacttgacccctaagcaagcgactaattaaccctaatgggctaaggcccaataggtccttgactcttctaacactacaccccacctggacatgcagctcgtcctcgagctgcaacttaacgacgacactaagaatgactccgcaagacacaaacataacacctaaaaacaagctttttacatctcggcttgttttattattctcaactagaaataattttaacccctgcacataaggcggacaccatccacctggatcccatggagaccatctggatgaaatacgtgcttgtgtgtggcctccaggaagtggtcgcaacagggaccagcgaaggcgccctcgcggtggtcggtggcggaatctggcggcgctaggcagtgcgctcccaccgatgacaccatgccttctccttgctggacggctgctggtctgcaccgcacatagaagagcatagggcttccaactgccgacgccgaagactttgagtacaccacccgcgggaaaaacagcatgcacgctgcccgtgggcggaaccacattctgaaaatccccgacgcagcggatgagatcgcagtcctccacatggtggagctgcaaataggtgcagggctgaatcagcggcagatcgcgcatcttctgcacccgccgacgtgcaaggaggccacgcacagcagcttgcagctgcactgccgccgacacctggcagcgaagcatcttccctgtcagctccgtcgccatcagctgctcggtcggctgcagcatctcgccctcatctcggacctgctggaagctggcacccctatagaagatcccatcggtgaatggatgctggatggttgatacaccggggaggacaacagcgctggtggagggtgctggagcaaccgttgtcgtggccgccggggtgcttgccatcgtgtgcaccagcatccatggctgctggatgggaaccggggcagatggatgcacgcccagcggtaaggatggtgcctgaagcgagggaagatgacccgcgcttgacatcggcagctgtgggaactgctcggctgtaggcagatcccgaccgtccagggccgacacacgcgtggccagatcgcccatctggaagctcatgagggccatctggttctggaggccctggatggcgcttgtgaaggccgtaagcgcgtcggaagggatggccagcattggggctggcggtgtggaggacgcagccggcggcggcgtggtggcagtgatcagggcgccggcggaggttgtcacgaccgcgctggcgccgggcggggctcttgtggagggcggaacgccaggggctgtggtcccggaagaagccatgatctctgataccagatgttgtgtggctgctggggatcaagggagatggattgggatcgaaggagcggcggtggctgatggcgtgaacagtacccgcgctacagtgcccgcgggtactgttcacaggatggtggctgtgagaacaagagaggaggctagggttttgggcgctaggaacgccggccgcggggctctgcccacggccggcaagagagaagggatttccttctattgatatatctcctctctttatatagagaggtttacttgacttacaagcaagacttacttgacccctaagcaagcgactaattaaccctaatgggctaaggcccaataggtccttgactcttctaacataaacactgccaggaagatagccgtgtggaattggcttcatgggagactagactattttggagactagggattaattcttctccgctgcctccttcccttatacatcacctcgctttatatagagaatcccttgattgctaacagtctctttggcacggctccggcttgttgcggctcttgctgcggagtcataccaaatggccatctaaaaagcggttccttgaaaggagcctggagccgtgaaaatgtggcttctcctgccccctcctcagtcctcacaaacttgacacaaattgttacaaaattgtcactggagctgtttttgccaaacagtttcagctccactagagaagctgctccacacgaggagccggagctgaagcccttttaggggattcctaccaaattggccctaaggagggcccaatctgatcctatgtgaattttgaagaatgctcctattcaaccccatataatcaaaattaaggtgtacccgaaaaaaacttccttcaacagtttccttattcaacctcctaaatttaatggcaccctaaatgactcttttttttttgacaagtaccctcaatgactctttgtccctcaattcatggttgcatgcttagcaccttttttttttctgcacccctttccctgccattctatgacaaaatagatctaatttaggtggagtcctggaagtgctctaacaaatcgtatttattcatatatccctactttatcctacatatctagctaatgaggaagggctggctggctgacacataatatggctaatactggaatagccccacctgccattgctatactctaaaaccctattatggatcactacgttgtattggtagagccaaagtcctgctacccttatagtggaccctgtaatattaagctttgtgttagaagataactttattgtagctccaaggtactatgaaaacagcatggatggtccctaattgatcctatatctctagctaatgaggaagggctggctggctgttgacacataaaatggctaatgctgcaatagccccacctgcctttgctatactctgaaaccctattatggatcactacattgtattggtaacgcctaagccctgttacccttatagtgggccctgtaatattgttggtgtttagctctgtgttagaagataactttgttgtagctccgagatactaagaaaacaggatggaaggtcatattagtcacaacttacaagcactttataattattattttttcttagggtttgattggattctgaattttgatgtgtacacgaaatttacaaagatgcatgttattagtctgcatagggcactaaactagtcttgaagcctagaggtcaaagcagtaacattgtttattccaactagtcttcatattttggtgtaatatatgtgatgcactcgtttcctcagtagccctaattattttttcttttttccaggcaattttctgttactggatcacatcaaacatatt

SEQ ID NO: 4827 - DNA, 1155 bp, Sorghum bicolor
  Intron number 6 from transcript Sb01g037810.1 (locus Sb01g 037810) derived from phytozome v7.0 (chr-ID chromosome_1; pos 61384031 to 61385185)
ttggaagaaaggtatgttcttattttctcttgcagttcatgtgtttctcaactctctttgtagttgtatgcacattcttggtcatgaagctttttagcgtatgcgaattcttcttttttcactgatacatttttgatactctgtttgccgtgcatagtaacaatgcagaaatgcttgacaatttatatgttggttgtgttggtctcactcatgccttgtgtttggtgcttttgagataaaaagaattgttagtggagggatggttcgcatctggatttaggaatcagtgcagtagaaactcttaagtactaacctagtttgtccattctctcttttttcggtatagctagtcgctagatgttccagttttggtattttgggaattccattctatgttctcacttctcacactggcacaacctgttctttcatggcattgccatgttgatgctcctttgttctatttctagtccttggtaggaatcaactttccagacattgttggtgacatcttgcatcgcttgaatatataggctgcctttcttgttttataggattaaaactgtagagcaggaaacaaaaaagagtgaagtgatgtactcatagattgttagtcatattctggatgtggttgatgaggattttacttataaattcacatttggataaagcatgtgtgccatttgcttcttccagttccaaaataaacttctgcaatgtaaaaagaatattagttttgtaacatgtggtcttggggatcaggttatatatgctgcaagagtctgtttgcttaaattcactagaatgcttgattggaaggcataattcctactaaatttctcgtcttgtcttatcagtagaaggttgaggttcctgggagcagtttgcgctagaattgaagaactcttttgcaactaggagcatttcattttggttaataaactcatatgtataaccatcacaagactgtcttatgattcacttcacctatttggctgttggagatctattaccagttgatgttctgtttttttaataggaaggacaccctgttatttatctgtctgcctatttgggactgttcagatatgccttaacttgtaatgtacgcctttcgcaggttgggtagaaatttcccatcaaaagcaaatctgc

SEQ ID NO: 4828 - DNA, 3161 bp, Sorghum bicolor
  Intron number 2 from transcript Sb06g026250.1 (locus Sb06g 026250) derived from phytozome v7.0 (chr-ID chromosome_6; pos 55322576 to 55325736 reverse strand)
tggtgtggaagtgcgtcattcccggcaaagagggcgtaagccaaaactcactcccccacccccagtccccactcctagatcttctctgcttattgtgtttggcaatatcaggacacacccgaggtttgttcgattttgtcggcttgtcgtgttgcatatggttccatttttctcctacctgaaaagaggacaacgatttgtctaatgcttttgtacggagtattcctgagctggtttgcttgttttttttttctacttgtgttttcatagattgatccagaaccctagcttttgtactgtgcctttgcagccactgcatgtggagcatttgtactgttaaagtgttaattgttggcagatgaatatgaggagcataatcctgcaagcatgttcatgctgcatagtcatattactgttctggagtaactagatgttcatgctgcaatgctgcatagtcctgttagtgttctggagtaactagatgttcatgctgcaatgctgcatagtcctattagtgttctggagtaactagatgttcatgctgcaatgctgcatagtcttattagtgttctggagatatttgtgtttcattatttgggaccaaatatcttctttccagttggttacaagtgccactgtattctgattgtacaatgaaggccctctttggaggactcgtcctaggttccgcttcaacattgttgggctactgtttgtgctgtagcaggagctggatgaagcttcaaaccactagcttttccagcttcacctgctttgtgctacagaaactcaaccctaaaacactacagtacctttataagagaagccaggtcttttggttctacttcctaattgatttactatgtcttcatagaacaagaactatttcaacatgttttccaaaatagaagcatgcaaacggtattatttttgcaagatttctgtaattcaagtttttcgaattcctagccttacacaagtaagttagaatctcattagattttggcttccatatggtaatgtatctctgtatctttgattcaaagaaactctctgtctggaacagtaggttatcaagtcattcattgatcatgttttattttaaggaggtcgattgtgttatggacaggaagctcagaagtatcattggcactggaatagaaaggagttggattttcctagtttagcagccagatcagatttggctagaacaataactcactaatataggcatactgctattcttagtttgtttgtgttggtgtctctatttccaatttctgtcttcttttccagattatctagtcatccttttatataaagatagtgatagtactccctccatccacaaaaggatgcaactataggatttgtgcaagtcaaactagcttaattttgaccaaatttataataaatagtattaacatttatatcttcaactaggtttactacgaatatatatttcataattaatttagtggtacttattgtgtatcacaaaggttagtacttttttacataattggtcaaactttaaatcatttgactcctcgaaaagtgataattgtgtccttttgtgaatggagtgttgttcagggttaccagcaaacaagtaatacagaaaagggcctggccaccaaacatgacttctatcagagcctcgtagtgcccacttgtgatcaggccgacgaagcaatctagcatctcttggtttcctttgtattcacacggcaggctgggtttgaagggctgatgcaatgcaggccctggttcagcgatggacacggcccctttgcaagtgtcttggcagacagctgcgtgacgggtgcccaagacgtccatgaaaggatttaattccatggtgtcctcttggcaaggatggtctagaaacacaggaaccgctgcgtcttccatggccaattggccatggaccatcagtcaggcaggtgcttcaggaggcagatcaggcacacctctggtgtttggacgaccaagggactgagggaacttctgtagtagacagagtagatttggctgctcctgaccgtggattcggcttgtacttggcctgttttctatctattaatggaatgacgcacaattctcccgcatgcgaggaaaaaaacagagcctcatatttatttgagacaagccctgctctcaatagcagtgtgttgctttccccagcattatctccttctctgcctcccacattataggatagatgatttactagattttcagttactcagaattcagaaagtcagatattgcagttatattttaagaaataaatcatattgtaggctgaatcattttttaaaagtaatctgaatagtgaatattcagattatcactgaagaaagcaattgagctatctttattttttttgagaacatgtccattgacacgtgtttcattaagaggaaaattgaactatccttgtgataaggaggtacgtgtgaaaacatacttattaggtatgaagcactttatcgtatgtgtaccaggctcccacgtgcccacgtggaattgcttagttaatctgagcactatttggttggcatagtatttttaattgaacttttagcatggcgacagttgaaatgagttgattgatctggcagtaatgactaatgaggatccattatggtacagaagcatgagtgaatcaactgatattctgaaataccatagtattgcggcctggtttcgctccctagaaccaaatgagatgctttggcagtcctgttcaagactggttaggaaaatatgctttggcttttgaaactctttactacttcgttgataactctgtaaaacagtaattttgtaaggtatggtcgttacttgaaagtctagatagcagtcaacgggaatgtttcttaaactatagtttagtttgttatgatccattgtttgtggtgccgattcgtattttatattcacatttcaataattctgtggtgcacatgctgacctattttatgttattgactgggtgcataatgttgtcttgtcttatcctcctacaacaaattgtcacactccactcgttgttgatcctccatcccaatcatggatggaacacaagctaaattatgtgtttgatccatctttgtgcagaccgactgggacggtggatatttccccttgactct

SEQ ID NO: 4829 - DNA, 1568 bp, Sorghum bicolor
  Intron number 1 from transcript Sb10g025280.1 (locus Sb10g 025280) derived from phytozome v7.0 (chr-ID chromosome_10; pos 54525384 to 54526951)
caagtgcgccgagatccagaacgccatctccgaaggtgagaacccagcgcccgtgccggtgtgtgtattttggattttgtggatctgagggcgcttaatcgtagatcttgcgctcctcgctgtttagtgcttgataagctccactgcttcggtgttcggtgtcaattctgcagtttttattgtttttgtttgcttgcgccgtggactcaataagtttacttattagttattactcgtcgatatgattatgaggcaattgaacttcaggcgtgtgaattgaatttcaggcgtttcttagttttagtcaattcagtctaaaactgtgctctcgatcagctggtgtccccgtgtttgttagtttgttgcttgcatggatgtctcactattttttttctcctgcagtgcgttttgcgttgttctagctgtgcgcctgggttatctactgttatattactactagacacagttagatccaacaataaaatactgatgctcccgctttgcccaacacatcttataatagttcttagctgtgtcctgtgtgtgtcctatggtaaataaactcttggttgtccctattagatattttttttgtgagatatttgtagttgggctgatgtgttcatatagaactaatggtagtgctctgttctgaagaggtccccgtataaacccctgctgtgggctgtggccatcctgaggggataggataagttactgaggcagcagatacgtcgtttgctgcacctgtggtccttgctgcccgatgtaggatagaactttccgtggatttgcattattgtagcaggtaggaatttgttttgttttgttttcaaccgcatccgctgaacttggaaggaatcctagaacgaacgcacatggaccagagatcttgtggtccattcaacagtgtcatataaggtaattattggtgcacagtgcctgtctgaaggtgcctgctgcagtgcttgcattattggctgccgcatgttggtaatgacattggttggattctgcccatgtctttgctcaggatttgtttcttctaatacgattagcattatgatgcttgggttatgcttcacttttggagccatactatgctctacaagaatcagcagagtagacgtatgaagacgtatggctcttgtcccatgatatacggatcctattagttactttagtattgctactgtctgctttgcttccctttcccatgagaagatgaggattacagtccatcatttatttatttatttacttaggtactgttctgtctattttgatgttgacatgcttcttgggtgacatgtccggtcctgttgtagttaacatcacaacaataaaagaggataagtactgcttatcattctattgtattattttactgctatgtctatcttcagtatttgatagttctgtcatcatttttattatttttaggccttctcttactagtggttattctctgcttttattgtataattgtattcacacttgtggttctaaatagctttgctttgttttaaacaggagcaacttctttccttttcactgaatacaagtat

SEQ ID NO: 4830 - DNA, 8537 bp, Sorghum bicolor
  Intron number 2 from transcript Sb0013s011230.1 (locus Sb0 013s011230) derived from phytozome v7.0 (chr-ID super_13; pos 3081958 to 3090494 reverse strand)
cggcgctcgcgccctgtgcgctcgacgcctacccggtgagtgcttcctgttgtgactcccctcctcacgcctgacatgatgctctgattcaaattgaggtgttcaagcgtcaaattaaaatttactccgtgcggatagtgttttaggtactgaacgtccgtggtggctcataccattctgaaaacagtgttgaatggatatttagtggctcggaatcgggaggctagttagtaatacgagtagtggatcatgaagtggtgaaaaattagcttgttgttgttggatctgaatgggttgaacctacaattgtggctttggtatagtgaggattgattcggtagtcactgttcagcaggggatgagtctcctctaactcagcagggccgtctctgaatttgagagcctggtagaaaatgcaagatggggccctaaaattgggaaaaaaattcatataatcaaatcatgctttcacttaattatacaacttcgatacatcttattgactcctaatcataagaagaaatcacattacaaattaagttgttccatattttgcactccatacgctagtatcgactagcaggctcaggttaccacttaccatgatgtgtcgggtgtcggtaggtgcggccctgtagccaggggtgaagccaacttaaaatccatagtggtgcacagtatccatagccatgtagaaatacgtctaatttcaactaatttgtatggcggctgacaaaggaccaaaattactcggctgcttccgcatatggtgcgatgttctttggctcttcagctccagttggagccaagcaaatctggaagaccgccgcgccacctcgtggaaccaaaaccatgaaccacatcattctaggttgttgttttagcgacaggatgtcatcagcatcgacgaggagccggtgatgcactggtgggtatgcgcccgaaagcaagtgccaaagctgttgcgcaggggttcgactccctcttctttctcgtcggctggtcgctgtggaaggaacataatgccaggacattcaacgcaaccgcaaccttggcagcgcagttggtgtctgtgatccaggacgaggctgattcctggtgacatggcgtcgctcatggcgaggatatgagcctttgtcgcaaaatgtttactgtgtaatcacaagcgcgtgcctattggtttgttcgagggcgtgttaccgtcccctagggtgttgttgtgatgtggggccgcacgtatacacttcaacgatgggcccgtgacatcaggaaggcctcgactgggcctgcagcagcagccgcgggcgcgcccagcgtgccccagggggagccggccgaggacaggggcttgatggatagccctaattttaggagataattcctattagttatttccaaattagttatttccaagttattagtttcctagtttgtttggccacggccctatttattttgtatcccaggagacgttgagatcaagcaagaattattatctccaacctcctctcttcctaaaacctaagcctgcggctgaggggcaaaacctcgccggagaagacgcatcgtggctacgaactacgtagccgaggtccagctaccgtagggcgtgacgcccttgacaacctggtatcatgatctaggcgatcctcgtctgcccggtccacctccccactaccagccgccgcccgaacttcaccaccagccgccgcgcaaaccctagcttcccccgacgccgtcctctgctgcgtcttgcacgtcaccgatggcagatgccgaggacctcaagaccaccgtggccaatctcgccaaggcggttgctgccctgcaggtgactgcagaagccaacgccaataccatggaggcccaggaaaaggcgatcatcgccctctccaacgaccgttcctccacgtcgggctacaaggcgcacttcggcgagccccaccaggatcggccgccgaagttccagaagatggacttcccgcgctgcgacggcaaaagcgatctgctggtcttcatcaaccgctgcgagtcctacttccaccagcaacggatcatggaagaggagaaagtatggatggcctcctacaacctagaggagggcgcgcagatgtggtacatccaagtccaaacggatgagggtaccccgtcatggcgcgattcacggagcttctcaacctccgctacgggccgccgctccgatcggcccccctggctgagcttgtggagtgtcgccgcacgtctatggtctccgaatatcaggaccgattccaggccttgctccccagggttggtcatctcgacgagtcctagcgggtgcagctcttcactgggggccttctgccgccactcagcatcgacgtgcagatccaaaacccgcagatgctggcggtcgccatgagcctcgctcggtagtttgaactgcgggagcagtatgcccccaactggcgaaggccgccccccgggggctcctcccagccccgccaccacggctcgccctgcccgcaccagtgggcgcgcggcctgctacccaggcgcaggtcacagtcaagggtcgtaccgtcaaacggctctcccagacggagatggatgaatgttgtcgcctggtctttgttacaattgtgatgagaagtatggctgcggtcacaaccgcgtttgcaagcggctgttcctcctcgacagtctgccggacgacgacgtcacggctgacgacggggctgatgccggggcggaggagggagacgctgaggcgcccgttttctctctccacgcggtcgttggtgtgccgctcgctgacaccatgcaggtccaggtgtcggtcggcacaacgacattcatctccctcctggagagcagctccactcataacttcatcgtcgaggaggttgcgcgacgtactggcctacgcatccaaccccggccgcgcatgtcggccatggtcgcgaatagcgagaagattccatgtctgggcgtcattcggcgtgccccggtcaccgtcgacaacaccaccttcgccatcgacctttttgtcattcctcttgcaggatacgacatcgtgttgggcacatagtggatggcgacactaggaccgatcgtgtgggacttcgtggaacggtcgccgtccttcacctaccaggggcgtgtgttctgctaggcaagagtgccttccacgggtgcgcccagcctatgtgcgtcaacggtgtccagcgcgtccctcgacgggctcctagcagcatacacagacgtcttcactgagcccagcggcatgccttcaccccgcgcccaccaccacgccatcgtcctcaagcctggctcagctcccgtcacggggcacccatacaagtacccggcggcccacaaggatgagctggaacgccagtgtgctgccatgatcgagcagggcattgttcgccgtagcgactcagcgttctcttcgcccgtgttcctcgtcaagaagcccgacggctcgtggcgtttctgcgtcgactagcgcgccctcaacgccctcaccgtcaaggatgcatcccccatccccgtcgtcgatgagctcctagacgagctccatggcccccgcttcttcaccaaactcgacctgcggtcggggtaccatcaggtgcggatgcaacccgaggacgtccacaagacgacgttctgcacccacgacggcctctacgagttcttggtgatgcctttcgggctgtgcaacgacccgacaacgttccaggccctgatgcctacctccgtcggttcgtgcttgtttttttatgacatcctgatctacagcaccacttgggcagaccacatgcgtcacctccgcgtcgtcctggacacactgcaccggcaccgcctctttgtgaagaggtccaagtgctcattcggcgtctcctccgtcgcctacctcggccacatcatctccgccgccggcgtccccatggatccctccaaggtccaggccatccacgactggcctcagcctcggtcggcacgggcggtgcgcgacttccttggcttggcgggctactacatgaagttcgtcaacaactatggcgccattgcaacccccctcacggcgcttctgaaaaaagaggggttcgcatggggcgtcgaggcggatgcagctttcagtgccctcaaggggggcgtgacgtcagccccagtgctgaccttgccagacttcaccaagcccttcgtcgtggagtgcaatgcgtctacatatgggtttggggccgtcctcatccaggagggacacccgatcgccttcttcagcaggccggtggccccgcgccatcgctccctcgcggcgtacaagcgggagctcatcggtttagtgcttgccgtgcggcattggcggccgtacctatgggggcgccgattcgtcgtcaagacggaccactacagcctcaagtacctcctcgaccagcgtctcaccacgatccctcagcatcattgggttggcaagctactcggctttgacttcaccgtcgaatacaagtcgggggccaataatacgattgccgacgccttgtcccgccgcgacaccgaggaacaacgtgggtggcctctaggcgatctccgccctgcgcttcgacttcatcgcgcgcctacgtcacgcccaggccaccgactcggcgctggtggccatccacgacgatgtccacactggctcccgcgcggcgcggccccctagacggtgacggacggcatgatcctctacgatggacgcctgtacatccccccgacgtcgccccttgtgcagtagatcgtggcagtgatacatgatgatggccacgacggggtctagcgcaccctacatcgcctccgctgcgattttcattttccctagatgagatgtattgtgcaggattttgtgcgggcgtgcgtcacctgccagcgctacaagtcggaacatctacttccgacagggcttctgcttctgctgccgattcccaccgtcgctgggcggatgtcggcctcgactttgtggaggaactgccccgtgtcaacgggaagtcggtgatcctcactgtcgtcgaccgcttcagcaagtactgccacttcatcgccctcgctcacccgtatacggcggagacggtggcgcaggctttcttcaccgacatagtacgcctgcatggcataccgcaatccatggtgtcggaccgcgacccggtcttcacttcggcgttctggcgcgagatgatgaggctcatggggaccaagctacacatgacgtcagctttccatccccagttcgatggacagacggaggcagccaaccgcgtcatcgtcatgtacatgcgttgcttcaccggtgaccgcccccgtcagtggctcagatggcttccctgggctgagtacgtctacaacatggcctatgagacgtcgcttcgggagactccatttcgtgtggtgtatggccgcgacccacccaccatccgctcttatgagccgggtgagacgcgagtggttgtggtggcgcgcgacatggaggaacgcacagctttcctcgctgacgtccgctaccgtctggagcaagcgtaggtggctcagaagctgcaatatgacaagcaccatcgataggttgtctaccaggtggacgattgggcgctacttcgtctccgacagcgtgctccgacctcgctgccccagcaagctgaaagcccgcttcttgggaccttatcgtgtcgtggaggtcatcaacgacgtcgctgttcgcttggcgcttcctccccaggcgcgcatccacgatgtgttccatgtgagcaccctcaagaagttcggggcacacctccagcagcgccgccacctctgcctgacatccaccacggcgccattgttccagtgcccgcgcgggtggagcaggttcgtcttgccaggggagttcgccaagtcctggttcactggcagggtgaaccgtcttcttcggcgacatgggaagacttggatgactttcgcgagaagtatcccgccttccagctcgaggacgagctggatcttgaagggggggggggggagatgtcatgtggggccgcacgtatacacgttagcgacgggcccatgacatcaggagggcctcggctgggcctgcagcagcagccgcgggcgcgcccagcgtgccccagggggagccggccgaggacaggggctagatggatagccctaattttaggagatttatttcctattagttatttccaagttattagtttcctagattgtttggccacgggcctatttattttgtattccgggagacattgagatcaagcaagagttattatctccaacctcctctcttcctaaaacctaagcctgcggctgaggggcaaaaccttgccggagaagacggatcgcggctacgaactatgtagccgaggtccagctaccatagggcctgacgcccttgacagttgctttaccaaactctattctgcttaatgaaaaacccgcctaggcgcgatcacaaaaaagtagtagtaaatatatatatttttttgcctggtgccagtgcaccacccaaacatagtgcggcatcgcccctgactgcagcagcgacagggtgcgtcctctgtccccgaattggcactcagcaggtgtggaactgcattggcagactagcaggggttgtgttactgtcttgctgggtggctggtgacctgggattgggagacaaacagagagaaattggtcagatttgatgaaccagttgttgaggttgattggtgatcacaatcgatattccttcacagttccaattcacgttcatgtattggataaatgtttttttttggtttgtgtatccttgtattaatgcaatgatatgtagctcttgtctgtgttgaagaataaaagtggctttagtttttttggggcttgtgcagctggccacctcgcgcctgctagttgatggccctggtggtcaggatcccttgtttcaaatggcacatttattcaggagtttggcttggcaaataagtatggctgtgcaaaatactacacggagtcagatatagtctttagaatctgatttggattcagagtgtccaatttgtctgaacaatttggacatgggtgtggaggtaactctggcatccagttcttagtgggtgcttaccccttggttgttgcagtatgtggccttgaaatctgagctatggaaattggatttttttttaaaaaaactttgtaggtaatatgttgcttcatatggggacatattgctaggagactatccctgctagtttgagctattgcattaaggaaaatatatgaaaaagaggttctttttcgagctgcgatgaaggcaaaatgtagccaacatatggttacccacaagtgtcgtaaagttagtcaacaactgaacatatgatgtgtagggtagggtgctaggaaaatgtgtgcgaccacaatcgtgtcagtcaaacacgcagctatgtgggaaactgtggtgtgactgggattatgtgatgttaggtgcataccaaatgtgccctaagacctaagattgcacgcctatcatgcaatacacaaaagctggaaagttttactttttgtcacatttctttggtcacttctgcactgatgtgccatactgtattttgctgaagttgtcacaatctaccgcttcagcagaactactgtctttccacactttgccagaggtaattgcagctaaatgtggtactgtggtagccaaccaaacagatcctaactcaacaactgaattatgtgtatatatgtatatttgttgaggtggagccacttatgttgtagcagctgatatttagaaaagtactagttactggtacattatgttagagtatgagtaggcccatgaggcccatgtatgacattatattactaaccctctagggttggcccaagttaaggaaattcattctctagcacattaaatttgcctgaactacaagatgttatttcgaaagggtgcttgtgatggtcttactgttatgatcattggctctacaactacagttaacctgtactaaacaagttaaggaacatacaatgtactttttacaaaaatgatttgactgttgtggaacgtatgttttttgaaacttgacatggctaagtggtaattcctcagaaattagtttataatttttaattcaatgtgtgcaacgaatgactttctttttgtcattaagatgtttccatcatgaaaggttatttataagtttagaccttaggcgttggtgcattttacagtttcaattatattcacaatgaatggatatactgcttgggtttctctactcaccctgttcctgtttgataaggttatggtgctcatttaactctttcgtgttcaattcttgagagggcaaatttcaaatgtattagaaaggcatatattgaacataacactaaaagagcatcttgcagcacctaggatatactagacagctaaacctgaataaacacatttatcctagcatgtttaattgagtttctttgtgcttgtttggagcttgcttactgagtattgatatgttaatatgcactgaaggaagctt

SEQ ID NO: 4831 - DNA, 1685 bp, Sorghum bicolor
  Intron number 1 from transcript Sb09g026660.1 (locus Sb09g 026660) derived from phytozome v7.0 (chr-ID chromosome_9; pos 55857660 to 55859344 reverse strand)
ggccggggccgtgggcgtggccgcgggcgccaaaggtagagcctccccttcctcactcactttttgttgcttatcctgctattgttttcacaagtgttatgagaattggaccatagacatgcacttggtagtctactttagttgcattgtaggtctagttcatatgcaactaattggagcccagacctttggcgggattcagctctaattggagcccagacctttggcgggattcagctcctcccatctatggttatcaaaggacattggtacgttgactaatgaaaataccaaattaattccacctaatgttattatagtgaatcaatagctaaaaaacttatgacagagttgatttatctattttttttcactcatttacttggtagatgaaaacagttattctattctttgtactctagaataacgatgcattgcatgcatgaccgttacttgtgtaacatggagcaaaaatgcccctcaaaaataacatggagcaaaaaagatagtgcatgatgcactgcgttaaagagcagtgaatggggcaaccaaattcaagtgcatactgcaattttccctcaaaaagagaggatagtgacacattgttagcatgaaaacagacaagaataacaatgaaacagggcaagtgggatttgaagcatggtatggaatgtagcttgctacctcaaccattggaagtatatcatgcatcggtctagcacagggagtaaaagacgatgacataaatgaagtactgtttgggagcttaaggtttctggtagagttagtcaggagtagttgaccttcatcattttgctcatggattttgtatatatattattgttatatttttaaaaattatactgcatgcattgcaacattccttttaggaaaaaatggcctgatcagtgagtgaactccatactgaactcagtcataatacagaaccttagttatgtttgcatggatatcctttatattaagaatgttgctgtgatgctctgtcacacacataagcttgatatttatgatttgaggttttgaatgattgctgtctaatgtttcagtattgctcatgtaggagaatggtgaacagtagaaggttgtggagtcctaaagacgagcaagcctgggtccatgacagatttgatgagatggatctgcatgattttcatggtggcaatgtaagttctatgttttcttgccatacttaaacttgtccaccgatgtcatctagtaggtccctaatttgttgagtgtcccaattgaagtccaaattactgtaattagcatagaattgcctatattacatgcaaatgtgttacctaaattgcaatatatacacaccgtggtgatggcatgagcacatagtagagcatggggtgtgtgtgtgggggggggggggtgcatcttgggctcctctatactagagtgctacatatgtaatgacttgctgattagggtaatttgtacctcaagtgaaccacataaaatttagggacatggatgtgcattttaagagaaaatagggatctagatgacactacggactagtttaaggaccacccatgcattttattgttttgtttttatggatccattgtatcttcctttcttaacatgttactgtttcttcaactgtactttcagccaaaaagaaagcagtggaggtggcattagaggac

SEQ ID NO: 4832 - DNA, 1977 bp, Sorghum bicolor
  Intron number 6 from transcript Sb02g033110.1 (locus Sb02g 033110) derived from phytozome v7.0 (chr-ID chromosome_2; pos 67762183 to 67764159)
caaattgttgtaagcatctacatctatcctcattctgtatggtagattcatgagcatcgcttcaagttgtacttgcataagtttttttgttgtatcttataagctgtgccagttattttattctgacgtgtttcatacaatttggtggcttgatagttgatattttataatgtcggagtgaagcccatgtgggccttggatagttggaaaacacaaaaaagtttctaacggcaacaaatcccataatatggattttgttcttctttgattcccttattctgtcaaatatataacctctttacatatgcctttcgagagaattatactcttaatatgctgaatgttgtcttttcatgctttttgtgtaagcacttccctgtatgcatattgttgtgcatatgcagcctgactctgtttatattcatgtatggtgatttctgattaatatcatgcttttgcaaatgacttccatgttggatctacaaattgtaaaccattgttttgcttacatgacatttattcattttatatcgtataagctgagccagttattttgttgtgatgtggtatccaatttggtggcttggtatgttatagacctatgctgaagcaaagacattgggccttaggccttgtttagatacacccaaaaacccaaaactttacaagattctctatcacatcgaatcttgcggcatatgtatgaaacattaaatatagataaaaaagataactaattacacagtttacctgtaaatcacgagacaaatcttttaagcctagttgctccaaaattggataatatttgtcaaataaaaacgaaaatgctaccgtgtcaaaatccaaaaagtttttggatctaaacaaggccttagtcccattaggccattaacgtgtctagtgttgttcagtgtacgagaaacgttaattccaagttgtcagtgcatgactgtttacatatgggaagtggagacgtcatgtgaagcttgtgatagatggcaagtcaaaagttgcgaggtcatgtcaggctagctgctattttttcgggtgcacattttgctttaggccttgtttagatgcaaaaagttttgggattttgatactgtagcattttcgtttttatttgacaaacattgtctaattatggagtaactaggcttaaaagattcatctcgtgatttacaagtaaactgtgcaattaattattctttttatctatatttaatacttcatgcatgcgtcgtaagattcgatgtgacgggaaatcttgtaaagttttgggtttttgggtgtatctaaacaaggccttacttgtgtctgcatccaacttgtcattgccatgtcaaatctgccaccgtgccatgtcattatgcagtgtcaaatctagcatactttatacacgattccttgcatagtctatgcacaaaagtaatgttatttgctatgcattccatgcatcatgcgcggtgtcaaatctagaacagggcggatccaagggtattccccagtattcctgggaatacccaacttttttgggatactttcatgtatatatatatgtacatacttatatataaatatatacgttgcaatattctgcgctatttttgttgattgcagccaaaaaaaaaacaaataaacggccttttggcatgctttctaaacttctaccttccgaaaccagcctattttgtgggatatctatggatttaattttttttttgtggaagtgggaataccaagtttgaaattctgcctctgaacacggaacacacaattccttgcattgataagctacataaatagatgaaccccataatctggatcatattatgttctgattcccttattctgtcaaacataacatctttgcatgcctcttgagaggattatattaatactaatatactgaactttgtcagttcatgttttggtgagtaagtgtggtaatgtctctgcagggaagtattaaaggag

SEQ ID NO: 4833 - DNA, 152 bp, Sorghum bicolor
  Intron number 1 from transcript Sb05g000210.1 (locus Sb05g 000210) derived from phytozome v7.0 (chr-ID chromosome_5; pos 45721 to 45872 reverse strand)
aggtcaatttgttttgttattcttatgatttatactttgatttatgtagatacttttttatactttttaagcagatatgaagagccattcattaaatctcataccatgttttctctcaatatcatccacttggatttttgtgttccaggaat

SEQ ID NO: 4834 - DNA, 14416 bp, Sorghum bicolor
  Intron number 5 from transcript Sb01g028780.1 (locus Sb01g 028780) derived from phytozome v7.0 (chr-ID chromosome_1; pos 50233237 to 50247652)
ggtaagggaactcataatgcagactctatcatagagtctaaagttatttattacctcgaacaatgtggacttagagtctaaataagacttggagtcttattttttctacctctttcttcaataaatatgttgccacatcagcaaaatatcataaataatatgaaattaattgtcttggactctgtgatagagtcttgcattgtgagtgccctaaggagtttttcttcatgaagatacattacatgtggatgtggaaagatgataaatgtaacactctggtgttaagcgaattaaaacatgacatgtcatcatgagcatttcatagtttagtgttaagtaaaccctgatgcattaacctaaaataagtttattttggatgaatgtgtttagggatttaaagtgtgtttaatttatgtatggatgcttgttttggagtttaaaaactttgggtgaaagttttcccgagagcttaaggggggaaaccctagtttccaaaaccctagatttgcccccttttgtgcaattcaaaaaccaagcagaatttgaagttgagtttaaaagcaaagttgtaggtcttgtcaagatgtacaactttggtgttttgagtttttgaagtttcagtacaaaattcaaagtaattttgaaaatacagatttccggaaagtgtccccttttcaaacttaaatctccaattcaaaatctgtttggaattttgaaaaatggtcaacatgagagttgtagggcttgaaaagttgaacaactttcatgttgggagtttttcaagttgttttactaaatcaaaagtaattttggaaattctgttttgccccaattcaaaaatttggaattgagcttgaatttcaaaaactgtttggcaaatttagctaatttccactcagaattagctctggtcaccaaaagatgttttgaagttcacaaaattttacacaacttttgttttggtagcattttggctttaattcaacttttggtcgatttttgcaaaaccagacaaaaggggggggataagctttggctcctgttcatggcggtggacacccgagtctggatcggtgaatgccagcgcatggccaccgttttacctcgtccacgcgcgtgttcacgtccgtgacaatgtggagcagctgctggcaaccagaggcgcgacgtgcccttctctgctgcgctcgtcgactccatttccgccaccggagcaccgaggagcagtaccccgtccccatccaaattggccgtgctcggtcttccttgtatcaaattgagctgtccacgatgttcgccatccctctgcgaacccagcgcacctctaagctcaccctataactcgctcgagcgccggagcttccctgttcttctccaattccgaccgagaccgccgccgtgatctctctccgtggccaagccgttctcgaaggtttcacgtcaatctagctggtgttcctatctctccttgtcactctggtgctcatgcgcttgctacttttccttggacacgagcaggttcaccggaataacgtcaccggagccggagcacccgcccgaccgcacggtcaccgtcgccaagcttctctactgcttctcccgctgtggtgacgtgagcatcgtgttccctaaacctccttgaacctctctacacctttcgtttgctctataccgggcccaagtggccggccgacagtcggccatggcggccgtccgccagtgatgcagtggagatggagaggaggcagtagagcgttagcaggtcgtggcaatcggttcgcgaggttgagtcggagctgatgcgcgcgcgcgcgggggccgagggcctcgctatcggtcgccggagtcgcggccgagccgccgtgccggtgggagaggaagctgacgggtggggctaacccgtcagtggctgtgagagagagagagggcgcgggcgggcacagcgcggatgcgggccggaagcagtgggccggtctgcggcccagtttccaagcagcccactgcgcagtaatctttttctttttctttttatgcagtttttgttttatatttgaatttgtgtagtaaattttgtgctggttccaaaaattgtaaaaatttttgtatagcttccataaaatggatagagcataagaaaaatgttaggttttattttctggtaattttcagatatacataaattgcctttgtttaataatagataaacctcctatgatttttaataaattatgggtatatccaaaaatcatgaaatttaatatgtgaacttgtgttactgttatctagcttcagaaattgtttcagttatttttgattaagtatgctctgtctcttaataaagctatttaaaatgcttataaaagaaatagaaatgattaatccctttaggatttgggtgatattttggattgtttgacaaccatggttacttagcataatatgctccctggttatggtttatttttctttatgatatgatagattcacaatattgcttaataaagatgataaaacttgtttagaaataatctatgtttttgggtagctaagcttagtttgtttctataccgtgaaggtaaattgtactcaagataatcatagtttgttgttattatccaagcacgtgtaacttgtctttatcataccttgagtatatcataatcatgcatatgcacttttacgtatagaatacgttccggaagaatctgatccccagtgggtttcttccgagtttgtggatccttcgagtgttgttgagttgtcgaacgtccctcccggtcaaggcaagccccggacattaaaccctatccttgtattttcataaagttatttatatcacttgagttaatatgatgcattaggtgaataggagttgagtgaatcctatttgctgcattatctaccttgatgatttccatattaaccttgatacttgttttatgaaaatacttagtatgcttagccctgcttattagataagttttcaaatgaaagagtttgaagggttgttgtggaatactcttatagttaatgatgttcaatttgagaccggtcggtggacttgctttaagaatggagtcttaaagtagtgtctccaactgagtcgattaaggaccgtaccgttgattggcctgttgtgattgagaactttgagtacagcccacatgcgctggtaagccttacctatagctattccgatacttgagaacggctaaccgcgtactgggagtggagagatggcgagagtagcgtgtacccaccttacggatctgagatgaccgggaaacatctagattggctgtaggatggtggtgtactgtactctcgggtgacgctggacccgttcttgtatgggaggatctatagaaaaggttgacatatgcaagattaagttctacatatgtcgtgtggtactgaatccccagctgggtttaatcgattcgaatcgccgtgtttcctcggatatggagcctcaatcctcaccccatcatcgtagtaataagtgaatctttggtataagaaagaggtgatttgcttatgaaagttggataatgatcttggttagctataagtgataatcttgagttaaaacttgaaagtaggctttactcttagtaagcttttatgcaaaagaaataattgatcttgataaagctttaccttgaatccctatagcctgcatacctgagtcttcatctcttttatagtcggttaagtcttgtggagtacttttgtactcagggtttcttaacccatgttgcaggtgagtcttttgataatccttttgatggccatggttactttactcttgtggaggaaagtgacgatgaggtttctgatgtgtgaccttgggcaagtaaaagatgttgtgtgaatctatggtttatgtaataataaagttccgaagcttttatgtatcaaatacttatggtttgtaaactatgaacttaagtttcaatctatgttatgtaatctttccgcttttactctgatttctcttatctatgaaatgttgtaatactgtgatgcttgatgagggaattcctgaaaagaacgttacgtggatgattcgggtttcccgaggacacccgacagacttcttgagtcatttggaactcgtgcacgtcgatcagaagtctttgggacaatgatgtgtgcatgtgggccacttaattcacgaggttctgccacagctggtatcagagcaggtttcccttagaaagtatagcagtattcgattttgaaaacttcaaaagcttttgagtcaaactaaatttcaaattagtttgggtccaaattgcttctaagcttgtcttatgcttctaacttgtctcaattcattctttagacttatccttctctctaaatggatatgtttttagtgtgattatggtgatatttatatatacaaggaacaatgcttatgatagtataagaatgccctatttatgaaaagaaagtttatgcacttttatatcaagtgcctaacttaaagttaattatttgtttgatgtatgcttggttcgtaagtacgtttcatgcatcattattgataacatgtaattaactttccctccttaaagttgttaataattagaggtaaagtgtccatctaattgtaaaactctattctttaaccttggaacatatatagttctaatattcaaaataaaaaatattttggcagatggcacgtacccgcctaaccgctcgcaagtccaccggaggtcgtgtccccaggcaccagttggcatcaagggatccgccaccctccgatagcagtgacagcagcactgacaactccagcgacggaaacgggagtgacactagcggaggtcctccttcgccaaggacctacaggcttatgaagaatgatctgcgcctgatgctcactgacaacatcaacatggaagttcagctgtaccatatggcggggtatgtggtcaatcttgaggcctatgccaacaccctccatgaggaagtgcaccagctgcaggatgccctcaatccacccgaggctcctgaagcagcagaggaaggaccagttgtcatccaagtggatagtgatacttctgaggatgaagcagaagaaccaggaactcccactccagatgagggtgttaccaccagtgagtcggagatggatgacgactaggtgttgagaaggcaagaagtatgaccgagtgtgatcttctgactttgtaacttagttagtcagaaaacctctagtatgggaagttgtgtaagatagtggtttcagtagtcctgcccaggagcggacttgtatgataaataagatgaacgtgtttgtgttatgtaagtcatgatgtatgatggttaagtaagcatgttaattaaagtgtgatgtgtttttaaacagatgtctgctaacaaccatggagctagttcttcccagggtggggatgattttcctaatgcaccacccgttccaccctctttggctgatgcaattgcagcattggtcaatgcaacaactctgttagcacaaaaccagaatgttggtcagcgtggccgtggtcgccataaccgagaagaaaccacatatgttgacttcacagatactcgtcccccagtattcacaaaagctgatgaacctcttgaagctgaggattggcttcgcactatggagcaaaagttcagtctcatcaactgtactgagactcagaagccagcttttgccgctcagcagctgagaggagcagcaggagtttggtgggaaaacttactagctgttcaaccagcccgccaccgaatcacttggggagaattcaaggaagccttcagggctcattacattcccaagggagttatgaaaatgaagctcgaagagttcttagctctccgtcagggggatgactcagtcatacagtatattggaaagtttaatcatctgtcccaatatgcaattgagcaagtcaacactgatgaaaagaagaaggattgtttcatgagaggcttgaatacaaagcttcaactgatgatggcatcatgtggcaatatatcttatcatgaggcagtgaacattgctatctccagtgaagaaaagaaccgcaagcataaggaggctaagaagaagaaggggtttgtctcagggtctggatcatctggcggcaacaagaagcgccagaggctcatgtatcatccagctcagcaattccgcccatcttatcatccttcttatcagccgcctcagcaacagaatatgcagaggagttttgtaaggccgacaatgccattcaatgttcaacgtcagccaaatgttcctgccattcgtccgccaatgccacaagctgcaaacaacccttgttacaattgtgggaagagtggacatttttctcgtgaatgtccatatccaaggcaaagtgttccaaatgtcaacgcaccaaggccagttggaaatcaacaaacaaatcagaacaaaggtcctgcccagaatccgcagaagggtaaaggtactcagaaaacaggaagggttttccatactcaagttgaagctatacctgagggagagccagtgatgcttggtatgttccctgttgcccaacacccagcacttacactttttgattctggagcatcacatactttcatgaatagaacatttgcggaaaagcataatatacctattggtgcaaccaaagatgagttctttatacagtcacctgggggtcgactatgcactaaggaaatggtacatcaggtaccaatagatttgggtggatatatatttccaacatccatgatagtgttaaaagatccgagtatagatgtgatcttgggtatgaactggatgagccagagaggtgcagttatagacaccttaaatagaaccatcaaggtcaacttacctaatagcaagtctcagcttcttatccatcttcctactcttaagagagcagttgagcaagtgtgtgctatctctgttaaggaaatcaaggatattccagtggtctgtgagtttcctgatgtgtttccagaagatttacctggtctgccacctgatcgtgatgtggagtttgaaatagagctcaaaccagggacagcaccaatatccagaagagcttatagaatgccaccaaaagaattagcagaattgaaaactcagttgcaagaattgatggataaaggtttcattcgacctagttcatcaccatggggttgtccggcaatttttgtgaagaaaaaagacaataccttgaggctatgtgtggactatcgtcctttgaatgaagtaacaatcaagaataagtatcctttgccccgtattgatcttctctttgatcaactaactggtgctaaggtgttttcgaagatagacttgagatctgggtaccatcaaattaagatcaagccaaaagatgttccaaaaacagcattcactaccagatatggtttgtatgaatatctggtcatgtcttttggtctgacaaatgccccagcacattttatgtatttgatgaattcagtgttcatgccagagttagataagttcgtggtggtattcattgatgacattctcatttattccaaaactaaagaagagcatgaagagcatctcaggatagtgttgactcgcctgagagaacatcagttatatgctaagtttagcaagtgtgaattctggatagatgaagtccaatttttgggtcatgtcctgtcagctgaaggtgttgcagtagatccaagcaaagttcaagaagttcttgactggaaatcaccaacttcagtacatcaagttcggagtttcttaggattagcggggtattatcgcaggtttatccctgacttctccaagatctctaaaccaatgacgacactgctgaagaatgataccaagtttgtgtggtcatccgagtgtgaagaagcttttcggactttgaaaaagttgttgaccactgcaccagtgttagctcaacctgatattgaaaaatcttttgacgtgtattgtgatgcttcaggcaaaggcattggatgtgtactaatgcaagaaggcagagtcattgcatatgcttcacgacaacttaagcgtcatgaagagcattatccaacccatgatctagagttggcagctgtagtccatgctctaaagatctggcgacattatctattgggtaatacttgtcacatatatactgatcataagagtttgaaatacatctttactcagtcagagctgaatatgcgccaaagaagatggttagaactgataaaagattatgatattgaagtacactatcacccaggcaaagccaatgttgtggcagatgcactcagtcgaaagaatcattgcaattgtgtggaagtcaagcctatagaccttaccttgtgctatgaatttgaaaagttaggtcttgagatgattccacaagggagtttgacaaatatgacagttcagtcatccatcaaagatcagattattacagcccagcaagaaaataagggtatattttttttgaaaagaaaggttcagtctgaaccaaattccaagttcagaatagatgaagctggagtgatttggttcaaggatcgtttagtagttccaaaagtccctgaactcagaaaacaaattcttgatgaagctcatgcaacaagactttcaatccattcaggcagtaataagatgtatcatgatttgaaacaaagattctggtggactaagatgaagcttgaaattgctagttatgtggctagatgcgatacttgtcaaaaagtgaaagcagttcatcttaggtctgctggagaattgcaaccattgccaattccatcttggaagtgggatgacatcagtatggacttcatagtgggattacccagaacattaaaagggtttgattccatatgggtcattgttgatcgtctgaccaaatcagctcatttcattcccgtaagaaagaagtatcgagcttccatctatgctaagatatactttaacagaattgtaagcttacatggtattccaaagactatcgtatctgatagagggacacagtttgtaaatgctttctggaagcacctacataagtctttgggtactaaacttctgcatagtacagcttatcatccacagactggaggtcagactgaaagagtcaatcagatattagaagatatgttaagatcttgtgtgctcagttattcagaaaaatgggatgaatgtttgccactagcagaattctcttataataatagttatcaagagagcattaagatggcaccatttgaagctctatatggcagaaggtgcaggacacctttgaattggtcagaacctggagaacatagtctcttcggggttgacttagtcaaagaaaccgaagagaaagtcaggctcattcgagataacatgaagatagcgcagtccaggcaaaagagttatgctgataagagacgtcgatctcttagctttgaggttggtgattatgtatacctcaaagtgtcacctatgaaaggagtcactcgttttggagtaaaaggaaaattggcacctcgatatataggtccatatcaaatccttgaaagatgtggaaaggtggcatatcgtctagatttaccaccacagttgttatcagtacaccatgtgtttcatgtctctcagttgaagaaatgtcttcaagtgcctgatcatatcattcatgttgaagaaattgagttaaagcctgatctgacatattcagagtatcctatcaagattctggatcaaaaagatcgagttactcgtagaagaactatcaaatattacaaggtgcaatggaatcaacataccgaagatgaagccacgtgggaatccgaagagtttctcttagaacgttttcctgagttcttttcttctgtcttatccttgtaatctatagtataatgatctacccctgtttttgtaaaggttggttttggaagtgcttgacaaacttccttttccattagttagactttaaggtaaatctcgggacgagatttctttaagggggagagagctgtaacactctggtgttaagcgaattaaaacatgacatgtcatcatgagcatttcatagtttagtgttaagtaaaccctgatgcattaacctaaaataagtttattttggatgaatgtgtttagggatttaaagtgtgtttaatttatgtatggatgcttgttttggagtttaaaaactttgggtgaaagttttcccgagagcttaaggggggaaaccctagtttccaaaaccctagatttgcccccttttgtgcaattcaaaaaccaagcagaatttgaagttgagtttaaaagcaaagttgtaggtcttgtcaagatgtacaactttggtgttttgagtttttgaagtttcagtacaaaattcaaagtaattttgaaaatacagatttccggaaagtgtccccttttcaaacttaaatctccaattcaaaatctgtttggaattttgaaaaatggtcaacatgagagttgtagggcttgaaaagttgaacaactttcatgttgggagtttttcaagttgttttactaaatcaaaagtaattttggaaattctgttttgccccaattcaaaaatttggaattgagcttgaatttcaaaaactgtttggcaaatttagctaatttccactcagaattagctctggtcaccaaaagatgttttgaagttcacaaaattttacacaacttttgttttggtagcattttggctttaattcaacttttggtcgatttttgcaaaaccagacaaaaggggggggataagctttggctcctgttcatggcggtggacacccgagtctggatcggtgaatgccagcgcatggccaccgttttacctcgtccacgcgcgtgttcacgtccgtgacaatgtggagcagctgctggcaaccagaggcgcgacgtgcccttctctgctgcgctcgtcgactccatttccgccaccggagcaccgaggagcagtaccccgtccccatccaaattggccgtgctcggtcttccttgtatcaaattgagctgtccacgatgttcgccatccctctgcgaacccagcgcacctctaagctcaccctataactcgctcgagcgccggagcttccctgttcttctccaattccgaccgagaccgccgccgtgatctctctccgtggccaagccgttctcgaaggtttcacgtcaatctagctggtgttcctatctctccttgtcactctggtgctcatgcgcttgctacttttcctggacacgagcaggttcaccggaataacgtcaccggagccggagcacccgcccgaccgcacggtcaccgtcgccaagcttctctactgcttctcccgctgtggtgacgtgagcatcgtgttccctaaacctccttgaacctctctacacctttcgtttgctctataccgggcccaagtggccggccgacagtcggccatggcggccgtccgccagtgatgcagtggagatggagaggaggcagtagagcgttagcaggtcgtggcaatcggttcgcgaggttgagtcggagctgatgcgcgcgcgcgcgggggccgagggcctcgctatcggtcgccggagtcgcggccgagccgccgtgccggtgggagaggaagctgacgggtggggctaacccgtcagtggctgtgagagagagagagggcgcgggcgggcacagcgcggatgcgggccggaagcagtgggccggtctgcggcccagtttccaagcagcccactgcgcagtaatctttttctttttctttttatgcagtttttgttttatatttgaatttgtgtagtaaattttgtgctggttccaaaaattgtaaaaatttttgtatagcttccataaaatggatagagcataagaaaaatgttaggttttattttctggtaattttcagatatacataaattgcctttgtttaataatagataaacctcctatgatttttaataaattatgggtatatccaaaaatcatgaaatttaatatgtgaacttgtgttactgttatctagcttcagaaattgtttcagttatttttgattaagtatgctctgtctcttaataaagctatttaaaatgcttataaaagaaatagaaatgattaatccctttaggatttgggtgatattttggattgtttgacaaccatggttacttagcataatatgctccctggttatggtttatttttctttatgatatgatagattcacaatattgcttaataaagatgataaaacttgtttagaaataatctatgtttttgggtagctaagcttagtttgtttctataccgtgaaggtaaattgtactcaagataatcatagtttgttgttattatccaagcacgtgtaacttgtctttatcataccttgagtatatcataatcatgcatatgcacttttacgtatagaatacgttccggaagaatctgatccccagtgggtttcttccgagtttgtggatccttcgagtgttgttgagttgtcgaacgtccctcccggtcaaggcaagccccggacattaaaccctatccttgtattttcataaagttatttatatcacttgagttaatatgatgcattaggtgaataggagttgagtgaatcctatttgctgcattatctaccttgatgatttccatattaaccttgatacttgttttatgaaaatacttagtatgcttagccctgcttattagataagttttcaaatgaaagagtttgaagggttgttgtggaatactcttatagttaatgatgttcaatttgagaccggtcggtggacttgctttaagaatggagtcttaaagtagtgtctccaactgagtcgattaaggaccgtaccgttgattggcctgttgtgattgagaactttgagtacagcccacatgcgctggtaagccttacctatagctattccgatacttgagaacggctaaccgcgtactgggagtggagagatggcgagagtagcgtgtacccaccttacggatctgagatgaccgggaaacatctagattggttgtaggatggtggtgtactgtactctcgggtgacgctggacccgttcttgtatgggaggatctatagaaaaggttgacatatgcaagattaagttctacatatgtcgtgtggtactgaatccccagctgggtttaatcgattcgaatcgccgtgtttcctcggatatggagcctcaatcctcaccccatcatcgtagtaataagtgaatctttggtataagaaagaggtgatttgcttatgaaagttggataatgatcttggttagctataagtgataatcttgagttaaaacttgaaagtaggctttactcttagtaagcttttatgcaaaagaaataattgatcttgataaagctttaccttgaatccctatagcctgcatacctgagtcttcatctcttttatagtcggttaagtcttgtggagtacttttgtactcagggtttcttaacccatgttgcaggtgagtcttttgataatccttttgatggccatggttactttactcttgtggaggaaagtgacgatgaggtttctgatgtgtgaccttgggcaagtaaaagatgttgtgtgaatctatggtttatgtaataataaagttccgaagcttttatgtatcaaatacttatggtttgtaaactatgaacttaagtttcaatctatgttatgtaatctttccgcttttactctgatttctcttatctatgaaatgttgtaatactgtgatgcttgatgagggaattcctgaaaagaacgttacgtggatgattcgggtttcccgaggacacccgacagacttcttgagtcatttggaactcgtgcacgtcgatcagaagtctttgggacaatgatgtgtgcatgtgggccacttaattcacgaggttctgccacagcaaacatggaagtgctattttgattagttgcaatcaatacattatcactttatgaggtacttgagcttttccaccattgactctgggtcaaatgactaggactgtcatttgtggcatctcaaacttacccctcacctttcagagctaacatttaccaaacaatgtatccatttctgtgtgaaaaaacatgcctataagagtcatccaagggaaaacatgactgaaaagttcgaagaagttgacctgaatcctggggaaaggatgactaaaaagtttgagtggtgttgttgtaattgggccggtctttgccggtcttttgtttgttcttcttaatgaaatgacacgcagctctccgagaaaaaaagttgacctgggaaagcaagccttatgatttatgaaatgtggatgtttcctgattcatcctgaatgttatttctaatgtttgttttatttgctctgcaggaaggtaccaagattcaggaggttcctggggtaca

SEQ ID NO: 4835 - DNA, 7903 bp, Sorghum bicolor
  Intron number 1 from transcript Sb06g022830.1 (locus Sb06g 022830) derived from phytozome v7.0 (chr-ID chromosome_6; pos 52056389 to 52064291)
accgcattgctagaaggctgaagagacacacctgaatgctttaatcagctggtatgtcttctttccactgtttagtgtgtgccactgtttgtatgaaattgactgtgttagtgactgtgagtgccattgtttgtatgtgattgctgatcatttcatcttgtgttattcacttcctaattaggccttgtgacatttttttgttgactaccaagtgctatattgaactgtcaagttcttgtatgtgtcaagtctttgttgctcttggttggtgttactctccttgtcttggtaaatagggtcctttaacacaatgcaagacctatagaaaggactgtaatatgctaacatattcctttgattgcttctcacctctttctttgtcaaggcattgaatgtttattccttttttccattatcatttatggaatgtcgaatcagcttgcacccaaaaccttttgaggaacttgaataaagagagaactcacacatttgattcattgaatgaatgtagcttgtttcccttcctttggtctaatgactcaacagttatgtccttgttttaggctttactaatttttctcttatataactatcattagttgtcttggtcttgctattttgccatagctgagtcaagtcatattttagcttaggtttagtcaaactaacaatgcttggcatatgaatatgagattcttaaccctaaactttgaagactttctttccttgttatacgccaaagccaagaggtggtgtctgttgtgcaatattcttctttcattgtaccctattagtagctttcctaaatgtttttggtcatcatggagaaagatttattgcactatgaagcatgggtttctgtggattgttgctcatattaggtacgctttaatgtttcttccatgtggaccctagagcatcttgacatgtgttcaggatcaaacctcttgattcatgtagtttcagtggaattaaatggaatgaccacatgacgatgccatattgttagctacaaaatgtttatgtttccatcctagaaagttctttagatgatgcaagtgagctaataagagaattcaatctgtgccctcattgccaagacatagttcctctcctcgagatctaacatggagacatcacataacatgaccttttgctcttgatctcacatcaatcgacgctccttagtaaataccttgcgctcttgaattgtttcggcctcctgccatctcatgtccttcatcttcctttctccttttccatagcaactcttgaattgcatccttgtataatgcatcatccctcctatcttcctttgctattcctttgcacgcttcattccaatgggcctttttccttgtgatgcttgagacgaatcaacagtttgggtgctcttcacaccttcatctgcttgatcttcatcacaaaggattggattagcaactatgtcattgttactcttctgcgttttacaacctttgtggcaggtcaagtgcttgaaacttgggtgagttcctcactttgagccaacaatgaaggaaacgaaatgacctcttatttgaatccttaccgatgtagcgcttcatgcatccgcatcaaaatgaaataattagtaaaacaagttagcatgcacacaaaaggaatttgaattgacaaaagactacaaaccaaacctacatgctcttggtatgggacaccactgggatgatgacattccacaatcataaacattgcctgaaattttttatgctccctttgccccaatggtgctcaagtaagcagcttttcttatcgaactccaagctcttgttggcatggtaatgttcatcaatccttttccaataggacttctccaactgctcattgccgtcaataggactgcaacctgtattctcccaagacatgtaaagttgtatgtcttctttgggtgagtaattggcagctcttttcatggactttgattgagtagatcgattgccaattgaaattgcttcaagattggtgtcctttgacatgtttgtgaaggtccctccggaattcattctgaacaatttcaaaatcaaaagcatcacgttatcatatgaatgaatttttcatattccaatgcctcattgcaagctaatttataatactcaagcaaaaaaattctggagtcaatctcatatattcgtaaaagttctcaaatcaatctcatgttgatgcggatcgtaaatgtttctgaattgggagcgtggaacgtggccatgttccatgtttccggcgtctaaggtcctgaccagacagtgcactccagccaatgctaggttgaaagccatgcactttggttacaagtatggaaactggctgtacggattgtagacataaatgacttggatcttgtgttcgacatgaaatttatgcctcatttggcacgactccagctccttgctacaatgtgcataggagccaaagtaagtgaagctaaaagtagtcggttcactggctcccaatccattctgagaactaggaactaaaggtatggccagtatagtggctgtaaaaaaaatattttgttggtagtatgttaggttggttgttgactttttttttaaaataactaagcattttacctactatgagcaaaacgatcagataaatcactgtagcaccgtagcaattctttgcaattgttatgcaaatatatggatcatggttatcaaggcgtcgcctagacgtccgggcagttttccaaccaagtcgtcgtttggatgtcgcacacgcgggagaaaaaggcacatcatgcgggaaagagagggaatcacatgcctatagctctcctgcaagcaggctgcattggtaatctgtgtgagttgagaggaggaggggggggggggagcgatgagagggagagagaagagggctgccactaccactgctgctgctgcttccgcctgcctgtttcgatccgccgcttgcctgcctcaatttcgcccctacccctctgctcttgaattcgtgactccttgatggcctccaacattcgtgccgtcgattcgcgcctccaacctccgcctgacgctcgttgatttggcctcaattccttcctctgctctgcctccctatcaacggttcatcacaacataagtacgtcttctgtcttcctcccctctcgttcctctgttctatgttgttgtctgctccttcctttgcttggatagttgaattggagtgtatattttggtttgttgctggtttgctgctttgtgctaggttgctaggttgttgactggttgtgcttggctcttctctactctgcagccaacaaggcaacaacacaatggagagtctagctgcatatgatcccaacaatgatccaaaacgtagaccactgaacttgaaagattaagctctgcgacaagagaattatagcaggaattaaaagattgaagaaacatctagctggtggctatagacatatgattccatgtccagaggctggcactgaactaaggaaaaggattcaagaatgcttgaatgctactaacaatgtcaataagtttgatgatgatgatgtatactaagagatgagaggcaagagttgggtgttacgtcattagtaattaagtcgttatgccattagagtctaatttgttgctattgagaggagagattatttcagatttgctatttttctactttatgttgtgcactagtactcaagtggcactacttattgtggcattacatgctcaaaatgggcaatattaaagtataatttgcttttaaattctagtggcattacatattatatattataagatgtttgtatgccatcgccttgcctcgtgccttaaatacctatgcatctagaaggggtagcttgccatgcgtcgccttaccgccttaataaccatgatatggatatggcttgggttggacatgtagctctagccctgcttgccagcctgtgcctgtcttgcacacctatagattgagttatatgtggcaaggatatcgaaggatggttctgtttccatgggccgcccccatccacgcctatatatacatatacatgtaccttgtacttgagatatcaatctactattctgcatattctcacaacttacatggtatcaagagactcgatcaatccgatcctcctttcgtttcccttctcatgccgtctcctcaatctctcgcctcacaccacatttccgcgtgtctcctcctaactgatcgatcgatctcgcttcccttctatctttgtgttgcagtgccgccttgaccctttcatgtccggcatccctcatccattgcttcgagaaccacagcggaagcctagcttgccactgttgttgctaccgcgtactcgagaatgggctgccactgttgccaaggatctagaagtcgcagtcgcggctattgttgcccctcaggagctagtagcagcaaccattgccaccgccaagaccaagacgacgttgcgaacgtgaggccgcccttactgccacggaaagtgatgctgctgaggcttgcatgcgtgatgttatcacctgtgctgtcactgcaccctcctcttgaatccaatgtacatcacatcggctcggacaaccacaattccatgttgccgaatgtttgcgcggctttgaggccactgccatggaaaattttcacattgtgccatcttggccaccaaaatggaaactacatttcctagtatttattcttttcaagtggtacatcactagtccatacccccttgatgtgggttctagcgccaacttaacatgctaactgggtttgtcgcacgtggcatcccagcacatgacagatgtgctcttccacatttgcgttgcatgtgagaacgatgaatgagaggccaccacaagtgagacctcgttcaccacgtggtcgatgaaatgcgctaactaagagttgtctcatggagaccaatgaacatgccatgttagctctagtgcccacgaggagggtatggtcctatgatgcatcagctaaaaagattagggacattgaaatgtgctttcatagttggtggacctaagtgacatttaagggccacctatgtatttaactctttttctctaaatggatatttagaggaccttgatgaaggtaagagacggggatggtgaaatatgaggcataacaagcatcatgcaacattcaacacaaggcaacatatgtccttgacacaacctagtcattagaggcaagtttgaggttaggatatgtgatcagggttcaagaatcttagatcataggtttgtttgaaataatgtcatcatgaccgatggcaaaacgtcaagaaagagagggagtagcttgaccaactcttgttgttggctaccatgcttgttcatagctgaagctgacatggtcaccatcatcgatatgaagaaagaagcaagaaaagacacgagggagagatgaaaggttgtgggagtgatggaaggaaaggaagacaaggcaatagaggcaacacttgtgttgaaagaggtgacatggtgctagcatgtagcgaggaaagacatgctcaaccaacaaaggagttgagagatgacatgaagaacaaagggtatgctggttgaagttggttgagtctatttccctatcttctgatggttccatttttcattttcccctttcttttgatttaggggtttatcatcccttcattagattttgatcatataattgttatctaactttatttgtgaaaggaatattcacgctttattattatttttttcctattagcctagtgagtcattgtagtcactccaagtcatgaactagtgccctaaagaaccccatatttgccacatttgctctttaatacatttttggtggtgcatgaccgtgctcaccgtagttcttttttcttgccattgtggtcaagccgcggggcgggatttggttgcatgtgcattggcaactttgtcattaggttggatgatgtggagcacaaacttgatgtgccctaccctcttcggcctttgttttaagccatccacatccctcgcctcttgacctaataaagcttggtttgtggtgactatggttggacaccattataacatattggaagtgaaggatctttaatgcctcaatctgagctgctcttccttaaacctgaatctgcattttaagttgttacaatgtattaggtgaatggggtacccatacagggatatttaactggggtgaaatttccctagtgggtatagcgggtgtggcgatgttcttctaccctagtcacctatctctttatgggcccctggaattgtgacatgttgggactagtcatatgtctggcataactcatggaaaagataggaggcttctcgtcttgtatagtcctattaatgtcccttgatgtcctgatctttcttatatttttttatgttgctcggattttgcgattagcctgtgtattatgtttttgtgccatattctcattttagaatttaattaattgctcgtacatcatattcaatgtgtaagggagccattgggtatccactattcatgaaggatggggatgtggggaaatgctactggggaaggggtgatgacctttccagggttccctcatcgaggaatggcccctgttgctatttgtagtttgttatcatagcaatcagccatcaaacagtatcacattttgttgtcatagcaatcagccatcaaacagtatcaaattttttaatatccaaattactatatatgtctagcatatatgatatatgaatacttatacgcaataaatcctaattcctgttttataattttattgtccattatcttcgttgctgaatattggttgggtcggacggtaactaatgttgtcgaatatggtctcattgtcggtcttggtgagaggttgtcaagatgagaaaccagataagggatgctcacctgcctgcctgcctgtttagggaacttatgattctcaccgtagcttgtgaagaagagagggagtgatgtgtgggcaaccctggtccagtttggtatttgtaagattaggaatgtcttgaaaactgctgcactgtctatgttcagttagggctttcacgtctcaagaagttggttggaaaattcttgctcatataggcgatactactcgagtcatagagcttgatctttttttaggaagcttactgttctatttttgttcaaactgtgaatttaccaaaccaaaattgattaaaaatcttactgattttttttcaagctttgttcactgtagaaaagaaatgtcttttcagcctttttctgttgcctccctctgttttttctcaacaaaaaagggaaagagctggtattattctctcatcattgtaggagcatggtctgtttggaactaccataacggatgtgtgtttgatgggattcaacctagtcttaatagggttttagctgtagttaaggacgaactgcacctctggagtctggccggagctcgaggagtttcccaatctcctcgctctagaaccagccaatgggtgagttctgctcctactagtggtcaaggcctcaagggtcaggtctttgtctagagagacagattgtgctttgtgaagtgtgttggtgtgtgtgtgtgtgtggtgttgtaagtgtgttgtcaaacatattaattgttttttgtggcacccagaatggttaatattctggtttatgctgttaaagacttaaaggttaacaaaacctttggtagcaaaccaacaattttttctcttatttttcctaagttaaaatgaggagaaatgtccaaacatctatttgaagttttgaactagccgttatttatacattgcagtgtaactattacatttggcagttcatttatttcacattaacatgtacagaaacttttgaggctcacggggtagaagtttaacgc

SEQ ID NO: 4836 - DNA, 4107 bp, Sorghum bicolor
  Intron number 4 from transcript Sb09g016860.1 (locus Sb09g 016860) derived from phytozome v7.0 (chr-ID chromosome_9; pos 42467677 to 42471783)
gccactcccctttggtcttctacttcagaaatcaactgatggaggtcatatggtgtcatcctcaagttcactgctaaatgcaagggatttaaatcgtcctagcaaggaatatggattgacctacaatgttccgttccaagcaaacacattggagacagacagcaaagataatggagccattgtctcatcacacctcatcttgaaacatccacttgaagagcctcaggtatataatttacagtatcatctttgtcatgtacacttgggcaatgtactgattttaatgcagcgacgttattattttatgtaatttatgttactggttgtgccatgtggttttaatattttagcagagactgcctgcctggttccatttttatttcataaccaataactatttacaggcaacatatgttgaagaaaaggacaaactaactatgatgagagattttgatgaagaaactatctggacaagtgacatgatacctctaatagcatcatatcataaaggttttttgtttcatatttctctagtattgtgttttcctttttttattagtttaagaaatttagttgtggcatgcagggaagtttcagcattctgtctggcaaattgatggtgctagttaccaggaagcaatgaatgaaaatacaatgctacctgtcgatatttcttcacataaatgtgcattccgcaagatatggcaaggggaatgctccgagtctgctgctagtaaggttgctccattctaatcgtgtattagggaactccatccgtgttatattttatctgtagatatgcttctcttcatcttccttgtcttctttttcagtctgccatttgtccttttttttgacaactcgtttttatcatctaccagaatctactgttttttaactcattaggtaatagcaggaatgttcagttgcagcctttttcacctgggtaatttttggtgctgtaccacttcaaaacaatcggttcttgcaaggattttgacagacacaatttaggatatgatttcacgatgtaattgttgctgcaaaatgaaaggaaataagtggttggggacctgtacaggattttggcttatcaaaacatagaatattttttctttacagtttcattatatccaggttccacattagcatgttaaaggtgcaatggacacattggatattattaaagattttattttctttctatttcgtctttcatgttccttaaactggtcatggtagcaaaatatttaactccagttattacttgttcttgactccaagtattcatatcaggttttcttggcaactgatattgatgggatgccaataattagttttttactggatgagcaaaaaatattgcttgctgtaaggattcaagttgatgatactagtgaagaagctttgggtgatattaagcctcacatgagctggaacattcctgcatttgctgctgtgccagttgtcgtgactcgtccaaggtgattgcctaagcacattgttttggatccatagtctactaccgctaatgtttctatgttatctgcagagtacgggttggtgttcttccctttacagacatccttgttctgagttcagataatgatctacttctctatgtaggttccctgctgttcaaactatgccatctttatatattttgttaggtagatatgatcatgaagtcaagttcacactgtttttgtaatttggtcttgaagacccagcactactatttatcacatggaaggccccagttgttcattctttatctgaccagaaattgatatagttaatttctattgcattatgaattcaaacattttttatagttgaaatatcagtacctttagatattgtagttcttttggaggttaccgtcccaatctgaagtgaattttgaagaattaatcattactgagtcttgtgggataccattgtgggttgcaccttctgagttccctgacatttcagtgtagattttatccaaaaaggacatcactagcaaattctggttgtactgttcaacttttcgtctttctttttgcaagatgtaaattagtaatcactggctctttttaatatatgcagtctgggaagcagtgcctctgcaaatatactctccctaatgaattgggaaagggtttcttttcaaatcatgagctaaattcagatatttcagatatttactctgatctgaagatcacaagcatagctgatgctgttgaaggccgtataaacgtgacatgcagtaatggcctggtaggatgttcatgttctttgtccttatgtgtcatggtttactccacatattattggtttataactgtctttgttcctttctttttgacaattaatgctgtttacaaagggtgtgatatgttggggctgtgttttggtcctttattctgcattggctctgtgtttgttgtgttcatttttgattatttcatatggtttattgtcaaattaaataacaaataggaaaaccttgctgtaatatgtcttttgacttggtgtggcaacagtttgtgtggttttgttgcactgtacattgtagagactgaaatgcaaatgctatttctttggttttatatttttttgcatattgctcattgacttatctattattctgtcacgaataatcttaactttcctatgtgatctattctgaaaatattaatcacgcaagctattttcttcaactctacaaaaactaaattttataatgtccttttcaactgtgctccttttctcactgtaatttttaattttaggttgctttgatgtagccttcagttgatcttattgcaattttgtccatttacttctttccagatgctcagatgttcgttgcgcaaaaatccttcctcttctttggttagtgactgcataactgcaatggcagagggtttgcagagttgcttttacaatcagtttgtttctcttttttggggtgatagtgatgctgcctacctacattcaagctctcaggtggattcagaatgggaatattttagtcatgaaataaaaagagtttgtacaaagtatggacaaactttgtcaactaaatctctcactttgccaagtaaagcttgggacttcctgatcaacagcaaataccattcccaatactgcaaaagggccctatcctcttccaattcacttttgcctgcgtcatataatacatgcaaaactgtctttaatccctttctccaggatgagcatagtttagatgtgccatataatattcggttcatgagagaaacattggagacattgcatgccctatatgagaacttgaagcttaacatcttgcggaaagagttaagttctgtttctttcttttgtttaaagtatcttgttgatattattttttttccaatttttttggatgttagtttgttttatagtgtagatattcactgagaagtaaaacatttggttaaacatatgttcatgtcctttagttaggtatggcattcatgaaagtcatagtttaatgcaattatcggtaaagatctttaaccatcgattcataggagagtgtagcatactagctttgcgtatttgaataaccgactgctgacttgttcctctttgcggttgccactagttatctcgttaatactctgtagcattcattcgtcttgacagaacagtattacctatacctacttaaaataatcccaacataaccatggtttttgggaacaaaggcctcatgcatcaaagcagctgccttggcactttctatatgcatggaaataatggtagatacatcaaccagtgttatcctcattgcatgctgttatatcattcatcaacatataaataatcaagtagtaatggaaaacttgtttttatcggttttcttcacggctcatgggaaactcagcttctcttgagtttgatattggagaatgcagctaacggcataataattcctttctagcctatcaaacagaaagtatgaatcaatgtgtctgtcagccaaaaggcacttaaggcgcctgcaaaagtgatttcactatttcttcttcatgttatgggcaccaaatattacatagaattcccttttttccaagttttaggtcattttag

SEQ ID NO: 4837 - DNA, 4990 bp, Sorghum bicolor
  Intron number 1 from transcript Sb04g013790.2 (locus Sb04g 013790) derived from phytozome v7.0 (chr-ID chromosome_4; pos 24574859 to 24579848)
gcagcgccagcacgccgccccggcatcccaccacggtacctttccttctcgtttcttcatccggtgcagagaaatgcgacctttcttcagctggtgattgttccagcggggcgaaatttgtcggggattgggttgcgtcgtggcgaagcttctttcttggatctcgattccccgtttgacgcgattcggagctcgccgctaatttctagtattttccgcgatttttgttggattcactaggtgtcaggtgagcacctaaagtaggttcgattttgcagcaggaatgcatcttactttctccatttaattgccggtgtaggaccaaataaaagagaggaacattttagacataacgggacttctacagcgtatgaacaaattatgttgaaatgttaatagattatgcaactatcaaatgttataatcctttcaatactagataaatctgaaatgtgcagtttttctcatgttagataatccagagatcaatcacatgtttggaaatcgacaaatgtttctatagagtattctgtggtaaccaatccatgacacttaatgtcatgtggggccggcatacaccaggtgtcggcatgcccatgacgtgcggcgcgcggctgagtgcgcccaggtcgagccagcaaccggtggctaggaggaaagtaggattagttacttattttattaattacctattttattagttacctatttcttaggagcatgtcctccagtcggtttaggccttaggccatgtatatactagataataccccgcgcgttgctgcggaaattaatagtgttgtatatctatttgaacatttgagagaattccctgtaggccattataaaagatgcgacttccttgtacggcactaaaaaagtttaccttgtcaaccatcggctcacaaaattcgtcccctgcaagccactactgtgaactttgcctctaacatgccttaactggaggacgaaatgtccattctgccctccgctgacgtgtcttgcaaaaagctcagaggttccttgtatgccagcgagagttgctcctgagcaccattttggtgtatgcgtggacggctgcacagagagctagcttctacctgcggttctgctttgccgacaactgcggcgaggggatacgtcgtgttgctcatctgccatcccctgttattgtcccgcctcaccatcgcgtaggccgaggacacggagtgggagctgctcgatgctgacttcgtgcgcgcattgtcctccggcggggacagcagccggtgcgcacgatggacgtcgtgggccatggggcacgtcgatgcgtgggagtgggacaacgtatctgcgacagtactggcgatgcccagcagggtggccgcgtcgccgtgcgtctgctcgaccctctcgtgcgccacatcggatgggtgccgcaagtacctcgtggagctagctctcgcacaggtggcacagcaggcacgacgtggccgacgcgcggccctccagttatttgttggcaacctgcgtagcaacaccagcaccataggccgccgccgcgccttgagctagtgatggcgcacacgcgggacaccgagggccacgaccacgagcacgaggaggaagctgagcgggtgaagcgctcagcgcggggcgcgtgccactgtcttcctcaccgtggcacaggctgctggaagagccgagcagggtgcgaaagttggggaagtaggggcagattggacattaatccagaaaaactaacacccaagccctacggtgcactaacggggatgacggcaatggcttgtagagaacaaaatttgtgaaccagtggtcgacagggaagataaacttttctggtgtcatataaggaacttgtatcttttataatggcctgtagggaattctctcgaaatataatgcatttcacagtacatatacaatggcccgaagaaaatatggaagttataaaaataaaattgcaaaatagtaaacaattctttaagcaaggttatgaagagccatatgatgaatatatgaacatggagttactttagatgtacgaaaggaactatgagtacgaaactaattaataatacttccatttgtaatactttctctgttccttaaaactttaactcctagaatccgtgcgagtcatcaatatatatgatataaaataagtatcttatgaaaatatattctatgacaaatctaatggtattaatttggtactataaatcttagtgtttttttttctagaaattcggtcaaagttttaaaagattgacttacgacaattctagaagttcaagttttcacgaacagagggagtagataccaaacacacaactgaaagtagacgctgctatttgatattgaaactgcaaaaatactggatttcaggaagcaagagaaaaagaaaatgctaaactaaaaatagaataaattgtttggattctagtaagcaggagaaaaagaagatgctgtccttgacttatatccatcagttacatttacaaaacacggatttacagatagtactttttttataagaaaaagatggatatatctatcttcactgcctcaactatggcatgcacatcgtagtctagttcacccatggatcctgtgtgtttgtgtctaccatgaatccgttgtaatatgctcggtcagccatggatttggccgtgcttttgtgcatccaagagttggagagcttcgtagatatatgagagagaattggattgaacaaatccatccatcaaaagtgagtcaggactcaggggatgacagtggaccttggagaagagtgaggctagcgcagaggagcagggcacgaacgtcgcatcccgcaagcgccgccggcagtgaatggactctgctggcgccataggccgcgagcgctgccgaccacgaggggtctacgcgagagcgaccggccttgagcgcttcgtccacctacgcgggcgctgtggccgctgcctccgcacgcgcctcctcctctcgtgagcgccaggggctgctagaagaggaagaagtggttctcgtgacggatgcgctggcatgctagaccatgatagtagcacatatttacacatttaaacttgagaagacaggtagcgacggctcggtttttgcatttgtggtgggctggtggcggaggaataaatgtggcagctaatgaccatgcctattcgtttttatgtgcactgcattagtggaatggccatgcatgttcgatgcccaaatgcatttattttcttctagtgcactgttgcattgcggtttaaagaatacctagtgacatggctggcaagtcagaaatgaagagccgccgctgcctgagctgtgaacatgcagggaagggactgttcagctcctatgtataggcttgtagttgtgggaccctcagatgacgtggcttctcgaaattgcagagaatttctgtagtgggttcctcctatttaggtatagtagatatgctgtaccagacatggattgaatcaagaaagatattataaatctcatctatctccctctctcaagtaagccgacggcagaggggcaaaaccttgccagcgacgacggaccaaggctataaactgtgtagccgagggccagctaccctaggccctgtcacgccgcgacacggaggaggaggctgtattggctatctctgcgccgcaattcaacttcattgaccgcctctgccacgcccagtccatggatccagctctcatctctacacgagatgaaattctctctggctctcgagcggcgccatgggccttgtgtgtcggcatggtaacgttggactccaggcattccgtcgtcattgtcgctcctccaggagatcgtgattgccgtcaatgaggacgaccatgatggggtgcagtgcactctgcaccgacttcgctgtgatttccacttccctgacatgcgccatgtggtccaggacttcgtccgcgcgtgtgacacgtgccagtggtataagttcgagcacctacactcgtccggactgctactgcctctgccggtgcccacaatggtttgggctgacattggactcgactttgtggaggcccttccccgtgtgtgtgtgtggggggggggggatcagtgatccttacggtggtggactgcttcagcaagtattgtcacttcatctcgttggctcacccgtattccgcagagtccgtggcgcaagccttcttcgcggacatcgtgtgtctccacggcgtacctcagtccatggtgtcagactcatggtgcgagctccgatgccttctacgttctggcgcgagctcatgcgactcatgggcaccaagcttcacatgatgaccgccttccacccacaggctgatggccagacgaaagcggccaaccgcgtcatcgtgatgtacctccggtgtttcatcgacgatcggccgcgtcagtgactccgatgcttccttgggcggagtatgtctacaacattgcctaccagatttggctacatgacacaccctttagtggtgtatggccgtgaccctcccaccatcaggtcttacgaggcgggcgagactcgtgttaccgccgtcgcccgaagcatggtggaccgtgaggggcaaaggggcaaaacctgacggcagaggggcaaaaccttgccggcgacaacggaccaaggctatgaactgcgtagccgagggccagctaccctaggtcctgacgcacttgacacttaagacataagacacttgtacaacactattggtctagaattttgtttctgaaatgatgctgcagattttgctttgcgatatggctttccttttggtattatagatgtgcccatttctttgagatattcaggtgctatcagtgttgttatatgttatttatttttcttatgctacttgctgttcaattcatttgccttattgcatgcagattgaaatgaatctgtttcaaaataaaaacacttcgtttgtgtcgcaaataaacacacttgcagatcgattcgggt

SEQ ID NO: 4838 - DNA, 827 bp, Sorghum bicolor
  Intron number 4 from transcript Sb06g012040.1 (locus Sb06g 012040) derived from phytozome v7.0 (chr-ID chromosome_6; pos 32756025 to 32756851 reverse strand)
tcaggtatgctacgaaggcatagcatatgagcattatcttgtatggtagagtctagatggtataatattttctcctgtagtcgcagtcacatagttaactttgtagatgttgaaatttagtatcctagaaattttacttgcataagtaaatgttctggtaactttgtaacagatgtaactttcttttaattaacaaactggtataacagtactagtgcacttaattatggtaaacaaataaccagctctggcacaacatatcaagtgaataaaacctagcattaggaagtattaatttgttccttccgtgattgataaagcgaacccaggaaaactggaatgttggtgtatgaaatctgccaaagtttttaggtgagctactgtttggtaattataatgtgtttaccatatgatgatgattctgcgcatgtgatgcctgtcgcaacggtgactattaaaatggttgaattttatggagggatgttattttcccagcatatcagcacgatactcttgttaaccagttgtagaagagatcctgacaaaaagtttggccctagtcttttttttttttggcatatatatgcacatacattccagaaaatgtcttggtctttagtactatataataatgcagagtcatagtgacaattcactaacaccacatatatgaatggtattagactaaaaaaatgaagtttgccatcgttttcttgagattagtttcttaaacttagagcttctacccttatggatgctaaatctcaggagtcatatgttccggataataaagtgcatccatcttattcaggtacaaaacaggtgtc

SEQ ID NO: 4839 - DNA, 3512 bp, Sorghum bicolor
  Intron number 1 from transcript Sb05g021695.1 (locus Sb05g 021695) derived from phytozome v7.0 (chr-ID chromosome_5; pos 53021497 to 53025008)
atcaacgagttgagatacctccttaaaaataaaaggtatgattgctactacacctttagctttttttttgaatgagtactacacctttagctttgctattattcttttattgattccagtttggtagaaagcctacatggtgtttttattatcagaagaaaacatatagtcctaattagtctccaagtatagctaaggccccagtaactcactggacaaacttttggttcaatcactctggactacattatttatacctcttaagaagtttttaccttttattttgggtttatctagataaactgttgacagatttatccagtcaaaatctgtcagatttgggccaatcaagacatgacagctcaccaaacaaaaactgacagacactaaacaaaaaaaatctgtcaaatccaatataaccaaaacaacaacccataacgggtttcccaaacccaagatccactaacagaattaagcaaccaaaacagtgttgcttcacgactctgaactcataatactgttgctttctgtcagaaaacacatgttttacccaccccacaaaacatgacataattacagataagtagctgacaaaattcagcattacagaactcatatagctcatatagcccaaatccagctagcgacaccagagtttacaacacgcaaatcaaacaaagatccaaaaccgggtaattttcctaaggccttgaacctgtaacatttgctgagaattaacaaaccaaggcacgagaatgatcacataaaaacaactgtacgacttgtcatacgaaatggacagatctacatgtgtatatgtgggcaagcctttgtcatactgagcataatggtttcttccaagtaggaagaactactactaaacatatcggtccatacacacttgagaaacaactacagaactacatgtgacaagtttagaggtgactaaataaaagggttgcagtctgaaattaaatgaggggagtaaagcttgatcaaataaaaatctctagtagcaaacaagctactgagaactactctctccgtctctttttaattgtcgtcgttgatgtgcgtgccaaaagtttgactcgatttataaaaaatacgtgcaacatttgtatctctaaataattttgttaaaaaactagattcaaagatctttctaatgatactaattatgtattataaatattaatattttttaatatataattgtcggcagttgtttttgggaagcgcaagcgataattaaaaagggacggagggagtacaaatatagctcaagcaactagtaggatggcaaaatattaaacaaagccacttagtgtagcatgaaagattgaaaggggccactaaacaaaatgagatatcagcgcaaatcactgttattgctgctcacccaacaaactgaaaccgacttgatcagtacatgacgttgaacaagcagaataggagcagcagaaacacatcatgtgattcttgatatatactctagagaacacaaggaaaaattaaaacttgagtccatttctatggtacactctttatttagtaggaggtaatatctcaaataaatctaagccataacattttttagatctttaattagttagttgattaattaatctagaaatagaaaggaaaatatgtcaaatcccctcacggggacagaaaagcaagcgggccacccttcctttcctataggcacgcatcctccctttcctaatttttcatgtcgttaaaattttaattgtaaaaacctttttaaatagtttaactattgtttttttaaaacatatcatatgcaaccctgcttcgtgtgcaacctatgcaaccaccaattaaggccacaggatctagataacgtctgaggttttgttcacttaaggccctgtttagatttgaaattttttgaccaaagtgctaaaaatttttgtggtcagaatacgcgaaaaattttaggtgtttagtttggcaaaaaaatttctaacacaatttgggttgcatgcatttgcagttgtcattggtgggcttccataggagtgcgtgcacagttgcagcctaaaatttttgccctaaaattttttggacccgtttagttcccgggccccaattctacaaatttttttctctttgagccaaaaaatttcaaatctaaacaggccctaaaccctcctatttggatacacacgagttagatttaaacccacaggtggaggggtttaagtgaaaaaaaacctcagatgttggatctagatcatgtggccttaattggtggttgcataagttgcacacgaagctgggttagagcatctctaacaacttggtatttcaacatgctatcctaccaaatttgctaaaagcataaaaatcctcctccaacaactccttatctcaacttgctaaatttcccaagttgctatccagaggtttctactgctgagatttgtcaagttgctatcccaagttgctatcccgagcgcaacttgttggagacacatattcttttaccaagtgagcgggtcccatctgtcatcctctatttttaccaagtgagaatagcaacttattggagacacatcctttttttcttttgctaaacaaattagcaacttgctataactcaagatttgacaaatgaattttaccaagttgttggagatgctgttacatatgatacgttgccttgttttttttgcttgcatctaaattttttttcccaagtttggttctttgaacattttcgagcaaccaatgattgcttggattatatgttaaatcatatatccgaatgcaaatttgatgtattcatttctaactaacgtacaataacatcaacatctatatttacattcaaattgaaactaaaatatgatatatctacacgggttacttatataaaagtagtttataccaattggacacattggtaatttatgtcagatctaaagttgcaaagattaaaaagatgtatcatgtccaatagatcatgtatgcattaattagatcaggaaagaatctttattatatctaaaaattttctaatttatcctattgtataaagaaaaattatataagtatatattctaacatattacctcctagccattcgatttaactaaatgaatggctcactatcatttgggtgtaccacagcaaaacccctttattaatctacagaactaatataagttacggttctacttagaaatatatatattgttcgactgtgacttgacaggactgaagcaattctttaatactccattatgtatcctctaagataatagtgctgccatcagagtaacttatctagctaactaaataaaatctactacaactttgtgaaagtgatactctaaccgattactacagcagtgaagtaatgtcaaaggcaagacgaaccaaataacattaaccaatgtcaatactcataaatattaactagatctgaaattttcctttctgctcaagtcccaaatcccaggtgggtgacttcatctggagca

SEQ ID NO: 4840 - DNA, 2671 bp, Sorghum bicolor
  Intron number 1 from transcript Sb06g001780.1 (locus Sb06g 001780) derived from phytozome v7.0 (chr-ID chromosome_6; pos 3247363 to 3250033)
aaccagtaagttatttgtgatcatgcatcttatgtttattcttttttgtgtgtgtatgtttctgtttttctagactattctggtgtttatatttagctcactggtatagagtacatatatatgtggtttatcatctgcctactggaaaacttttagatgtgtgaattgtgatccatcctccagttatgagaaattactttacaccaacatgttaggaaatgtgagctttgtaaggaagtttttcctttgttctctccgaagatgtaagcaatgaattcctgtctatgtggttgaagcctataaggtttacagatcccataactgagaatccgggacttgagtttcagtgttcacttgactagatttgggaaaaaagagagttgttaaatatgtgagcagtttatcataaagccttgttgtcaccaacatagagttgttttggccgatcctccttttacttactggctgactatccatcatgtctttatctgtcttctttatttctattggttctgattataatttgagttttgcttacaacttgactatgtttggctaaaaataaaagagagagtggttaaatatatgagcaacttatcataaagccttgtcacaaacatagagttgttttggccaatcctgtttttacttacttactgacaatccatcatgtctgtcttttttattctgctgattctaattataatttgagcaatttataaagcaaaagcagtgtctgtttctctgtgttgcctttcagtcatttattggatatgatattagctatggaccacaatagtagtttgagagtagtttttgtcattgaactatgatatgcgattaaagaattgcccatactgtaaaacctgtggaggtttataaacccttagattcaaatattttgtgctctacacctgtaaaattaaatagtttcagccctgcaaatgaaagagttaggagaaaagactgatccatcgcacttatgtaactagattgtctcatatctatctgtttatatatcacgagctgcaccttcgaatactattcagttgtatcttagaactgactcatgatccttgcagcgttcctgaagcattctggaaagagcttgatcaagcgaagcaactgtggaagaacagaaatgatctgaaggttgagcatgcgggtgttgctgcactcttcggtagcaagctgtatgtgtgtttctgcgccagcgagattgttgtgagcaggggtatatagctcaatatcaaagagtgctgcaacaccggcacactcaactttcagaccattaaccatttctgttcttcacagctgctccacttgatcaagctctttccagactgcttcatagcgaccaggaacttgagatgtgtatagcagtgactaaaaagaagactagaaacaataatatgagaaaaaaagttaatcacattgtcttaccacatccatgggaaggccaggttaggttcggagattattgcaatgccaatgtctagtgtctaatatatgccaattattaagcaaactttatttgtataagaagcaggtgctaaaattcaactacaaagagcaaacaggactgtacatcattactgatctgtcttcatggaacacctctcactccagccttagctcttgagaattctgttgcttataatttacttgcctagtatttctgtttgtagaagagtcatataataatttatatgtctgaagcatgtagatctctcttgacttgaagttttatttctttggctaagctactgtgaactgctgctttggataagtgtctaattttctgagtttcccacaaagcttagcattaatcaaactatgaggctatgagcgatatattagtattactgatatttaactattccattatgaattaccttattttttattttgtctttttgtgtttctgttttgccagagtattttggttttcatatttagctcggattacaggcatagtgtacattgttgatctataatctgcttactcgaaaatattatgtgtgatactgcgattcatctcttggttttgagaaattacttgataccacaatgcgagaaaaatgtgtgattcatcttttttttacaggaacttcctgatgtatactcctattatattgcttaaatgaagcatagaaacaaaaatgtcagaaaatggtgaccacatccactaagaaagagggttaaatttggaaattgttgcaatgacaatgtgtactttctgggatatgccttttgttaagaaaaatatatatgcaaagagcaaattgaactatgtatgttgttgcaaatcttagttcataaaacacctcactccaatcttggttcactggcacaaaatggtagtcatgaaacccctcactccagtcttactctgtatagttctgtcgcttgtaatttagttgcctagtgcttgtctctataaatgagatagtaagtcatataataatttacatatgtatggagcatgagacctctcttgacttaaagttttattactctgtcagagctgttatagactattgctctggataactatcttaattttctctgtttgccgcataagctggcattgatcaaaactatgagctagtagactgattgttgactttcccattatgaatcagctctgctggaggagctccttattttg

SEQ ID NO: 4841 - DNA, 2220 bp, Sorghum bicolor
  Intron number 6 from transcript Sb03g014700.1 (locus Sb03g 014700) derived from phytozome v7.0 (chr-ID chromosome_3; pos 20027057 to 20029276)
atctgctacaggtaagcactgggatttttcacaaaaaaaaaaagttcgggacaaaaaaggaataactataagttccgtagctaatagattttttttaataatgaaacaaaattccagtctgtaccatctagagatagtacacggccgaaggttcagatacagaacgaagtcataagactcacgtactaatagggaacatgaaaaaaaatcagccctgaaaaagagggcaaaataattaaaaaaaaacagagcaaagagctaagtctcaatgcgtttcatgtatctccagctaaattttgcgaagatagtaagagcaaagtctccctgcagccttccatgaataaaggttgctcctccaataggtcgccttgaaaattacatgtctagaagtatcatatcatttatattcaaccaaattatccaacaaagtgcagccgctccaagcagaatttggtttctgagccttggacataatccatgtagccatgaaccaaacatattagcaaaagtaggtggttgaattccaaaagtaatatgcacagtattccaaagaaagctaacaaaatgacaatcaaagaatatatgttagatagtttcatcgaaactacagaaacaacttttgagatttgacactttgccagttcctttttgcttaaattatctttcgtaagtgttattcctttttttaaatatcacagaagaattttagtttcagtgctactgttaatttccaaagaggacttttgttgggaagaacaccttgttgaggccctatttagattctaaatcttgacatcccaaaacttttggctataaactctacattccaaataggtgtttagatgttttctaaattttttgatctgcaacacataagacagatttgcccttatttaatgcttgattcggttcattaatttaagcgggtctgggggtatacgacgtccaaaacgggccctaagtaagtttacacagtttttggtctcaagcttcccaaattccaaatctttacagcccaagttttacaggcctctgtttagatccattcttccaaaagttttggttttttggctacatctaaacatggcctgaatcaaatttctatatatggagcttactgtgaacaggccttttttataaaggttccatcggaaaacatctctcccatttgtgaggtgaacatttactacttttgacactagaccaaaccaaacgatccgatttgcattaaccaaatctcgcctaaagaacacattcaatggtgtagtccttaggacctctgccaccgtgtcatcttttctcctcacaattctaaataagcctgggtaaacctcactaaagatggtcggaactgctgaatgtgtgtcgcctctttttgctttggtaatagcgtgattataccaaagtttaaaatagcgggctattgaaaatagcggcaactttttttcagaagctatgcagctatagcggcgctatgacagatagcgttttttataaaaatacatgaaaaacatgagtaattgatgaaaaagacatggtaaatatgaatttgatgtataaaaatatgttttcataagtctaggtaacattacaaaataccaatatgacattacaacatggttcatgaaagtttcattatttaaaatattaaattagtagtaaagaaataaatgataatctagtcttcatggagttttgagagtcaaactgagaagatttatcatagcggcgctatagcgcgtaatagcggtgaaatttgttgtaataaatgcaacttagcggcgctatagcgcgtaatagcggtgaaagttgtgatagcggaaaaaatacaaatagcttagcggcaagtctgtccagcagctatagcgccgctatagtggcgctatagcccgctattttttttttttggattatacccaagctaactcctaattccgagacactagaagaaatacgaactgaaggaaaatgattgaaagaaaaattaaaggtgttacctccaccgaaattcaattttttccaagctgctcgcttttttgcattctgcatggagtcaatgtcgttgtgcttagccaaccgtggactcgcacgcttcggtgtcttcttagctgcagccgccagcacatcagatttctcttccttggacctgcatttgcaattttgcattctgtaactaataaaatgttgtgcagctgctgtgtactttcgaagatatcagga

SEQ ID NO: 4842 - DNA, 1822 bp, Sorghum bicolor
  Intron number 1 from transcript Sb02g034300.1 (locus Sb02g 034300) derived from phytozome v7.0 (chr-ID chromosome_2; pos 68789288 to 68791109)
ccgctcaggaggagaacgacctacgccttcgcgaggtgcggacgcttctccctcacgagcttcaacaggctgattgtatctcttttctatgcgttgcaaatttgggtacttatctagaagcagcttgctcaaattgagccagcaactgaagctatgcagttccctggaggctcttatgtgtttgtttggtgtctatacaggcctaattttcttccagtcttgcaaaattcgggctaatcttgatttcgcagtgtatagtttgtggtgcagtggatctatttggtactggcgatgtgaacttttaaattgcattgccattaagcaattttcttctttgtttagactttagatttatgacactcctgcactttatttggaaacctcggcgatcaaaatgtatatgtgtgccattttttttttggcttatagtaccagcagttggaaaaaaaaggagataagatataaaagtttacctggacgcatgtccctttttttgtgagctaaacacactcacacccgtgtcagattctgatacctgattcgaagtgctttttcgtgtgtaccaaaaattttgctgaatcagacattggcgcctgaattagacactagcagctgcacttgtgtccatgtaacactagatataaattgaaaaagatggaagtttgcctcatatcatagtttgataggccatggtcacctaagtgggtttggtgtctgccaaggcaaggagggatctaggctgtgcttgggtgctagacaggaggcttcctagtgcctgtgcttgggttctagacaggaggctggcttcctaatgccttggcactggaaggctaggtgtctgctttggaattgtggaggagacaagccacagaattagaaccaccatgtatatttatcttcttgtccatgctattgtcacaattgtggaaaatttgtcagcttgcattagattggaacctcacatcctttgatctcatcgtcttcttgcatgtaaataatggagataaaatgtagtctgagagagaataatgggtaaagatggggagaagatgacagcatggcagagaagtcagatacattaaacaagctagatactgcagaatacatgcttatgtgtatgtattatgtaggtcatttccttcatatttgctgtttgcgccgtccccaattttaacatgtcccagtttccaaattttctgtgtgccatacagcccatacacttatcctaagcaatctgttaggtttctacaatacagtgcctccaccttcctggagatccagaagtcctacgtgattctttgttcataggggcttctcaagatctatattcacactgttgatataaactctactaattctagtagaaatgttttgtttccacactttttttcttagaatacggtaacacatgcatgcttgtttctctctctctttttaccaacatcatgtgaatccactcttttgcttgaagccacaaaattaactgtgtgtattttgcttgcaaaaccaacccaagttcaattatgctatatttttaattagttacacttgtatttaggtgtgttttccatgaaattgcataattttgcattagttgtaggtttgaaactgcatagcaggaataaattggattttatgttttatcttgaggtaaggtcccattttcagccgatattttcaaatacatgcatgctatattattatgtaaattcgtgtatcttgaacccacctgacttagttcaataagatagttctgttcatatcaaatataattaatttatggttctttttgttgtaatatccaaaataatttaataggtct

SEQ ID NO: 4843 - DNA, 627 bp, Sorghum bicolor
  Intron number 8 from transcript Sb03g007070.1 (locus Sb03g 007070) derived from phytozome v7.0 (chr-ID chromosome_3; pos 7282240 to 7282866 reverse strand)
accaatacattggttgttggagatcattgtgtagggtaagcattgttcaaatttttattggtagcatagggagatgatatatgatctttaagtgtgaagtcaactataattatggcatcaacttgaaaatgttaacttgttagccaaatactcatgtcacagcttcttctattccaagatcacggtgacgaccctcatgcacaatgcatatatgcacaccaccctgcagtacatttacacatttcctgacctttttttttcatcctgaactaaattttattaaaaagagaaataaatcaaacctctgttaacatttggaactgctggaattttgtaggaatgaaatatgcctgtttctctttgtctatttggaacctaaatagctgtgttttaagatgcaagttgacttgatttatcgtcctctgctattgcaagcaatattgcatttcgtttttgtttcctgaagcaccatcattaaatggttatagattaaaacatgaccaaaaggaacataactaatctttaaaacaaagtagtagagtcaacattagtattctatgtactctaaacttaaatgcatcatgtatgtgcagttcttaaaagatgtttttttacccatttgcaggc

SEQ ID NO: 4844 - DNA, 1112 bp, Sorghum bicolor
  Intron number 1 from transcript Sb03g010140.1 (locus Sb03g 010140) derived from phytozome v7.0 (chr-ID chromosome_3; pos 10980826 to 10981937)
ccagcgggttgagatcatcgacaaggaggacaacagtgcgtgctacgctcaccacactcgtagttttgttttgcttcctgcttgggtatagggtatagtgtgctggttgtttcagtgagagaaaaacacggttggcaggcagaaaaagcatggcttataagacaagcgaacgggctaagtactccgtaagtatttagtagtattattagtttctgttgcaaggaatgctgccacggctagtgcaggagcatactttgtttgaaatcacttgaaactgtaaactaacaggctgatagtctttgttacgtcctgcagtatgcaaatcatttccaaagaaagaaatgtgtaggaaatttggtatgcggttgtaaattactcaaagtttagggagtactggtcattagagtggtgataaattaccatttcttttgtaaggaattactcaattcattatttgtgctcttaatgggagcctccttcctatgggtgtgctcaggtgagctttggaaaattcaaggattctacaccatttctgtgtatatccttgtatagttttgtttttcttcaagtccagagaatcattagggcttgacttgtgaacaagattgactgtatataattgtacaacttccttcctcagtaacccattctgcaaaaccttgtcaggacaacaagtcaatcttggtaattgacttagttggattaggtaggttgagatggaaaatttgtggtcaaacaacaggacgagcacgatggcatcaataggtagaagaaaatcaaccctttttatgttacaactttctaataattatctatacaggaagctgatgcctgatagacgtgttgtgtaaagtgttcacaccaacattgaagttctttaagtactctttcgttcaacttgatcaacatagcgatgttttaaattgggctgacttcgggatgtataggaacctactatccatatctgattattggataaaaggatacttgcactgggacattagaatattttatttaattatattggtgggtttgtgccttttttttttacttatagaattgttcaatattatccaggtcctgttacgattgcagatagagaagcagaagaa

SEQ ID NO: 4845 - DNA, 1175 bp, Sorghum bicolor
  Intron number 1 from transcript Sb04g005730.1 (locus Sb04g 005730) derived from phytozome v7.0 (chr-ID chromosome_4; pos 5628828 to 5630002)
gatccccaggttcgtctctgcgctttactcatttgttttttttttgtttgcaaaaaatctggtgggacgtcgcatttgcgcactgaaaggtggctcggttcatcatcgtgccgaaaatttagtttttacagggatcagattcagttgctcagaagtgtagatcagatgaagctgctcctgctaattcgtttggtgaacctaagtactatttgacgtgagattgtagtatatttggatgtgaagcaccttcctttcgtgtagatttgtggcttcttagttgatgtttgccatttaggattattatacaagttaatgaattatggtgtttttctgctgaaacagggacccctttagctcaaaagttatgctttttaatgtttgatactttgattgatgcacaagtgttctgacacacgggtttgggctgctgtgacacatcatattgaacctgttgtactcatgtttttctctaatggaggatgaatttgggcatttatcaagcagcaactgtaagagtactggcatgtgaaggttgtagtgcatgcaacttgttcagcctctgttatagccaagctggaaattttcatttcgagcacttggtatttgcttatatacacctatacggcaggattatatcaatcttcatctggttcctatgccttatttggaatacccactaagaagctttgctctgacttttgagcatttcagcatgttgcataagtcacctattttggaagtgttcagttctcaatagggaggagtattagatcagctgatgcctttttggttattctgtttgtttgaagctctgatgggttcacaggtttcaggaagacctttttcatattcttgtgtcacatttgcttcttgcacttagcagtgtgctatcatgtcattcgttgtgcaattaaagtctcactgcattatctattttaaaaattaaaatgctgctttcagttacacaagttcaatgtaactatgtatctagatcaatattgtttgagatgtcttgctgctaatcataaattcttcttgttgcatatttagctcgtcttggtagcgaacagagatggatatatgtatcgtggctcaatgttcttgattttctttggtatgattctcattttcaaaattatttcagttgcttgaaaaagctcttgaggcctctggag

SEQ ID NO: 4846 - DNA, 14667 bp, Sorghum bicolor
  Intron number 1 from transcript Sb01g050640.1 (locus Sb01g 050640) derived from phytozome v7.0 (chr-ID chromosome_1; pos 73783247 to 73797913)
caaggacaggttcggggaggtcagtccagtccgtttctatcccttctctcatctaccatctaccagcagaagccaagtatttgcatttccaatttccatagatttattcctcttcctagttcttcaaggtgcattatttttcaatattattaatttgatctagtagcattacctaggttagaacatctccaaaggctccttaaaaatcacttggtaaaccaacgattatgccatagccacagtagcgatctgcagcagcagcatgtaacattgcgagttattcgtagcctgaaccaacagcgagttcatctatcgcttctgcaatagtgttctattacccttcaccaattttgttctcctgaactagcacaagaatttgcagcttatattctaggccttctgtgaataaaacacctactcccattgaaaaaaatcacactataccatgaatcaacctacagattatcataaatttctatgcttagaagggaatcagcaggtcaccagtttgatactctctccagattgcaaacaaagtaatgtgtcagaaaactgaaattttgagccctgtaccaacttcacagaaacaaaaaaaaaaaaacttgatacgatcctatttttggtacgatttggctacaaatctcagataaacatgaggtgaacactgataatttgtcctctgaaatttgtatcaaatgccatggaattggaagtggtattaatcagttgaatagttggaccaacttattttcttagaccaagcttatcagtagttaaaacaatccaaattccctaaaaggatcaaggtaagttcttctcaaagcaaaatggggaaagtttactacagcatcaattcgagcatattctgtagagcaaatcctaaaccaatgtaggtaagggtaacccagtagttttcactttcaggtttaggatgtagcttgtgtgaattaagatacgctgcgttttctttgcaggagcgtattgataaaagtaaaattagtacaggcagcaacatggatccatttatatgcaactagaatagaaaaagaaaaacagctatctctgaactgtcagtgctatgtacgtaccagttttggcagcttgatgtaagtcactactacgactgctactctgttgttgtgtatattagttcataagatctctctttatttgtacaattctgctgtgacaatagcgagcttcgaaatgaatgctcaccttgacagagacagaggggatatcaccgaggggtccatgacagctcggtggtgtcagtcttggataaagtgcatatgcggtcgaggttgggttgagcgacattggcgcggtggtggcttcagatcgatgcagggcgctgctgggcatccttcttgcatccacacgaagccgaagacaggtgtcgggatgatgtggatggccctggtggagaagacggatgtgccttgcagtgcaggagtggccgctgctggtgcggaatgggttgaggaaggtgttgttgacttgatttggtggccttgtagtgccggcgacctgggtggtgagcggctgctgctgacctccgaaccctactaacctacaactaatctccagctgcaactgtgaattgtgcaaggaacaagaactagatgaaaatgggaacatgagaataggaagagaagccttagcccttgggaaaggtgtacagtctttggtgtgctgtcctctgcacgactgcacctgcttgggctgcagccaagcggctgggctgtacagctgcagttgaaacagctgcaagaagcagtagcgagagcatgcacacaggcacgagagatttatcaaatgcttatttttaggaggtcagatacaaagctatttggagggacatctttttcctttttgccaaaaaaaaagccgaattagcgagttgctttctttccttatgcagcagcagcagcagcaagaacacagcaagaacaacaaagccttttagtcccaagcaagttggtgtaggctagagttgaaacccaacatgagcccctagtcacggttcaagtacgtcgatagctgctttccaagcacttctatctaaacaaagatctctaggtatatttcaaccctttaaaactctttttattgtctcccacatgtcagtttcggtcttcctctacctctcctcacattgatatctcgacttaggactccacaatgcactggtgccttagaaggtctcctttggacatggccaaaccacctcaacctatgttgaacaagcttttcttcgattggtgctacccctagacggtcacgtatatcatcgttccgaactcgatccatccttgtgtgaccacaaatccaacgcaacatatgcatttccgcgacacttagttattggacatgtctttttgtaggccaacattttgctccatacaacatagcgggtctaatcgtcgttctataaaacttgcctttaagcttttgtggtaccctcttgtcacagagaatacaaaatgcttggcgccacttcatccaccttgctttgatctatggcaaacgtctacatcaatatctccatccttctgtagcatcgatcctagataacgaaaagtatctttcttaggcaccacttgaccttccaaactcacctcatcctcctcatgtgtagcattgtcaaagttgcatctcatgtattctgttttagtttgacttactataaaacctttggactcaagggtttgccgccacaactccagtttcctatttactcctgcctagctttcatcaactagcactacatcgtctgcaaaaagcatacaccaagggatattcccttgaatgtcccttgtcacttcgtccattaccaaggcaaagagatacaggttcaaggctgacccttgatgaagtcctattttagtttggaagtaatctgtgttgcgatcatttgttcggacactagtcatgacattattgtacatgtccttgatgagggtaacatacttggttgggactttatgtttgtccaaagcccaccacataacattccttggtatcttgtcataagccaccaagtcaatgaaaaccatgtgtaggtccttctgctccctaaaccgctccatagttgatgctcgataactctctcccacggcttcatcgtgtggctcatcaacttaattcccctatagtgcaactttggatgtctcccttgttcttgtagattggcaccaatatgcttcttctccactcctcaggcatcttgttcgattgatagatattgttgaacatcctcatagccatactatagctaaatccccaagacaccaccacaccttgctcggaatatcataggggcccaacgctttacccactttcatccttttcaaagcttccctaacctcctgcacttggaatctacgcacaaagcacctattggtgtcatcaaacgagttgtccaactggtcagtggagttctcattctccccattgaaaagcttatcaaaatactcttgccatctgtgtctgatctcatcctccttcaccaagagttgctctctctcatccttaatgtacttgacttggttgaagtccctcgtctttctatcatgagccctagccatcctattgatgtccttccctccttccttcgtattcagacattggtaaagaccctcgtaagcccgccccttcgcctctcccaccgcttgttttgcagtcttctttgccaccttgtacttctctatgttgtctgcacaccggtcctggtacaagcgcttgtagcattccttcttttccttggtagccttttgcacatcttcattccactatcaagcgtccttcaagtcgcatccacttcctttagtcactccaagtacctctgtcacaaccttccgaatgcatgttgccatcttctcccacatgttgttcgcatcgccttcgtccatctttcagttgtagctcactgttggagtataaggtttaggcccatgaggcccatgtatgtgaccatattgctacccttctagggtcagcccaagtaatggaaatcacagtttacagcgtggtatcaagctagggtttctcttctccctcccttcccagcccagccgccaggcagccgccgccgccggccggcgcgccgccgcagccgcggccatggctgcccctcctccaccaccagtcggcgcgggcgcgccgcccctaggcgcggccccccgaggcgcgggcgcgccgcccctgggcgcgggtgcggctctccggaacaccgaagcgctggccagggtgacggacgccggcgccgccatggcagctgctgcccttcctccaccacactccgccctcgtcactgccctcaccgctgcccgcgctgctgctgcggacggccatgtgcgcatgcgggctgttgccctcgcttgggagcacgagcaccatgcagccgatgacctggctcgcaagatcgccgagggggagcaactgactctctgtatcttcctaggttactcccctgagcataaggggtaccgttgcatggacctctcttctcgccgtgtcctcatctctcgccacgtagtgtttgacgagtcgacattccctttctccaccacccccacctccacacctcctgctgaccctgcagaggcttctttttttcccactgacccggtggttcccccaccgtttccactataccctgcaggtcttgctccggcacgctctcctggtggtccttcgagccaggaccctcctcctgtacctggcacggcagaggcagccccagagcttcctccaccgctaccagtggttgcgctgcctcccgttgtgcccgaagtcgtcgtcccgatcgcgggactgcgcaccccgccctcacctccccggcgcttcagcctcgtctaccagcggcggcgagagccggctccgcctctgcagccggtgtcgctggctccgtcgccgccctcgccaccagcgctgtcgtcgccggtacgggctccgccgtcgaccccgccacctccggcggagcacccgtccatgccgcctccggccccgaggcgctctcgcgccgagccgccggtgtaccacccgcctctacttcaccgggatcctcgtcacactcacccaatggtgacgaggcaggcatcccagctgcgggccctcaccgctgctacctgcgagatggggatctctccggtaccctcttccgtccgcgaggccttgtcagatcctcactggcgccgcgcgatggaagaggagtacgcggccttcctcgctaaccagacgtgggatctggtgccccgtccgccggcctccaatgtcgtcaccggcaagtggatctggacgcacaagcggcgtgctgatggttccttggagcgctacaaggctcgttgggtcctccggggtttcagtcagcggcccggcattgactatgatgagaccttcagtccagtgatgaagccagctaccgtccgcaccgtactatctgtggctctcgagcgctcctggcctgtgcatcagctggatgtcaagaatgccttcctccatggcactctgactgagacagtctactgcagtcagccggccggtttcgtggattcttctcgccctgacttggtctgccggctcaacaagtctctctacggtctcaagcaggcgcctcgggcgtggtattctcggttctctaccttcctgcagactcttgggttcatggaggccaagtccgacacctcactgttcatataccaccatgggggtgagactgcttacctgctcctctatgtggatgacattgttctcaccgcctgcagcgagtcactgctccagcgcatcattaccactctccagaaggaatttgctatgaaggatcttggtctgctccatcacttcctcggtgtcactgttgagccccgaccttcaggcttgttcctccaccagcggcagttcacttgtgacattctagagcgagcagggatgactgactgcaagtcctgttctactccggtcgatacccagggcaagctgtcagaggcagagggtccgatgcttgggccagaggactctaccgcctggtcttgctggcgcgctccagtacctcaccttcacacggcctgacatcacctacgccgtgcagcagctctgcctctacatgcatgctccgcgggaaccccaccttgctgctatgaagcggctcctccggtacctccgtggcactctcggctatgggctgctcctcagccggtcctcctctgccgagctggttgtctacaccgacgctgattgggcgggctgcccggacacccgcaggtccacctccggctacgctgtcttcctgggcggcatccttgtctcgtggtcgtccaagcgacagccggtggtctcacgctccagtgctgaagcggagtaccgcgccgttgccaatggtgtggccgaggctgcttggctccgccagctcctggctgagcttcaccgccccctcgccaggagctcacttgtctactgcgacaacgtcagcgccgtctatctctccaccaatcctgtgcagcaccagcggaccaagcatgtggagatcgacctgcacttcgtccgcgaccatgtggccatcggcgacgtccgggtcctccacgtcccgaccacctcacagtttgcggacatcttcaccaagggcctcccttcctcgactttcgccgagtttcgctccagcctcaacgtcaccggtggctagttgtggctgccggggggggggggtattgtgtgttatgtgttttccttcttgtccagtcttgaactccgctgtgccggtagtccagactgcgggggggtgttggagtataaggtttaggcccatgtatgtgaccatattgctacccttctagggtcagcccaagtaatggaaatcacagtttacagcactcacataaaccagcttatttagcctctgatgctctaacctgtttcttttttttttgtatggacttacacaaaagacaatgcatattcacataccaatattgcttgcaagaacagtacagtagcacttaattacttgcaagtacagtacagtagcacttacagctgaaaattcactccaattacgttcgcatccagatgcactacaacaaaggctaacaatcctttttgccaagcattggagctcatatgttaggccaccatatgctccccaccagagaactacaatttccataccatatcattagttcattgctgattgctttcacaaatagtagtacataaggatcaagaaggattacttactaggattttttctctccctgtctcttattgccattggcattgagaaggattcaccttcagccctctcatagtcatctgcctgcatgattatcttgttctgttcctcctcttcactcaccatcttccacaaaactttattaaacatgatcctcagcctgtgggcttatctcctatctttttcttttatggcaaaaaacttgtttggattcaagtatagggctgctccatataggtcctgctccatttggttttcccatcgattgtcatagtattttagtacttcgttgagtagagttggttttcctttcaaagattccttaattgtggccttcgccacttccatggctgccataatctcaggagctgctggtgtctcatctccatcagctatcctcagagcaataagaagtggttgtgaagcttttaggtataattccactttgctccaaaatggcgctgaaaggataatgttctcaacgcgccggccttcttgagtagctgaaaagctgaggttatgccattcatcacaaaccactaaactcctcaatgcattcttatgcctatgcatgcttgccaatgtgagaaatgaagtggcaaagcgagttacacctggcctcacaagatctcctccaattttatctcgcattaggtctagaaccctcccatgcttgtacacgaatctggtcaccttctttgccatgtttatgcaagtgctgaattccttgatcttcccaatatcctccagcaacaaatccaagcaatgggctgcacatggtgtccaaaatagatgagggatcctctccattaaaagcctccctgctagcttaaaattggctccattgtcagtgacaagttgcaccacatgttctttcccaatcttatctatttgcttctctaacaagtcagccaacataggtgcatttgctatctcactggaagcatcaatagaccctagaaagaaagtccctgctggactgttagcaagaaaatttatcagatggcgatggcttgtgtcagtccacccatctgacattatgctgcagtcatattccttccaagcctgctcatgcttcttcctcaactccgatgttctattcacagctttttctagcagcggattcctaatctcatgatatgatggtgagcggtaacttggaccgtattgtccaattgactagcaagacttcccagcttcttgaattaatcacattcaatggaaggcgattctcataaaagaagtctgcaacatgatcatcaacaatttgtttggcctccttacttctctttgtgcagtgctcaagtgtaggttgagttagcttggatttgtacctctctgaaactacctcctctggtgacttgcaaagcatggaactcactgcctggactgtttttgagttgcaggttttgctgcagcagtaacagtgaaagtagtgatggcagcttgagcaatcttcttcttggcttgtttaccttttgttccagaacttggtactggtacagctgcagcagcaacatcttcctctgcagcaggaacatcttcctcttcaacttcaccatctgcatccgccgctgccacaaccacagtccttgaattttttttatgtaagcaaccatctccctcttaactagttctggactctgaggacaaccaatagcatctccaaaccccccagcaaggtgttgcttaaacctacttattccagaagggactaccttcttgcaaaaaatgcattgcacaaaatctttcttggaaggatctggccaccacccatactgccatcctggatcttgacttcttgccttcctctttttgtcaacagcttgagcagcaaggtctggaggtagttttgctatggccctctcaattagggaggggatatctatagcagatgaggctaaggatgaaaatggaacggaaatattccgtaccgaccgctttcgttttctacattatgatatcgttttctatattataaaaccgttttcgaattttgttaaacataaaactttgtcagtttcagttggtttcacaaccatttttatttattttttatactctttaattgctaaaatatagaaatattccgtaccgaccgcattcgttttctacattgtaattccgtttccgaccgttttcatccttagatgaggctgaggcagcagtagcagcacctgacccaacagattctggttgtggttgaacttcttcaaggtcagacacagtcattatcacttccacgtttgcacatcgtcgatccacatctacagattacagaagcagagggacatcacaagcactaggaaaagatggggggaggagagcaccgaaaaccaccaggagagggacatcacaatgacagcaagcatctagagtgagagatgaggggaggagggaagaagatggagaggggaaaagcttaccgtcgtcggagctcatggtgaagaccagcagtggaagagggaagaccggagaagtggagttgtggggagaggagtcgtgaggtggagaagaccgagcctggaagaaaattgcggctgccttcaggggtatccccctgcagccactctattctatctaaaccctcaaccctaacaggccaaaaacttaaagcccattagcccagtcccagttagaaaaggcccaaaaaatagaaacctggtcgtccgattaatcgcgattaatcgacgattaatcggacgaccagctttctggtcgaactaatcgagtcggacctcctaatcaaatcctaggagcgacctggacgattaatcgcgattaatcggacgacctgaaatcattgtgcagaactcaatacttcaatagacagcaagtagttcatcaaataaatggaaaatagcaagttgatacttatctgattaccagtcatctcccatccattcaatgaacacagcatagcagatcagcaacaactagtaatcagagacaagtggacaggacagcagtacaagtgcacaacacaattcataaaaggtcttgttcagacaacacatagttctcagaaaagaagaaaaacagtcacacaggcacacagtagcaacagttcacaagtttaagacacacattggcacatatatgcatgaatgcatcacaaaagataaaccatgacatgcgaaaaggccccaggaccatatcatcttccttcttcaataaggttccaagtagtcatcctcatcttcatcaaactcttctttatcagattcaaactcttctccttcatagagctctctcactctagcactcctacgcagctgaagttgttcttctgctcccactgcatctccaagaacagaccaaggtatcccagtaccttccatctcttcttcctcctcttctctatagaccactaatgcagaatcatctccattctcatgcaaaaatccttgagcttcagttgtatcattagacaagagaacatcactgatcttctttgacttgattttctctctcttattaagcagcttggagttgaactgaatgtagactaacttgttgagacgtgttgtagtaagcctatttctcttcttagtgtgtatctatagatttaaaataagaacatgttcaggtctgcaatttaattcaaaaactcctgaaatgtggacagcagatagctacttaccgcttcaaacccgctccaatttctttcacaaccagaggcacttgatgtcaaagaaaggatccttgttgccatcttctgtaaggctggtacttcagttccatacaaccaccaccatgatgctggaatgaatgaaaacaccacttttagttagtaggtacaattaatttattgtgagctgaaaacaacaaaaattatattgtaaatggtactacctctatctgggttgtaatcaaaattttggaaagtccttgccaacttcttgctaaatggggtccttccctgttttgaaactttctcagctcaacatgggcagcctgatcttgcttatcttcatcatgatagtagaaggtctctacacaactaataaatccttctgttattgtgggctcatcaaagattgctggattagcataactgtagtgtggattcagcaaataagctgtcaaatgcagtggagaatcaagtcttcccttcatcttcttgtcaataacagcaattacctccttgaaccgagactcattattgcccaaggcctccttgatctctttctttgcctttagtatttctccataaacgaaacccatggatggtttcacatccccatcaaccaagcggagaactttgaacagtggctcaaaaatactcactgttagcttcacattcttctagaaggttggattcaatacaatagctgtggcatcttttactttctttgattttacatccctcagtgagtcccacctattatgaaccaccatctttcttagctggtccttcttctctagtatgctattcaatgtgagaaaagttgaagcaaacctagtcactcctggccttactatctctttcccctctgtgaaatatctcatgcattctaatgttcttgtgtgcccgtagacaaatatagtgaatgcctttgcttgctcaatcaccttcttgaaccgagccaaattgccaattccttgcagcatcaggtttattgtgtgagttgcacaagaggtccaaaatatttgtggtctcttctcaagcaatagcttctttgctcccatgttgttagaggcattatctgtcactacttgcacaacattttctggaccaatgtcttcaattgctttgtccactagttcaaagatgacttcacttgtgtgtgacacatctgacatctccattgagctgataaagcttgttccatcagcacaattggtgcacaggttcattatgcttctcctcttcctgtctgtccatgtatcagtcataatagagcacccattcttcatcttctcggcttcacgttcttgcaacaagctcttggttcttgcatattcttcttcagcaatttctctcgcagagaatcctgacatggaggttcaagtccaggtccaaactggccaatggcttcacacatctgcttgaactcatcattgtcacatgcattgaatgaaattcctaccaaaaaaacataataattaatgttctgaaatgtttcctacattctcaaatgacacaacaacagaccaacagtacataataacagaaaagtgaattaccatgagtatagacccatcttgcaatatatttgtgcacctcatgtgttctttctttccacagctccttgttcagcctctgttgctgtaaagattcacttctggttgctttaggatcaatagcctttgtccatttgtccatgagccctaatttgtgaggctctgaacttccgacataggtgacttcctctgactcttctccaactcgagatacattcacttcctctataagttctagctcacgaaccaccttctctgccctcttctttttgcaccatctattgatttctggcacttgtctttagcttcatctgtgctctttgggcattttgtcgcattctttccatcatgggccacatgctgcttcaaacgataaattccccttgcatcaccttgttacagaatttgcacttcaccttgtccttgttcttaggatcaacaagaaccccgtatttccatcccatatcatctgaattccttttcaagagatttactccttcattctcaggtgcaggtgtagcaactgcagtatctgtttctgttgttgacatcctaaactcaaggctcaagggttcagtgagcaactaacaagtcattgacaagaaacctaaagtcctaaactcaagtagctgtagctaagctatactgctatacactagcttcagatttagtcatttaaagttcacataatccattcagattcagtcaaaatccatccacatacaaaagcaggggaggggatcagaagcagccaatgggggaggggattcaccttgccacctggggctgccgctaagggaggagatgaagccgtcgggggaggggagcaggactgcaggagcaagcagacgtcgggggaggggtgcgcccactggaagacgacgtcggcgggagaggtgtgcccgctggtggacgacgccgacgggagggatgcttccaggcgggcacgagcacgaccggcggcgaggacgagcttcgaggcagggtcgcaggcgcagcagggaggtgagcaaccgtccgagcccgtggcttccttttcgcgcgcgcgcggcctcgtccccctcttatccttcccgcgcgcggcttcctttcccgcgctcgaagacaacagcgcgtgcgcgaccgcgggagcggaatatttcgcgcgaccggctgcggcgtccgcctccgcgccgcctagagcgcctccgcgcgccgaatcgccgcctccgcgccgcctggaatcgcctaggcgccgccatcgcctagagctccgactaccccctaatctaggcggacaggcctcgactagcgcctagttgcgcctaaggcgacgcctagcggaaccttgtcatggcctacttgaggagcatatgcgctaattacatttaagaccatatcactaacgacaagtttgactaaaataatcctatccccttgccttctcacctccaccaccccatccttgaggctcttatcaatcaaaactcctactccatttatatttgaagttgtccctgtgtacaagagcttgaagccggtattgtccacctggttcgccttttgtcccttccatttagtctcttggacgcacaacatatttacccgcctcctaaccgctgtatccactaactcttttaacttactcgtaagggatcctacgttccagctacctaaacgaatcctacttggctcgactagcttccttacccttcgcacccgtcaagactggtgtgaagacccttggtcattttgcaccacacccgggcgccgatgtggcgcgccactaaggatgcgacgacccgacccttgttcacttgacaccgtgcccaggtcacgacacgatgtgtcatggggcgatgacccgacccttatttaacaccatacccgtgtcccgacatggcacgtcgctaagagggttacaccccaacgggattcttttgggtctcataagagtagctaagttttacattggctcgccaagcctcacacaaccctcctccttaaccagggcttgggacctgctatgctgggacgccataggcaccccgcccataggcaccccaccataggcggagttgctttctttccttatgcatacaagaataaaagtctacctcacctctgtaagataagatcagtgcagggatttaatctagtcattattgttgctcctttgcatatgttaagtgggtgcagaacctaagtacctctttgtttcactaactcctttgctgcactggaaatgcagtgctggctgaagaaacagaagg

SEQ ID NO: 4847 - DNA, 925 bp, Sorghum bicolor
  Intron number 2 from transcript Sb03g027920.1 (locus Sb03g 027920) derived from phytozome v7.0 (chr-ID chromosome_3; pos 55631289 to 55632213)
agtacgtgcggatcccctccagatttgacttttagcggatttcaattttttctgccgtcttctccttgtattagctagggtttcctcgtattccctcagatctggtctctctttgcttgtaatggctgttcatcatcttttgtgcacgctagtttactcgatccagtgttgattggttagttgtagttaatttcgtgtctcagtgtatgcttagcatgtgactacccttactaaggaagcacctctaacttgatttgggagcactgagttattcctttttctgttttgttgagtcgggagaggagttagcccttgatttcttatttgttgatgatttgttaacttggtaattattttggctaaatttcgtacagtctcacgttgttgagttcgaattataggtggagttgatcctttcattaaatttgtgaggtacaattattatatgtccatgttcttgggaaatatcctgatgcctgacaatctatggtggttttatccccattgctaatagcattttgtggcaacttgtcatcttttaaattatggctaaacacaatcactttacattaatggtatctacaagagaagttttcaaagcaaaatacaacattcagggacaaaacgtatacttcaaatgtttcttcctgcttattatgatggattcttaggatatatacctttgtttatgttgtgagctggttaattgggcctgtggcatgattgtttagtaaactagctaactagtttggagctgtactgattttgtgacatttttttctgtagctttaagtaaaaggtcataataattttcatggaagatatttagattgcctttacctgcaaggtttattctgggaccttcaacagccaactgctttacttcgtgaattttcaggtacattcaaagaacatttcgggaaat

SEQ ID NO: 4848 - DNA, 2819 bp, Sorghum bicolor
  Intron number 1 from transcript Sb03g041070.1 (locus Sb03g 041070) derived from phytozome v7.0 (chr-ID chromosome_3; pos 68606183 to 68609001 reverse strand)
tcttcctagtgcccgtcaagatctctgatcaccaggtatactcctttactcactcctgctcctgtagtttggaatttatagttcatatgaatagaggtttggatataacgatgaataaatactgaatatataaaggacgtggtgctcagaacactaaaacactaggttgaaaccgtaacacactaggttgtaatatctgagtataattgtagataatttctttgcaatttattggcatttcagaacctttgaagggaaccaagtagatatgtgctttatacatgtaatagcttggtccgatgtgatgttcaattcattgacaatactgcctttctgagtgaaccaagtctatttgtgcttgaactatatattaaatttagccatggaacaacaatttactgatataatcaactctgcagcatggtttacatctaaatttaccaatcaatggcaaaattagtttttttccattaacaggaagggttgccgcttcacttgcagttggttaacgagtcactttttttcattaaatttcccagtacccttccattgacagccaacatgggcgtgacacaaggcacctaatctgggtttaaaacactaatcttttaggtttagcagtaaatcacaataacccattcttatcagtggagattctgaattacaacttgatcacacattttttttccttagaaattagagaagactactaaattgacacactatgtatttgacctgaaactgtaggattgtctcctttggacatgcatacttttgacttgaaacaatagaattttccccttcgaacacaggggcctatggaaaaattcgagagagagcacgccaacggctgcaaaaaattttaggtagcttaagcatggtgaaaatttgttgattacattagcttcaaaatttatgagtgggcctgtaccctgtaccttcattggcttctgtgtaggtccacccctgcttcggtaacttgacatgtttaccttgttggatgaaagaatgcttctctttgtgtgatatttgaagtgacacaacctagtccacagtagtttaacaaaaaaaatttattgtggttatgttgtggatgagtcttagaatgacatctagacatgtgggatgtatgaatttcactggcattttttttacttgaagatgtgcttacagtccatataatccacaaatagagttggtttggttataaatatttatagttccattaatagtgtagtcactttttttaaccaaaaggagctctggcatttaatatgagcacatatggttggccctaggtcctgaagtgtaaaaactaaaaacccttctacaaggagcatagtacggagagaggtctgcataaaagttatatgtcatcgttgatttttttgtgtgcttttattgaataaatgacagtgttttgaggggggtggtagagccgtacaggatcttgtcagttaattatcacaagatgatttttgtgcacgtacttctttagtaccaatgtacaatacttctgttgagattaatggggatgccaggacccagaatatttgcaacaaacttgtaggaaaaaggaaaattggtaactatataccttttccaacacgacacagacacaccacacagacacaaaatattctgtgaatccacctttaaacgaattatatcagaatcttcatctcaagggatctcacattgaaggctctaaagttacttttcctcaaataaatattctatagatctacctttgaaagaattttcagaatcttcatcttaagggatcgaaggctctacaatcccaactttctgtcctgtgcatgattgtcccactttaggtgcaaagaaatgaaaaaaggccatccgtaggttgcaatagggtgtaagagcgatgtttgcctgctcctctgtagtttttcattttctgagattatttctagattaatcttagtagaatatatatttttaataacatagcatattctaaaaagcccttcattatataccatgataaactgtattaactttggtttagtaaaatcatctaaacttggtaaacgtgggtgattggatatgattttcgtactttttattaaccctaaagccttcaactattacactgatgctgcatttaaactggcaacattatttgctaattgctgtgtatttcaattgagcagttcatgattggttattcaacataacaatcctcgcatatttggcattgtatgctgcagatgtaaaaattatgttaaactgagtcaaatatattaggtattgaagctgtagtaagtatatttgcttccataatgaacatgcatttttcatggatagtttagcttaaactcaagcagaaattgcctcctgattggtccttgttccacaaagttagtgcactgaaattgaataaccgcaagtgtggtatagttgcatggtagtagtgtcattcatttattttttatctgcatcatcacggctgattgatgtttttatttcgtaaaaagttgcatagtatattcttgattaagagttatatatccaactctttcacaatatagttctcgcatatatatctgtaattagattgatgatccactagatttacacattaaaatatcttcagctttggtgactgttctgtgttggggtatgaccatatttcataatttgacacaaggaagtgaggaaatggttcactgtcctctcatgttagctgattacaatattctgttttacctatcaagatgttctaaattataaccattgtttgcttggtgattgcagggtccactctcagtaggctttcctatagagaaccg

SEQ ID NO: 4849 - DNA, 741 bp, Sorghum bicolor
  Intron number 3 from transcript Sb01g008430.1 (locus Sb01g 008430) derived from phytozome v7.0 (chr-ID chromosome_1; pos 7268235 to 7268975)
ataaaggaagagacagatccagagtacttttgcaggtgagcagcttgtgatattatattcctatattctttgtaagtagaaatcgttgtaacttcccttgtgttccattctttttggctgttgtatttacatggagagcacctgcaataagaactgcaccatgcttgccctatctcatggtcaatattgcgttagcactgtttcggcgtatgctaatattgtgtctgccataaagaatggcctacaaaatgccacatcacagatttctaaaacagctaatttccagtttttaggttctgtttatatcatattctgaaaagaacagcattgtagaacattgtattgtatttgactatttgctaccttttgtatggtccatgatgctgccaacaagttgtcagtcctatctttacaaattttcacctgtgcaggttttcgttttcctgtacaattttcagttagaaaatttataaaagctaagaaaatatcatcactttgtggcaggcactaagcccatttttatattttcaagatttggttgttgctggtagatactcttttaatcctttattattttgttcacctgatggtaggggatcttgtctgctgatctagcacattagtcttgctgtttcagggaggcgctgacacaagtattacatgctacatacaatttctttctgaatccaagatcatcatcttatgtttgactgatccatttatctctgtgctgtttcaggt

SEQ ID NO: 4850 - DNA, 1265 bp, Sorghum bicolor
  Intron number 6 from transcript Sb03g012960.3 (locus Sb03g 012960) derived from phytozome v7.0 (chr-ID chromosome_3; pos 15794246 to 15795510)
attcaaggatacaaagactccggtgttttatataggtaactaccaagaaatactatatattgcaattgcatcaccttttcccttttttctatgggaaaattgctaaaagctacctcatatgtcactctgattttgagatctccccaaaaggtgttgttgcgaaagttcacccctgcacttggccccattgcaaaaaccaccccaatattccactcatggttgactcagctaccttgacctgtgctggctccatgttgacaaaaacaggcggaatcagctcaacacatgtgtggtggggtggttttttgcattacattggatccgggtaagggtggtgggccttcgcaacaaaatgcctgtggggggtggggggttcttctcaaaaccaaattgctgtggagtggcttttgcaattttcgcatttttatattggcattttggcacatgactacacgagcactgcgaagtacgctttgatgcaagtaacagcatgttgacatgtagccaagttactggttttggttgactttttgttttaccatcttacctgatattctgagtagttctgtctattgtgctctggaatatcttatgattctcccagtggtggggcagtgctattagaggtctccctaaggagatgcgcaggcccttaactctctaatcattcttgttgtctgggagatatggaaacataggaatgccattgtctttgaaggtgctggaccaaacattcagactctccttctcacagtggctaatgaaagcagcctgtggattggctggtgcctcggccttccatgagctcttctttaggtcactaggccctgcccctgaccctttagggtggttgcaggtgggctggttgtggtcgtgtttgtgtcccttagcttgggacatctttctgtagtctcctgtcatcctgtgtgtcagtgagttgggaggggcttcctttagcctctcccatttctgcatatagtttgtaccttttttcccttataatggaatgtcatgcagatatcttgcgttgttcggaaaaaataaagaatttcttataatgttccattctcagtattgtaaatactaaatcatgttattctttttatgatttaaatgaggatgctgtttatttgcaaagatttatttgaactttattcttccatattgtctggtgccaaatccttgtattcttccacttcatgattcgtgtatcgttttcataccctataggtttgggcaatctttccgctgtagcccttcttcct

SEQ ID NO: 4851 - DNA, 1722 bp, Sorghum bicolor
  Intron number 1 from transcript Sb03g010370.1 (locus Sb03g 010370) derived from phytozome v7.0 (chr-ID chromosome_3; pos 11214305 to 11216026 reverse strand)
cagcgccgggccgaggcctactccacgctacgaaggtaccgccgtcgttctccggtgcggcccagccgccccggttctgaactatatataaaccctaatgatcatacgagagatttctggtggcgtgttaaagaccatagttccgtaggccagattgggctgggactctagttcttatatgactttttttagcattttatttgctagccttgaaattggtagtcgatacagtattgggctattggccctgtttcaaaggttcataggaaacagttgtattcctgccagaattgggaaagttctggcaaaaacattgctcagagaatgtgatcagcccatcccagtcatgatgtctatgtctgctcgcctgtcatctcaactagtgatttgatttttggtgctttggtttgttgttgtttctttgcatccgatgaagtgaggtgttttcatgtttgttatgttcgtagttttaggatttgtagttttaggatgtgttgctggtgtgcagtgtggatttgagtttactttttgggtggttagagtagttattttagtcttagtggatcattgtgattggaacataagtttgaactttggatcctttcaacatgtattggaatctgttatgttttggttagccattttgctgattttttccatgattaattgtcatcgattatccactggatttgtagcatgaatcagtgcttcgagcttattgcaagggagagtcaaccttgatgatcttgttttcacttgtccgctgtcacactagtgataaggttcttaggatataggaagtttctagcgttgaatccttggaagttgtccattgtgcattgagtgttttcctgccgttcaaagaaagagcataatagtaggtctaaaattcttcagacacaaaataagatgttttgtgccaatttaatgagaaacttggcctatctaggaacatcagatgccatgttagcttggaagaaatttggagagggaagggatagatgactagaagggttcagttgtcttcagttagcagtagtatcctctacctttggcatactagttactagataaggctcatttacgttactaccaattgtacagaatcgtctctgtgatattaaaagaagtatacgtagtacaattcaatagtatgtgtgcaatgctcatttggtagttccttttcccatcaggaccacttctgaatgcctttctgtggttttttatgtatatatgcttcccaacagaattttataatgttcggacctattatgcaaagaggtccggtgtattgtagctatataagtttcttggtcttgtagttgttgatctagccataaagcatggttgttgctttgaacccactcgaaatttagctatctggcatgtaatatattcacaaaaggagaaaagacttctgggaataatagcaaaagtactttgtgttgtcactatatttccatgctacaatggttcaagtggtaaattgaaaaatcacatcaatgtatttttattatagtaagtattctaactcagaaatataattgttagtcactttggttatgcattttgccaacaagtttttttagtcatctgtaattctggtgactgcatttgcatctctctgtgtgaaaagtacttaatgacaatagttttctaaacctaccattttgttttctcattgactcattaaaaatatgtggcaggggtttttctgagtat

SEQ ID NO: 4852 - DNA, 1512 bp, Sorghum bicolor
  Intron number 21 from transcript Sb06g003090.1 (locus Sb06 g003090) derived from phytozome v7.0 (chr-ID chromosome_6; pos 6359850 to 6361361)
tagcaacgaggcttccaagaaatctcaagagtgaggtatgagacagttggcaagatatagccaatctggattaaaggaaagatgattcattttagtagatatattatcttaattttgcattttacatattggcttatgttgatggcagaaaaagccatcagagaaactgtgatattttataacattagtttgcaccgtgttatgctcataaataaacctgacaatggtttgggccggaaccagtttccatggtttgatttccttgttgggccaattcaatttgggtgaaaacgggctgagcaagctggtgggctggttcagtctgagttattacttagagtagtttagtttggtttggtttggttttggactgagtgttttggcttgataacaggctgaagctgtggttccaacccagcatcacaccacggtacagcagaagccccatccgcgtccactagtattcctattgtattactggatttgtttttctataggaaaacggccataaagtgtagcatgacgtcatgctgatgttgacaagctaggaatgaagcagagcacacacaacactcagccggctactcgctccgcgccgcgcagcagcgcatgtcacgcatgcacatgtgggaggacgtgcacagacgtccgtgctcggctcggccacgctcgggacctcgtggttgccggagctgccgggagcggtgcgaatggcggcgcatggccggacggaggagaggctcgcgctgcactgcttgggctttgccagcctcaagacctccggtgccgtcaagctcgtggatgccgcggtgctggcgcgctccctgcccaggctctactctctcttacctgctctccatcctctccagcttcagtgacctgcgggagttcatcatttcagcgcccggagctgtatcagcttctataacaaggacgaggaggtgctcaggcaaggggccaggatccagcggttcgacgtcagagggtccaagttggtggacgagatagagaatgagttcgccggtggtgaagttttctgcgactcgtcctacgttgaagtgatgtgatctctgtctgaaccattccacgatgacagttcgaagtcggtttcgaatcccggttgtaggctgtggactggtcttgtttggatttaggaacactacagtttggcgtggactggttttggagggggaacgagtggggtggattggggatttgaaggcagacgtgattagtttggtttggttatggtctggatcacggaccattaacaggtttactcataaaaatcgtttagttttttctgcagtttgttttgtaaaatttgatgaaaacttagaatttttcactctagcattttaccggaaggtgaatctttcagtaagtttgttttgattctgtgattgtagttctggtatgtccttacataatccatttttattctagcttctgatgtttttatcttttatgcatgcagttagaggataaatacaaggaatacaagttgaattt

SEQ ID NO: 4853 - DNA, 3643 bp, Sorghum bicolor
  Intron number 9 from transcript Sb01g048450.2 (locus Sb01g 048450) derived from phytozome v7.0 (chr-ID chromosome_1; pos 71456646 to 71460288 reverse strand)
aactctacacggaatatcataagccaaagccagaggtgatgatgtctccacaaataaaaatttcaagtttgtattcttcattatattaagaaaagctatataatagactataaattagttttgattaaggatcaattgcaatgctctaatggcaggcatgtatttatgttgaaatctagatgatattgtatttgctttatggtcctcttatcatgtgaaatgtgaagttgatgccatcataactagtgttgataccttgatttgatagtaagtaacccaaaaatttttgtattgctagttcctatgaatatgttaaaacttatgaatttataggttttcaaatattatcttacatttttttcattttgacttgccttcacccattcagatttattttattattatttatttaccctacaaataaagttatattatttgttcaattatttaccttagataccctcacaaataaattaaatatttattttggatgcatatcattaccagagaacaaagatttcataaaaatgacatattctctgaaagtaatgcaaaacataatgacaatattttatttcatgaaggtggtactataattatgataaaaatgtatatttgtgaaggcgttcccataaaccatgaggaaaagtgacaattggatgacagttacctcaaactcttgccaaaacagttgtcctcatcacgagtataacatattgcacacatctccactcatttgctcaacggtttaaggagtagaaagcacacatgtgatctcaatggggtgcgctagagctggtgtgttgtggcgccaaatggaattggttgtgcaggacatctaggcaacggcgcaccatatctacaaggacctctcctcacttagccaacataaattgtttgtcgttttcttgactaacacaatttaagcccactaaccacaggagcccctagagtcaccatttgtgatagactagcacaaaatcgcgggaccaagttatgggagtgcacacaatatcgacacgtcgagaatcaacttacaaagaattcacatctaggataagcaattctattgatttcaatttaacacaattaaaggatcttggtcatgaacgtaatctttatattgtttatattgatactgtggtagcttatataatattatctatagcactatatcacaatattggttagtaacattatccatggtatattatcataagttacaatttattagtactgcatgtttggaccgacaatggtgctatttttattctggcttcatctctgagacaatgaaccaaattgcctaaatcaaattgttcattgtgtggttaactgtccacaattgttgttggactgctacctctcaatgtctagattagagagggctatagtaccttagaaaataccctttatgtggctcatctacaatacacgtgcgtacttgcgcaaaagaaaaaacacgtgcataattccccacccccaaagatgcatgcatatatggagacggccgagcatcatggcatgcggtatcctttgcgacttattggcatggaccggggctacgctcgtttcatcctaaaatttaaaaacttttaaaaattttctatcatattaaattttatggtacacccatgaaaaattaaatataaataaaaaataattaattgtacagtttttctgtaacttacgagatgaattttttgagtctagttagtacatagttggacaatagttaccaaatgcaaacaaaattgctacagtattaaaatacaaaaactttttgatctaaactagacctaagaccttgcttagatccaaaaagtttttggattttgataccgtagcattttcatttttatttgataaatattgtccaatcgtaactaggcttaaaagattcatttcgcgatttataggcaaccagtaccattactttttgtttttatctatatttaatattttatgcatgtgccgcaaagttctatatgatgagaaattttgaaaagtttttggtttttgggataaactaaacaagacctactccctctgtcccttttaattgtcgttgttggtgtgcatgccacaagtttgactcgatttgtaaaaaatacatgcaatatttgtatctccaaataaatttgttaaaaaactagattcaaatatctttctaatgatattaattatatatattacaaatattaatattttttaatatataattgttggtagttatttttcgagaagcgtaagcgataattaaaaaggacggagggagtaagttaggaagtgatgctcttgctgggctctgagcacgtgcacgtcaatcaagcagccctctccacgcccggctcggttcaggggttcagctcacgggcgtgcacctaatcggattcagatatttgaggtgacaaatggatcgcgaaccgatgtgtgctagtctccactttcggtgtacttgttcgtcgaagcgtaaacttatcgtaagtcaaaaaatttaaattttgattgaatttttagaaaaaaatattaaaatttatattactaaattaatactattagatttattatagaatatattttcataagatacttattttatgtcataaatattgatgctctttttttataaagtgagtcaaacttaaaaaagttaaacaagtttcaaggataaagaaagtaatgtaacaaaggtgtaatgtaacaaaccaaaaacaaaccgagtaataatttgactaagcaactaaccccaaccttggacctatcctaccgcaccgcgagacgacgacgatgcgtagcatcgacgaccgcaaacatttactgacgacggcgtgcacttgtttggtgtaccgctcctaaaaaatgcgcaacgagtacggaagcgacgacgacgcccagtcgctcacgttcgtacgttttacacgctgtagtagggcgtcctgaccgcgttgatgtcgatccccctgcgcctcgccgacgactccagttggcccctcagcgtgttcctctggcacagcctcgcgaactcggctcgccgcttggcctgctcggcgatctccgacagctccgccgcgtggttgccgccgccgccggcgccggcggcctcggcctcggtggtcgtagggaggccgtgcaggctgcgctgcgtcgtcgcccactgcgccttgcgctcctccccgccgtagttcttcttggtcgtgaaggccgtcttgttctgcaggaggttgttccaggccctgccgctcagcacgtagcggatggcgaacttgaacaggtccaggggcacgaaggtgacgaggctgtagagccagatgacgcccgcccatccccatccgattcctctgatgtgggcaaatccaaagttggccaacactgcaatcagagtggcaacctgtgcaaccacaaaaagcagcatgatcgatcagcaagaactttacattatggtataggcatgatcgagcagaattcacaagtgaaaggagataatggcttacgatctgcgcgatgacgaacgctgcgcacagccagaagccggggcgttcggtgaagcaccagctgcgcgaccgcgtcacgaagatgagggcctggctgatgatgctcacttgcaggtacagggcagacatcatctcctcggtgctgccgc

SEQ ID NO: 4854 - DNA, 1881 bp, Sorghum bicolor
  Intron number 34 from transcript Sb03g023490.1 (locus Sb03 g023490) derived from phytozome v7.0 (chr-ID chromosome_3; pos 46854904 to 46856784 reverse strand)
actatcgggcaaagagttctggcaaatcctctcaagtatgcaaatctatcttttatttcacattggtatatgttaagcttgagtatgaactgatagctagagttatctggactatttatcccatacctcttgttttccacagttccagagggccataaatagaacagatagctatagatacataatacacacacacacgcacacgcacacgccttctgaatgaagatttattcaaattgtatgtactccctcaataacaaattataagacgttttgacttttttagatacatagcttttgctatgcatttaggtatacactatgtcttgatacgtaataaaagcaatgtatctagagaagccaaaatgtcttataatttggaacggagggagcatgtgctaaaccatgttgatggggaaccgttatttgtatttctggttttgtatggggtatacctcaaggctgaagtatatgaatgtgtgcctttttttccttcagtgagaactcacatttagattctgataagaccttaatacgatttaaaagaggctcaagatagggtcctgttgttagtgataggatactatttctattccaaattggagatgggagtaaatagagatgaagtctttaagagttagagtccaaaatttggatcagataattcctctaataaacagtgtgggtttcaattagtataacacaattgtttgttcaaaattttagttcctactcattccaaatagcaatcttgtcttgaacacactgctcgcaaaaaaaaatcttgtcttgaacattagtctccataagcaagaacagttggcctatagtctactgcaggtccattctggggggcggagaggtgtatatactgccatactgctgtcagcatcgatgttgaagctgttatcttgctctttctgtctgttttttccttttaatttgatatcactctttcattctgttgattcggtgaatgagaaacaaaagaaaggaacaggataacatcgaactgttttggtgttccaatctactgaaactgcagagtggaaaaaattgcagaaaatagaagtattctacaatacttgccttatgtaacacgatgggattatttagctactatgtttacagaagcaataatggtaaatttaccagaattcttggagaatattcaaatgccccaaaaagccagctatagtagagtaattatgttagaattaaccgtataacttctcatttgttatgtcttggaccttttatggcggatctcagggcacagactccttttttctacatttttagagagagagagagagaattgatatatgacctatttgaagctgctacaggtatgcgagtgatgcataattactttcgcatcgtaggggtagctgctgatctcccttatggatggatggataaatgtttagatttctgtgttgaatatcaacaacttattacacagaatcctatttttttagttgaaggagttggttttattagtggagaagaagctgtaaattggggcttatcgggaccaatattatgagtttctgggattcgggctctagagagaacaagagaggattgtgtgtttgctgcagtgaagagaaactcgcttgaagatgatactacaaacataattaatataatttcaagattaaaatcgaaataccttgatttgatattttttatgactgattttaaatgactcatagccagagggcgttggattttgaatgagtgatttttgtatttttcatgtttgttcctgtgtgtacaaaatgcacattttcttcccatcatgctattgctctcttattgcgacaaggatgtgtttttgttgttcatggttgcttggaaacagggttcggttccatt

SEQ ID NO: 4855 - DNA, 512 bp, Sorghum bicolor
  Intron number 8 from transcript Sb02g028140.3 (locus Sb02g 028140) derived from phytozome v7.0 (chr-ID chromosome_2; pos 63359594 to 63360105)
tggattgcaggtaataattaggaaaattataactagcaataatcattatcttcttagaactgtcaatgtattatgtgtagttttggggtaaaatgattatttttgtgttcggaaattgagttgcattcattatatatcatatataggccctatagtgtctatatctgtgaccaaaatatagttggagtcattatacaactgtagcagctccaatatgcacatgaagcaaatctatattctgcatcatttaagttttccccactgaataagggattataatatttggttccctttcttcttgatgaggtaacttctggctcattagaatgggactagtgcctactaattgtataaaaaatattatgaaattaatcactatccatatttgaaattgcagtagtttgaaatatcaaggttggattcttatatttctgattttttctaatgatttcatttactcaatgttgatttgaacagggcccgactgtaagtcctgtctattgcagacgtga

SEQ ID NO: 4856 - DNA, 1837 bp, Sorghum bicolor
  Intron number 1 from transcript Sb07g016730.1 (locus Sb07g 016730) derived from phytozome v7.0 (chr-ID chromosome_7; pos 41418798 to 41420634 reverse strand)
agtggtgcggaggccggatctaagacctccccacggtggcgctcctccccctccacctccacaacaactctagcaacgacgtgggcctcccctggcggtgctccttctccttcccacggcgaccctcgaactctggcatcagctccctagcggcggatccagtgagcaaccgcagcggcagtaggtggacaagctcagtgggcccttggataggcttgtccatgggcttcaattttttattcgattaacagaggtgggcagggcaaccgtcttggttaaggccacgattaatcatgactttttgttcgaggcggctgcaaaaatcgtctcgattaatcgtttttgcccaccacagttaaaattttgtgtagtagtgttcataaatgagctggccgccactaaaaatagtatggtatttttggacactcggaggttgtttatccacctcagttaataaactagctaaactttttttgtagtagtgattcaaagtgatcatcgacttattctatgaccaatttgagtcactagtcttagtaatacaccccaagagttagcatactaagatcctaagaggatcgctctgggattgaattgtagcatagtgagggaaaagtagcccacaggctgtctctgaacccagctagtcctagtttcagtagattcaccaaaatataccccaaacttctccagtgaagaagaatgtcggagatttcctgaaaagaaacctgttggggaggcaaacctaggttttttttcaacagatcatgggttagttattctagggcaggcaagccacctagcaacaatcatcgtcggatgctggtagagtggcatatatcggatttgaaaaagatagagtttggaaattgtaaaataatagatttattgtatttttgatggatcggataccctcagtcggctatggccgtttttaaattttaggacgagggtgaacttatcctattgggggtggggttgccaaaactattgtaaattaaaatccatgcaaaatgcaaaattcaatttgattttgggctgacaagaacgtattttctggttttggaaaccgacctagctggtttccacgagtcaggatcttttcaatcctataattctctgatccagactatgcatctcaatcgtctcgatggaaaagtgtaactgtaatgtttagtttacagtttgttacagaactggccagccaggctgtttcttttcggaacagctacccaactttgagtgccaactgtgacaatctagctactttgcttgaatgatcaagaacatgttaatatagtaactaatacagcatgttgtgacaatctactttgctttatttctcaatccattgaattaaggctggtttggttcagcttttcgaaaatgattctgctgttctaaaaatcaaaacgccaactaaaagggtagaatttaaagctgtttgcttaacaatataatgccaaccaaaacggtggaaactaatataatgcagctttttagaagtagctgattccgtgtactactattttcttagcaccttggatccaaataattttggttttctgtgtttctaaatacatggaaatagagagatgctttacatctgtttcaacggagatagagagatggtgtaggtttcataattgtatcaaccaaacattccacagctctttcatagcacataactaataacattaggtttctcatatcttacaacatacattaatcttttttctggctcacggctgaacgactaaactcggccaatggaatggccaaatatatgtttaattacacaggtcaacgtctgcagggaagtgcagtactattgacg

SEQ ID NO: 4857 - DNA, 5740 bp, Sorghum bicolor
  Intron number 2 from transcript Sb03g002525.1 (locus Sb03g 002525) derived from phytozome v7.0 (chr-ID chromosome_3; pos 2407282 to 2413021)
agccgcggccgcctctacgagtacgccaacaacaggtctgcgaactgccatcgatctctttaacttctcaacctcagcgcacatacatacatatgcatatttgtttgttttattaaaaaaatctcttaaaagctgtgcatatgcatatgtttatatatgtatatcttggatcatcctacacactatgcgtcagttgttgttttgcactgtccaaattggagcaagttggctcccatctttctcgaggcaaaaccgtggggagggtcaaatgggagctgcatcttttgttgtgagtgacttcattccgttatatcaactgcatgttgtcttgtttactttggtgttcctgagaagagaagaggcatgcaacaaggggaaagaaattgccacagttcctttctgcgtattatttccattcccctgtgctcgctcctgtgagaggcaaggtgaggtgagctagatgtttgcatagatctagtacagagcttgctgtatgtgtagtatgtcctcagccggcctttcgatcttgtgagttgtgagcaggggcgagagagagctgagcttctttggccatggtggtcctgctctcttttcttgctgtatttatgccctttcctttctcactgtgctagctcagctccctggcttcctcatgtgtgtgacacagctgtagacacacacacacacacacacagagagagagagagagagagagagagagagagagagagaagggagctgatgtatgcaggctttagatctcacacaccccatgatatgaaatactcctatatgtatatcaagcatgtttgtacacaaaaaatataaggcatctatccatccatctatcttccggggttcccttttggtctttgcttgtgtagaagcagatctagctagcttctgcaagagacatggtagttcttttgggtttgatagctccttcttgttgtaccagttggtgtggtacaagagtatgtgtccatgaaagcttgtatatatgagtgtgaggtaacaaggaagagagatagataaaaaggaactgccatgccaactcttcagtttttcttgcatcatctccatctgttcccagccaagggctttcatcccatgtgctacctctctcacacagacagtctctctcatactcatagtactctctctcatcatcgcacatcacatcaccaattcaccatgtgtgtgttcacgggagttgttgatcggacctgagtggcaccaaagactctacttttcaagagggagtcaaacacaaccattatgcagtaaagtcgttgggtatatttttgtgtgtgaattttggcatttggtctacacagggaaagagtatattagcctttttctgtactgggtttctcccaaaacagattttttttttgctacgctgagaactaagttcaccacaaataaggagttgttattatattgtttaagaaaatcaaaacacacaattagtatgataatgcaaataaaccagctagctgatcatttacgcagagcttctcatgactgtaattgtatgtccggaaatcaagcactattattttcttcaaaaaaaatcaagagcgaagaataatatttgagagtaataaataaagaacaataccacatgggatgcgaacaaggacatctgaacgtaacatactcctatgacgacttcagctgtttcacaaaaaaaaaagggttttagtgaatagtaatggatttgcttttttgtaaccaccaaccagtggaggtagccatgtatattactccctcctttttaagttataaactcattttgttttttccaaatacataacttttgtaagtatctaaatatacatttgtctagatacgctcagtaaatctatatattgagaaaagttaaaacgacttataatttggaatttagaattgagggagcatataacatgcatgtgaagtagaagtgaaattaaattttctttttcttctggaagtccaaaaaaagtagtcttatttggcccaagcaatcaacgctttattactaaacagtacttgaataatactgatacacatgtactaattacaaagtagtactagtattactgtaatgtttctttcttccatccaatattcttttggggatcagttatctcccagtataatatctgcagcaggaataagcaaaacagctgctgcagcctgatgctgctcttttttttcagagtgctaagccacactaatttgtggtatgagtgacacgtggccatgcatatactgtatcatccctcacacaataggatgaagcaggagcatgcaaacaaaaaaacctgatgaaaacccttttccgtttgctcatgcctgtctgcgtgtgtgactggtgcctgtgtggcctgtgcgaacagactgctgggaagccaacgcccaatggcacggccgcatgggcagaaggagcactggtgactggcctgcctgccactaccgtgcactgcacacagaggagtaaagaaaggtggtcgttcggtcagagtggtaaaagccaaggggcatggagtgctctggtgtgcactgtgcagtgtgtgctccatcctgccttgctgcatccactcctttgcccgttgggtaaacatgcatgctcactactgttcctacccaatcatgtgaaatcctgtgccagctgcatgaaccacagtggccacccaacagcgtactcgaggatgctaaggtttcatctctttggtaatgaggagggactggaggggagagtctcagagctacttagcttgtgatgtgacatcctgattaatttgctcatgcagctcttggcttgcttaagcattactgttgattgtttatatattggttattttatgcacgattttgtatgttattctgtgtagacatataaaagcaattcaacgaagtggtgaaaggttccataaaaatgatgcggtgaaaggagatgagcaaagagagcaatttgcagtaaccataataaacaaattaaaagatcttgaataataggacggccgtttgagattaaacaaattaaaagtttgttatgcaatgataggtgcctagctgctggctagcaccatcaatctcttctgtagttctgtatagtcctatttctatgttgggaaaccgattttttcccctctcttttctcttaattttatctctggtgaagtgttccttataaacctgatgcgtgtaaacatgctagcaacctgctcttcttcatctttattttattatctatatgaccataatcaatttaattatgcatgcagacatcaataatagtgtacagctcttttcatctgacactagctaaaagcagtggaataaatcttcattaagaaaatagcaatggaattaacaaatctgtatcctaagaattttcctgaaaaggtgttggagttcaattcctaaagaaatgtgtatcctagtctgcacaccactttgcttcaagttctcttcaatttgttaaatctggctcattctttttactttaaaataaaatatgcttactcctgtgttctctgattttatattctcggtgcatgaaaaaaagggagcccagtttcctatgcttatataatatttgctgttgtgttaatatcacacacaaaaaaaaactggcctggttctgttgaagaaaacaggaacacttatagcaaattatttttatttatgaaacttatatgtgaagaaagtaaactaaaacttggtttcacctcacatggttgggatgctaaattcagaaaaaaggtatatgaagtagtaaatagtaacaaacaatataaaattaagatatctgaagtatagtaacagagaataatataagttaacacatataaagcatgcatgtcattcttttttgttttgctgaatatttttcagtttagagaagataatagtaaatttgaattagttacacccgttcgcctcattacttttaccaaaacaaaaaaacttatgcatgctccaattgggtgaaaggatgtaaattgtgatgcaacatgcatgaggccagggatctgaatgcatattctaaaacagcaaataaataaacatgtggaagtaacggtgttaatctagctcttcatttatgtttacaacacaagcattttagcatattccctacgtccgtaaatatttgttgttttcgctttccaagaaataactttgagtaaatatatattacaaaatattaatatttatggcacataattagtatcattggatagatatttgaatctaggtttttaataaatttatttaaatacacaaatattgcatatattttctataaatcgagtcaaacttatcggcatgcaaactatgacaacacacatttaaggacaatgggagtacatgtctagttttttgcactgtcttttacttttctgcatgtatggatttctgttgtcattttttgccctttattaacagcagaaccatgtgggagtgggaaattttcacataaatattggttgtagttgtatcgatgtgctattcctttgtgctttttccctaatgatgaaaggaaatatagctcgttagttaaggccttgtttagttcaccacgaaaactaaaaaattttcaagattctccgtcacatcgaatctttcaacacatgcatgaaacattaaatatagacgaaaataaaaactaattgcacagtttacctgtaaatcgtgagacgaatcttttgatcctagttagttcataattggacaatatttgccacaaacaaacgaaagtgctacagtaccgaaatccgaaaacttttcagaactaaacatggcctaattcatgctgtcagtacacatgaaccaacattaactgcggccatttctatgcattattgactgaaggtatcaatacctatttgtctggacatcatatcgtatatatacaacgacagtacacatggtccatagccccatactcatactgctaccagagagaagctctgaagtctatcgtttggacatgcaccggcacaagatttctggtaaggccctgtttagattggagatgaaaatttttgggcgccacatcggatgtgtcggaaagatgttgggaggggtttttagaaactaataaaaaataaattacatagctcgtttggaaactgcaagacaaatctattaagcataattaatctgtcattagcatatgtaggttactgtagcacttaagactaatcatggactaactaaacttaaaaaattggtcttgtgattttcaaccaaactgtgtaattagtttttttttatctacatttaatgttctatgcatgtgttaaagatttgatgggatggatgaaaattttttgggtgagaaactacggggccagaaaacactgttgctgacagtgctagcacaggcttcggaccaataatgtattcttgaagtcatacagaacctgcagattgcatgcattattaagccctactgttgcagatcccttcaattaatgtgaagagaaattgaacgaactgtatacatatcatatcatagcatccatcgattgcataagaccggctaggaatagaacgtgattctgaatcatcttcagagcgttatattgttctgaaacagcttgcagtccatgtgcacacctatacatgtgattatgcctagtgattgctttaatcttcgttagcaagcgtgtgtgctgactccgactgtggtcatcattatattgcagtgtgaagtccaccattgagaggtacaagaaggcca

SEQ ID NO: 4858 - DNA, 1131 bp, Sorghum bicolor
  Intron number 1 from transcript Sb06g030800.1 (locus Sb06g 030800) derived from phytozome v7.0 (chr-ID chromosome_6; pos 59249679 to 59250809 reverse strand)
cgccgtcgcggaggtcaaggaccagggcagctgcggtaagctttcataccaatctcctccctgccttttttttattgctctcctgcggttgaaagctgacctgcttaataattctagatagaacatgggtaagttgttcgggcatgttttctatatgtttcgcccgaaaaaactgtaaagtctgttcatccgcaacttgcagtaggtagtttttattgttatccacatgaggaaaaaaaagggagtaggggatttgtgtcttctacggttctacctgaaggtcaacgctaagcggcaagcttctgcttctgcaattcgttagtcgtgccttataatgggtgggaggttgcagagatggcacgcatatagattagtacgcttttgaattcgaagtccatagatagacacgctaacaattacttcaaataaaattattctgtttggttacagctttgtttcggttctagagctaattttatgggatttgtttaacttggtcccgtgtcttgttttatgtgacaaatattactgcaatgattttcgatacagtaggtgtaaaaattattcgtgtatttgatctgtattgtcttgcatgaaaggcgacatatactatgttaagtaggttcatcgaacatggacatcaccttgctccttgtgaactccagtgaggcagtgaccctgctggaaggtgcaaccaagaaaaaatattactccacactaatagcagtcgctgtctagctgacaaggtggctggaccaatatgctccttttctcctctggacaagctcacttcatgattccagatattagccttggaaacgactttcatcacggctcttgtggccgtttcacgttcctattggtcgcctgtctccctcggcatcctattcatcaccacaaatttcttctcttaaataaaaatatgctacgcccataagatattttccactctattgtgggtagctttcactcttttgattttataactctgtgttgttacttggctggctgccttttttaaattgacgtgcaggattaaacaataatgctgatgacatattgacattgaaatctaatctatgtttatctcttccagggagttgctgggctttctcaacaatagcagctgtg

SEQ ID NO: 4859 - DNA, 8840 bp, Sorghum bicolor
  Intron number 2 from transcript Sb04g027860.1 (locus Sb04g 027860) derived from phytozome v7.0 (chr-ID chromosome_4; pos 57741955 to 57750794)
ctgggctgcaatacgcttccgtgcgtcaaatcctggtgagtatttgctaaatttggcaacaatgatggaacaacaatatatatatatatatatatatatatatatatatatatatatatatatatatatatatatatatatatatatgatttttttaatcttacattgcgttgtctatttgtctgttaggtgtgtggtatatgcattgccacttcgatcgtcacacggcgtggggcatggacactgtattcatcgtgaaaaatggcaagaccccaggcgctcaaatgatgccacgtcctcctaacatgcctatgtgctaaggaaacaaaggcatgagccatggatgactgcgttgcatgcaaaacagtcgagcaaaaataattaatctcagttgattggttgatttaattatttgccgtacatattttaagtagactgtttcttctgatcagttgagatgaagagagaaaattatatttattgtattcattatttgtgttggtttactcctggtgcaatctttaaaaagtgtaattaaacaatgtaagttacggggagctatatatatatttttatcccgtgaagattcaatataaatacgtgcttcatatatgtattcatttattttcgccatgataagaccatgaccatcacaactttgtcattgtgattggggctcctttttttttacccttagctaggtcccgtttggatccttacaaatgaaatctattccaaaatcgaagtctaggcacaaatccagcaggttggtgtgtccatctgaggatgtatttttgtgctgctgcaagtaagtttgaggttggagagagagagagagcacatacaaaagtagggggtatgggctcctgttgcattatttgtctttgtcgtaccttggcatggatagagcagtgacgaaccgacgagcctactagggcatcgtatattcttgacggcttcgatctgcaggtacgtggtacgtcttccgagggaaaaaaaacaaggaaactgcataacgatattcttccacatgacaaagacgacgaaattgcaatgagcatgttgaaatttttctgtgaggaacacgaaccgacagattaattacattttctccgtgagactttcgaggaatgaagactatcttgacttggatataatgtaacatttttcctgtgttccacactcacgtagctttggttcgatggtggctacaatcacacattgctgaacaccaatcgataccccaccaacaagacaatcatcggtgcatggagcggcggcgggcacgaggcagcggccggcgcgtgcgtgagtcgatcgagccgagcgtgcgtgctgtggatcgagcgtgcgctgtgatgttggggtcgagtgcttgcgtgagttttgggggtggcggccaacaggttaggggctagggctagcactttttttaatgtattttctttcagtttttttgataacatatcttctttcattgagatgcgcgaacaccaaaatgacagcggcgaaggccagggcaacaatgccaaattgaatttctatgtgcgtatataaatttccttatgtgtaagttatgaacacacggaacaattactcattttctctgggcgttttagcaaaccgacagagtaattacaattaccatgtgtgtatcatcatcacacacagaaaatcctcccatttttctatgcgtttatgcacttttttgtcgatatttttggtaccgacaagttaattgatcttttctttctctcatttcgtttgtctataccaaacaaccaaatgtgaaagggacacaaaagctagctagattggcatctaagggcctgtttagattgggaacgaaaagtttttgggtgtcacatcgaatgtgtcggaaggatgtcgggaggggtttttagaaactaataaaaaaacaaattacatagctcgtcaggaaactgcaagacaaatttattaagcataattaatctgtcattagcatatgtgggttactgtagcacttaagactaatcatggagtaactaggcttaaaagattcgtctcgcgattcttaactaaactgtgtaattagtttatttttttatctacatttaatgttccatgcatgtgtctaaagattcgatgggatggatgaaaaaattttggatagggaactaaacagggcctaaaaatccaatacaggccggggttcacttttacaaaggagatgactggactggtaataccaccagtggcggagtcagaaaaaaaataggtgtggcgaaatttgtaaaagaaccaacgtactagcttgtataacgtattgacatatgtatttcatatgtgtatttacttgtatataatacatatattaagtattttttataaactttaggtatggcggtggccaaagcttgccaaataccggcctccgccactgaataccactataataacacaaaagcaagttgtgatacaaagacgtatatgacactttcttatatatctaaacctactaaggatgagtttgacaaaactacacattgaagaaaattagaggcacgtgagcattgtctcatgaggcacgacggttgcttgttaattagatgtggaacatcttcacatgcggcttttacatcaaagaactattccttggtaagttggagatatcgctaggatctaactaactcaaaaaccttaagatatccaagtgatatctccatttccctaacaaaccaaggataagttacaataccaagtacacaagatcaagtacacattatctaacactctctctcaatctgtccttacaaggtttagatcgttcctgaacatttgaagtgatggtatgctaagatgtttggtgaagccatccgcgacttgatatttggatgagatatacttaatgtcaagcagtttccttgcaactcgtttgtgaacaaaatgaaaatcaacttttatgcgctttttttttgacaattaacttttatgcgcttagtgagggtatgaaagattgtattagaataaagatacttagtcaaaaatagggttttcttatttttttttctccaagtgatgcatcttcgtgctcatgaggaacctggtcaagctattttgctagagatgtttttcaggggtcttagcacgcatctatccactcaagctaactccaaacacatagaatcacaagatccaacaaagcggtcaagagaggggaaaagagctgagaaaaaccaaatcagaccaaaactcgaagtcgatcttgacacagacatgatttctttattgccaagattaaaaaggtctattcttacacatagacaatggtttcattcactcatttgtgagatctctcatcactcagtacagatctcaagctacaaaatagtaaactaagagacacaaatgaaagtaatggaagagatgggctgattttggatgctaaacaactcaagtgggcttagccgactcctgatttgaccaagtttctcaaatgcacaaacggacttcaccgttgcattccccttgtcgagctgataaaaaaatatatcatatatggttcgtctgatttggagtctggatgaattaattatgaatttcagaagattttcacctagaatttcctgtgccaaaatacagtgtcctaggcctgtggaagttggctaagccgacctggaagtccgctaagccaactttctccaaaccgattttattccaaatcatgttttggtataattagacgtgataaattcaaagattaagtcttggagatgtttgttactgggataagatcaccccctctatatatacgaaaggatcatggtcaattgagtttccaactatctaattgatacaaatcaatctacaaactcccttctctctctctctaacctccatattattcatctcttgatccacgaccaaggatagtgccctaggcttgccagttgcctaacccggtgatatccttgccctaacgaggtcactcccgaacaagagctttgacggtttctttgctagtttacctaaaaactagccagttcttcatcacgtaagcacattagttatcttttggtggtttgcttgtaaaccttcggtctgtggtggtccgggcatccaatgtccttgttggtgtgtgatttggaccatatccaacatcaacaacatcgcattgccagtcgttattgggttattaattggcctggtgcccatggtttcatgcatacgtggtcgcttttgtaatccatagagtcgtctatgcgcatgaatttccctaattattaaaatcaaagtgacacatataatttagtactcttttattataaataaatcaattcttagaatttgtgttaattaaactattttaaattatactaactttatagaaaaaataataacatttatgacattgaacaccttaaatatattctatgctaaattcaataatactaatttgatatcataaattttaatattttattttaaatatttagttaaagtttaaaatgtttgatttaagtctagaaatctatttattcgggacggaggaagtagtactttaaaaaaaagtcaagatcgatacctggaaattgatctgctttaggctcgcgtcacgcggagttcaaactcacgccggccggtggatcagatcaggaagtcgcaagaggacaatcttgctgttggtgtcacagtgtcgcagacgtgcccgccgtgcatacacgcccgatcggaccacatcacacgtcgcaaagagaacatctctttttgaaagacgcaagtgaacatttctggctgttagttggtgtcacatagctagtgtctcaggcgtgtactaaccgtgcatacaagcgtatagccagctaggcacgtacgcacgtacgtacagtgacatgcatgcatgtattggagtattgtttacgtacatacgtgcaactcgccgaaaaaatatccagcacgatctggtcgttgaagacttgaagtatagcaggatagcatgcatgctctgacagtttgatgcatgtctgatacatgccctccgttgataaaaaaaaaataaactatagcgtccgtttgtttgcttcgcgtcaggcgaatgcgtcaagttttgaaaccgtaaatttgaaatttcgaactttagtccttcacacatagccacacggctgtacctgtaacacatgtgccacatactgtggctgcatctgatcttgaagaaaaagagctactccgatccctttgtccgtaaatattggttaccacattttacgtgccaacaaatttaattcaaattatagaaatatatgcaatatttttatttttaaataaatttattaaaaaaataaatttaaatatctatctaataatactaattttgtattataaatattaatatttttttaatatatattcaattaaaattatttctcaagaaacgaaaataacaaatatttagaaacggagaaactacacagaataacttgggaccgaagaaacaagaccggatcagctacacaaagtgacgagggcttcctgcgagtagcacccacttgcaaatactccgtaataagtcaatctcatgggacagaaattttggttgcacatataacgcgtattatagtatacctattcagaaaaagttaatctcatgggacagaaattttggttgcacatatagcttaatttaacgcgtattatataaatacctatattcttcttcatgatgattgcatagtcacatagtttcaccgacacgttcagatattgctttgctagtcaaattgatcacctcaaaaccttcaacattaggtgtgcgtgtgccaaataataaaaaattagctagccctaactactggtctgctacagcatccaaaaggaccattcgctagctgtaagccagcatctctcgatcggaatgctgccgttcgttgaaaaaacttgcatgcatgcggcgcccactgggttccttgacgaccttttgactcgttccagccttagcttccagttgacagcatgcatgctggcttaataagtttagcaacccaaatgtcgccgccgacgtgccagttcccggtgaagattcaattcaagcctagctagctagctcggacatcgtcgtcgccgtcgccacacacacacgctcgcgccaccgcggcgaggcagctgtggagctagctaggttatatgccacgccaataaactcacgctaacggaggagaggggcgtttcagatcagggtacgcggcttctgggcggaaaaaaaacgctagagcgtggatgagttgctaagctagccaagtccaaagacaaatcattcgaagttatcgaccggaccgagccggggcagttgttgtttaggcactgactggtggaggcatgacgaacgggagcatgcatgcatcccttgctcgtcgttgcatattggcagctctcgctctatataaatacctgccgcgtccgctccagattaacatcccaccagcaacgttaacacacggcgagatcacattgcagaagctagctagcctttgcgttctcgcttgctctcgctgctaagaacacgttgttgtgttccagtttgctcaaactaaacagagcgcagcacacatcgatcatcaccatacacaaagagctgatcgagctctagctctgctgcttgccccaagggcaacgtctggcgacgggcggtgcagataagatgccggcagcaggccggctgatcagctggttactgctaggcgtggttttagcctttggagttgcagctagcccggcccaggcctccaggaagactcactacgacttcgttgtaagttgatccatacatctcatttcagcttatattaccagtttaatttcagaggtgcaggcagttgttgtttgatgagtacgtagtatttgcgggcgcttacaatgcaaatcaacagctgtacatgtatgttctagttttgaaatatctgtagctagtaggttgatgtgacatgcatatgtatttgcatgccttctagctactccagtatgagttgttaattagatactctgcatgaccatgatgatggaagtaactagacctagctagctgtattccgagttttcgacaggcacagattgacttcttacttgcttatctagaaacacaaattatataatcttgctaagtatagaaattacggaagccacaatttttccatttccgtgaatgtgaactgctgaacggcgtatgatactgatacatatatatatatattgcagatcaaggagatgaaggtcacccggctctgccacgagaagaccatcctggccgtgaacgggcagttccccgggccgaccatctacgcgcgcaaggacgacgtggtcatcgtgaacgtgtacaaccggggcaacaagaacatcaccctccactggcacggcgtggaccagccgcggaacccgtggtccgacggaccagagtacatcacgcagtgccctatccagcccggcgccaacttcacctacaagatcatcttcaccgaggaggaaggcacgctatggtggcacgcgcacagtgagttcgaccgtgccaccgtgcacggcgccatcgtcatccaccccaagcgtggctccgtctacccctactccaagccgcacaaggaggtgcccatcatcctcggcgagtggtggaatgcagatgtggagcaattgtatgaggcgacagagcagggcggcgacgccagtatttcggatgccaacaccatcaatggtcagcccggcgacttcgccccgtgctccaaggaggacaccttcaagatgttcgtggagcatggaaagacatacctactccgggtcatcaacgcggggctcactaacgagatgttcttcggcgtcgccgggcaccgcctcacggtggtcggcaccgacggccgctacctcaggccgttcaccgtcgaccacatcatgatcgcccccggccagaccatgaacatgctcctcgaggccaaccgccccatggacggctcagccaacagccgttactacatggccgcgcgggcgttcgctaccaacgctgcagttaacttcaccaagaccaacaccacggccattctagagtacacagatgcgcagcccttcacggagccaccggactccccgaacctaccgaccttcggtgacatcacggcggcgacggcatacacagctcagctccggtccctggtcaccaaggagcacccgatcgatgtgccaatggaggttgacgagcatatgctcgtgacgatcgctgtcaacacactcccctgcgaggccaacaagacgtgcaccggcctccgcctcgcggcaagcttgaacaacgtcagcttcacgcacccgactactgacatcctcgatgcctactaccgcaactccatcagtggtgtgtacgagccagacttccctaacaagccgcccttcttcttcaacttcactgctcccaacccaccacaggagctttggctcacgaagcgggccacaaaggtgaagatggtggagtatggcaccgtggtagaggttgtgttccaggacacggccatcctcggcgccgagagtcatcccatgcatttgcatggcttcagcttctatgtggtaggtagaggcttcggtaacttcgacaaggacaaggacccatccacgtacaacctggtcgatccgccgtaccagaacaccgtctccgtgcccacaggcggttgggctgcaatacgcttccgtgcggcaaatcctggtgagtactttatttgctaaattaaatttggataacaatgaactactcctacattgtatgttgttatatggattttttcccttatatatgttgtgttatttttctttcttgtttattaggtgtgtggttt

SEQ ID NO: 4860 - DNA, 20092 bp, Sorghum bicolor
  Intron number 9 from transcript Sb08g004470.1 (locus Sb08g 004470) derived from phytozome v7.0 (chr-ID chromosome_8; pos 5350940 to 5371031 reverse strand)
caactattcaattggtaatccctaactccatactccttgagctctcttatggtgttagaattagggtttctcattagttgggctaaccctaaccagggtgccatataattagggatacatgggcctcatgggcctagccacatgggcctgttacacacatactccaacacccccccgcagtctgaactaccggcgcagcggagttgcagactggactcgaaaagaatcacacacacgagcccccccacagacacaactagccactggtgatgttgaggctggagcgaaactcggcgaaggtcgaggacgggaggcccttggtgaagatgtcggcgaactgggaggtggtcgggacatggaggacccgaacatcgccgacagcgacccggtcccgaacgaagtgtagatcgatctccacatgcttggtcctctggtgctgcacagggttggtggagaggtacaccgcactgacgttgtcgcagtagaccagtgcgctccgggagagaaggctgtggagctcggcgaggagctgccggagccaggaagcctcagccacgccgttggcgacagcgcggtactccgcctcggcactggagcgggagacgaccggctggcgcttggacgaccaagacaccaggttgccccctaggaagacggcgtagccggaggtggagcggcgggtgtccggacacccggcccagtcggcgtcagtgtagacgacgagctcggtggaggacgaccgtcggtggaggaggagaccgaagtcgacggagccgcggaggtagcgaaggatccgcttgagagcggtgaggtgtggctcccggggatcatgcatatgaagacagatctgctgaactgcataggtgatatccggccgggtgaaggtgaggtactgaagtgccccggcaagactccgatatgcagtgggatctgtcactggggtaccctcagcctccgatagcttgccctgtgtgtcaaccggagtggagcagggcttgcagtcagtcatcccagctctctccaggatgtcaagagtgtactgccgctggtgaaggagtaatccagcagggtgaggctcaacagtgaccccgaggaagtggtggagccgacccagatccttcatagcgaactcctgctgaagtgatgcaatgatccgtcgaaggagggactcactggaggctgtaaggacaatgtcatcaacatagagtaacagatatgcagtctcagccccatagtgatagatgaacaaagaggtgtctgacttggcctccacaaaccccagagtcagcagaaaagcagcaaatcgatggttccacgcccggggggcctgcttgaggccgtagagagacttcttgagccgacacaccatgtctggacaagaagagtcaacaaaccccgccggctgactgcagtagactgtctcagtaagaacgccatgcaggaaagcattcttgacgtccagctgatgcacgggccacccgcgcgtgagagccagcgagagcaccgtgcggacggtggccggcttcaccaccgggctgaaagtctcgtcgtagtcgacaccgggccgctgagtgaagccccggagaacccagcgagccttgtaccgctcaagggtgccgtcagcccgacgcttgtgggttcagatccacttgccggtgacgatgttggagcccggcggtcgtggcactagatcccatgtctggttggcgaggagtgccgcgtactcctcttccatcgcgcggcgccagtgagggtccagcaaggcctcacggacggaagagggtaccggtgagacctgcgagtccccaggcatcgccgcaagagcccggggctgcagggtcccagccgcgtgtcgcgtcaccatcgggtgaacatgacgcgggtgtcggtgaaggagcggtgggtggtacaccggcgtcacggcccgagtagctgggtgctgcggcggtggggtcggtgtcgccggtggggtcggtgtcgccggtggggaagacgtcgccgatggcgcaggggaccctggcgaagagggggccaccagcaccgccggaggcagcggcgccagccgggcacgccgctggtagacgcgcaccggctgggcgaaacgtgccggtggggccggtgtcgaaggtaccgaccccacgtcgggagcacgtcgctggtagacacgcaccggctgggcgaagcgtaccggtggggccggtgtcgaaggtgccgacccgggacccgcgtcaggcgcaggggccgggccggaaggtgacacctcgggacccgggcagggtagaggccccgaggtgtcacggacgacaggcgacgtagcagtacctgcaggaaacaccggaaaaggtggctcgaccaccgggtcagtaggaaacacagaggagaggtcatgctccgaggtggaagtagaagtggtagtggtggaaaaggggaagatcgactcgtcgaacaccacatggcgagatatgaggactcgacgagaggtaaggtcgtagcatcggtaccccttgtgatccggggagtacccaaggaagacacagagagtcgaacggggtgccagcttgtgaggagcggtggcggtggtgttggggtaacacgcacacccaaagactcgaaggtgatcatagcgaggaggggtaccaaagagagcgtggtggggtgtgggagctggacaagcagcggaaggaaggcggttaaggaggtaagtggaggtgtgcaagctctcggcccagaagcgagcaggaagagaggcctggagcaggagagtgcgcacggtgtcgttggtggtgcgaatcatgcgctcagccttgccgttttgagaggaggtatacgggcaagacatgcgcaactggacaccgtgagagagaaagaaggcgcgggaggtggagttgtcgaactcccgaccattgtcacactggacagccttgatagtgaggccgaactgtgtggacacccaagcgaaaaagtggacaagcgcggggaaagcatcagactttgcacgtaaaggaaaagtccaggaataatgagaataatcatccaccaccacaagatagtacttgtatccagaaatactgatgacaggagaggtccataagtcacaatgtacaagatcaaaaatgcgggccgcatgagaagaagaactagaaaaaggaagacgaacatgacggcccagttggcacgcatgacacaaatgctcatcgtgagcccgagtacatcgaatattggaactacgactaagctgcatcaaagcatcacgtccaggatggccgagacgccggtgccaagtactggaggtagtggtggcgaaggcagctgacaaaactggcgaaggaggcgaggcagaagccggaaagcgaagagtgtaaaggggccccgtgctgtcacatcggagcagaggacgccgggaagccaaatccttcacagtaagaccagaagagtcaaactccacagaacaagagttgtcagctgtaaaacgacgaatagaaagaagattgtgaaccatagaaggagcaacaagaacatcagaaagacgaaaggaactgtggcagaacctcctaagtgtttgggcccaccgacacctgccattgtcctaaggacctctgacggtgatgccgggagtcctcccactttagaagtccgatgagcattgctggacgctcattccactgctacctgtggcgtaccaagctggctcgtcctgaccactggtaatggtcaaacaacgagaactgtttcttctcgcccttacaggatagcaagtggccaccttaacaccaggatcattcgttgcgaagataaagcagtaacttaacgacacaagaccaaaataatatttcagagtgaaacagcggaagtattacataacttaatttacaaaaagagttcttccaaatagtagagtgttattacaagcctggtccagcggagcaactgaaactttagtacagacagaacaaatttacagaccctgcccatgggtcacgctcactcttcttcgtcgtcaacctcgacgacggtcacacaacagggtccgaaacaagtcggctcctgtgcttcacctgcaacaggggtattgaaaccctgagtacgggagtactcaacaagacttatccgacgggaaaagaggagaatttagggatgcaggcttagggtagacaaggggtggccgagcaaggagccaaagtgttttgcgtaaaagcttactagtagtgcatccttattttcaagttttaccccgatttcctccctcacagaggcagaggaattcgaggatagtctatctgtttgttccccacagacgaatccgtgagttcctagtcctatcattaagtattatttattgattgatggccatagcttcatgtcgctatgagtccgggaattgggatccgaacctcatgagacattttcccctttctcattatatcacttagttgcatatttagctacgatgagggtcgaaggaattgagtctcccaatcggggagcaacgacgattcgaatcgcttagcaatccagctggagttcctaaccacccgacatatgtagaaccaaatcttgcatatgtcaacccaaatcaagctctccccaaatttgaccaggttcgcggcacccgagagcacagtactccaccatcctacagccgatctagatgttttccggtcatctcagatccgtaaggtgggtacacactactctcgccatctttccactcccagtgcgcgagtagctgttcgcgtcgagggatcacaagactgggcttaccgtaggtaagtggctagtactataaattctcaacccagcaggccatcaacggaacggtccttaatcaacacagtcggagacactactttaagactccattcttagagcaagtccaccgaccggtctcaaattgaaacatcattgatcataagtgtatcccacaacaacccttcaaactttcttgtttgaaaacctgtctagtagcagggctaagcatcgctacgcagttttaaaataaaacaggtgtcaaggacaggatacagatatcaaggtagtaaatgcagcaagtaggttaacccaattctcaactacctaatgcagcattttcaattcataagtgataaaagatttaaaacatccaaggaggggttaatgcatccggggcttgccttggttgcagggcagagagggaccctcggagacttcccaagtctcggatccgacttcctcgaacggagcaccgacctcgaggttcggttcaacgggcgctccttcggtcacggacgctatacgcaagatgatgaatgcttatgatatgcgtatggcaattatgcaagatggaccgaattaagtacgatttgcctttttaatgcaatacggaacaatcaataagtaaagttgcttaataacttaatgtttttacccaagaggttgcaatctgtaaactaagactttacttaattcataattatcttaaattaagtaattattaaacctatttaccttaattaattcttaattaattactaatgacagcaattaagcattaaggctaaataataattaattgccagaggtcattagggttaatgacctcaggtcatcacacaattccaaaatcattcaaccttaatcatgagaacttaattaattattgattaatggttttggaattattatttaagtattaaataagggtttattagtattctaatctaacaatacccaaatgccaccaaattttgtgtggagccagggaataataattagaggctccccacaatttttggtgatttttgaacatacaaataaattattaaaaatcatacaagttttatttgctaattaaaagggctaatttttgtatccttgcaaactattagaaatcagaacctagtatttttcttggatcctacatattttaaagagtttatacaaaaattttcatcatttttggattaatacaaaatttataacataaattcaaacatcaagcaattttaatcaaaaaggaaaaagaaaaaaaaacacagcgcagcgggctgcctggaaactgggccgcaggccggcccacacgcgcgcggcccgcacccgcgctgtgcgcgttcgcgccctcgcctcccctcaggacgtcgctgacagcgggccctcgctgtcagctccgtcttccacctccggccggccgaatcaatgccgcgaccgagccatccgtgcctcctctgcttcccgtaacctgctggtcgcgttctccattcctaggcgcacctctggatacccttctcaccccctttcttctcccctaacccccgcgaccacggacacggcggacggccacctcggccgggcaaacaccggccactacacttgagtagagcgcgaagagagtagcgcaaaagcgacagaggctcaccacgacttcaaccgagcaacaaacagccgcggagaggctttgagcgatgctggccacggtgggatgcttgcggcggcgctttggccggagctggagaagagcggctcgggaaagggctctggtgggttagcgcttgcgcttgggggcgcaaccggtggcggagctcaaggcggagtcgctggggtgctcaaatcgcgtggaaaggcaacgaggaggacgaattttggcggcggatggtggtggtcggcggtgaggttcaaaggaggaaaaagaagcactccggccgtccgaggctttatccaggcggcggaacaggggatgtggatgaggccgtccgcgcgaagcacagcagcaagcagctgcgtggccagctgcgtggcgtcgcgcgcggaggcggcgcctgcccgccttgcaaccggggtggacgagctcgtgatcccctggatcactgtagctctcccttatctcctctcttttgtccccttgcgaaaatcagccaaaatttgaactaaagtccaaattccaccaaaacaaaaattgtgccaaattttataagctacaaaacatatttaagagtccagaaccgattttgagtgtaacagggtgaatttggccaaacagtttgaaaatcaaactcaaatcaaagaaattctaaaattttgaattggggcaaaacagaatttccaaaattacttttgattttgtataacaacttgaaaaactcccaacatgaaagttgctcaactttttgtgctctacaactttcatgttgaccacttttcaaaattccaaatgtattttgaattggggttttaagttggaaaaggggacactttctggaaatctgtattttcaaaattactttaaattttgtattgaaacttcaaaaactcaaaacaccaaagttgtacatcttgccaagagctacaactttgcttttgaactcaacctcaaattttgcttagtttttaaattatacaaaaaggggcaaatctaggatccagaaatcagggtttttccccccttttgcctatcggaaagcttccaccctagggttttagcaaccacacaagcaaaagcacagtctacttccctaagctcaagcaatcaaagtaaacttattttaagttgatgcatactaatgtgctttaacaattatgctttacaatgcttatgatgacatgatccgtttttagtaaccgtaacatcagggatgttacagcccttcccccttaaagaaatctcgtccccgagatttaaaaccttaggataagtaatggaaaaggaaatttgtcaaaactctttcatcttcaacctttccataaggcaaggagttggagaaaatacttcattatatgcatatatgtacattaagtacatagctttggcgactctgcttctttactagagtacatcctctggttatcatatattgtcctgaagagaagcatagaattcgggaaaattctctagcaagtaatcttcagattcccaggtggcttcttcttcagagtgctggctccattgtactttataccatttagtggtcgtccttcgagtaactctagctttttgatccagtactcggataggatattccgaataagttagatctggttcaagctttacatcttcaatatcttgaactcgatctggtacccgaagacactttttcagttgagacacatggaatacattatgtaccccggataatcgttcgggcagtttaaggcggtaggcgacttgcccacatcggtcaataattggaaatggaccaatgtaacgaggcgctaacttgcctttaacaccaaaacgacttactcctttcattggggatactttcaaatacacatgatcacctttggtgaactttaatggtcgacgtcttttatcagcgtaacttttctgtcgggactgagcaactttcaagttattttggatttgtttcactttgttctcagtctctttcactaaatcaactccgaagaaccatctttctccaggttctgaccagtgtaacggagttcgacatcggcgaccatacagtgcctcaaagggagccattttgatactctcttgatagctattattgtaggaaaattctgctagaggcaagcaatcatcccacttatctggaaaattcagggcacaagatcttaatagatcttctagggtttgatttaccctttcagtttgcccaccggtttgagggtggtaggctgtgctgtgtaaaagcttagtgcccaaggactcatgtaaacatttccagaattgggagacaaattgtgtgcctctatctgacactattgtctttggcactccatgcagacttaggatacgatcgaaataaatcttagcataggtggaggcaggatacaatagctttaccggtagaaaatgtgctgttttggtgagacgatctactatgacccaaatggaatcaaagcccttggccgtcttgggcaatcctactatgaaatccatacttatgtcatcccatttccatgcggggataggcaaaggttgcaactccccagcggatttgagatgaatggctttgacctttcgacaggtgtcacattgggccacatagcgagctatttctatcttcatttttgtccaccaaaacctttgcttcaggtactgatacatcttattgcttcccggatgaatagaatacctcgtggtatgagcttcatctaggatttgctgacgtaactcaggtacctttggaaccactaaccggttcttgaaccagattactcccgcatcatccaccttaaagtctgtgggtgctctattagaaatcttctctttaagatgtctcatgcctttgttttctttttgtgcctttatgatttgagcctcgagattgaaatcaatctttatattggaaaggcttccttgggaaatcatttctattcccaagttctctagctcttggcacaaagttatatccctaggcgtcactgttaagcaattacagtgagccttacgactgagggcatccgctactacatttgccttgccagggtgataatgcacctcaaggtcgtagtctttaattagttctagccaccttcgctggcgcatgttaagctcggcttgagtaaagatatacttcaagcttttgtgatctgtatatagatgacatgtgtttcccaacaaataatgacgccagatcttcaatgcatgtaccacggcggctagttcgagatcatgggtcgggtaattctcttcatgaggtttgagttgcctggaagcatatgcaattacgcgaccctcctgcatcagcacacagcctaacccgattcctgatgcgtcacaatatacatcaaagggtttttcaatatctggctgggctaagacaggtgcagttgtcaacaaccttttcagagtctgaaaagcttgctcacattggggtgaccaaacaaattttgtttgacttttgagcaaggttgtgattggtttggcgactctggaaaagtccgggataaaacgacggtaatatcccgccatgcccagaaaactacggacctcatgtaccgtagtcgggggtttccaattcaacacatcttctaccttgcctgggtctacagcgactccttccgctgataatacatgacccaggaaatgaactttgtccagccagaactcacatttgctgaacttggcatatagctgatgctccctgagacgggtcagcacgattctcaagtgttcagcatgttccttcttagttttggagtaaatcaagatgtcatcgatgaagacgaccacaaatttgtctagttctggcatgaagacagagttcatcaggtacataaaatgggccggtgcgttagtcaacccaaaagacatcaccaagtattcatacagcccgtaacgggttgtgaaagcagtcttgggcacatcttccggcctaatcttaatttgatggtaccctgatcttaaatcaatttttgaaaacactttggccccagctagctggtcaaacaataagtcaatgcggggcaaagggtacttgttcttaatcgtcacctcatttagaggacgatagtcgacacacagccttaatgtctgatctttcttcttcacaaacaaggctgggcaaccccatggggaagaactgggctgaataaaacccttctgcaacaactcttgtaattgggcttttaattcggccagctcttttggtgccattctgtaggcccttcgagatattggggccgttcctggtttcaattctatactgaattgtacatcccggtccggaggcagacctggtaagtcttcaggaaatacatccgggaaatctcgaactactgggatatctttaacttcagacacattagcggcatgaacttgcccaattgtccgtttgggagtaactaattggattagcaagtaggaattctcattgggcaatgggattttaatagttcggtgcaaagtgtctagcacaacccctcgttgcgccatccagttcatgcctaaaatgacatcaatttcttggtccttaagaacaatcatgctagtaggaaaattgtgcccaccaaattcgatgggtacttggtgaaccatttctttagacatcagccgtcctcctggcgactgtatataaaaatgatcttgtgtttccccaatgggtatgccatgctttaacacaaaggtgcgattgataaatgtatgggatgcaccagaatcaaagagcattaaagcaggatgcttcgcaacaggaaacgtacccatcatcactggttcaccctctggaattgtctccacttcagtatggaagacttgccctgtcttctttaccggtctacccttctgtacctgttgccctttttgaaccccagttctgaactgactcggctggggttggcccataggtggccttggaaaggtagggttggtttgacggggaaaagggcactctttagagaaatgcccaggtttaccacaattgaagcaagggtaattgtggctgggcggagcagtagggcgaacacccggggcgttcggctggcgtggtgcaaaagcgagggcagtaggtcgagaatatacctgctgcccgggtctgtactgtggaggggagaaaggaccacgataatatgacggcgcttggaaacgtccgtggccctgtggatgataaatgatcctctggcgcttttgaccgcgaccagagaaagaagaggaagcagccttcttcttggcttccttatgtttcctattcttttcctctgaggcgatagcaatatttaccgcctcatagaaagtagcattttggcaagcggtcatcatggtctgaagtttagtatttagaccacgcatgaaacaggctttcctctttctgtcagtgttcacatgatccgtggcatattgagagagatgattaaaccttgccacgtattccataatacttttatcgccttgctgcaaggcgagaaactcttcggccttcatggccatgagcccttcggggatgtagtgggcgcgaaacgcgtccctaaactcggtccaggtaacttggtgtccgggagcttgaatagctaagaagttttcccaccaggcacctgcagctccccgaagttgctgagctgcaaataagggtttctgagtttctgaacactgaattaaactgaacttatgctccatagttcggagccagtcatccgcttctaaaggctcatcggccttagtgaacaccgggggcctggtctcggtaaaatccacataccgagcctctccatccccgttgcgcggtgctctgatgtttggagcagagtgtgtttgacgctgtgctagctcgcgcagcaagcgagcgttgtcagttgtggcacttagcaagacagcaatggcgtcagccaaagaaggtggagcaggtggagggttggggatatcatcccctccctgggatgtcccagctccatcggatccgcgagtacgcatcggcatctgttacaagaatcgtagatacctgttatcacgtaaaattcataacacagaacatatcttacattctttcattcacttattaaacattagttcaacacaccaagagtaaacaggttcaacttctcaaaccgaaagaaaacttatattacaaacccgaaccccactacggcaagctaagacccctacaacgacgttgctctcggtttcaccgaactaatcggtgtggccagagctgtagcccgggtcgtcattgccatcatcttgattaccccctgggttgtggtcgtcggggtcggactcctcttcaccactgaggcctgggtcgggttctccatcatctgccaactcgccatctgtatccatttctccttcgccgggaggtgggtggagttgatgatacagatcaaatgcaatatcacgatactgcatagccaagtcattgactgtatccaagtgatgtgccagctccagtttctccagctggagctggtcctctcgttgccacgcgacatcccgttgtgcggtgaccgtggccgccatcttcacatacaaatccttaagatactttgccttgcccaactttgcgttcatcctagttagctcatgcctatgggtgctcctagcttcttcctctcgggcaatggctgcattccgctcctccaccatccgggacaacatagcttcacagttttctgtagcttgtttttctttggccagttgagctttaagtttgccaatctccataacattgtacattctctctctcatcacctcagtcaactcggcggacaacctgtccacctcctgctgaggcggtgaacggctactactggcttgatcactgcgtggagctagctgatgtcggggaactccttttggaccggtccgcttacgcggggtctgcttctgacgagccatcctgtagagggtaagtttagattagtaagagagaccttaaaggttagcaagaataggattgattctattcacccaacccaacaaggaggaaggaacttaatcagttaatacatcatgatgcatacacgaacttacgattcctactaacaattcgtaacgttattactttaaacttttacaacatagggcaatactttatgttgctcctccataccacttcaaaaattctaagaaagcctatagacaggggtaggttaggactaagcacttggactcaaaataggcaggttcatagtattagttccaaacgaatttttgaagtttttcaaaaggttcagcagtcatcttagcaacgaatgctctgataccagctgtggcagaacctcctaagtgtttgggcccaccgacacctgccattgtcctaaggacctctgacggtgatgccgggagtcctcccactttagaagtccgatgagcattgctggacgctcattccactgctacctgtggcgtaccaagctggctcgtcctgaccactggtaatggtcaaacaacgagaactgtttcttctcgcccttacaggatagcaagtggccaccttaacaccaggatcattcgttgcgaagataaagcagtaacttaacgacacaagaccaaaataatatttcagagtgaaacagcggaagtattacataacttaatttacaaaaagagttcttccaaatagtagagtgttattacaagcctggtccagcggagcaactgaaactttagtacagacagaacaaatttacagaccctgcccatgggtcacgctcactcttcttcgtcgtcaacctcgacgacggtcacacaacagggtccgaaacaagtcggctcctgtgcttcacctgcaacaggggtattgaaaccctgagtacgggagtactcaacaagacttatccgacgggaaaagaggagaatttagggatgcaggcttagggtagacaaggggtggccgagcaaggagccaaagtgttttgcgtaaaagcttactagtagtgcatccttattttcaagttttaccccgatttcctccctcacagaggcagaggaattcgaggatagtctatctgtttgttccccacagacgaatccgtgagttcctagtcctatcattaagtattatttattgatggccatagcttcatgtcgctatgagtccgggaattgggatccgaacctcatgagacattttcccctttctcattatatcacttagttgcatatttagctacgatgagggtcgaaggaattgagtctcccaatcggggagcaacgacgattcgaatcgcttagcaatccagctggagttcctaaccacccgacatatgtagaaccaaatcttgcatatgtcaacccaaatcaagctctccccaaatttgaccaggttcgcggcacccgagagcacagtactccaccatcctacagccgatctagatgttttccggtcatctcagatccgtaaggtgggtacacactactctcgccatctttccactcccagtgcgcgagtagctgttcgcgtcgagggatcacaagactgggcttaccgtaggtaagtggctagtactataaattctcaacccagcaggccatcaacggaacggtccttaatcaacacagtcggagacactactttaagactccattcttagagcaagtccaccgaccggtctcaaattgaaacatcattgatcataagtgtatcccacaacaacccttcaaactttcttgtttgaaaacctgtctagtagcagggctaagcatcgctacgcagttttaaaataaaacaggtgtcaaggacaggatacagatatcaaggtagtaaatgcagcaagtaggttaacccaattctcaactacctaatgcagcattttcaattcataagtgataaaagatttaaaacatccaaggaggggttaatgcatccggggcttgccttggttgcagggcagagagggaccctcggagacttcccaagtctcggatccgacttcctcgaacggagcaccgacctcgaggttcggttcaacgggcgctccttcggtcacggacgctatacgcaagatgatgaatgcttatgatatgcgtatggcaattatgcaagatggaccgaattaagtacgatttgcctttttaatgcaatacggaacaatcaataagtaaagttgcttaataacttaatgtttttacccaagaggttgcaatctgtaaactaagactttacttaattcataattatcttaaattaagtaattattaaacctatttaccttaattaattcttaattaattactaatgacagcaattaagcattaaggctaaataataattaattgccagaggtcattagggttaatgacctcaggtcatcacacaattccaaaatcattcaaccttaatcatgagaacttaattaattattgattaatggttttggaattattatttaagtattaaataagggtttattagtattctaatctaacaatacccaaatgccaccaaattttgtgtggagccagggaataataattagaggctccccacaatttttggtgatttttgaacatacaaataaattattaaaaatcatacaagttttatttgctaattaaaagggctaatttttgtatccttgcaaactattagaaatcagaacctagtatttttcttggatcctacatattttaaagagtttatacaaaaattttcatcatttttggattaatacaaaatttataacataaattcaaacatcaagcaattttaatcaaaaaggaaaaagaaaaaaaaacacagcgcagcgggctgcctggaaactgggccgcaggccggcccacacgcgcgcggcccgcacccgcgctgtgcgcgttcgcgccctcgcctcccctcaggacgtcgctgacagcgggccctcgctgtcagctccgtcttccacctccggccggccgaatcaatgccgcgaccgagccatccgtgcctcctctgcttcccgtaacctgctggtcgcgttctccattcctaggcgcacctctggatacccttctcaccccctttcttctcccctaacccccgcgaccacggacacggcggacggccgcctcggccgggcaaacaccggccactacacttgagtagagcgcgaagagagtagcgcaaaagcgacagaggctcaccacgacttcaaccgagcaacaaacagccgcggagaggctttgagcgatgctggccacggtgggatgcttgcggcggcgctttggccggagctggagaagagcggctcgggaaagggctctggtgggttagcgcttgcgcttgggggcgcaaccggtggcggagctcaaggcggagtcgctggggtgctcaaatcgcgtggaaaggcaacgaggaggacgaattttggcggcggatggtggtggtcggcggtgaggttcaaaggaggaaaaagaagcactccggccgtccgaggctttatccaggcggcggaacaggggatgtggatgaggccgtccgcgcgaagcacagcagcaagcagctgcgtggccagctgcgtggcgtcgcgcgcggaggcggcgcctgcccgccttgcaaccggggtggacgagctcgtgatcccctggatcactgtagctctcccttatctcctctcttttgtccccttgcgaaaatcagccaaaatttgaactaaagtccaaattccaccaaaacaaaaattgtgccaaattttataagctacaaaacatatttaagagtccagaaccgattttgagtgtaacagggtgaatttggccaaacagtttgaaaatcaaactcaaatcaaagaaattctaaaattttgaattggggcaaaacagaatttccaaaattacttttgattttgtataacaacttgaaaaactcccaacatgaaagttgctcaactttttgtgctctacaactttcatgttgaccacttttcaaaattccaaatggattttgaattggggttttaagttggaaaaggggacactttctggaaatctgtattttcaaaattactttaaattttgtattgaaacttcaaaaactcaaaacaccaaagttgtacatcttgccaagagctacaactttgcttttgaactcaacctcaaattttgcttagtttttaaattatacaaaaaggggcaaatctaggatccagaaatcagggtttttccccccttttgcctatcggaaagcttccaccctagggttttagcaaccacacaagcaaaagcacagtctacttccctaagctcaagcaatcaaagtaaacttattttaagttgatgcatactaatgtgctttaacaattatgctttacaatgcttatgatgacatgatccgtttttagtaaccgtaacatcagggatgttacaggaaccatgggtgccggcagcacccacagaggtgacaggaagacaagacccattagcgaccataatggacgaagggagagatggagaaggagggcgaacagaagaaagtataccggggttaggagtggtgtggtaagtagccccagagtcggcgacccactccggcccgactggaggtgtcagggccgtggtgctgaaggagtgcgccaaggccgcctggtcccagccggcagacccgggcaagggcgtcggtggagtagcccacgaggacgcggggaacggggccgcccacggggtcactgaggggaaccccgagggagcacccgcgagcatggccgccggaggacgaggctcgccaccggaagcctggaacggccacagggagatgcgccctgaccatgggtggttgtaggatggccagggtgcacctcgtggaggtggcagcggcgtcgtgttgcccccacgacctgctccacgtcccccaccatgacgacggcgaccgccacggcccgcccccacccccgctcggcccggggggaagaggacccagaagtgacgactgtggtggggcggcgggacgaggtggaggagtggcagcgagagcagtcgaggaggacgacgaggaccccgaagcggaggtggacccaggctgtaggccctgagtaagctcctccatgacaaggtcgtcacggacctgcaggaaggtggggaagggccgttgccgggtgatccacgtccggaggtaggagtagcggtcactgagcccgcggagaacgttgaggaccaagatgcggtcctccacgggccagccgaggtcgccgagggagtccgccatacccttcatctggcggcagtactcgctgacggagaggtcgccctggacgaaggtgcggaagctcgcgtcgagccgcagagcccgggcttcggcgttgcccaggaactggccctcgagtgctagccaggccccgcgagcgctcggggtgttgcggacgaggtcgtggaggtccagggagatcgtccccagaatccaggagaggacgacgctgtcgaggcgaagccacgagggggtcgggaccgcccccgcggtgtcgaggaggacgtggtcgtcgagggcgtagcggcggagggtgaggaggaccaagtccctccagcgagcgtaggagggcgactcgggctcgaggacgaccgggacgaggaggcggatgttctggacgccccctgcctggtagtggagctgcaccacgtgggggtcggccggatcgtgccagacgaccgaagccgatcccgaggacgtggtcccaacgtcaggcgaggctggaaggccgaggaactgctcggcgtcggcgatctggcgggccaaggcgtcggccgcgtcgcgctcgcgttcccaagcgagagcggcctcacgcacgcgggcccggccctccgcagccgcagcccgagcagtgacgagagcagcgatgagtgtggagtccggacgatgcatcacaggcggcggaggcggtgcagggaagggggctgcgcccacagctgcacgcgggccggcagcaagccccctggacagggcgcccccggctgtgagcagcgtcctgggcagatcggtcatgtccaggggcatgccaaggcctgcagcaatggcggcagccgctccccgggcgtaggctgctgctgcggcgtcgtcgttggtgcccagctggagctcagaggcggccgcggcgtcctcggcggcgtctgcacgcgttccgtccgcaggggcgcggtcctggtgcgccccgcgcgctgctgccgcgcgcgcagccgcgtccgcgtgcatcgcggcctccccgcgcgccgcggcgtccgcgcccgctggctgctgcaggggagggcggggttggccacccgcggcggcggcggcggcggccggttcggcgcccgcgacggccgccaggaggagggaagggcgggccgcgtccgctggctgcgcgttcgcgtgcatcgcggcctccccgcgcgccgcggcgtccgcgcccgctggctgctgcaggggagggcggggctggccacccgcggcggctcgggcccaggacgggtaggggagcgccggaaactgctggaagtagggaagaggagggggaggaggttcccggcctgccatggcggcggcggcggcgcccaggcagctggccggccggcggcggcggctgcttgcctgcaggcggctgggagaaggaaaacctagtctgataccatgttagaattagggtttctcattagttgggctaaccctaactagggtgccatataattagggatacatgggcctgttacacacatactccaacatatggtccatacatgaatttgtctatctaattctctacttgtaggttgaaggaggga

SEQ ID NO: 4861 - DNA, 3317 bp, Sorghum bicolor
  Intron number 4 from transcript Sb03g032530.1 (locus Sb03g 032530) derived from phytozome v7.0 (chr-ID chromosome_3; pos 60973739 to 60977055)
tacggcgacttgcagactcaaacaaaattgtaaaggtgaatcttccttctcttaaattagactacagtttcttttccctattttattttcatcttagcgaggcttatgttttcccctttacaatccgtttggatatgcaatctgtagtttaacccatggatctggctgaaattctacgtgttctgatctaatacaatcgaaccctctgtgttccattggtctccttcaatgtttttgaggcgccgcggcgcggtgcggtgcccgacccccttcacgacgcctaggtgtttgtggcggacgcctaggcgacgccatacacacattgtaaggcgttgtaagctagaattttatatactattgcagcacatacatacctctgtttgtaagctagaaagacactcaagtaatataaaaagcagtagagaacatacaatattcacttcagagcagcagagagtatgcaatattcagattcaaagcagagcacgaggcatagactataacattcagagcagacaacagagtacacgcctcaaagatttaggaaagcagaggaggcgggagggaaagcagaggaggcaggagacatactaggcggaagtggaagtacccgacggatccgcagactacaggcaggcgagcagctgctaacagccgacggaggtgtagactcgagatagagcaggtgcggatggttgatggctgcagcagcggctccatggctggtgcggacgtgcggagatgcagggcctgactctgcggcagggggcggccgctcggtggactcgaatagaggagcagccaagccgcaagcggagctcgaggtttgcccgccgccttctctcttcctctcccctcaccgcactcgcggtaaatggctcccgcggtggatttcccgtgcgaagaccctatttgggcggacgtcggtggatttcccgcagggccacggtcttttggcgcccaccaccccttgtgcggcctatctagctccggcgcggtcgatttcccgcaaaatcaattggggcgcggtcgatttcacgcgctgcggtcgattggccgcgcgcccgacctatttcctgtgggcccacggtcttctggcgccctccttaccgattttggcttctggcgtccgcggcgtggctgtaggcgtccgcccgacgccacacgactcctaggcgacgcctaatacgcctaggcggatgccatacaaggtcagggcgttgcgccgccgacgcccagcacccgcagcacgccttgtcgcctaggcgacgccccaaaaacattggtctccttgcttggttggcaaggtctgcactgcatgtcagcaagggacggtattgtgagaagagaactgaagaatagttttttttttcttctttgaaaacgcaggagagctgtgtttcattgtattaaagagaaagggtggtcctcaacatgatcctcactcatacggggaccaaatatgagggaggcaaattacacagactcaaaacttttccacatagctaacacacacgactcaaaaaactgccctaggttgcaaaagtaagtcctaacccctgcagtttcttcgcaccagccatgcaccataagccgtgctcatccttcagttcacacaaagttgtgttaactgaaggagaagccctctggaacacacaaacatttctatgtttccaaatagtccaggcgccaagaataattagagtgttcactccttttctgtgctccttctttactcttctcatcgtcttactcttacaccaccaatctgcaaagctcctttcattttgatgggggactaaatctgttagctccaaaggctggagcaatctgaaccacacacacttgtcttgccaccacgcacgtatcgtctcatcttcttgatcacatagagggcattacccagatgatgggatgagggaggcccctcttagaaagcctatctgctgtccaacatctgtttcggattgccaaccacagaaacattttgcatttagatggggcccaggtcttccacaatcgacgccaaggctcgaaggtcacagcaccaaagaaataagctttataggcagatttggaggagtaacatccgttagcatctagcctccaaatgtgatgatccacttgatcagtcaaagcaatttctatgaggcagtcccataactttaggaatttctatgacccaggccaagcctccttggatgtccctgggctattccccattgttgagagcctcagccaccatccgggtcttgcgttcttggagggacacatgcaaagactgttggtgcaaacttcattgaccgaacttttaagtaaagattttaattttaagaaattgcattttaagatttgacagttaacagttttgtgcatgatttgtgaaattaggagctcaggttatttagagtgcttgtgaaaattggcactctcgatctcaatttacattgaattttgtttgggaattgttatcaaactaagttcattattatttggtattttgaaattgccttcaaaaaagagtttcagtatgccatactttggaacttatttttaatacatatgtactttggaagttggattcaaaatatatttctatggagcacatgaaatattctggaatccatagtggatggtatgtgccttgcaatgtcactatcaattttatctcatagcctcacacagcatacgaatggtaacagaagattagctgggtttgaatgtcactatcatgtatgcaggctggtattattaaacagaatatatcggtagtttaggattagtttcatgcttctgtggagcctttgcatgatgtttcttttaagagattgtagtgctatttttgctaaaaaagagagagattgtagtgctatagttgcatatgttatatgtagattagttatttgcatgtgacaacatgagaaagctcattgttttaaccttcccaacaactagtcacatgccaggtttctgtttcgtcatgcaattaatcagtctgtttatttttcatagcttgtggtcgtatcaacgaacttgcttttatagttgtatatatccactgggttttgctgaccttggcagaatatcccatctagccatgtgcccatataaaaaaagtggttttgagcttaacataaaatctgcaattctcatgagtgcaaatttcatcgtggaaagtatcttgagagctgtattggcagaatattaaatttcaagcaagaaatgtttgagctgtagacgcaactagtgccaatctaattacatccttttatctaaatacagatcgataagtcttataggctcccagattcctttgc

SEQ ID NO: 4862 - DNA, 11443 bp, Sorghum bicolor
  Intron number 1 from transcript Sb07g005740.1 (locus Sb07g 005740) derived from phytozome v7.0 (chr-ID chromosome_7; pos 8029178 to 8040620)
ctactccactgagttcttctgtcaacgcagcaccggttatgatgccaatctggtcagcagacgatgggtacatctggaagaattcgggtctgcaggagattctgggttcaggttcaggccgattgatctgctatgaatgttcgcaggcaaactgcatggtcaagaaatcggtggttctatctgcagatggtcagattttggagacagttctcaggggtagtcacaaccacccccgtccatcagagatttgccccagagatgttccaacaggatacataccagactctcaacactacgcctatgtgccatctgagatgtacgtaccaggggcttcaattcctcagactgagggaggtgaacaagaacaacttggcagttctagtgacagcgacgaagaggatgatggcgaacaaagagacgatggccatgttgccagtgccagcacaacggaaaggttctgactgtctcatgaaattctcgagctgaaatcttggtcacaattaatttcttaatttgtctttcgacactgagttaactgtactttcactcgacagacctgtggtagctccagctgaaaggagaaccaggagcgggactcctcaccgaaagtatgcatcgattttgaataaacctgctctttctgtcttcttctagcgtacctttctatttcccttaacccttattctgcaaagtttaaataaatgcactatcaagatataagacaaagtcaaaacgacccataatttgaaacggcaggggtactagatctgtccaaactgaaaattttcgtgcaagtaaaaatttttaaatgaagaattgatgggcattgatatgcaattaattaagtctcccattttctctccttggggccatgattatgcattcttaattaatgctttatgaagtgatgagtaagcaaaaggcatttaattgaagcatatgagaatttgacacttgtgtttctgagcgtgagcttaatgatcaacgaatgttgttggtgctaaaaaaatctatgatacgtgctaacaaaaactgattaggatgctcagagttttacagtaagtgaaaagggccatattgtattggatttactctgtaacccggatcatactttgtcttggtctctgtatgaatcctgttttcttaatttcagtaatttcataggaggccaaaaggaaaatccaaaattttatatattacactaatgcatatgctttacagtaaatatgtaactctagactcacattacctattatttatgttgcaatatttttgtactcaatagatgtgtagtcataaatcatgctaacatcttgtttcgatctaaattttaaaaaatcatgtcacttgttgaagtctaaaaatttgtggtaaaatttcatgaattttggggatggccaaaaattttcgaataccgaaattgaaaacctggcagtttctgtggttcagtttaaatttacattttttggtcaccgttctaacagcacacattttgttgttttcataactctgattcctaacacatgacagcgaattctctactgaaccttacactaactggtatttataatgccatttttgacacatggcctgggcagccttagcctgctctcaccaagccaaaccttggctgtttggttgtgtgtgctacaaacaagtgatgggcatcctcggtgagctagcatagctgactaataataaggcaatgtggaaacattaaggaagaacgggacgcaaattttggagcttcggagcatgacactgctgaattcctgatttatctgttgtgcaaatatgtttggttctgtatagagaagcagttcatttcggtatgcgctccaattgaatttgagaaactcagatcaagaagccattctactggcattcttgtaatgaagacagttttcagaagtctgaacattactgagtgctgactgaccacaagaatgtaattcctgacaacataatttgatctctgaatttttcaatgctaacacaactcctagtactgagtgttgactgacatactccatcactgtgcttagtcagaagaacaaagctatactcagataacaacacagaggttggtctataccctaagggcgtcttcaaccactagctatttggctaactattctgacgtggacaggcaaaaagtaggagagagagtagtcactagcaacgagcaaataacctatctatttcacgtagtccaaaaatttgagaaagtagcatgtgggtccaatagtacatatgtataaaatagtctttgcttttgtctctcacatccacgtcatctagctacgtagctaccaccattgtggatgcccacttactgaacagtttgacatcagcactttcacaatagtaattactcaatccatcccaaattataagacgtttgactttttttatatcaagcttgaccacttgtcttattcaataatttgtgcaaaatatcacttttttttattgtggcttggtttattaattaaagttcttcaagaatgacttaaatttgactatgtttgcacaaattttttgaataagacaagtggtcaaacttggggtaaaaaatcaaacgtcttataatttgggacgatggagggagtacttagtagttactgctggctgcttagtctaaagaacaaattaatgccacacaccatcagccgaagttggatcacattcacattcagggggcttctccttcaagttaacacaattttgtgtgaactgaaggatgagcacggcttatggtgcttggctggtgcaaagaaactgtaggggttaggacttactgttgcaagttgcaacctagggcagtgagtcgtgtgtgacctttgtggaaaagttttgagtctgtaatttgcctcactcatatttggtccccgtatgagtgaggatcatgttgaagatcgccttttctctttaatacaatgaaacacaactctcctgcgttttaaaaaaaagagtcagtcagttagaaaaggaacccaatccaagcgaacagagcagaacatgccggatctggggtgtgggtgtgctctgcggctgcggatgtcgtccccattgaggatccacgcgctcattgtccccgctctgggcttcatcttcttcctcccccgctccgccgtcagcagcacgctcttgtcatactcgtactcgcagcaactctactcggcggcctcgagcgcgcgcacctcctgcaactcctctgcctgaagctgctcgtagacgacatggatctggccatggcgttcctccacagccggaaccattggctgcactcctcgctgcccgcggcgacttctatgtgtccgtgaggcgtacctcaaggcgagagcggcggcctcgggagcaccggctaaagggcggtcgacgacagcctcaatcttcaccgcacgcgtggtggctgtcgtcaccacatcgtcctccccgctggagcgcacgacaccgggaggtgacctaccgagagctggttcgggctaggctccacaagaacgaccgatttgggcattcaaccctggccaggctatctctgtacggatggctagccccagccaggcccaacccacttccaagcaaccaaacaggtcaaaattggctctagggagctagactgggttggccacccaaccaaacacaacagtaggtggcaagagccatattgtattggatttactctataacctgtatcgtactttgtcttggtcttggcatgaatcgtatttctagggttcaaaatttcactgaatttcacaaaatttgataatttttggggaggccaaaaggaaaatctgaatttttgtattatacgaatgcatgatttatgactctagattcatatttcctattgtttatgttgcatattcttcaactcaatagatgtggcttgtttacatctaaagtttttagaaaattatatcacttgttgaattctaaaaaaacagcaaaatttcacaatttttgggtatggccaaaagtttttgaatactaaaattgaaaacccggttttttttgtggttcaatttaaaattaacattgtgttagttgctactaaccttcgattctgcttgtctagtcccttagagcaattccaacggcagcccttagagcaaggcccctactttttatttgagccacccccacttttgagggctctattttctaggctgcactccagcagtggccctcaaaatagagctctcaaattcatatgggcgggcggaaagccgtgtggtcaggtgggtggatagctgtgcatatgtgtgatgaaggcaggtggatgaagaacacggtttgatacgtgatgaagacagccccgcgcagggatgtcacgacggccccgtggatgatgaagacaggcctaaagtggacgacggtgggccgatctatggtggggcagcaactggcggcgtgaagagcagaaaagggccgcgacaggcagcggatggccagcgaaggtcgtgttgctggctaaactttttttggatcttgggtaattagggattagattagccctaatttgatccctaaaccttattctgacatcatgttactaacctttgatgcctgagtctgtctagtcccttaggtatggcaacaatatatatagagttgctcatgggccatataggcctagaatatataagggctatggaccttgatatgcttaacattagttactgattttttttaagaaaacattagttactgatctaactgcatacatttcgttgctttcataactctgattcctaatacataattagcgaattttcttctgaaccttacactaactggtattcataatgcaatttctctgacaccggtgaaaaaaaaagaagaccgaagtccaaagtgtgggaggaatttacaaaaatttttagagacggaaaacttcaagcagcagtctgtaaacattgtgaaagttcccttagtgcaaaaactacaggaggaacaagccatctgaaacgacatctgcagtcctgtcctggacgaccttcaacaggtcgggtgcagctgcaacggccattttcacatcctaattcatctgttcagaagaatttgaatttagatcaaaacaagtctcttgaattgctcatcaaggttttagtgtccaaccttttctcctctccatttacaagcagcacaatttttaggcagttttgggctggcatcagtcctactaatgatatggtatcgccagctgctattgaagagaagtttctcagtatttttcagactgaaaagcttaagcttcaggaggaaatagaacttgcacctggtggagtttttctgacagttgctggcagttctcttgaacttaagtgcgtcatctttttgatggtgcacttcattgataaagaatggaacttgaataggaaaatcattagatgttgctttacagggtgtgaagactctgatgctgagtattatgctagcatgtttccctttttgaaatcgtactattatatctttaatgggaatgtgagagcagtcgaaatagaaatagtgaaagaggtagtacaaaattggaagcttgagtggaagcttctaggaatttcatcatccaagtcattatgtgatgcttctgtgccagctctggagaagaatcttactggacagaactatcttcttgccaaatgtaagctgttaaatctcccttgcataacagatgccctaaatgacctttttggctatgagatcaaggaatatatcctaagaacaagtaagatgtggtttcagtacatgacatgcaccccactgtgtagggataaatacaaagaaatcctgtcacgcctgcaaataagccgaccttctttcggttcgcagagatggtacttaactttccattcattggaagctgctttgcagtttaacaatgagatgccaaatcctcagctgatagattccgaatcttatccagctaagccatcttttgcacagctaaaggcagcagagaacttctgtgaccttgtaaggtcgatttaccatgcaataaaagtggtttcaagacgtcgcaatgggaccttgaattcacaatttcacgcaatttggaacttgaagatggctctgctccgttcatctacaaaggaaaacattgaccaagtttttaatattgaagaaatgaagctaaagtttgaccagctttggaggaaatggtacctatggctatcattagctgttgttctcgatcccagatataaaataaggtttcttgtttgctttaaggaagcctttggtagtcatgccaaaaggtatatctctgaagtgcgaggaaagctgtatgagctctttcttcagtactcttgtcatgttgatcaacaaaatgatgagaactttgatgagagaaccaacgatttacagttggatacacatggtagcataccagtacatgacgcaagtcaaaattacattgagcaagcagcacatgtggaactgggagaagtcattagataccttgaaggagagcttattcctcaaaatgccaattttgatattttgaaatggtggaaggaaaatgcttcaacatatccagctctttccaggctggctcgcgacatcttagcgattcctggatctgcggtctctgccgaatctgcatttgatgaaactgatgaacggacgagccttttcaatcggaagctgagccctgaactaattgaggccctcatctgtacccaggattggatcaaatcttcaggtatcgtacaagcacaactcctcatatttcaacttactgctgatctctttcatttacagtagacagatacaaaatacctgtaactagtataatgttcctattcttggtaaacagaaataatttctgacgaagttggtggaaacataaacatgcctgcttaatgcacagcaaggtaagcctgccatcttcttcatgtcttctttaatttttgtccactatttagcaccgtagaagtatatgtgttgtacatacacatataccaccataatacaagacatgaaatgacaattgcacatttcttggtgcaatacccaagtgcatgggacttagctcagatacactgtatttttaacccaatttattgaaatcctagctactcttggaaagattgagaaattgtgcacactggcagttccaaaaaagaaagataagcaggcttatgtttgaacctttcatttatagtacatagtataagcttctcgatgtcaataatgtggcacatgaattatagctcatcgtattcttgaaataataatcagtgatgcttttttcctttctttacatgctcctggtggatcagttgctaactagatctttagaacattttgttctccaaagacggttactaagccactttgatatcttctcatctttatctgcaaaataattctcaacatggaaacagagacaaaggcctaatatttcaattggaaaaagaagtctggataatcccaaatcagaacgcctgccttgagacctgcctcgaccccggacgcctggagcgctgccccgcccctgcgcccgcccaccggagccccaatcttgctcccacgggcaggcagcggcctctccttcctcccctcatgcgcacagccagcaccgtcccacctgggctgcccctgtccccttgatttggagggacaggagtcacgggcatatgctgtgaatattcttaagtgggacgtctctatccctccgtgactctgaaccaaacaggcaaagaaagaggtccatcccatcccatcccaccaaatcccagcaaccaaacactgtcttagttcatctaaaaaatactcctttcattttgaatgccgcatgaagtttcaattggtttcttgcgattcctctgtgttcctgtttaatgtgctagaaataattaagacacatgccattctccttgatatgcttagcctcatacccactccatacccatattacagtccctataggcacactgaattgtctcgtacccaagtatagcaccatcgttgaattatactccctccgtccacaagaatataaccatgggagttgtgccagtcaaactagcataactttgactaagtttatagtaaatagtattaacatttatgtctctaactatgtttacaataaacatctatttcacaattaatttaatggtatttattttataacataaatgttagtaactttttatgtaactttagtcaaacttcaaattatttgactttctcaaaagtgagaattgcattcttcgtagatagagggagtataataataaaatgagttatgaacaggacggttccagatattatgggttatgagttttgtcttcctttttgttatatttcatatatacatctgatattatggttaattagtctttttttctgtgcttaaacagctcctccagccttttcactggttcaataaaaactgaagagcccttccgaccttatctgcatcttgccttctcagtataatgcatgacagaagtctaactggcaatggtttgtaataacttgttttgttgcatcattcagcatggaacatatgaacaatattagtttttaagttaattgcacagtacatgaaaggctgaaatatatacaaaacttcaaaaaccaacagttggttttgctgtacttggcggaccagttttgggtgagatgtgccatatatatctttgaagaacgtaagaaggttcagcgcttaattttgttttggagagtttgttctgacagctcatgaaggctcttgatgaacatgtttttaacttgatttttttttctaaactctgaaaattttgtttgacgataggaaatcaaaatggttttgtacttgtatgtttggtcagttccatatggtcacatttgcttcttccatattcaaggatttaaaaataattgcacctaaagtcagctgtgcagaaaagaacgcatcgaacggagcatgataacacagtatagacaaactgtgtgaactgtggaggcaccacaatgcacagctaaatttggatacctatgattatatacatctctacctatccattgacccattgtcatggaaacaagaccacagctgcataggtaaatcttatatcaacatttgcaaggcaagaaagtttgctcatatttacatacagttagaaatgagcttgaaatttctctttgacaacatagctgattgtcaaggcaagcacaacattcaaaagactgaacatggcacaacacgtgccatgatcttaaatacatatcggttttaatagtagtttacgatcgagaaacaaagttatctgatggtattatgcgtagataatccgtccactagaccagaacaccacaacatttagactgtctcgaacaaccatcccaaaacgcaaaatacatcacgaacagtgttttgcgtcaccaaatccatcttccaatggaagacccaaacgaactacccattatgcctagcagccgaggggaaacgcaaatatgtgtcttccggagaggtgacacaaactctgcgtagacgaggaataaactctccttcatagattcatcatctttgtgagattgagagtgattccaaatgtatttgcatgagtgattgcatctagtggcacttgaggatcgttgtgcttgtggagttcttgttactcttggtggttgtcgacacctagacgacttcgagcagcgaggagcattggcacgagttggtgattgttcatggctatctctcgatgattgtgaggggttcttgtgccttctccggtggagctctaaaggcaattttagtaaattgcttgtgttattgagttacctcacttgtgggtgacggtgtctaattgcgtggacgaggttcgtgctacacctcttagccgtcgaaccacaccaagtgttggtcgacattccggggactagcgtgccaacaagcacgtgaacctcggaagaaaaattatgtgtctcaattgtgattgattgatattctcctagtgattcattggttcgtatcttggtgattggctcatcccctacacggcggtataaagaccacattctctttatttatattttcgcaaagtagttaattagctttagttgttagttttgtcttgtgtagcttagtttactagtgtagcttgtagttacatagtttttgtgtgtctaatgaccttactaactaaaattgttaggatatgtggcttacaaatgctcaattagagctacaacaaaaaatttcgctttgttatttactaacttcttactttagtaagtttatagaaattttattaggctattcaccctttctagctatattaagaccttttaatggatcgaactcacaggaagaatggattgaaatgaggtagagaaaagaagagtgatgcggtggctggttcatgccattttcattttcgaaccgagcgagtgggctttcaggcattgggccgtgtagacatcgggctgtttcgttcgtgaccaaaccaaaccatgtacttacttcagctggcctttggttaaaggctgaaatttggctggcccacaaaaaatttgggataaaaagatttgctcgccccgggtgcccaatgcaaagaacattgttttttcacaacctatgtttaaacttatcagcactatcttttagcataaagtagtatttttttctcacaacaaatcagtatcagtcatagctttcagcatagactactgtagcatcgaaagaaatagttttgactttggctctagctacacctaaaacacaactaactcccccattcccaaaaataaaacaagagaagctgttggaattattctaccatctagtgacgtggtcttggtgaagctttaatgcttagccttcgatccctcaccgatttttttctagtgcctgtacattgtgcctttctttcggttctcctctctaggcattacctaaggccttgtttacttcctagaaaattttacaaaatttttcagattccccgtcacatcaaatctttagacgcatgcatgaagtattaaatatagacgaaaataaaaactaattgcacagtttggccgaaattgacgaaacgaatcttttgagtctagttagtacatgtttggataatatttgtcaaatacaaacgaaagtgacactattcctattttgcaaaattttttggaactaaacaaggcctaaggccagttgatgaaaaattttggctttggctactatagcactttcgtttgtatttggtaattattgttcaattataaactaactaggtttaaaagattcatctcgcaaattactggcaaactgtataattagttatttattttatctatatttaatacttcatgcatgcgtccaaaaatttgatgtgacagagaatcttgaaattttttgcaaactgaacaaggcctaacttttacaatgcctatctacggtgtgtgttgagttgactttttcgcgtcttctcgtctgggcttagactac

SEQ ID NO: 4863 - DNA, 6317 bp, Sorghum bicolor
  Intron number 2 from transcript Sb05g003784.1 (locus Sb05g 003784) derived from phytozome v7.0 (chr-ID chromosome_5; pos 4389672 to 4395988 reverse strand)
tgtcaactgcgagaacgctgcgaggcacctgtaacttttctttctacttgttcttcgaagccttcatgtcttctattttcaaattagagttcctaagtaaaagaagaaaacaaatgtttgagttttgattatcttgttgtaatgaagttcggaattgcttggatgcatgatttattaacactttatagagaattatttgcttcaattctgtccctgttactcacatccataagattatctttgcatactggactgcttttttatttgccattatggtgttcaaaagccccaaatgttttttcagattctcatttgggtccttaaactaataaaagtgaccatctaggtctttaatcaattgctaattcccatctgggtccacaaactaaaaaaagtgaccatctaagtccttgatctctgttgtgcttgactaacatccaatacccgccacgccaccgacaattgcctatgtggtcgtgcctgttaaggttgcataaaaaacatcccctacctcccctagcagtcctattgcctctcttgccgtctacctccctttgttccatgggcgttgagtgtgtgcctccagagcacaggtgagcgtgtgggcgtagccgtgaggctggtacgcacgggaacaacgggaggtagagggagtggacatgcaggggagggggatggagggttcttttgcaagtggaatgggtgtgtgggatgtggatcaacaattttaagttcctgggtgcatagggcacatgtctcgatggtttggtgtgctttgtgacatcatcccaactcacatcccagacattgacctatcgtgttgtgtcatcctagaaccacaatttggaatgaccattcccgggacatggaaccccactaagacccacaatctgtgttagtgttggcaatgggtaaatccccatcgggtatgaactccccagacccatccccgtgacaacaatatgacaccacgggtatccccatatacagtgatgggtgggggaatttccccagacccatacccgggtgggtaaattagacccggcgggtcacccatacccaccaaacatcaacaattcacaagcatcagtcacgtggtagcaattcacaagcatcgtcacatagccattcacaagcatcgtcacatagccacctcaccatatacctagcaaatagcaacataataatttctgctgcaaccactagtcacaacaccataatagttcattgtccatacaaatcacgtagtagaaagtagtactttgctagcactacatatggtttcagtgtatgggctgccgatggactggtggctggtgggcttctttagttttggactgggtatttttcacccatgggtaaatgggtatggggactactagaacgtccccatacccgtgtacccaatgggtgaagggtttgctccgtttgtgtacccatgggtactggtttcactccatattgataccctaatagagtaaatacccatcgggtcgcgggtcgtgggcccccattgacatctttaatctgtgtgactatgactggcacccactaggcatacaaaggtgatgtggtgggatttggaccttaactcgggtgcatcattagttgaaggacctaaatggtcacttttcgtgagaatctatagtagattgaggatatagatgatcactttagttctatgacctaattgagagtataaaaatttctaaggactcttggtgcattttacttttttttacattccacttaagagccatgtagtaaagtctcattgtaattagggcttgtttgacaaagctctagcttcaatactttttgtagctactcattcctaactatagaaattcttggagctggagctatgggctgacttaggggatgtttgggactgctccgctctaagttttttagctccgctccacgttttttagccaaatggtttcagcttcacacactctgttcgaggaaaaatggtggagttgtgagaacacttaaaagaggtgctccacaaattccagttttttgtggagttgctccatggtggagtttgtagagcagtctcatacacccccttagtattgagttgagccattcgttttctcatttttagattaaacacatagatctaaagcacttcaatttatcatagattcttaattttgcatggacctcgaacctagagcttcgtgaaacaccttttattagtaaaatcccaactccaaaaaaagtctatttgtgtagcacccacacccaaaaccattttacatcttaaccaatgttcaaaaaggcgacattaggcgtcttcctaggtgcaactaggcactaggcgagggggtcctccctggcctagggggtaaacggaccccctagacagtgcctgcttgtcggcggtgcctgtgtgtgggggggtagtgtctggtggaggtcgccgatgggggaggaagcttcggacacgtgcaggcggtggcaggcgctcactagaggagcaagagatgccggagagggagagtaatcggctgtggcggctgatgcaggagacaaggacgttgactgcgaccgtgacgaggaagggcgatgaggatggctagaactggagagatatataaggttggagacttggagtgggagatgggttggactcttgcctcttgggcctttctatctatctaagccgatgggggtgggtgggtgggggcgaaggagcgtctggtggaggtcgctgatgggggaggaggagctttggacacatgcgggcgatggcgggtgcacactagaagagcaagagatgccggatagggagaggaaccggcggcggcggctgatgcgggagacaaggaagggcgttgagtgcggccgtgacaatggcgatgaggaaggctagaactggagagatagataaggttggaaacttggagtgggagatgggctagactcttgtctcttgggcttttctatctatgtaagccagcctatctatctatctgtctaagcccactatttagctatttattttttcttttagaagataatcatatatgtatataagtattagtatatatacaaaacgcctaggcttgcttaggctctaggctatgggtcattgcctaaaaattgcctagcgcctttttgaacattgattccaacccccacaatgtcacaaccataacatattaaatattcttaaaaaactcgaccttcgggggttaagacaatccccaacactgcattaagaataggaacttgtcatgcgggtctagaagttccctaaaccattgctttgcccatacatagcggcaccgtagcccatgtgaggacggccatgaccagggctggaccttaaacctctgctttggccgatagacgaggggatttttttaaccctagcctgaaaattcactcctatgggagtcgaacatcggacttgaggctcaaggcactcaactaactcaactagagcctctcgcctttctcacactttcatccttgatttgcaccagtttacctaggtgctatgtaaggcgtgaggaatcaaatctacctaccttcctcgagatcctaggtgagagtaggggaggggttgaggccagcagcccctaacactagattgctcatgatcttgatgtctccaacacctttccattgttttgaacatgtcttggccttgaccatgcccattgaactttttatgccatgaaagcaaacaagggactgagcctttgccacctaaacactcacgcttccaaaaaattcgcttaaacaatcaagttggtagggttaattgtagttgattattcctcatattacctgtatacttctatcatctatgacctcgagccatagaagatctatccctaactagcattgtttgtggtttttgtagatattgtttggatccggtaatttatgatgcctcatcatttgaatggttgtgtgacgattgcccccaaaaacataatgaagtcccaaaatcattagagcggaattgtgatcatagtcacaaagttcctcagtggaaggggtcaaggaacgtgatcgacgaacacaacatgctatttgaggaaggttttaacaaggcaggggtgagaatgttttcgcatcccgagaacatgaatgatgttctcgaaacgaggagtgttacatggttccatgttcccgatgacactagctgtgatgaccactactctattcaattgggttctataattaatgaaccaaatgtgaatagagtattggtgacgaaggaacccttgtcgtgggggtgttgtagacataggtcacacaaggcaaggtgtagtacatgggggtgtcgtagacgtagatcacagaaagcaaggaaaggtagttctgatgcctccactaaacattttctgagtgcggatacattcaattcttctgaaatgtttgtcgtgaaaaagttaaagcgcaatgatattttagaggaaggggaaagtaaaaatgaccacttattttatcgcccagaaagtgctgatggttcaagtcattcagcttctgaccttattgtagaaatacaaaagacagcgggtgctgttggacctactgtgaacacaatggagtgtctggaactctcaatggaaaaagatagctgctccttttcactgagttgtgttgaagggttcactcaagaaacaaaacctgacttacttcctttaatcaatgatgttgagagatcctatccatatgttacggatagttcttgccctacggtaccaaatatggagcaaaaagatgatgtattggaaaatgcggaacaacctcatccttcggagatggttaatcctgatggtacaagccattcacctgtgggccgtgcattagaaatcgaagaacaaggagcggaggctggcttatgtgcttcagttgaagatgttgaggagcaagtagacggttctactcctgcatcagaaagttgggagcaatctgttcctttgaaggtggttatacttggaccatggcatgatgtgccagattgcatcctaatatcaaagcctccttcaaactactcgcagtcaatgcaaggatcagatctatatgttggaaatatggatgtcttggatccttctaaggagtggttggactcaaggtaagtcaaataccgtagacccatcaagttctgcaaatggaggaggcacatctgttgagaaagaaatactggaaaaacagaatgcttgtctgggcatgaacactgtcacccctgaactggataatgtccagggatcaaatccctcagcagagccctcaagttcctcaaatggagaaggagcctcagctgttgaaaaacacagtgctgaaatgacagaatgcttcttaggcatgggaactttgacccctgcgctgcataatgtccaggctttaaacccctcgacaccaaaagaatgcttggtttctaacgcagacaactcagatcaagcaaataggtcatatgaggttcattgcagtcacaatgattttaacgtaagttactatcccaatccagtgctcaagggaagaatctccaaaatgatgtacccaagacattggtttcaactgccaaaaatgtggcttgtaggcaaatgtctcaaatggaagatgtcattgccttccaagcatgttagtccacgtaaggcaagaaaaaagaccttcagaaagcaatataaagggccaaacagacatattccacatcgtactaaacatcagaaaaccaagctcattatgaaggacagaaatacagatcctgcacatatgagaagtagtaagacatcaaagcaatttgatcatacttgctcaagtgcttccttgggttcatctccaaagactaaggaagtaaatgatcccaatgacgcaaaaccaagatgttctaaatctgtaagaacttctgagaatgtcatggccaagaaaagaaaacgacctattttatcatgtgatgaagatgccgaggccatgcagatggaagcgaggatgcacaggaggcacgtggaaagtggtgtgatgaaacagcgaagatccgcagaaaattctgaggaagcgatgtctccaggaaattcaaataatcaacttgccaatgatcatatgaaggcaaggaagccgagaagggccaacaaagagaaaaaagcacctgtagtgaatgctagtgttccatgcacacagaatgatgctgcacggttagcatcagatcagcaaagctttatttgcacgcgacccattgatagaccttactggacgtatgttagatgccttcgatcccattctaaacatttcaatatatttctctctctgcaatgctaatgtttctcatgttttatgctgatagtggaatc

SEQ ID NO: 4864 - DNA, 835 bp, Sorghum bicolor
  Intron number 2 from transcript Sb04g006940.1 (locus Sb04g 006940) derived from phytozome v7.0 (chr-ID chromosome_4; pos 7039434 to 7040268)
acctgaagcggcggcctgctgcggagaaagagaaggtgagggagtacaattcttctcgctcctattggaaattggatagcttctgagctgcgctgacctttaagctactcataaaccacacacttggaaaattgatgaagtacattgcttatttaatttgaacctggaatacatactgtttggattgccaatgaaaatagctttatgttaccagattaagcttcctcatgcgcgttggaaccacatcaacttgttaacctgtaacatgtttttgtatatatgaaaccccttagactacaaataaacatcctagttcctaatcagcagaatgcagaagtgcagctagagtcaagcttgtatagaactactaactttgtatgcaccgttcgttcactgtgtcttgtgaagatttttgcattggatttgtgacatttgtgaaatgttacatttgttacccatagcaaagcaattcaactttgatgtgaacctctcatagaatgcagaagatgattactcttatctactccctccattccaaattataagtcattccaagaatcttggagagtcaaagcattttaagtttgaccaaatttatatgataacgtaataacatttatgataccaactaagtatcatttggttcttcattagttatattttcatattaatatctatttgatgtcaaacttgagatgctttgactcttcaggattcttggaatgacttataaattgggatggagggagtagttatctggctgtttgatgctattggagtcaggggccactttagtcgatttgacaaaaccattttaatatcttatgcaggtagc

SEQ ID NO: 4865 - DNA, 2137 bp, Sorghum bicolor
  Intron number 1 from transcript Sb03g030050.2 (locus Sb03g 030050) derived from phytozome v7.0 (chr-ID chromosome_3; pos 58338066 to 58340202 reverse strand)
cctcgaccccgacccggcgcggccgccggttccaggtacgctcgatccatctccctgcccccctcttaccccgcaatgcttcccccgctccgcgcctccgcccatgcgaggtgtgatattcgcctttgcgaaggctcgagagatacgctgcagtctgctctgctctgctctgctctccctgaaattccgctgcttcccgttaggatcattcctgtagcgcaggcgtagccgtgcgtttgcactctgcagcatgcatctcggcgaggtgctatacatgctttggcgttgccaactcggctggtgaccgttagaccatgacgcctgtgggtgtagcgtcattcactctaatcttcaaaacgagcacgttacccctgtaggctatatatggaagaatgtaaaatcggtgcccgtacagtatgtcaagaatgtgaaaactggtcgccgtacaggatgtccttgtccttgtcgtctcacggaggtcacctcgccttgctttgtatgcgttggacagacgagagactactgatctagtcagctcttaactgagattttgcgtggatgctgtttacgattctgaatggtggtcgtagtggtcttggacagagttagattagccagtccgtcatcaaggtgacggtgcactcctcttgttatgattggtactgaatgcagaatatagcattagctcagcctgattcgtggacacgatcacatgatagaaaagaaaaccatcacttttcagcctgatgaaacaagcagatgttacttccacagttccactatcgagttttttctgtccctaccttaagtccttaacagacagcattagtaatgatgtgatttatcaaccgaaagtttgatactacggatggcttcatcaggctctaccactgttcagtggccctgtcatacagtgaaaagtgcaccgaaaaatatctgatgcgccacacttggttgctctgtttcattttcttcatgcagcggataggagataaaaaggatttcagaaattaagatgtacttagacacgaagctaaatgatcacttaaccttttaccttgtcaccaatggtgaaaagtatataatttcgatcgaagtaagtaccgtgcaatgggcacatggctagtgttttgcaaaataagagttcttgccttcacaaaaaggaggagtcagggacccaagatgatttaaatgttgtaaccgggaagattataacacacccccaccatctgcataagctttacctattctccaatggatacagttacatcttacaattgtgattctcctccacatacactaaaaacatatctagtgttgacctgtaaggaccagggataagcatggacttgcaagttacacgaactgctaattgcacatttctggtatgttcataaatattagggatataattatattagtttgagtaatccagtttcatgaaaatctatggtagtggtagcagcttggttcttttaatgaatttgagctggaatgatgcttggatactcgtgtgaagcctacaactacaaaatgttttttaacccgaacacataggagagttgcacatcgttttattaagaagaaaaatggtggagagcttacaactaattgcaatttgatgatcactactattcaccgaatgatgaagcagacattttggaagttttatttgcgcagatgatatttttcttaaatataatcccacatatgtatcataaaaatctgcaggcattcacaaaaaaaaaatggggcatgatgaagctgtagttactcagaattcagtaaaagcaccgtcaccacccaaggtaaatacattgagtaattccttactgatttgcaatcattggatttatccaaggctaaaaaaagaacaaatcaaatgcatagaaaagtcccgtaaaggctttattgggactaaatgtcgtctagggttagtactgtaggtgtccttttttctttcctgtgtcattgttacaaaggaacagaaggttttacatccgacagcaataaagcatatatatataatgctctcaaggatttttttttctagttacatgcatttatcggtcgactatgctggtttggtgtctaattaatagctgactgttttgcaggatcagccagctatttatcc

SEQ ID NO: 4866 - DNA, 932 bp, Sorghum bicolor
  Intron number 2 from transcript Sb10g029320.1 (locus Sb10g 029320) derived from phytozome v7.0 (chr-ID chromosome_10; pos 59155710 to 59156641 reverse strand)
cggtgctgtcgtcaacggttagttaacgctctctctccgtcgtctctgtgacgtttccagatcatcaggggtgaattggtttgggttatggatgctccatgttccgtggaattatttagttgaggcgatcagggaatggattggattaggtagccaccagcaatgggagaacagtaattgctgggcttttggaccactgtttattgaaataggataactgacgagattcaacctgatatgttgatgtaggttgctagctattctatatcaactttaaggattcacattgtcagaataattgtggttttctaacatcgtatcttctttgtccattggcgattgccgattggcttctgtaaactatctatatacacaaccataagttgttcatttgaaattgctaattctttcctgagattgtactttgtgtacatttcttgtaagtatttcgttgctttggtgtcttgcagattatggcattcaaaagacaacacattttgtaagttgtagatttggtaggttgataacgtacatatgtgaaaatatggaaaagaaataatgataaggtcttgcattatatatatatatatttcgacggtttattatacgaaagacaatgtaacaaattgcttgctgattgaggaacaaactaggttcagaaatgagtgataagtgcttaattcgcaggcagattgaacagtaaacattatatatataattcaccggtttattatacgaaagacaatgtaacaaattgcttgatgattgaggaacaaactaggttcagaaatgagtaataagtgctcaattcgcaggcagattgaatagtaaagcggcaaccaacagactagtttgtaggccagaatgtcctaaatgtaactttgtgtgatctttcaggaagccactatcgatataaagcttcctagaagaag

SEQ ID NO: 4867 - DNA, 2553 bp, Sorghum bicolor
  Intron number 13 from transcript Sb01g045550.1 (locus Sb01 g045550) derived from phytozome v7.0 (chr-ID chromosome_1; pos 68636241 to 68638793 reverse strand)
cctttgcgacatttatacaggtagacttgctcctcaacctattgtgtggtgtggatgttattatacttactacttagcatcttctgttcgctagaaatgaaataatatttgcattcccagtagaaagctttggtgaattattaaaaaaaaagtgttaccagaattgtacttggccacatgtcgctgtctctgatataccccatttcaaccctagaacttccgctcctctgtgttcatatttgctgagaaagaatgcttgtgacaggtattgcattataagctgtacaatgacccttggcgtcaaggtctcctgcaaacaaaggaaactcggctgccgaacatctgctcaagaacatcctgaagtgtttagtcaggcagaattacaactgtaaagaataggcatacatactcctgctccctctcaagaaaaaggatagatctgacatactcttaggaaggaatttacagatatatcttacattctgggtaatgttcttttgactgatactcaatttagatcatttcctgaaaaaagaaaagggaaatgcaccattttcatctaccaaaaacatcgatagcatggatcgtaatgtcaagctacgttggctttcactgagaaagaatcagattttgttgttcagtgttattttcgtttgtcgagcaaattaaccctaatcgagcagatgatgtacgttgttatgaatcagttgccactctacatggttaacgtatactcactccggtccaaattataagttggtttaacttttttggtatatcaattttgctatgtatttagatgtaatgtatgtgtagatacgtaacaaaatctatacataaaaaaaatcaaagtggcttataatttgggacatagagagtaccatgtatattttgcagcaaactacaagatgtcggcctgcattccggagggacagctgaatgtgatatgttgtgaacttgtgatatacattagcacggagcacgcagatggtgtcacacatggacatgcttatccgcgtttgccctaggctgcacggtagtagagccggtcaaacaagcagatcaatcgcacaagacagacaacaggaggagggctcatcagggatcgcatgcctctgtacatctgacgtggaggagagcatgtgaagagcacgctcgtgagagccaagaatgctgtgaggtggatctttacacctcgcattcatgccgctcttattaccatgacgacgatcgaatcaacgtgctcgccttagcttgtttcggcccgtacgtcgtcctctcgattcctcggtgcatatccaccaaaacttagcgcgatcggcaattccaccacaattaatttgttcatttcacggaaataaatctaaatcaagtttcgaaagttgatctacgctggctgtcatcaaaagacagctagaaagaaagaactgtttaattcaaacaaataagataaatgataaatgttattcctctaaatcaatatatttatttagtaaaaaaagttgtcagtatgtaatgttctaggaggtagaagaattacttgttccatgtgtataggaaccaaaatatttctcagttgaaccaaaatatttctcacttgaaattacatccaagagtgtggaaattaaaatcacactgaaaaagggggagaagatggtgaatgaattccattcaaacgcgcttataatcagaaagtggatgaattgggtttttggaaatccaatacatatatagtgatatagatagatagatagatagatagataataaatagacaaataaagcctaataaaactaaaccgaacaacaagcacttcttcgttcgtcagaattggacagcaggggacggtagatgattttctttggtttggtttctcgatcgatcggtcttattggacatgcattcctagagatgcctaacggtcacatgtggcgcctccgacgggagttcacgctcacaggtctgcaaaaggcgcgacaccaccgtacatacgccgagcatgcatgcattcccggccgtgacaacatttaaacccacgccccatgccggccttgccgatccccgcgcgcgatagcgccggccactctaccctactaaacccccgcgcctcgtcacactctcctcaccccacttcactacactccccctccgactttgcatgcattggagttcaaaataaaccctccctctccccacgctccgctccacggtgatcccaattcccatggagagccacggcggccggaagcgcgcgtggaagaagggcccgacgcgggggaagggcggcccgcagaacgcggcgtgcgagtaccgcggcgtgcgccagcggacgtggggcaagtgggtggccgagatccgcgagcccaacaagcgcacccgcctctggctcggctccttcgccaccgccgaggaggccgcgctcgcctacgacgaggccgcgcgcaggctctacgggcccgacgccttcctcaacctgccgcacctacgcgcctccgtctccgccgccgccgcgcaccagaggctcaggtggctcccggcctccgccgccagggg

SEQ ID NO: 4868 - DNA, 1423 bp, Sorghum bicolor
  Intron number 6 from transcript Sb05g026880.1 (locus Sb05g 026880) derived from phytozome v7.0 (chr-ID chromosome_5; pos 60866256 to 60867678)
acatcactatttagtttgaaggtaaacagaaaaaattttatcttatgagcatcaaaataaaatctgaattagtacaataatttgtgccagttgcatcttgttaattctcatggggccttgacttcaggaagaatctagctgttctattttttcagttttcaaatataatgatgtttttatacttataggccatactatggatttggtatatttgtggtgtcccacatagtaatgcatttgtccggttgcttgtatgatactctttttctttgcaaaaccaagtacagaaccctacccctattagggcatgcgagagactaaggccttgtttagttccaaacttttttgggccaaaagcaaaatattttgtgtttttgcattttggaagtaaatggggtcaaaaaattttggccttaaactgtgcagtcccaaactgaggtattaaatacgggttatttgtgtctctgttttgcaaaatgttttggaactaaacaccaaaaccaaaacattttggtgttagatttttagtgggttgtttaggttttggggtttttgcaaaaaaattccaaaaactaaacaaggcgaccagcaaatctcggcacagatgaagtcacaataggtgttattgacggacacataagaaaatattctgaaaaatgcaagcacgcgtgctatgtcgatgatttcagtccaagtggacaagtttcattgcatggaacgttaccaaatgaggtatactgtcagttcgcacattgcacagattttaacataacttaagggattactaaaatgacaaatgtagtcatcgattaaaccttattgatttgtttctcctagagtaatgaattatttttaaacaatctctgctaaacctgatcatggccatcatgtatcgaggatgccttatatttcaatatcaaatgcaacattgtaatgtaggatgtacggagtagtctacaaatgcaacattgtaatatgttagcatttggtacaacgggagcaaacaaatatttctgtgcattaatgactttaattatacattttaatagtataggtgaagacatactcatacaaataaaggaagtcgttttataagtctaactttgactccttgtttttataaaaatatttatcaaaaagtggtatttgtatattttataggaattatttttcaagataatctatttatatgatttttatatttccaaactcaataacttaaaagttatttatgatttatattttcattgtttgacacaaaccttgtccaaaacgactttctttacgagtataaagggagtatgaacgttttatatgcactttcattattttaatacttattggggattggcagccataattatggttgttcacaatcctctcattttaattctcctgtaattttgtttgtagggccgaaagg

SEQ ID NO: 4869 - DNA, 1538 bp, Sorghum bicolor
  Intron number 9 from transcript Sb01g010070.1 (locus Sb01g 010070) derived from phytozome v7.0 (chr-ID chromosome_1; pos 8910442 to 8911979 reverse strand)
gcagttccctaaccaggtacttgtcttgcctatgtactctctaaaagttaaaaatcctgaagtgattgagctaccatcttgaggatgtaggaataacgtgacatacttggctgcttggatacttaaatgcatgtgacttctcttcagaattgatatttggttttcaacaaattttgttgcatatgaacactttaggcatattgatcgcttcagaattgatattcccaacataaaatatttttatacatcctctgaccatcccactcatcaattcactgttgtgatctgtactaatttcctcatcattttcaaagctgcaagatctacattaaaacacctatatcaatagtttaagaaaactacaaattgttaatttggatttggactgtccaccttcaagctagcgaaccgtcgactctcttatggccttgccaagactagtatgctagatagttgttgcgctccgtgcatagctattctggtgcatttaggctgttagagagaaatttaggagaggttagtgaataggagagataagcgagagaactgtgtctaatcggtgtcgaactgcggtgctgtgcgagagtgataagagtcgcacgtggtggcattgaactgaatatgtaggctgttgtgttacttgtgttggtttgtttgctgctagttactgttgcccctcgatcttcctgcacaggtgagcaacctgctcaccaacactcacacactcacggctagaggtagaagaagggctcttggagaacagagcacacacacagcacaaacacttgttctaaatttgcagcaattgaactgatttgcttcattcattgatatgcctagtatatatacaagtctagtaccaactattcggtacactagcacaagggtgagatcacccccagctactcctacatggctgaagtaagccactactactagtggccatactcgtacaaagtagtacatgagatagtggcctattgccatacatctacaggaactaggatggacagcaagagctgaccaatcaactaatctcctgctgcagcaaaaggtcaaaagagagcagcaaattatcttacagttacttgagttggatatgatgctaagaaatggtgaattttgctccaacttgagttatacacacatatatatactataaaccataggtttctcagaatagtttggcattcctatgaatccgcccatgtgctagctggtccatttctattataattaccaaattcatcgtgttggatctgctttcagtttgtatcactgctttggtctatagttctcattacattattgcatgttatttatctagttcaaactttacttatggtaaacgtttcagtgaaaatgcagtttttgctctattaacctgtagaattcaaatgactactaaactactactttcgacatgcaatttcactaatttttatctgtatttctttcgacatgcattttctttcgtttttcttaggtctaagatctaactaaagttttccgaattcatcatgcagcacgaagcaacc

SEQ ID NO: 4870 - DNA, 601 bp, Sorghum bicolor
  Intron number 19 from transcript Sb01g042440.1 (locus Sb01 g042440) derived from phytozome v7.0 (chr-ID chromosome_1; pos 65715642 to 65716242)
cccgcaaatctgcttcagctctaacattatctcaggtttttttgcttttgctcacatatttgattatgctattatatctgatttgagttgtcgttgctgccacagaagaaacagttgttgaaattgtcagttgtgtgctcctgttccacatatgtgcaaaagtatttagttttcctaatcttacctcccaagtatgaattggactatcttatgtagtttcatttctgctctaaggtggggtctgcctgaatttgccacctttatgaatactgtagctttgcataatagtgtgttcttttaaggtttcgcctctgaagctctgatctactgttggaagttttggctaaagctgctttcagctggaaaatagatttgctggctgaaaaactctagagaagtaacctgtcaccaccagaagtccatttattctttggtagcagacctcttgttctagcgctgctagctttcttcaacaatatgacaggagctttgttgaacaatgtttcattgatgtaaagatgcttatcgcctaagcagaagactaatatctatctttcaatatacaggagatacaaagatacgaagaagcacattcctcttc

SEQ ID NO: 4871 - DNA, 6522 bp, Sorghum bicolor
  Intron number 1 from transcript Sb01g016910.1 (locus Sb01g 016910) derived from phytozome v7.0 (chr-ID chromosome_1; pos 17116482 to 17123003)
gcctggatcgcgacacactccgttcactcttcacggtaagccgtatattcactgcattgtatggggagcaagttcgcatgtttggtcagccggattttctgaatttctgtccatacttcgttattattttttttatgttgctgcatttcgacaagaaagagataagggtatgggtttcccatgtgaactttgtcacaaaggaacgtctctttcataaattggtgtttcgtcacattgtcgagactcgagagatattgacgttttgtaagattctcgagagccatgacctattgtcaaatctatgaaaaaaaactgtttttcttctcctaacataaatactatatatacaattttatatctggtcaaaatgaaacaaatctgaatttgactaagtctcaataaacatatttcatgataaatttaaacatatttttttatacaaaaaatgttcaaacctcaaatcatttaacttaccactatcttaggcctgtttagtttcccacccaaaatttttttatctatcccatcaaatctttggacacatgtatgtaacattatatatatatatatatatatatatataaactaattacacagtttggttgaaaatcacgagacgaatcttttaagcctagttaatccattattaaccttaagtgctacagtaacccacatgtgctaatgacatattaattatacttagggtctgtctagctatctgctgacagatttttgttgtcaaaatctgtcaaatttttatccaatcaacagatgacagctcatccaaaaaaatctgacggatagaacattgaaatatctgtcaactaaaacataaatagatcatcccataacggcttcccaaatccaacatccattaacagcaaaaacaaaacgcactcttttgatttatggtacacccgtagctggctcactatacacgtctcactgtcgtcactgctcacttcttgttcttgctctctagcagccgcttcggctcaatgtcgcagttcacttgttgttcttgctctccagtagccgcttcagctcgatgaagatcaagaccacaatctggatcaggttcttcttcgcgacctaggtcaccaccctccctctggccaccaagagcacgctggtcgttcctctgccctcgccaccttcctcatccatctcagaattctctaacaacatgttgtggtggatgcacatctccttgcaagccggtatctgcagagcatcctattgacaaaaaaactaaatcatcacaactatggaaaaatagcagctatgaaagccatttagctctccaaaatcatttaacacactaagcatgtaacataataagcatgaataaaaaactctggctgcatgtgcacattgcaggttgacaatcagactataaacactaatcgagatgtgttaaggccctgttttgttggtgttgtgaaccgtcacatcgagtgtttgtttggacacatgcatagagtactaaatatagactatttacgaaactaaaaatacagctaaagaataatttgcatgacgaatcttttgaaactaatagtctatgattggacactaattaccaaataaaacaaaaatgctacaatacctgttaaactttaacacccccacccaaacacccctttaatggtcatacctactatctaggtattagatatccaagtcttagttcataatgacaagaaaccatctgggttctaaaagatattgatccccacctagagtacagcccttccaccagcatcatcaacactgagaaagccatatatcgcaaacagctatatcatcaacactgagaaacagtttgagttgttttacggaattccaaaaaggacaggtcttctgtctgaacttccctaagactagagtcgttgtagacaccatgtccagtgcaatcgtttagaacatatatagcttcaataaaactattatatacaaggagtggcgctttagctgcaaaaatgtaagcaaatgttaatcagtgacttgatacgtgttagttagtggcttcaaaaacaaaagtttagttcaaaaacaaatacctttttagatgttttcaaaaagatagtcagccaaatgccttatcttctcagactcatcaactaaagatggcagaaaccaaaggaagagaacccctctccattttacatagtccctgtggacaaaaaaagcagtctcattaaccatgacccaatattcaaaataaagcattatagaagtgattagcacctgcagcaacttagagagtaggataaaaacatttgtctccgtactacttcacagggatcacgtagtgcttttgttatttttgacatataactgcagaaacgtcacacacacaaaaacaagttaagcaactcaactaaattcaccaagaaaaaacaaaggtcaaactcaaacataaaaacaataatgcaaatcaacacaacacacatagaagtcatcagctgcccgaacctcggagtgcagcagctccaacagcagaaaaaaaagcagcagcagcagctccaacagcagctcaaaaccaacctagagaaaactaaaaacaaagatacacagtcacacttacacatagacccccaaagctagcatacaaatacacaaacaactataaactaacaagaaaaaaagcctacaaaaacacacacacagagatactcacacacaaacaagaaaaaaagaaaaagacccacaaaacacccacaaacagcacaaacacacctaaagacacacacagacaaacacacacacacacacaaatatagctgcacaaacacacgtaaagaaacacatgcacacacggagacacacacacacacacaaagaccaacagagccaaaaaacacatgcatccacaaaaacaaaaacattcacaaacacagacacacttacactttcttatagacccacacaacacaaaactagcacccacacaacctgttacccacaaagagacatactcacactcacacacacacacaccaaacaaacaaaaaaaaggaaaaaaatgaaaaagaaaaaaaaagaaaggaaaacatagtgcccatgtaaaccataaacaaccacttaatgattctttgttagtagatatacataactatatagcagcgacaatgtgactgatttacacagacaagatagaaaaatgtaaaggatgatgctaatttgtaccatgaatctaagatagttgcactaccatggccaaataattcttttactcgcttagttgttttaaatatgtggttggaacatggatctatataatgcagtacaatgatgaatattttttatttgtaagcatagttccatggattgataatgcagtcaagtgacgaatatttgttctttgtaaaatacgagaagtcacaatttccacatatgaacttatctttaaaaacaaagacatgtcccataagctcatttataggtgttaaataataaaggaagcagcagagtactctgctagtatgtaagcctaagtgcctaacatagacttctagagagcactggtaaaatcttgttcttagagctttgtttgatcacagccacaataaatactttcaagcagaaaatgatattcatatgaaatactgattgtagagtagacaaaattaccttcaccagaacctttgatttcctcatgatcttcaccacctgaccaacatatgagccaggctcttgaagcaactgcaactcttcccggaacattctaactgaaaaatcaaaattgcaaagccaaaattagagtatggtaatcagaaaacaataaatgtaggaggatgtcctgctcctgaaacagagacagcgggaatataataaatcctaaacaaaagcatcatggtgcaatcatgcaagtgaatattactccactaggtaatgggcgcatggtgatcatcaaagataatttcacatggcaaattttcaactagagccgaatttagtttatgatttatgttagaatgtcacacaataggcagccacaataccacaatcatgtcaaagaaacacaagaattgaataatgatagataacctcagaaatacataaacctgcttgaaatattatcctaacaacccgacaaaaatgtggtagaacaaaatcgaaaagacaacataagcaaacacagacaagcaacaacctaagctagagcggcgtgtagcacgtatacgcagagggaggcacgcgcccgccggcaagcccacttggcctgcgcacacgccagcacctgccgtccatgcctgcctgtgcacatagctgatgcacacacaccccagccccgccgcaactagatccacagctacaacccctgccgcgaccaaatcaaaagccacagccactactgggtttgaaacaactaccatagccaccgctgaaccaaacacacacacccacacacaggtgacggacagagcgagagggcttgccgccgcgttgctgcctccggccccagcgcccgcgcccgcgccctatggtcggctggccgccccggtgcaccaactccctaccgcactgccgcccctcgtcagcgcatccggctctggccaccacgtcgcccaacctcaccccgcggctcgcccctcgcccaccaacacgcactagctcctcaacacaaaagcaaaatcaacaaacaaacatacaaagaagaaatacacttacaaaaatcgatggggcatgggctctagtgcggtcgtcggcatgggggaagcggtccggagatctcaaaccaccgcaggccgcgggcacagcggaaagcggcgcgcgaggcttagccatgcccaccccacagctcgccgcagcttagcggactgccgccggtggctccgccccacccacggtctggcgcggcgcaaagcgaaagcggcggcgaggccaccacccgtgactctcacgaagcggagaaatattggggaagaaagaagcggtcaaaggaaagaataacaggttatcgggtttcggaagatctagttcgcggacccatcagcgtggcggacccgtcagtaaacctagattgctgcacgaatctctaaacacaacaaacggcctagaatctgacaaataaaagataacaaaatctgtcaacagataaatagcaaaactcttatacttaatagatttgtcttgcagtttctagatgagctatgtaatttgttcgagaacatttatctatactgagagaataccatcattagagcttgaaatacatcctataaaatacgagtattcataccaaatagatatattatgtatcctgattattaatactagtaatatttatagtttttacaaattttgtcaaatttgacttaagactatgttaaattgcactttttcgagtactctactccctttcttctaaactgtatattcttctgaatgttttaggtaactattttttgctaaatatgtattatgtttagacagtaaaaaccatatctttaaaaaatatcaaactgtttacaacgaacagaggaagtagtacacactgttcaagacatttagttcgatgttcattctttgcacatgggtgtgtgcatgttttggccaaccgtgttttctgaatctcggtggtctaaactccaaaaggtcttaaaagtatacttcataccttccaaatttaaactgtttttgatatttcctaaatacatagtttttattatgtatatagacataatgtaaattatagtagatctagaagagtcaaaacgttttataatttaaaacagagggaactgaagaattttgaaacttgctgcattgagtgaaggggatgttttcagacagctctatcgaaacagagaaggtaatattgtctcctacagaacgtatgatatttggtaaagttctcgaaagaagtcggtcggtccatttgcaatcgagtcgaatagggatgcccttccaatccatatccacgccgctatattttataccttatcgataaaagatgcatacagaaaaatgtctaaacgtctgacgtcccacctttctgccttaccttttactccatatataatatcttatcttatcttgaagactaaatcatgcaatttttcatcattttaaaaataagtccagataacaaatactatataaatttagatttttgctttaccatttagtactgattaattttttttgggagttccgatctgaatattattacaaacaccaaccttcatcccttcctacttttctaattattggtaacgtttctactaattaacggttcaaattgtaactattgcatttcttaataattcgcagaaccatctctccccctttaaataattcctcaatatttctttcttattacactcatgcaaatccattatctattgcacccaccggtcaaaaacacatatgacgttttggatgtgacatggtgtccaatgtgtatttagtaccactattctctttgatagtatatcatagttggttcagaaaaattaacatcttgtttatgttttaggatttgttttctgctgggagtgacacaagctccag

SEQ ID NO: 4872 - DNA, 15313 bp, Sorghum bicolor
  Intron number 3 from transcript Sb10g014850.1 (locus Sb10g 014850) derived from phytozome v7.0 (chr-ID chromosome_10; pos 24280899 to 24296211 reverse strand)
tcaaggtaatacatatatatgtattttcaaatctccagttatgtattagagcagaagcattacattcagaatttggataaatttttctgaaatttagctacataccatcagtgtcttctgctttaaagagatgccacttgagaaactcgttttatgttctacgccactagtaaaacctcatttagttttttctcaaaattaaatataactggttgcctatggccggttggctgtatttgttcctatctctctacctgggtctgcaggcaccaccttgccagggagtggtggtaatgattcatgcaaaacaaagtgggaagggtaaaattgtctttatttttttgttattttttttttggggggggggggatgttgggagacagttgcttaaaattcatgagaaaattatctgaaagtgcagagttgccaccatttcattagttgatgcaagggacatttatctagtcagtatggcaactaggcaagttttattgtggcatgatcctcttgattatgttctctccatttactttttttcctcgaactacgcaggagagctgcgtgtcatttcattaaggtagaaataaaatacatgagtctggttagaccctactcgagtacaaaaacaccaccaacacacacccactcacttaactgaaacagccacgccacaaactatattgatgttgaccagacaaaagagcctgccttatacccccaaggctggctccctgaccaagagttcctggagctttcttgctccagctgtcatggtcgggcgcacgtataccaggcgtactagggccagggacgtacgccgtgcaggggctagagtccagggtgcccacgagcaggccagcgcgcggctaggagaagtgcaggccgcggcagctgcaagtggctaggagggaaagataggattttctgttagggggactccttgatttagggagatttgttactcctttttattataccagctcctatatattctgtacccagggatcaataataaatcaagcaatgaattgttatctctagtctctctctcccaaatctctcaagcctgcggcggaggagcaaacctcgccggagaagacggaccgaggctacgaactccgtagccaagggccagctaccctagggctggacgccctttttttttttttgacaacctggtatcacggtctagtcgatccttgcctccttccactgccgcgcagccaccagaaccatccatagccgcaagccctagccccctgccgaccgctgccgccaatccatcgtcgccgtcttcgtcatccgtcgcctcctgcaccagccccatgggtgacgacctgaagggtgccatcgaggcactcaccaagaacgtcgtcgtgctgcagaagcacgtcgaagccaacgccaaggccatcgccgacctcgccctagcccagtcgtcctctgcgaggatgggacgcggcctagggggcgaacaccaccaggatcggccgcctaagcactggcgcccggagttccccaagtacgacagcaagagtgatctgctggcgttcctgaaccagtgagtcgtttttccgccagcagcgcatcatggcggaggaacgcacctggatggcttcctacaacctccaggacgtggcccaactttggtacacgcaagtccaggaagatgagggcacgccgacgtggccgcggttcaaggagctcctcgatctgcgcttcggtctgccgctggttgcagctcccctctttgagctggcatcctgccggcgcacgggcacggtcgaggagtatcaggagcgcttctaggctctcctaccacgcgccggccgcctcgacgaagcccagtgcgtgcaactcttcatcgggggtctacttccgccgctcagcctccacgtctagaaccagaaccctcagtcgctggcagcggccatgagcctcgcacggtcattggagctggtggagcagtactacacgtcctcgcccaagggccctgtccggggtgtgctgccggcgccgggaccgcgccctgctctgcccgcaggggctaaacacgcgcagctccctgccacggtcgaaggtcgcccggtcaagcggctgaatcaggcggaacaagatgaacttcgtcgcctcgggctgtgctttaactgtgacgagaagtataaccgggggcataacaaggtttgcaaacgcttgtttttgtggacagcatggaggatgaggacgaggacgccaccgatgacggagcagacaccgagacacccgtgttctccctccacgccgtggccggcgtcccagtgggcaatccaatcctcctccgcgtcaagctgggcgctgtgaacctcgtcgccttggtcgatacgggctccacgcacaacttcattggcgaggcggctgcacatcgcacggggctccctgtccagccgcgcccccgcctcactgtgaccgtcgggaacggggataaggtggcatgccctggggtcctgcgccaggcagcagtatccatcgagggcatgacgttcaacgtcgacttatacgtcatgcccctcgctggttatgacatggtgctgggcacccagtggatggccggcctaggacgcatcgcgtgggatgtcgccacccacaccctgtccttccagcacgccagccaggaagtctgctgggccggcgtggccacctccgacgctccagccgtacacactgcgaccaccagcgagtccctcttggatgggctcatggaggcgttcgccgacgtcttcgctgcacctgccgtcaaggggccgcgatcaccgcatcggcctcaagccgggcgcggcaccggtggccgtacggccctaccgatacccggcagcccacaaggacgaactggagcgacagtgtgccgacatgatcgcccagggcatcgttcgccgcagtgactcggcgttctcatcgccggtcctcgtcaagaaaccagatggctcctggaggttctgcgtcgactaccgcgcgctgaacgcgctcaccgtcaaggacgcctttcccatccctgtagtggatgagctcctggacgagctccatgatggcgcccggttcttctccaagctcgacctacgatcggcatatcatcaagtgcgcatgcgccctgaagatgtgcacaagacggcgttccacacccatgacggcttgtacgagttcctggtgatgccgttcggcctttgcaacgcgccggcaacatttcaatcactcatgaacggcgttctctggccgtttctccgttggtttgtcctagttttctttgatgacattttgatatacagtcagacatgggcagaccaccttcgccatttgcgggctgtcctcttggagcttcgccgccagtacctcttcgtcaagcgctccaagtgtgccttcggcgtctcgtcggtctcctacctcgggcacatcatctcagtggccggcgtcgctttggatccggctaaggtgcaggccatccatgactggcccgttcctcgctcggcgcgggcagtacgcggcttcctcggcttggcggggtattaccgcaaatttgtccacaactacggctcgatcgcggcaccactgacggctctcctcaagaaggaggggttcgcctggggagtggaggccgcggctgccttcacgacgctcaaggccgcggtcaccacggccccgatcctcgccatgccggacttcacaaaggagttcgttgtcgagtgcgacgcatcctcccatgggttcggcgcggtgctcgtccaggagggacatccggtggcgttcttcagccgccttgtcgcactgcgacatcgagccttagccacgtatgaacgcgagctcataggcttggttcacgctgtgcgccactggcgcccatatctttggggccaccgcttcgtcgtcaagacagatcattatagcctcaagtacctgctcgatcagaggcttgcgacgattccccaacatcattgggttgggaaactactaggcttcgacttcgcggtgaaatacaagcccgggacggccaacacggtggcagatgcgctgtcccgacgggacacggctgaggagggcgctctgctagctctctctgccccgcgcttcgacttcctctccagactgcggctgctgcacgccaccgaccccgccctggtcgcgctcagggaggagatcgtcagcggtgcccgacgtgccccgtggtcggtggtcgacgacatggtacagttcgctggccggctgtacatccctccggcttccccgctgcttcaagagattatggtcgccacggacgaggacggtcacgaaggggtccagcgcacgctgcatcgcctccgccgcgacttccacttccccaacatgaagcgcctggtccaggacctggtgcgtgcctgcgtggtctgccagcgatacaagtcagaacatctccaccctgcaggcctactgctgccccttccagtaccgcagggtgtctggacagacgtcgccttggacttcgtcgaggcgctgccccgcgtccgggcgaagtccgtcattctcacagtggtggatcggttcagcaagtacagtcacttcatcccgctggctcatccctactccgccgagtcggtggcgcaggttttctttgccgagattgtgcggttacacggcgttctgcagtccttggtgtcggatcgcgaccctgtcttcacctcgacattttggcgggagctcatgcgcctgacagggacaaagctgcacatgacgacaacttttcatccacagtcggatgggcaatcggaggctgctaatcgggtcatcatcatgtaccttcggtgcttaaccggggacagatttaggcagtggctgcgctggcttccatgggcagagttcgtcttcaacacagcatatcagttgtccctgcgcgataccccattctgcgtcgtgtacgggcgcgatcctccgaccattcgctcttatgagccgggggacacaagggtggctgcagtggcgcgcaccatggaggagcgcgaagagttcctgggcgtcatccgctaccgccttgaacaggctcaggcggtccagaagctccattatgacagggtgcatcgccacgtccagtacaccgtgggcgactgggcgctgctcaagctacgtcagcgtgcaacatcttctcttccgcaggcagtgaccggcaagctcaaaccgcggttcttcggcccctaccaggttacggagatcatcaacgacgtggctgttcgtctggctttgccaccacgggcgcgcctacatgatgtattccatgtgggtctcctcaagaaatttcgtgggacacctccagcagcgccgcctccgcttcctccagtccaccatggcgcggtggctcctgttccagaacgggcagcgcgctacaggttagcgcggggtgtccgtcaagtgctcatccagtggcaagggttgagtgcagcttctgcaacgtgggaagatgtggagtctttcgcagccaagtttccagacttccagctcgaggatgagctgcctctcgaaggggggagagatgtcatggtcgggcacacgtataccaggcgtactagggccagggacgtacgccgtgcaggacgagcaggccagcgcgcggccaggagaagtgcaggccgcggcagctgcaagtggctaggagggaaagataggattttctgttagggggactccttgatttagggagatttgttactcctttttattataccagctcctatatattctgtacccagggatcaataataaatcaagcaatgaattgttatctctagtctctctctcccaaatcagcatggatgggccacttccctcatcagcatccacacccatgaataggccatgatatattttttctcacgatagaggctctgccacaagtatagctatcatactgccatgggatggctttgcatggatgtagtgaggaagccaataaaaacctccagggacttttagtggaggaaggaaggagggagagatgtgagttctgctcttcggagatgcttagttgaagggtttgggaaccatgtatggtcctaagcatcatcgtaagggtttcaactcattggttgtcctggtggcatggtagatttggaagcatagaaattgttgtctttgagggatctcagcccaattttaattccatcatgcgggataatagagatgaggccaagactcattggtcatgcatcatcgtaatggtttaaagtcattggtcatccttggttttatttagtttttgtgttttcttctgttttattggtcatgcctttctaaggggttgttcgagcacctagactccttatccttctagtattggttttatttagttttttgtgtttttcttgaatacgcagctctcctgtgttcgagaaaaaaaagccaatggcttatacatctcgtggtagatggtgcttgtatggtgcatttcattgctgtaatgtttgaggatttcctcttgtagccttagggactagggctagccacactttagagagaggaagcggttggcagcagcagcaggtgtccgggcactgggaaggaggcatgcccgctggcggtgtgggaaggctagagagctttagggttttacccctagattacttaatagttacatccccccttatatttatagggaggatccaacctgtcctgacttgccttgctttacaatcagtcaaattttctggattcttcctaaacccagacggtgaacggatgctagaccggctggtcaagtactcctggtggcacccttgctgcctgggtttgatcccccacgggggcgaattgcagtgccggaggtaaaaaaacccaccttgtctgctccgcgttactcaaagcccaggtttgtggcaccgacccactcacaaggtaatagggccttgtgtgtgggcagaatacgaggtttggaggttttctcggactgggtgaggagtactctacttaatgcgaaatacttgggagcgcatgctattcccccgcagtctgagttgtttttttttcattaacccaggcctaaatgggcttccagtgggccgctacagtacccacggaaactgttcgtgcaagcctgtgctaggctgcagtgggcccttcatggtccatttagacccatgacataaagaggcatgatgcttgagattttatcctctcgagtcacaaagtgacattttactgtttcggagagaatgcagtcaacaaattttaagctaatccatgcccacagtatctcgtatacatctgatagaggatgaactagctatattattcattggtaaagtctagaggacaggattacatatatagagaggagagagttcagaacagtagtaaagaggggaggaggcctggccgacagccagggggagttcccatgcattggccagggcaaggcccaaggcttccagccgttgagcaaccaggcattaagccactaagcagtaaggcatttaagctactgagcagtaaaggtatttaagccactaatacccaactaccaccagtacatagtgaatacgctaacacccccccgcagtcgaatctagagcttcgcgcatatgaagactggagcgaaattcttgaaacacagaggtcggaaggcccttggtgaagatgtcagcaaactgagaggtggtgggaacatggagaactcgaacatcatcaatggcaacccgctcacggacgaaatggagatcgatctcaatgtgcttcgagcgttggtgttgaactggattggtggacaaataaactgcactaacgttatcacagtagaccagtgtactccgaggcaacagagcatgcagttcctgtagaagttggcggagccaacaggtttccgcaactccattttccacagcctggtattccgcttcggcacttgaacgggagactgtgtcttggcgtttggaagaccaagaaaccagattggtgccaagaaacacagcatagcccgaagtagtgcgacgagtgtcaggacacccagcccaatcagcatcagtatagaccactagttttgaaggagcagagggctgaaggtggagacatgactgacagttccttgaagataccgaagaatccttttaacagcagccaagtgaagttctcgaggatcatgcatgtgaaggcacacttgttgaacaacataagcaatgtctggctgggtaaaagtaagatactggagggctccagtaagactgcgatagtgtgtaggatcagtgacaggggtaccatcagtagcagaaactttggcacgagtgtcaactggtgtgctacatcagtcataccagcccttttgagtatgtccatggtgtactgctgctgtgataagaagagaccacctgagtgctgcttcactgaaattcccagaaagtgatgcaaaggaccaaggtctttcatggagaattcttgttgcaaggcagtgattgtgtggcgaagaagagaggcattggaggccgtcacgacaatgtcatcaacatagggcagcaaataaacaatctcattgcctcggtggtagatgaacaaagaagtgtcagacttggcttcaacaaatccgagagacaagaggtaggtggcaaaccgactgtaccaagcgcgaggagcctgcttcagaccataccgagaattgttgaggcggcaaacatggtcaggaagtgcagtgtcagcaaatccagtgggttggcagcaataaacagtctcggagagggtcccatggaggaaagcatctttcacatctagttgatgaatagaccactgctgtgagagagccaaagagagtactgtgcgaactgttgctggttttaccacaggactaaaagtctcatcatagtcaacacctggacgttgggtaaagctatggagaacccaacgggccttgtaccgatcaaaggagccatcaacatttaacttctgatgaaaaatccacttgctggttaccacattcacaccagacagtcggggaacaagatcccacgtgttgttggatagaagagcagcatactccttccattccattgcgaaaggagactgcaggatcttaagagtctcgtgataccatgatagaggatgaactagctatatattactaaagtgtttttaaatccagcaattgtaatacatataattttattatgaaaggagactgcaggatctttagatgtttcaccttgcgcatagtttggcccagctcgcctcaggctaccaatttccttctttgttgctgtttttttgttctgtttctgctgtacagttggttccttttgatttaataaaatcctaacagtggggctccccctgctgtttttttgggtaattaataaaatcctaacagtggggctccccctgctgtttttttgggtaaagaaagagtagaaaatggcaagtagctcatgaggatgataacatttccaaagtagccgaggtcgaggtgggtgtggtcgaagccatggatggggacatagccacagtgttagagtaaataggaatagtaccacattgtgtatccacataatgtgttagtcctatgtaccctatataatcagcccatgaggtccaatgcaatatatcaaatattccgccaattatattctccttcatggtatcattcgcttaggtttagattctaaccctagccgccgccgcttcggcactgcgcgcccctggggagaggacggtctccgccggggggcagcgcccctctttaggcgcccgatcctattgatccggctgccatcgtcattgtcgcacaacagatcgggatctcccctacgtcatcgctaggctgccgtcgctgcctcgtcctcgggctcaccgccggctgtcgccatcgacacctgatcttcatcgcatggaggcagatggatctcgccccgtcccatgccgccatggtggcggccaaggccggccacacgccttgaccctgcgatgccatggaggcagccagatctggcgtgtcgctgtctgtcgggcggatctgtccatctccacctcgctgatccacgttagcgccttcgaccccgcgtgtttgtgacccaccgtgcgccttgcgacgcccgatcgggacgcatcgccaccgtcgtgtcgtcttgctgggtacacccgatctcctgctgctgtatctttttggtttgctcgatcactgatcgggattgagtcgcccaccgcccgtcgacctcgtgctttctacttcgacatcggcatcgacaccgtcaccgagtatgagcaatagggctgctgttgtgtcgcctcatcgggccacaacactttgtccatgtgtacgcttcgccattgcatctccatcgctgtcatctgtgcagcgacgttgcagcggctgcgtcgggagtgggagaacatggatgtcaagcctggcgagccggtggaggattttgccctgcggctgtcaactctgcaccagcagcttgttcttcatggtgacagggacatcgacgagaagcgtgttgtggagaagtttctgcgcacggtgcctgccaagtacgcgcagattgtcgtcgccatcgagcagttcctcgatttcgaggcgctctcgcttgaggaggtgacaggaaggctcaaggcggtggatgaacgtgaagcgcaagctgtgacagagccagtgtccattaacggcaagctgctgtacaccaaggagcagtggcgtgcgcgtttgaagaaggagaagcaaggcgcagaagaagctagcggttctggtttcaagaaccagcatggcggtggctgcggacgcggccgtggtggtggacgcggacgaggcagaggtgctggccgtggtggcggacgtggagaaggcaaaggcgctggtcgtgttggccccaacacctgcctcaactgcaaccaggaaggccactgggcacgtgagtgtccccagccgcgccgtgaagatgcagagcgcggcggtggagggggaaaccgtgctggccgcggtggtggcaaccgtggtggaggtcgtggcggcggaaatcaggctgggcagcgtggtgggaaccaaggaaggcatgaggcgcgcgcccagtacgctgagtgcgatgaagatggtgctctgtttctggcacatggcttcatcagcctggaacagagcacgccggcgcacagctacacggcacagcacgtcgagctctctgagccacgcgctcgcgcctaccttggcgtggacgaagaagaggtggacagcggctggtacctggactccggcgcgacgcattacatgaccgggcgccaagagctctttgctgatctgaacaccgacgttcgaggaacggtccggttcggggatgcgtcgaaggttgagatcaagggcgtcgggtctattgttttccaagctaagaccggtgagtagagggttcttcatggcgtctatttcattccggcgctgaagaactctatcataagtctgggacagcttgatgaaggagggtccaaggttgatgatggcgtgcttcgcatctgggacaagagtcgccgtctgctcgccagggtacgcagagggaagaataggttgtatattctgcatcttgaggctgcacaacctgtctgtctcgcggcacgcaaggatgaagaggcgtggcagtggcatgagcgtttcggccatctgcacttcgatgcactccggcgactcagcaaggaggagatggcacgcgggatgccggtggtcgaccatgttgagcaggtgtgtgacacctgcgttaccaccaagcagaggcggcgttcctttccggctgcagcagcataccgtgcccagaatcagcttgagctggtgcatggtgacctgtgcggtccggtcacgccagcgacaccggcgggcaaccgctatatcttgctgcttgtcgatgacgccacccgctttatgtgggctgtgctgctgccatccaaggacgcagcagcagaagcaatcaagaaggttaaggtggcagcagaggtggaaagcgggcacaagttgaaggtcctgcgcaccgacaatggcggcgaattcaccgtcgcagaatttactgcatactgcgctgatgaaggtattaaacggcatttcagtgccccttattcaccgcaacagaacggtgttgttgagcgcaggaaccaaacagtggtggccatggcacgagctctgctcaagcaacgccagatgccctctcggttttggggggaggctgtgatgacggctgtacacatcctgaatcgatccccgacgaaggcgctgaagaatgtcactccttatgaagcatggcacggtcgggcaccaacagtcggccacctcaaggcctttggctgtgtggcttatacccggcggcttactcagcttcgcaagctcgatgaccgcggagaggctggcgtgtttatcggctatgtggaaggggccaaggcataccgtatctatgatccagtgtcccagcgcgtgcgtgtcagccgtgatgtggtgttcgacgaaggctgcggctgggactgggcatcaccagcagtaggcacaccagaagcagcgggcagtgagttttctgttgaattcccatgggcggaggaactccctgaagcaggaagttcagcgtcgccttcactatctcctccgccacatcctgcatcgcctggtttctctccggtggatgcaggagagcctgcagcagaagcagaggagcccgcagcggaggcagaggcgcctgcgtcacctagaacacctacaccagctccagcaagtcctcaggttgagcatgtgactcccctggaagatgatgatgaaagggtggatgcctaccatgacgatgaagaactccgctatcggaagattcatgacattattggtgatcagccaacccctccgccagcgcagcggctgtttgcagaactgaatctcacccattctggtgagcctacaagctatgaagaagccaaagatgatccagattggcaagcagcgatgaaggaggagctgagatcagtagagcggaatgggacttgggaacttgtttctccccgtcctggtcaccgtcccatttcactaaaatgggtgtttaagctgaagaaggatgaacatggagctgtaattaggcacaaggcaagacttgtggcccgtggttttgtgcagcaggaaggagttgactatgaagatgcttttgcaccggttgcaaggatggaatcagtgcgtgttttgcttgccttagcagcacaagagggatgggcagtacatcacatggatgtgaagtctgcatttttgaatggagaactccaggaggaggtttatgttacacagcctccaggttttgctgtaacaggagaagagaagaaagtgtacaggctgcacaaggccctgtatggcctgagacaggctcctcgggcatggaatgccaagcttgacttcactctcaagcagatgggttttgagcagaatgtgtatgaagctgctatgtacagaaagggatcaggtgacttcttactggtaattggagtctatgttgatgatttgatcattaccggagccaatcagcagaagattgaagctttcaaggcaaagatgaagcaaacctttgaaatgagtgatttaggtcttctgtccttctatttgggagttgaggtgagacaatcagaagggaacatcactctgaagcaaacccattatgctaagaagatacttgagcttggtggtatggcaggttgtaatccagccaccacacccatggaagaaaggctgaaattgagcaaggaaagcacagcaaaagaagtaaatccaactcagtacagaagactggttggcagtttgagatacctagtgcacaccagaccagatttggcttttgctgtagggtatgttagcagatttctggagaagccaacaactgaacatcttcaggctgtgaaaaggatcttgagatacctggcttgtactctagatcatgggctttgctacaccagatcaacaggcaaagcaaggtttgtgggttacagtgattcagatttggctggagatgttgattcaagcaaaagaacaactggatgtttgttcttccttggaaccagcctggtcagctggcagtctgtcaaacagagagttgttgctctgtctagctgtgaggctgaatatgtggcgatgacaacagctgcaacccaagctttgtggctgtcaagactgtttgcagatttgttgggaagaaaagttgaagtggtggaactcagagtagacaataagtctgctctggctttggcaaagaatcctgttttccatgacaggagcaagcatattagaatcaagcatcatttcatcagagattgtgtggaagatggtagcatcaagacagagttcattcccactgcagatcagctcgctgatatactgactaaagctttgggcaaaaccaagctggaagagatgaggagcaggattgggatcaaggagatcaagattaattgaagcaggtcttagggggagaaatgtagttaataagccctgcttcctaagcatttcttagataactgtgctagttaatttctgtcattaaagaccttgggtagcccaagagttgtgcgggtacccaggcagctattctgtctagttaaagctctagtgagctgtttgtaatcaatgcaatatctgtctttctctatatatatgaaggagacgcctggggttagttgcctcaaggctaatcaaaatctgtgttacctctaacagtgactgcagctgaagcctcggctcaggatcaaaacctaaacttgttatgccaggaaagcatagtagattggctataatgcgtgaaatattatatatcattgaacctctcgggtggtatataaagagtagagactttagcaacacaactctctggacacatacaacaataccggattacaatcctaaatatactgataatttaaaatattttgagaataatctattgttgatgaacccaagaatcctttctccctggtatgctgatgtggatgccaacaggatgtgcacccatgtcagattcaaacacttgtactgattcaaacacttgaacccatggcgaggtacaaagctattctctaaacagaaacttagtggtataccgcataatttttaatgcaagaaaacactaaggaaacagtgctcaatgaaaaacactacggggaaaaacaaagacttaggataatagtcatctcatgtcttaactgtttgtgctaactaaaataccatggctgggtattcttatgtggctacatcatgctatatgtttcagttgtctgtctttgatcatcattgggtgcatgttctaaattattttcgacattactaatcaatttcaggctggaaacatcttaatagatacaa

SEQ ID NO: 4873 - DNA, 1450 bp, Sorghum bicolor
  Intron number 3 from transcript Sb06g005700.1 (locus Sb06g 005700) derived from phytozome v7.0 (chr-ID chromosome_6; pos 14526300 to 14527749 reverse strand)
ccatcgatttcgactcacttgctcgcaacctccaggttgggtctcggtcttgctcttcacgacccgttgggatttgtgtgggattggttcgatgctcacgagctgattgctttaatgacgggccagggtctgttgagaaatggtgggatttaatgttcttgtcgattgtaccattggtagggctaactaattttgggttgggggagtggacttgtttgccgaaactgaagtgtccaatgtttttcgttttgctgtcaatttcttccagtcctttatgaatttgatttgaatgataaaaccgtgtccgcatagggtcacatttgctgaatttggggtaaaaggttttgctatatgactagttgatggttacttgacaatttaacagccttttggactttggttatgattctctagtcattgactgcgaagggaaaaacaaattgaacctttgcttttcaactattagccaactgataaataatgattacatgcaactgaattagaagggtatgtcttattcttgtattagatctttgcagtttccttaataaggctgattacacacaatggtaatgatgacatttaggcttgaatattgtctttttctgaagcattttagggtttcttattgttatttatctgatagagataaataaagtgttaacagtgttatcttcaccgggaacttatgtgcatcatcaccaaataaatattggtgccagtatatgtaaaatccagtccccttggttctgatctaatagcctgtgaatttataatgcttcaaatctctaaattagtatattggaacatggaaatgtctagcttgtgcaaaatttgacatccccaaccctaccatggctttgtaatgttttagcttttgaaaatgttggtagacttgctacccatggttttggtattttacagtgatggtttgccacttgacctgtagggcccgtttggcactgctctagctccaagatatggcacctccctggcgtatccgtgttacatagccgagatctatgctgcatctatagtttgtagattaaattagagtggtttaaatatttttatttgatctaatgagccatgtaaatgaacttaacatgcctgcagctctagatctatgattttctagagctacatgtgaccaggtctaggaaatcagatttcctagggctagagctctgccaaacagggccttatatgcatagttgtagatttgtccaaagtttgtaaaagtaacgcttgcttttgttaggagacttagcacaattgattggctcaatatatcagatgctaattctgcaattttaattgtatgccatttgtttagttcaggtgttaattgcacaaattttattgataactctgcctattttttttggtgttgataagtgcccttacagtcatgtctattgagcaggatcttgtgaagggtaaagataca

SEQ ID NO: 4874 - DNA, 12481 bp, Sorghum bicolor
  Intron number 3 from transcript Sb05g010340.1 (locus Sb05g 010340) derived from phytozome v7.0 (chr-ID chromosome_5; pos 21188548 to 21201028 reverse strand)
tccaggactccaggggaaaacaacagagggaaaaggtaaataacaaaattatgcaaatatcttgatacaaacattctgttcttgtgttgtattagcaatgttttcctaaacgctaaacagcggtcacccttcgtttagcgtttagactgtttacatggtgtttaaacggaattatattagtttccaaaaatatatataattatacatacgtgcatgtaaaatatcaagtgttctaacaaatatacatgttctgtgcacataaattaataagtattataatttatagcataatagcaaatcctcattcactccacattcactgattcacatgacaattaaaacatcattaacgagagaagttactagatgagtcaaattatagacaatagcatggtgaatcataattgacaattgggccagctgtttggcatggtctttaaaccagtacaatagtgcatagcatcacatgagtacatatattcagaatacagaatgtctaaatatcgttggtcattgctgcacaagaccatagaccaaagacaaatcagtaaataagcaaaatgacctatttttgtcaaggtgttaactgtcaagttctcggttgagttgtcaacgtgactcacacatcagggcgtcacgtgtcagcttgtttattgttttttttgtatgaatctgcaaaagcaaatttaagtttggttgccaatctgaaatgacaagctcactagaaccaatgtaatcatcagctccacattttggttcatttgtatatctgtcaattttcccatgaagtgctggccctaacacagtgaagaatgaaaacagagattgttgaattcgtaacaagctgtctgcacaagtatggaaacatggtgcagcatcagcacctgttggagcacggaagccccttcaaataatccatgatcataaataaatttgttgggcggatagtgagcagcaggtgcaatcatgaaactagtatataccaaaaagataaacaaccatcagttgggacaggaattcacagatcacagatcacaaatactctatatactattggacagatacttttgtcccacacttactcaaccagttagcatactatattaatggtagacaacaatgatgtgtcagagctggaactagtgtgcacggaactcaacatggagaattacaacaaaaatgtacatgcatatccactcagaatttcagatccagataaaatggagtactagagagtggacactggaggagcaccttcgagtgtggtgtggtcggaaacttgagtagttggagggctagaggaggctgcatgctgtcaccagctcactgtggccggcgtcggtgccggcgcacaagccttgccggcgcagctcgaggtgcacatggccacaggatgaggacgctcatgcctgacctcggcacataaacccaagcttgattcttctcgacaccttcctggagagcaaggacacaggcgcacggcttaactgggtggaggatgagaggatccatggagtgcggcggccaatcaacaagcgcggtcgcggaacaagtggcggcggggggcaggctcactgttgaataggaaataaggaaccctaatgcaacgaattgggtcttgctattatatatgtcctgcagattgggccaagattaggcgtgtgttctgggcgcaagttttggtggatcaaaaatttcggaaaatttcctcctgctctcggacctgtatctcctgaatggcccctttagtccgcccaggtccatttaactacgttctatgtcacctgtttcaaccgtttctcaacgtttacgcctgcgccgtttaacaggccgaatatacgctaaacaagatagtaagctcctgtttccgtttaccagaccgtttaaacggtgtaaacggcagtttaggtgaacactgtgtattagcccctagttttgtgtatgttctgttagtagttaacagatacatgatgttgcatggatatagtttccttgcgcatatgaaagtgctaaaatcttgttgcatattcagtacttctattggtcctaggaatatattttttcttgaattactcgtcataggcatgaatattggtagtcgtaagttacttagttacctatatttaatattttttcatatcctttatcaacacccatttattgttccatgtttgatgctcctgaattctaagtaatgtttactttcctgtatgattccactggaataagtgattaaatacaggttcaaataaatcattatggaactaccaaatgaatcattatgaccccgtaggtgtcatgtgcggccgcacatatgtcaggcgcaggcgcgcccgcgacatacgccgcgcagctgagcgtgctgggcgcgcagagatagggacagggcccaaagcggcaacttccagtggctagaatcaggggatagagtagctacaatcaagggattgattagttggctgttttagcaactcctacaattaaggggtctgggcaatccctagattagggggactttcctttgttcggttgggccaagagctatatatactcctgtaatcagcagagaatgaatcaagcaagaagttatcctattctcctctccctgttctgctaagcctgcggctggggggcataaccccgccggagaagacggccgacggctacgaactgcgtagccgcggtccggcaaatcaggggtttaacgcccttgacaacctggtatcacggtcacgtcgatcctcgccttcccgctccgctcagtcctccacagccgccgcccaccacaccagcccaccaccatcaccctcagccgcgccaacaccagccatgtcggagccctccatcgccgacgtgctggcgtccctaaagtccctcgccgccgagatgaccaccatgaaggcggacatggccgccctgaaggaaaagtctgcatcctcgtcggacagcggcggtcgtccggagggtacgcgcgaccttgatcgccctccaaagttccagaaactggactttccccgctatgacggcaagtccgatccgatgctcttcctcaacaaatgcgactcgtacttccgtcaatagcgcaccatgcccgaggagcgggtgtggatggcctcgtaccatctggaagacgtcgcgcagctctggtacgtccagctccaggaggacgagggcacaccgacgtgggggcacttcaaggacctcctcaacctgcgatttggccctccactccggtcagctccgctgttcgaattggcggaatgtcggcggacaggcaccgtggaggaatactccaatcggttccaggcccttcttccgcgtgccggccgcctggacgaagcgcagcgagtccaactcttcaccggcggtcttcttcctcccctcagccacgccgtccgcatccacaacccagcgacgctggcagccgccatgagtcttgcgcggcaggtggaactgatggaggttgaccggccggccctgcctcctcccagggcgcccgcgcgggggcttttgcccgcgcctgctccccgcgctgctctgcctccacctccgcagcagctggcgctgcctgcaccaccggcggccgtccagccgggccgtggagacggcaatcctcgccgcctcactccagatgaaatggcggaacggcgccgtctcggcctctgttttaactgtaacgagaaatattcccgtggccataaccgcttttgcaggcgcattttctttctggacggcgtcgaaatcgacgaggccggggacgacgcaggggctgctgagcccgacgccgaggcgccctgcttctccctgcaggccgtggctggtgtgcccatggcgggcaccatgcagctccgcgtggccctcggcaccgctgccctcgtcgccctcctcgactccggcagcacgcacaacttcatatcagtagaggcggcacggcgttcgggtctccctctccgccaccggccacgcctcaccgccctggtcgcgaacggcgaacgcgtcacctgcgaaggcgtcatccgcgacgcgcccctgctcatcgacggcgaggcgttcccagccgacctcttcgtcatgcccctggccgggtacgacgttgtcctcggtacccggtggctaggcgcgttgggccccatcgtctgggatctgggcagccagcgcatgtctttccagcggcacgggcgcacgatctcctggactggcgtggcctgtccggccgttccggcgctgcgcgcgacttcagaggccggtcccctgctggacgccttgctgcacgcgttcggggggctcttcgcagaccccgtcggtctgccccccaaacgtgcgcacgaccatcgcatcatcctgaagccggacgcccagcccgtcgccgtccgaccgtaccggtaccccgcggcgcacaaagacgagctggaacgccagtgcgctgccatgattgaacaggggatcgtccgccgcagcgactcccccttctcgtcgcccgtgctcctcgtcaagaaggccgatggctcgtggcgtttctgcgtcgactaccgggcactcaacgccctcaccgtcaaggatgccttcccgatcccggtggtcgatgagcttctcgacgagctccatggcgccaagttcttcaccaagctggacctccggtctggttaccaccaggtgcggatgcggccggacgacgtgcacaagacggcgttccgcacccacgatggcctctacgagttcctggtgatggcgttcgggctgtgcaacgctccggcgacgttccaggccctgatgaacgacgtgctccgcccattcctgcgccgcttcgtcctggtattttttgatgacattcttatttacagcaagtcatgggcaggccaccttcgccatctcagggccgtcctcgacgaactgcgccggcaccagctgttcatcaagcgctccaagtgttcctttggagtgtcctccgtcgcctacctcggccatatcatctccgcggcgggcgtggccatggatccagccaaggtgcaggcgatccacgactggccggcgccgcgttcagcccgggcggtgcgcgggttcctcggtcttgccgggtactaccgcaagttcgtccacggctacggggccattgctgctccattgacggcgctgctcaagaaggacggcttctcctgggacgactccgcggccgccgcgttcgccgcgctcaagtccgccgtcacggccgcccccgtcctcgccatgcccgacttctccaagccgttcaccgtcgagtgcgacgcatctaccgtcggcttcggcgccgtcctgatccaagagggccacccggtcgccttcttcagccggcccgtggcgccccgccaccgcgcgctggccgcctacgagcgcgagctcatcggcctcgttcaggctgtacggcactggcgcccgtatctgtggggacggcgcttcatcgtcaagaccgaccactacagcctgaagtacctcctcgatcaacgccttgccacgatcccgcagcaccactgggtcggcaagcttctgggcttcgacttttctgtggagtaccggtcgggcgccacgaacgtcgtcgccgacgccctctcccgccgcgacactgacgagggggagctcctggccatctctgcgccccgcttcgacctcatcgatcgcctccgccacgcccaggccaccgacccggccctggtcgccatctacgaggagctccgtgcaggcacccgcgcggcgccatgggcgctggtggatggcatggtcaccttcgatggccgcctatatattccgcccacctcgccactgctccaggaggtcttggccgccgtccacaatgacggccatgagggcatccaccgcaccctgcaccgacttcggcgggactttcacttccccaacatgcgccacctggtccaagagtttgtgaaggcctgcgtcacctgccagcagtacaagtcggaccacctccggccggccgggttgctgcagcccctgccgattccatcggcggtgtgggccgacatcggcatcgacttcgttgaggcgctgcccaaggtgcagggcaagacggtcatcctctccgtcgtggaccgcttcagcaagtactgccattttatccccttgtcacacccctacacggcggagtccgtcgcccaggccttcttcgccgagattgtgcgcctccatggcgtaccgcagtccattgtctcggaccgcgaccccgtgttcacctcggcgttctggcaggagctcatgaagctgacagggacgaagctcttcatgtcgtcggcctttcacccgcaaacggacggccaaatcgaggccgccaaccgcgtcatcatcatgtacctgcgctgcttcaccggcgatcgcccccgccagtggctccgatggctaccatgggcggaatacacctacaacaccgccttccagacttcgcttcgcgacaccccgttccgggtggtctacggccgggatcccccgaccatccgctcgtatgagcccggcgagactcgcgttgctgcagtggctcaggagatggaggaacgcgctgctttcctcgaggacgtccgctatcgcctggagcaggcacaggcggtccagaaacgtgtctacgaccagcaccatcgcccggtgaccttccaggtcggggactgggcactgctgcgcctcaggcagcgagccgcggcctccctgcctcgctcgtccaaagggaagctcaagcctcgctacgttgggccgtaccaagtgctggagctcatcaactcagtggctgtgcggctccagcttccgcccggcgcccggcttcacgacgtgttccacgtcggcatcctcaagaagtttatcggcaccccaccagccgttccaccacagctaccaccacttctgcacggggctgctgtgcctgcacccgcgcgggtcacccaggctcgactggccagaggcgtgcgccaggtgctcgtcgaatggcagggtgagccgaccactgctgctacttgggaggacttcgacgacttccgcgctcggtttcctgcatttcagctcgaggacgagctggatttcgagggcgggagagatgtcatgtgcggccgcacatatgtcaggcgcaggcgcgcccgcgacatacgccgcgcagctgagcgtgctgggcgcgcagagatagggacagggcccaaagcggcaacttccagtggctagaatcaggggatagagtagctacaatcaagggattgattagttggctgttttagcaactcctacaattaaggggtctgggcaatccctagattagggggactttcctttgttcggttgggccaagagctatatatactcctgtaatcagcagagaatgaatcaagcaagaagttatcctattctcctctccctgttctgctaagcctgcggctggggggcataaccccgccggagaagacggccgacggctacgaactgcgtagccgcggtccggcaagtcaggggtttaacgcccttgacagtaggggcaacaccaaacaccttggattggtttacacaatattttcatgcataggctagctggcactaccaaatataggccttgtttagttcgattttttttgcaaaatggacactgtagcgctttcatttgtatttgacaaatattgtccaatcatggactaactaggctcaaaagatttgtctcacaaattacaggcaaactgtacaattagttattatttatatctatattgaatgcttcatgcatgcgccgcaagattcgatgtgacagtgaatctgaattttttttgcaaatttgtttgagaactaaacaaggccatagaatacttcattctgttctatttccagtactacagttgtagtatgttctcattgacaatgttttatggttagaagtagtgcattaatgttaaaatccggacaaggtgggtcaagacgggaaggctgggtttagggttttgtagaaaattaaaattaatgtcagaagactcctaacttggttgcggctgcccaaccacatagttcttttctgaatatagttcttctatgtttgactatgttagacatttgacaaaaacaattgtaggcacttctttgattgatgggtgcttattgggatggtggtgataaatgaacatagatggcctaaacatttagcctgaggggttatatccttgtgataggattcctaatcctaccaggaacgttgcgaagtcagtatgggtgagaaggaaggggggggggcaggtttagggcttcgctgtcggcggttggacgccgtcgtgaggagtgcgagctcgaggaagaagaggcaggcagcagctagggcaactcccggctcccaagggaagccggaaacaatagaattgtttctgcttaatctcaataatcccaattacaaaagatgtccttttagctaaataacccttatgcaaatagctaaatattaataactcaaaataaatggatatgagcctctttagccattgctggaccggttgtgccttgagtattgtataccggtcataacatctctccctgcctcgacaaacagctcgtcctcgagctagacttcagggtactgctccttgaattccgccaacggctcccatgtagcatcatctgccggaaggtcgtgccactgaacaaggacatgccagtcaccacggcggtgctgagcgcgcagcacatgctccgtagccggaagcagacgcccatcttgcaccagcggaagaactggagcagccggaggagccccagtgtacgctttcaattggccgacatggaagacatcatgaaggcgagcaccagctagaagttggagacggtaggccacttgacctatgcgctcaagcacctggaatggccctgcatatcggggatgaagcttgcctttcggatgcgcgacgagggtctgggtaggacggtgcaagaggcacaaaagcacccagtcacccacagcgaaggagacgtcccgatgatgctcatcatagtatcgcttggcatactgctgcgcctgaagaaggcgttctcggacctccaccagaaaagcgtcacggtcccgaagcatagcgtctgccgcctctgtctgggccgccctgtgctggaagggcaggaggggcggtggagggtggccatagaccacctcaaacggcgtagttcggagcgccgtgtggaaagatgtgttgtagcaatactccacctaggaaagccagtcgacctaggagcgagggcgatccccgcggcgcatcgcaggtacatcacattgatccgattgacgacctcggactggccatccgtctgcggatgaaacgccatactcaagcgaagcttcacacttgcaagcttaaacagatcgcgccacaaattgctggtgaagactgggtcgcgatcactgacaatggagttggggaagccgtggaggcgcacaatgccgtcaaagaaggcgtgcgccacagaggcagccgtgtaggggtggctgatggcgatgaagtgcgcatatttggaaaacctatcaaccaccgttaggatgaccgatttaccatgcacctttggaaggtcgtcgacgaagtccatggagatatccgcccacacctgcaaagggacatcaaggggttgtagcagccctgctggatgtgtagtcggcgtcttgttgcgctggcacgtgtcgctggaacggacgaagtcctgcacaagggcgcggtcaccggtgaagtagaaatcctagcggagacggacgagggtcttctggatgccctcactgtccacggcggagatgacgtggccaaggaaggccacgaaggaggcgccaaaggagcacttggacctcttgaggaagagaccatgtgcccgaagagcgaggacgaggccgacgtgctggaggtgtgctgcccaagatgtgctgtaaatgaggatgttgtcaaagaaatccagcacaaacctgcagaggaacgtccagaggacgtcattcatcagcgcctggaaagttgccggcgcattgcacaggccgaacggaggaagtcgatgccgaggatgaagtcgaagcagcccaacgtgaggccgacgtaggtgacggggaacgccgccccgccgatagagatgggaacgacgtgggcgatgccgtcacactgtagccgctccccgctggcaaccgtgacgcggaggtgctccgcgccggacggtgtgagccccaagcgacgcatcactgcgtgctggaggaaagtgtgcgtggacccagtgtccagcaaggcgaggagacgctcccccttcagcgtcacgggcaagagcatcgtgttatcggtccgaatccctgcgagggcatgcatggagacaacaagggcattagcggtgggctcctcggtcgacgtggtggagtcctcaggttgcgcagccccaacgtcgtccatggccgtgaactccgagtcgtcaacgtagtcgaccgactcgaggtaaaagaggcgcttgcacacgtggccctgcacatacggttcatcacagttgaagcagaggccctgacaatgtccctccaattgttccgccggcgacaaacggcggaaacgcagctgactggggggcagcaggtggaggtgccggctgctgggcggcaccagcccctcccgcggttgggcctgcagctcctaggccaggagcggcaggggtcgcccaccccgctgctgaggtggctgcgccaggaggaaggccaccgcacggcgttcgaaggcccgcgcaaggtacatcgcggtctgtaggtcgggcggatggtgcatctcgatgtccactttgatgtgctctggaagaccgccgatgaagagttccgccttctactgcgcgtggcagacaaccgcattgtagcggctggagtactcctggacagaggagctgaaggacagccgcgcgagctgggcgaggcgcgtgccctgagttggaggcccaaagcggagctgacacaaggcgcggaagcgatcccaagattgcatgccttcatcctgctgcagcgcgtagtaccatgtctgagcgtcaccacagaggtggtatgaggcgagccaagtgcggtccgaggccaaggtgtgctgaccgtggaaaaactgctcgcactgattccaccaatcgaggggatcaatgccgccatcgaacgtcggaaactctagtttgtagaagcgcggggggcatgcgcgccgtgccagtagcagcgtctggaacgccaccctccaatgcagtagctagtgcagcgtcgcccccagatgggaacgcagcagcgggcgccgcggtgcccccgtataagaggttccctgcgttgtcgccgtagaaaaggccgggatcggtgaaggcaaggccggccatgcaagcagatgtaggggaagaccggtgcttgggggcaccggcaggcccgccgagggcacggccgccgacgcagctgcgaacgcggccgaaggagcgggcagcgctggatgcggcaggggtgggggaggcagcgacgccggtggcggcagttgctgcgtgaagcccgtccacgcggcttgcatcgccacaatgctctgactcatctgcgccatattctgggacatctcagcgaccacggcggcgagggattccagtgtcaggggctggccacccaatgaggctgagggcgctgccgatgacatcgcagcggaagtcagggcggtggaagaagacggcggcagcaaagtagtggagggggagctggtccgtgcagcggagggattggaggagagcctgacatatccgatagcaggttgataggattcctaatcctaccaggaacgttgcgaagtgagtatgggtgaggaggggggcaggtttagggcctcgctgccgacggctggacgctgtcacgaggagtgggagctcgaggaagaagaggcaggcggcggctagggcaactcccagctcccaagggaagccggaaacaatataattgtttctacttaatctcaataatcccaattacaaagtatttataatctaagatgtccttttagctaaataacccttatgctaacagctaaatattaataactcaaaataaatggatatgggcctctttagccattgctggaccggttgcgccttgagtattgtataccggtcataacacctcgaacataaaaacaagttaatggaaatggcatacagaaacatgtggattcttctttacaaattacttagtgctatttgtagtttcttatgctataaatatcaacttcacttcagcaatctactaaaataaattactcatcacaagttgataaatgctgattgctgataataacttgtcacttgattatgtcctgatattaatttgctacttgcctacttgagatttacacatacctagttgtcaggacctttgtggagctttcttcttcttgggtgcttaactgcttattggctggatggtctaactttgcataagttgtctttcaaagtaaattctctttttatgttaccaggtctgctgccagaagtttgg

SEQ ID NO: 4875 - DNA, 393 bp, Sorghum bicolor
  Intron number 4 from transcript Sb02g038680.1 (locus Sb02g 038680) derived from phytozome v7.0 (chr-ID chromosome_2; pos 72891904 to 72892296)
attttaggtacatcttttttcgttacttaccatgagacacttgtatatatggtatttttttcttgtttctcctgatcattttttaaaatcttcttgaagcaatcatgccactggtggtcaattgttgatttcttaatgatttctggagtacccatcatatatatactttcaggatgttcagtctacaaaatgtatatctctatctcatggatcccatgatttgaacctagtaataaataactgttcctgaaacatgaaaaccaatgagaattaccttttcatttggttggtgttcccaacttccctttctattctgcacttatttaactatctgtctaattccatcattttgtctcaggttcttagataaggcagcagttatttctgatccaa

SEQ ID NO: 4876 - DNA, 2141 bp, Sorghum bicolor
  Intron number 4 from transcript Sb03g032810.1 (locus Sb03g 032810) derived from phytozome v7.0 (chr-ID chromosome_3; pos 61267945 to 61270085 reverse strand)
agttcctcaaccaagtaagaaatattatcttacaaattgttgagattttagtcatggctgtagatatcaactgtactagttttgaaggaaaaaagataggtagctgaaggaaaaaagataggtagcaactgtagtgcatttcatcatttatcatattgatatcattgtactagctgacagcttgatgtgatgttgatttcataaagcttgagcatgctcacatatgtgcacttttttttatagatgtctggaaatatattgagtttagccttgccagctgtcgtaaccaaatatgttcgcttatgaactaagaatttgcagcatatgttcaactcgtttgatattgccatcttttctgtgtcaatatgctcattctcaatctaccatgttttcaacacttgcaagctgtaagaagccaagaagccatatcaagggtttatcatcggtctatgctgaataagtatatgtgaacaggaaataaataatgatatatttggctaaaattggatttgcctagcacatagttacaccctgtccatagttgcggagttagacaccctggacaggagttgctggactagacaaggggtgctggattgattggaaatggattgagttgtgatttttaagcttatatttctcttagggattcaccagcaaggccggtgctgcagccccgacagcaccagtccttactcctcccctccctgtccatgtcttttgattacttgatttcggtgtgttcagggcttcaggcagaaacataattttcgcttactgttactttggcagttcattttgttcttgatcctgctaataatagcaaaccattcttgaggagagagatttcactatttctagtaaccaagattgtaaccggcatgtgacaattatatagcctccctgctatgatagtgcttttgtttattttaggatttaggatttgtaatgagcacttcagaaattttgattggaagtatgaggctatgagcacagtttatatataatataaaattttcgaggaaagcaattgtatgattcttagattttcttaagttctgagtggggagggagggtcaaggagtagtggcttccgccctagctcataactagcaaacatataaatgcttgatttgttgtgttgatgtaaatcagaagtgttgataagtgactattgaggtccaaatgtctaactgttactaggatgaaatgattatagaattgtagtctacatgtctaatgccatattagtacagatatgttctattttcctataagagttgtgtatgtccagtcagcaatttatgaatgcaagttaaaataaagcaactgagtcagaatataatcttttctatctataatgcatgatccaaactgattctgctcaactactacaaaaacttaggtaattccacaactcataatatgctgcatgcttattcataatgatatagtatgtgcacagttcatgtaatgatgtaataacaaagctactgtttctgttattacctttgttggctgtcaaggaattcttagaaatttatgcgtacacaaataatgtaaattagtctttaatccatttttgctgtgtttgttgaatggactatttggtaaacagcattatgctttagcatttttgtctggagatcgattttgttgaaatatttttttctcaaacgcacaggagagctgtgtatcattatattaaaaagaaaaacagagaagggcccttacaaacacacacacacacgcaccaacaccaaaaatcatgctactaacaatctgactcgcctgtgacaaaggatgaaatgacccaaccaaagcaaacacactacaccgtcacaagggtgaggaggtaggagatacctctagccccatccaaacccccaaaaaaataactcctctccagtgagcagtgtgactgtagccaagtttggagaaactccatcaaacacacttattacgatgaatccacaaggtccaagcaccaatgatgattttgttgtaatatagtaatctattaatactatagcatctgtatctcttataacagtttgtagtatcgtgacaacattacttgacatagttgtccttatttcttttcaggctagcccatcagatcctaaaacttttcccttcat

SEQ ID NO: 4877 - DNA, 12636 bp, Sorghum bicolor
  Intron number 5 from transcript Sb06g016010.1 (locus Sb06g 016010) derived from phytozome v7.0 (chr-ID chromosome_6; pos 44402054 to 44414689)
gccattagtcatagtaaacattggtggaccaacaagtaaatctttccacactcttgcctttcctgtctatttatgattctattccattgtgcatacatagttcaggttcttgtttgactttgattaagaaatgggataatcatggtaccaagaatggcactgcaatttattatgaacactgaacacataatttcctatacaggaaacatattatcgtcctacagttaaactctagccctatgttgtgagagaatataaatggtgaaatattagatatattgcattgagcttcatgggctgattatatagggtatataggactaacatctcatgtggatacacaattggtactattcatatttactctaatgtccccccgcagtcatagcgagagcgctacagacgatgagactggagaagaaacctataagctaacatcccctgcagtcataatagtcaatgcacagtgtatggtggctggagaagaagccgatgagttctcaatttctcatgcaaggcggtagccctttatgccgatattgaggtagctgagcgtgagggcacagtagccgtggtcgaagaagtcgtgctgaagatggccgaggtcgacgtagttgtggtcgggttgcatgtcgatggagttgcaggcgcacaaggggcgccatggtaatgatggagacacgtcgaggaagtcattgtgggagggggcgatgccaaagttgacgcagtcagggccgttgtagatgtagaagaaaggcgacgacgcaatcgaggcagacagggtaggaacgagaaggtcgatgccgaagtcgatgcagtcaagccgcctaagcgctgaggcgcagctggatttcccagatccaacaacgtatcggggacgaaagcacgcgtcggtgttgccaatatcgggtgtacaagaatatcgggtgtacaagggagagggccccaaccgtgtggttgtgctggacgaagaagaagcaatgcaggagaagatgcgtcggcgagcaggtctcagcgatgatacgggtagtgacagcttgatgatgcagacccaatcagcgggacgaagaccttgtgcagacggatgacgcaacagggattccgcagcacagtcgtcgatgtacagatgacgatgtagatggaacgacgaagctggcacacggtcggcggtgctacggcccgatgaggcgacacaacaacaaccctattgctcggggaagatgcgtgtagtactcggagacggtgtcgatgaagtcgatgccgataccgatgtcggagtagaacgcgtgaggtcgacgggcgatgggccactcaatcccgatcggtgatcgagcaaaccaaaaggatacaacagcagaggatcaggtatacccctcgagatagcacaatgacggcggtgcgacccaatcagacgcgtcgggtcgaaggcaggtgccaacgcggaccgacgtgatggagatgggcatatccgtccgacagcagtgacacgctaggcgaatgataccatgagagaatataaatggtggaatattagatatattgcattgggcctcatgggctgattatgtagggtacataggactaacacctcatgtgggtacacaatgtggtactattcctatttactcttaatgtgttgaatccacattttatgtatagtattaacttcgatgacattttccaatgtgaaggtagtaactacttcacatattggtcattttctaattaatatggagtataatgttaatctctttggtgggagatagcctaccaccccatgccaggtactacgttacctcattaatggcgcccattcaacctatgtataggaactatgccccctcagcccactgagttttccttccttgattggtggtcttcagaaagggaactatggtttaatctctttagacaggttggtcttcagaacttgtcccctcagcccactgagttttccttccttgattggtgggagaaggccagcagcagcaccactgttgagttgacaaggcaaggaattaattctctcattattctcggagcttggactatttggaaccaccgcaatgggtgtgttttcgacggagcagctccaaatttggttcgtgccttgatggcggttggggaggaacgtcatttgtggtccacggctggggctcgagggctttcgtttctgtctgccctcctccctggtagctagctagattggctttgtttgtggtagtggtcgccttaagtagctttgtcgcgggcgccaatgtaaccctagaaacaggtggggtgtgagtgcgtgtgtgtgtgagtttgtgtgtgtgttgtagcgttgttcgggctcttgccctttaccctcttcttaatataatgaagcgcagctctcctgcgttttcgagaaaaaaaaatgtataggaactgctcaagtgcacatatgttagatccctatgtttttttccttttttttttctcgaacaatgcaggagatttgcgtatcatttcattaataggataggagaggaacacacaaatggaagagaaaactcctctgtaaccagacagctacgatggtatggtatctgctagatatattgagtatttgtggaacaagagttcggaaccccggcgaggtgccgggctccgtcgccgccgcagcctactcgactcggttcagacgataaccaagttcaagttttctctcagtttctgttaaagaaggggctaggagcctcctccacgctgggccacgcaaggccaattgggctagttaatccattctggccagagactcctacgctcttcttcttggcccgcgtcgctcttttgtcgacagtcggcccatccttggtgaagtcctcagcttcaggtgcagtcaccagagtgccgtcggtgacactcccccttccttgagtaccagcttgcccccaagctggtgcgcggagaaattcttgacacagatggtcttcatcttcccatgtcgtcagtgttggagggaggtgagaccattgcaccaacacttgaggtttagcaacaccgttatgtggttggagacggcgctccagaatgtccacaggcagctgtaactgattagtctgatcaggaagctcagtacttacaatggtatgtggaggcacaacacacttgagttgggagacgtgaaagacaggatgaactaggcagtcatcaggcagcttgagtttgtaagaagactgaccaattctgtcaatgatatcaaaagggccaaagaagcgaaaagccagtttgtttgatgacctgtttgctaaagatgtctgtacgtacggctgggccttcaaatagacagaatcaccttgttgaaactctctgtcagaacgatgtttatcagcttgaagtttcatcttgttctgagctctgatcagatgctgacacacagcatgttgcataagttctcgttcagtcagccatttgttcaattcagcaacttgacaggactgtgatatgtcaataccaaagtgcctaggttcatgaccatataataccaggaaagggctcttacccaatgatgagtggtaagatgtattgtaccagtattcagccattggaagccagtggtgccatttagttgggcaagtatgaacaaaacacctcaaataagtttctagacattgattgaccctttcagtttgaccatccatttgagggtggtaggcactgctcatacgaagatttatatctaagagtttgaaaagttccttccagatagtgctggtaaacaccttgtctctgtcagacacaatggctgatggctgaccatgtagtttgaagatattgttcagaaataattgagctacttggaatgcagtgaatgggtgagagagaggtagaaagtgagagtatttggaaaatttatccactactaccagtatacagttagccggctgatctaggtagcccttcaatgaaatcaatagtgactacctgccaagctccctcaggaattggtaatggtgccaggagtcctgggtatgctactctctcagtttttgcctgttgacacacagaacattgtgctacaaattgtttaacagataatttgagcttaggccatgcaaagatagttttaaccctgtggtaagtagcttcaaagcttggatgacctccaacagcactgcaaggatgctaaaattttagcttgcaaagagaagttggatccaacccatattctacctttatacctgataatgccttccttgagtgtatagtgtcctgatgctgactgtactgaaagttcagtgaggagttgtaaagcatgactgtcctgttggtagcctgcctgaatgtcctgtaaccagacaggtttaaccacatatattgctgaaatttcataagtatcagattggggcactcgagaaagggcatctgcaactttattgtcaacaccctttttataaatgattttgtatgtgagccccattagctttgtcggagctttgtgttgccaaggtgtagacagtttctgatcttttaggtgtgtaaggcttttttgatctgtcagaatgacgaaaggcgatgtctgaaggtagtgtcgccagtgatccactgccatgatgatagcaagatattctttttcatatgtacttaatccttgagctttgacgcctaaagccttgctgacatatgctataggatgtccctgctgtggtaagatgacgccaatacctttggctgaagcatctgtttcgattgtaaaaggctcatcaaaattgggcatagctagaacaggtgctgtaagtagtgctttcttcagagtttgaaaggaagctttggtagaaggtgtccaaacaaatatggtgttctttttgagcaagtcagttagtggtttgctcactataccaaaatgagggacaaattttctgtagtaacccaccattcctaggaagcttctcaagtccttgacattctggggctgaggccattcttggacagtcttaattttagatgggtctgtggagactccctcaatactgacaatgtgacctaggtatgtgagctgctgtttcacatgaaatcgatgcttctgcaagagggttagaacttctttgatatggtggagatgttctgtccaagttttactgtagatgagtatgtcatcaatgaagaccactacacattttctcaagaatgtagctagaatgaagtttgactggaatgtggctggaccacctgtaaccccaataccccataaggcataactctgtattcgaagtgaccatgatgggtttgaaatgctgttttcaattcttcccctgttgccatgcgaatctggtggaatccagaacaaaggtccaaggatgtgaaccattgagctccatgaagttcatctaggagatcttcaataagtggtagtggatatttgtttttggtggtaagagcattgaggcgacgataatccacgcatagtctccaatccccagttttcttgcggaccaggagagctggggatgaaatggtctagtactgacttggatccatcctctggctaacatctctttgatttggttttctatctcagttttctgagctggattgtatctataagacctgagacagaatggttgagcaccttccattaagggaattctatgatctccagatctctcaggtggtaactcagttggaggagagaacacatcttggaatttactcagaatgtcttgtaactcagttggtattgaagggagagcctgaccagatggtgagctaggttccacagattgcaactgcacgacatattgaaggcagaatgccaactagatttgattaattgattgagtgtttacatagaagattacaatatatagaggcccaaggggccagaacacatgcagccacatagggtggcgcacagctaagtaaatagcaggaaaggactaacacagtaaccaaagagatactagtactggatactagagtaatctaacacctccccgcagtcggaacgtcgcagcagcggacattcagattgtagcgaaagtcttgaaatactgaagtaggcagccccttggtgaagacatcagcgaactgagaagtagtcggtacatgaagaacgcggacagcaccgatggcaacacgttcccggacgaaatggaggtcgatctccacatgtttggtgcgctgatgttgaacagggttggtggagaggtagacggcgctgacattgtcgcagtagacgaggcaggcattgtcaagggggtgatgaagttcctggaggagttgccgcagccaagaagcctcagcgacactgttggcaacagcccggtactcggcctcagcgctagagcgagagacggtgggctgccgcttggaagaccaggagacaagactgccgccgaggaagacggcataaccggaggtggagcggcgagtgtccgggcagccggcccaatcagcatccgtgtagacgacgagctgtgttggagaggtccgagggatgatgaggccaagattaagagtcccctggagatagcgcaagattcttttggcagcaacgaggtgaacttcccgaggatcgtgcatgtgaaggcagacctgttggacagcatatgcaatgtcgggcctggtgaaagttaagtactgaagagcacccacgaggctgcggtagtctgtgggatcagcaatagaggggccatcatcggcagatactttggcgcaggtatcaacgggagtggagcatggtttgcaatcactcatgccatgtcgagccaaaatgtccagcgcatactgacgttgggagaggaacagagaatcaccttgtcgttgtactgccatgccaagaaagtggtgaagggggccaagatccttcatggcgaattccttcatgagagcatcaataattcggcgaagaagctgctgggaagaagcagtgagaacaatgtcgtccacgtagagcagcaaaaaaacagtctctggaccacggtggtagacaaagagagaagtgtctgatctggcttcagtgaaacccagggagagcagaaatgttgcaaagcggctgtaccatgcacgcggggcttgcttcaagccataaagtgatttgttgagtctgcaaacatgctgagggagagcagagttggcgaatcctgttggctgggagcagtacacagtttctgagagagtcccatgaagaaaatcgttcttgacatcaagttgatgaatcggccaattccgggaatgagctatggtgaggactgtgcgaacagtggccggcttgacaacgggactgaaagtttcatcgtagtcgatacccgggcgttgagtgaagccacgaaggacctaacgagccttgtaacggtccagagagccatcagcatgaaatttatgtttgaaaatccattttccagtgaccacgttggccttggcggggcgagaacgagatcccaagtcttattgtccatgagagcagcatattcatcttccatggcgcgacgccagtgaggatcagcaagggcgtcgcggcaggaccggggaattggagacagagcctcagtatgcagaattcttggctgaatgtatccagacttcccacgagtcatcatgccatggctgttgtcaaccggtgtaatgggtatagcactaaccggaggagcatctttgacaaaccgtgggggtgaagggatgatgctggagcggcgaggaggagcagcgggcggtgatgatggtggtggaggggctgcagctggtggaggacgccgagtgtacacttgggtgatcggtggcttctggaaagttgttgccataggagctgcagcaggaggaggacgccgagtgtacacttgagtgactggcggcttctgggaagctgctgtcatgggtagcgcaggaggagcagtgggtgctgggtcagcagccagtggcagcatggaggaggttgtgggtgccggggctgcagcctggggcagcaccggtgctgaaggtgttgctgtaggtgcgtggaaatctggtggagggcgccggggcgctgacccggctagaatggggggccagagcggaaccggagcgtcgtcaggtaactcaggtgcagcctgcagtgggaactgggcagggacaccagaggttggcatgggtgtacctgcagaagaagaaggagctggcaggagctcgtcgttagttaaaaaatcaagttcgtggggcgatgtggcaggaggcgccggagtcgaaaacccagtcggtgctgcccggtggagtgagcgatactgtgctaaatgcctgggcgagaaactgaggagtccaaggagaccacgctggaggtggcgccggagactgagggagcagcgccggcgatgagtagggggctggtccaggaggagccagaacgccggaaagtggcgtgccaaccatcatggcgtgctgctgctgctgagtgggaacaccagggcgtgctggtggaggacgaggggcgccgggcgtggggccgggccacatatgaatggacccggtccacgggttgtagacagatggccattgagggccgccttgggtgccttggttgcgtccgccacggcgacgtcggccacgattgctgccagaaggacccagggtcacgccttgcggatgaggatggcgaggagtggcagagttgggtgccggcgtggtggggggcagcctgctggtcggggtggcgaggagggcagaaggtgcggctgaggactgtgccatgttgagctcagcgaggcgaaggtcagcgcgaacatctccgaatgaaggaaacggtttctgccgagtgatgagctgagccatgaactggaagcgctcatttaggccacgcaggacgttcaggaccagtgtacgatcgttgattggttcgccaaggtcagcgagggcgtcggccatgcccttcatcttgcggtagtagtcatcaatagagaggtcgccttgtgacaaatttcggaactccgcatccaggatcagagctcgagactcgctattccccaggaattgctgctcgaccccgagccaagccacgcgagcagtgatgccgtcatgagcgtggatgatgtcgaggaggtcgggggagatgctgttgaagatccaggagacaaccacgcaatccatccggtaccaggccggatcggcagggcagcaggcatcgctaaggacatggtccttcagagagaactggccaagagcgagcagaaggtagccgcgccacttggagtactgggtggacttgagctcgaggacgatggggaccagatacttgatgttctggacggcgcaggcctggctgtgcaggtgcgcgatggctgctgcctcgttggagatggagtgctcgtcatcgtcgtgggcatcttcgtcgtggagggcctccaggcggatgcgctcgcgaatggcagccgcctgcgcttccagggcatcggcctgcgcgcgcttcttggacagggcgtcagcagcggcccggacgcgctcctgggcggcggcggcggacttcaggagatccgcctccttctggagttgagccgctcgctcggcgttggaggtgcgagccgcggagacttcttcctcgagtctctgggcggctgcagtggcgtcatcgcgaagctgggccgcgtgaacggcggtggcggcggctgctgcagccgaggcactgaggctggagtcgccagcagaggcggccatcatcgggagtggaggagggggtgcggaagcagaggagggtgggcgggaggagaaagggtcggctcaggacccgaactaggcgtgtgataccatgaaggcagaatgccaactagatttgattaattgattgagtgtttacatagaagattacaatatatagaggcccaaggggccagaacacatgcagccacatagggtggcgcacagctaagtaaatagcaggaaaggactaacacagtaaccaaagagatactagtactggatactagagtaatctaacacatataactgatgtaactgatgttgggaaacaggtgttcccaaggatggtgttggtagaattccttgtaatgtgattagttgatgatgatgtggaaactgtaaccatttttcagcccagagtatgttcatggggctgtgatcttcaatccagtccatgcctaatatgacatcatagcctttgagaggtattatcttaatgtggaatggaatgagtggccttgaatgccccagagttggtgaggtaacggatgagtgcatctcaacaattagccattggctactttgatatgaactggatgagttaaaggttgtgcggaggtcagattggtcactatttgatcagatatgaagctatgggagctgcctgaatcgagcaggataaacacctctctgtcttggaggtagcctcttagtctgatagtttttgagccttcagtaccattgagagcttgaactgataaagccattaaatcttcctcagattctgagtcctgttccactgaaaggaattgcaaatcttctccttcagtaacacatttccataattgctccatagcatgaaaagatacagaaggagggcatttatgctgtgggttccacttttctccacatttgaaacagagacccttggcccttctgaaattcttcaatgcagttatgttgtcatctgttgacttgggcagagttgagttgttgtgtttctggtcttcaccatatttgtagttggatttgcttgattcaccagaacatttgacaagctcagaagaatgtttcttagaagattcaaatctcttgataggaacatcttgagtggcgtcttcctgcaaaagagccaaagaactagcagtattgaggtcttgtggcctatgcataacatacaactgctctaacatctttctttagaccatcaataaagtggttggtaatgatagtagttgggaaggagggatcatgagcaagtaaatgatgaacaatgtcactgaattcttccgcatactcagtgacagtggctgtttgtttggtgtggactgtggaaaaagtgtcgaattaagtgattgtgctcatctttatcaaaacgactgcaaacagcgagaacaaaagtttcccatgtcattgtagtagttgggttggacaaggtttggaaccaaagagcagcagaacatgtcattcgcatagaagctaaacaaacccataaactaggatcagtttggtacacatcaaaataggtttcacagcgtttgatccagagtttaggatttgtgccatcaaacttatggaactcgacctcaggaaagggtgtggcagtggaataaattgggtaagggtaataataccgatcaggatgctcaggatacactgtagtatgaattggggaaactttggtttggagagatttcgcacctgtacccaagggttgggctggggcagtggtatacaccaccccgtaaccctgcttgccgtggtctaacgaccctggtaccacccttgattgggaaaactccagatgagcggagttcggcaccttcgtgagtggcggggtgaagtgatcctcccgaaccaacgccgtgagcggcgtcggagtcacagtagtggtaagcgggtactcttgccgtggggacgtgagcggtgacgacgagggattgatgacgtccagcacttggtcgatgtgctcactgaggtccagaacggcgtgctcgagttcgtggacgcggtggtcgacctccggcttccaagtggagatctccgtcttgagatcctgcatctccatcatggagatcctcagctcgttgatgcctttggagttctcgcctaggagagggatgattttgccgagttgttcttccggggtcgtcatggccatctgacgacgggtgaagtattggtgggatgccaaaatcgcgatctactccacaaatagatccgcgtgcttgggaattacagagaaattgttggcggtcagaggatctcgatccaacccaaagcgtttgcgattcgatggatgggatacagagatcaacgaaccgggatcaaactgaatccaataccagatgtaaccaaacagctacgatggtatggtatctactagatatattgaagagtatttgtggaacaagagttcggaaccccggtgaggtgccgggctccgccgccaccaccacagcctactcggctcggttcagacgataaccaagttcaagttctcctctctcagtttctgttacaagagggggctgggagcctcctccacgctgagccacgcagggccaattgggctagttaatccattccggcccagagactcgtacgctcttcttcttggcccgcgtcgctcttttgtcgacagctggcccatccttggagaagtcctcagcttcaggtgcagacaccggagtgccatcagtgacatcctcccacccaaagacacatccagacacaagaacacgcaaaagaaaaaactgaggaagatagcctcgtgagaaagaaaaaaacagaacagttgaccagaaactgcagaactaaaaaatcacataaccgcattaagtgccctgaccaaaagctccttgagatccttatgttgcaccacccactatatagacgttatcacattcaatatttcaaaccctttcatacaaattcttgcattctgcatgttcttcttgttcatttaattattcaggaaaaggtaagaaccttttagagtttaccaacttt

SEQ ID NO: 4878 - DNA, 1481 bp, Sorghum bicolor
  Intron number 2 from transcript Sb06g015350.1 (locus Sb06g 015350) derived from phytozome v7.0 (chr-ID chromosome_6; pos 42661365 to 42662845 reverse strand)
agtgctttcccttactggagacattgcatatccaggtaattacagcttgaggttgccacccattggcaattgctttgttggtctgtgtacatactatgcattaggtaagagtaaagtgcaattcatccactcaactagtcgttgaatttggactaccataccagacaacatacacaacttagcttttaaaatcagacaacacatccccttgccgacatttcaaaatggtttcttaggtggtcatggcagtggggcccatccgtcattggtctaatctttccatatgaagtcatatgaatataaactttatatcaaagttatagagctcgacacaatatacaactttgtagttgataatttgttttatttaatacattttagagactcaaatatttggtttaagtaactagattttaaaattttatttttttattttatttttcaaaggacctgtgttgttctgttgacatagtctatatcaaagttgtagtttgcagtaaaatctacaactttgtagttggcagcttttttatttgagactccaaatattcgttttaagttctctaattttgaaattcatttttttaattgtttcaaatgacctctgatgttgatgtggtctacaccaaagttgtagctcgtaacatttataactttgtagttgacaaatttttcatttgagatcatttagaggcccatacttttattgtttgaacaaaaatcaaggaaattgaatttcaaaatctgagaatttaaaacaaatatttgtgcctctaaatgtccccaataaaaatggtatcaactacgaagtagcaactttggtgtagaccatgtcaacatctgaggtcgtttaaaaattcaaaaataaattaaatttcaaagttacaaaacataaaatgaatatttgggcctctaaacaatctgaaataaaaaaattgtcaactacaaagttgtagatcttacttgaaaatacaactttggcatagactatgtcaacgtttgagattttgagttcatttgaaaaattagagaaatgaaatttaaaatctgataacttaaaacgaatatttgagccgctaaaatatattaaataaaaaaattgtcaattactaatttgtagatcgtgtcgagaactacaactttggtataaagtttgtattcatatgacttcatatgaagaagttatgttttttatataaaagaaagagagaccaaattataggtgggtcccactgccacatcagcaaaactaccaaaaaaccactttgaaatgtttaaggcagtattttttgtccggttttaaaagttgaagtgtgtatgttctccgttattcaagatcgagggggtctttcaaattcaacgacttgtttaggggtaaatcggacttttactcattagctaaacattgtaaagaacttcatctgattcttcatttctgtgtaaaagggcaagcccggggaacgccaggttgacacaattga

SEQ ID NO: 4879 - DNA, 2038 bp, Sorghum bicolor
  Intron number 2 from transcript Sb01g042840.1 (locus Sb01g 042840) derived from phytozome v7.0 (chr-ID chromosome_1; pos 66085461 to 66087498)
gctcacaggaagtaaaagttccactggacagtgaagtaagtgtaatgaattcttagcatcctttctcgacataataatgcatttgtatgttagggcaaaaatcatctgtaattttgttttataaaaaataataatataagctaacaatctgttgatagcttccagtgacaccaatcgcccaaaaaaatgaactaaccagatttgctttatcatcagtcaagtgatcatgttcatgtaattttttccaagctaactgatatcatactttatgtttagattcctgttttttaaattcaaaatggtacctttattcatttgcctcataaagtttcctaagcagtccaagaagtgtgcagacactcttgctcaacatagtctacaagggatatataggattggcctagggttgaatatacaattataaagaaccatagaaatatatatgatgttgttctactgtgaacgcaatattgttatgaattgagtttattataaagaaaatatttcctaaattctagcttaggtttggatggcattgaagaatcttgtcctatttaagtttttagatagacttgtgtgggtgctcgtacctccccgtttgtagacgacatatgtagggctggagacagacctaggacaacgacagtctccagaaacacaactttgatatcttatttttataaaaatatttaggaatatatgtatacttttatgaacttattttcaagacaaaatctattaatataaatttcacatttgcaaactcaacaatttaaaagttattgatgatctatattctcaatgtttgacctaaacgttatccaaaacgacttctaaatcctatacggagggagtatgtggttatcaaatgagcaagcaggacgtaagttaaagaaactattccttttgttaccaaatgtaagatgttttagttttaaaccttaagttaattattctctaactttgattatgtttatagaaaatacaccaacaactgcaacatcaaattaggttcctaaaattcatatgaagtattcctgatagtgcatttcattattgaatcatagatgttaatgttttttctaaatttggtttaaattagagaagtttaacttaggtcaaaattagaatgcctcacattttggaaatgaggaagtctatttccagtgctgtagagattgatttagttgagcgttggttcttagtttggttttcatcagccggtaaacgaaggagcaaaacgtcaatattttttgacatctcagcttagaggctttctccctataagaacaaaataaattgcagggaagggtttttgttttaaaaaaaaacaattgcagggaagatgagagctcaaattagccaccatttgtggccctgatatcaagctgacgggctcagccagattgggctgggggctgtacagctgggccggatacaaaagataccttatctatcttcctctcgcggagcccatcatgtacaatttcggcccatctctcttaccaaattaatggatgcgtgattctgatttcgtgataattttcaaagatttatttatatgggtttagtagctttgttaaagggcaacggatctagtgtaaattaataaattagtaaaattaagattcactcggtcaatatatataggaatgtactgtgaacgctatctacaattatacatcctgcttgctcatttgataagcccacccatctgtttctactgatttctagagtaggctagtgggagtgtgggacaggatcatttttttagaactagacgctattttcttttttctttagaactaggtctaaaagccggtctgaaaagtcataattgaaaatactgttcaatgatttattgtgagagaaaaacactgttggctggtaaaaaaaagtacggctgataagacaagcgaacgggtgcgttaaacttctgttttccaagcaggatctcacgttgacttattctgtttcgttgtgctctttcttgttaaaactagattaactaccaggattatctgaagttgaggacaag

SEQ ID NO: 4880 - DNA, 3169 bp, Sorghum bicolor
  Intron number 1 from transcript Sb09g018590.1 (locus Sb09g 018590) derived from phytozome v7.0 (chr-ID chromosome_9; pos 46455081 to 46458249 reverse strand)
cgtcgagatccaccccggcgagctccgcttcctcggtacgtgcccctcttctcgttccctgacccctccccctcctcttcagcccaatgaaggctcgagttcagtgagtgattcagtcgccacgatccatccctgacctggcgggtttatttgcctgatgcattggcctctgatcgtgggcggggtctgtgattatccgctggcgcttaagtttccggttgatttctcatgatgctgcaatcaatgcttgggtcggattgggtttttgacggggcgggtgggtcagcgtgtttgcgtaagggtttaactatccatgcttcgatttcgatttgcaccttagaatgtacgacagtcaagataatcttattattatttgcgattgcgtgaggaggtttgtgcaacaaatttaaggaccagaccgaccgtggcatagcactttcataacatgatttgcactttcagtcggatcaatctgttctccggtcaacaagtgtgctagtgctaataggtggtttagtggttggggtgtcaataagtattagttcccgtgctgtcgttgtgtcaatggttctaaagtttggcgtgtaggaatgtgacatatctgtatatgcacatttgttgcagcagtgatattctagattccctgattctttgcttgccacttgtgatgaaaacatggtatgtcacagatagcgcagagtgtgtgttatatgcataaggatgcagagagaggtgttaggtgaaacgccgccagtttgttttaagtgacaaaggagattgagcgagctaacagacaacctttatcatgtaactttggtccagatacctttgtaaaatagtgcagatctgagtttgtttctgtaattgtactgtacagaagcaggttgtgcctgtgattgtgtgaggttgcgcaaggcacctatgagtcagtgatcatgcatttgacaaacaaaatcctacagttttatccagtgtgaactaattaccttgtgttgagagtggattaaaagggatcatgctggtaaggtgttccattcatggttggtaacagactacaaatctgcctttcaaaggttggaggaatcatagaatccatatttctccattagttgttggaacagtatgttttatctgccattttggaggtttgaactagaatatagtttgcattgtttgtaccatgcaaatgagacaactttttaacttgaaattttgtttgggagtttgtacatttacttgtgtgtaacataggagttactgattgttcatgatccatttaagcatgttctaacccaatccccagaacacatacaaaatttagagacttactgggcatttacattttgtaacatggtacctatgttggacttactagtctttttttttctatacatgaatttgtatagctgtagttaaaaggatggagccatgcttgtggtttagtgctggtgtttggatgtgatattggaataggtcgttcttttattgcaagtaattttgtattttaatgggcaggcatgtgctgcttgtcacatatgttcatttgataagtaggttaatctgatgtaaattcaccagtttcttgtgtttgggaacaataatagcagaacattctgttaggtgtgttgaaagaggctagtagggactctactaggcttctgtattcaatcacactgtacttaattgtaggctaattgggaccaatggtagtaatggagcaaacttgtttattttctcctttgtcccagatggtttgtattattcattgtgtattgatcatgcaagataataatattctgtgttaattgatttatgcattcacggttaagaaattgattaactttatttttagtggaagtggaatgattcttttggtgttcatatctgtagagaattctagactctagatctctggttcccaaacaatcctttatgcttatgattcaagggtgagagctggaacctacttggacttcctgtctcaccactcaaaggtggacaggtagttagaacaaggagctaaaggctgatggtagttttgtatgggaatacacttggatgagcttagtcaaagaaagaaaaagtttcatatgcgttgtgaagctgaacaggaaatgttggggttcttatgacccaaattgagaaatagaataattggaatctgtttaaactggagatcgagattctagagtaaaaatttttggttatgtgctgtggcaacatactgagttgccgaaagtgaattgacaatgaaactgttagatgactaatctggttgggtcatcggccatgtgccagccataggctcatactgcatatatagattggtttttactaataggcataactgcataggcaaggatctccctgatggtgccatttctataaacaaaaaccctagagcatccttgcctatacaatcatgtactctgtactcttataaacaatctactattgccgtgtattatccttgcttacagaaacaggagtgaaagagttggttattggttacagtgaaactgttatttccggctatggttgcatatgttgaacagttttgctattgtgtactggtatctgcagtgatattattagtacggccttttcattgtttaggttgaaaattgtcacaatgatcaactgtcacagtaaaactgtactttaacctggttggttggttttgccattttgtattatctgaagctactcataatctaaatactgtcaaataattttggtccgctcttgacaaatcatgctgatttactcttatcccctatgaagcaaattatttgatcaaagaatatcatatgtgtttcgataagatttgaatatgccaaaatcagtatcttagattggtaaatttaatgaagctgtactgagcatagtaagtcataagctccagttttcatgactgtttagtaattttctgttaacatgctattctttccttttttgtgaataacatgctattcttcagaggtttgtgaatgttaggatatcatatagtctatcgtcataattttctattgttattgattctaccatctgtaggttagtgaatgttagtctaagatcgtaatttcatatttttatttattctaccacctgtaaatgaatatttatctgactttcacttgttatcagttgaggtgaagaagaagagttc

SEQ ID NO: 4881 - DNA, 2434 bp, Sorghum bicolor
  Intron number 1 from transcript Sb02g043090.1 (locus Sb02g 043090) derived from phytozome v7.0 (chr-ID chromosome_2; pos 76861080 to 76863513 reverse strand)
ccgctccgctgtaccggcggctatcgccggcggaggtaaaccccgcctcgccctcgcggcttctgcttctgctccggctccgcgttgaaaccctgctgctccgagctctgcttcctttgcgtttttcttcctgcgcgcgctcatcctcctaggccgcttcgcgggatgtgcataccttagctaagcgtttcgcccatccctggaaaaaatctcgtcttttactttagcaaattttcttgaaatgggacggggagcatgatggatttgtttggtttgattagactttatagaagaaggatttttagccgtgttggttgtgtctttttttttcatcatcattattaaaaaagacaaggcagaggtgaacgttttgggttttgcccttgcatttcgagtttcagttgtactagctggcctgccgaattcctaataattgatgcaaccgtaccatttctctcctctgcagtgttcgatttcacaaggggttccgtcaaggaaaggttggtgctttgcctgtccttccacgactcgacatcctctgcgtactcagggaataggagcccaaatccacgcatttcccccactaggtgtatgtattctcatgattttagctgaaccttactgcatcagtgggtgttttgtgctcagctacactgattgatgtttggcggcgctgtttagcttcctgtttccggtagtttaggcaagctgggatatatgcttctacagtaatgttgtctttggcgccaaacgacaggtgctgtaagcagcacatacatccataatgctccactaaattaaccctttttcctttcagtcttgctgttttagttaccttgattgaaatggacaaacgttggatctccttttgagttccagttcttgtatcgacctgtgtggtggatctggacatctagctgtaactaatgctagtaaacagtagctgctatgctatgatgtttttttccctctcttcttcctgtagcatgttcctcctattgcttagaattgactcaaaataaaataagtcccacttgagctataaatttaatctcgtaccctcgaatggcctgcggtcaatcttgggtttcgctcttggagttacaagctaccacttgaaaaatgcatggatccttgcaaacagctaattggtgttgatcttggacttttgagcactgctcccaggtcacttgctggcttgaataaggaattggttcgtctcagggtctctttaagtggaggttaagtaactctgtattgttctagaatctagatcttgtagtctgtaaacaatgcagtaaatctccgcgcacattggcatgtgcggtagtttcccacatacacgtcttcctggcagtgggatcttcccgagttcccatttgaattagcttaggttagattagctaaacctgtgcctttgtttctctctcgttttgttcaactttttttagtggcgtctcagatcacattagtcttttttcggtggtcacagccatagttgcagaaccctttatgagatggtaaggctgctctgctccatgttagtcctaagaggctaagagtgcagaaagttgcgacatgataatttgtttgttcaatattgttacgtctcagtgtaagaatgctctccatgacagcctgagatactccttctcgtgaacaagtaataaacatcagatacatgatgtgccatgctcatctttgtgaacgctatgatgagtccacctttgttcttgctccctcttttctgcctactttgttgatgcttttgacttttatatgctgaccggatcatttcactttttctccctttctttatctttatttgctttctgtccacgattttataggtcctgttttttatttgactttattgtgttcgattctttgaaggtataatttatgtaccttgtttttacgatgccacatcactcagtaaaatacccagcagctactgcgctgtgcgcctagggggatatatatataccaaaattaagcttagaataaaattttctcgatggcgtgtaatacatactgatttcaaatgatacatttggcatgcattctataatgaaaccatgaaaaagcaagttgcattggttggaatgagaactctgtaatcattagacattgatgggaatttcttcttttccaaagtatcttggtcagtgtcatgagtcacttgctggaaatgaatgtttattgtgctaccccacgcgttttgctgaggaatgcacacttttgcctaaacacaccttttttttgggttaagtccaggacatgcaatgattgctgacatgtgttcagttgccttctgaagaaacactcacctgcatttgacatcttaatgtcagtatggtagcatttgtcactgattatgctctatttttattgaacagggttgcttactttgcctgatataggcaattgaata

SEQ ID NO: 4882 - DNA, 1921 bp, Sorghum bicolor
  Intron number 3 from transcript Sb10g007620.1 (locus Sb10g 007620) derived from phytozome v7.0 (chr-ID chromosome_10; pos 7439167 to 7441087)
gattctcggtcggtattcgtcggaaatgtaagttttatctcctctttatgcaaattaaggggacttatatatagttcaatggatatatgatactattttttgaggggagtgttaatataatattgactgtcattttcgagtaggtagtatgtttatttggttgtgctccactagaaatccaatttctatgaggattgtattagtttgcagttcatttgtaaatgtttcattctatttcattgaagaagtgcacatatggtcgtatttttatcatatatttttctattttttctcctttgtgttgattgaacaatggcaatggtcgcaggttagtctgctgtcatcaggcctttctatcaaagttttggcatctggttcggtctcagcacaagttctagtgttagcttagtgggggaaagaaaaaaaaagaaagaaaaaaaatccaagaaagaagttcttgaaaaaagaaagaaaaacagaaaaaacgatttgaaaaaaaagtaaaaaaagtatagaaaaaaggaaaaaagagagaaatgatgtcataggctaggaattattccccaggttagccagcagagaatgcgtcaggcacattcgtggtactgatgtggagtgatatcattagccatggcatgtaagtttgacctcatatttctgcatagtgtatcgagattgttatatgcttctgtagatgttcccttatcttactcttgacatctattgcattttatctatttcattaatcctttttcacactgaagtttttttttttatttgggaccttactgcccagtaatcatccattaggttagccttgtgtgatcttccaatattctattgtccctacaatccctaaagtgtccattttctttcttggcatgtcgactacgtggcatagtataaagtatagacatagtagagtgttaatcatatcaataacctgcctcagtgtgctatgatagatgaattccgtcattgcaggcacggcaaatactttccttgatgtgtggttaataatttgatcaattggattctatgtaattttaccctaactactattgacactccttttcatgccattaaaatgtcatgtcttggagaaaatagatatccgtattggtagatatatactatagtgctagtaatgtaatatgttgctttttagtcattgtatactatgtttgtggtgtatattgacactgtaactaggtccttggttgtaatttagcttgttctatatgaacacaaaacctatattatcatgctctggacccatcaactttcaactggtgtagtgtaaatacatatttcttttttgagggcaaggcattacaccatgtttctgacatgttgcattcattcattttgttcagctattttctggaagatgcaaagtagacatgtagtttagtgaaaattgttgaacattaacttttgatgcccttaaattttactggtaattttgatacaaacttgctttgttgtgcagtggccagtggtaatgtggattaattaacttgttaactttgtaaccacctttgagcatcatttaagcaatttgagggactgctgataatacagttggaacatactttgtgtcaccaaacctgattgagcagctttagaactgtagcatatacaggcataggaagttaataaagcatgtgttttataatcaaattggctctggactctggttcagctatgatctctcatatgatatttggagcagctgactccaatactattttcgtctatgcgaacagagacagcttattgatgcactgacttattagttgtttcaaatgaattatgcattagttgtgtgcaatatatgtctttttgtcagctgtttggttattgaaatatgtaacattacaagtccgctcaccttctgtgtaattactgcaggttgact

SEQ ID NO: 4883 - DNA, 7572 bp, Sorghum bicolor
  Intron number 1 from transcript Sb03g040120.1 (locus Sb03g 040120) derived from phytozome v7.0 (chr-ID chromosome_3; pos 67696526 to 67704097 reverse strand)
tggaggacgcagaagagcttcccagcttctacaaggttagttcgtttgagcacaaaactctcctattttgttgaattgttttctgttgccaattcctaggaaacgttgttttcggtagcctgttgcttgctttgctctgtttgtgggactgatcggtatggattggacaaggggcatctaagatttgtcacatccgtttgttctatgccgtactatttgatttggcttccggggatgcagctcggaggatgccaggatggtaatgccaggtgtcgcgagtgggtaggatcactgtcactgcataggaatcatgtacttttgacaaccagtgctggagcagacagttccagtctgggagggggaaccctgactaggaccatattagtatcttagccagggtcaagccatcaaagcttataacgccctgtttgtttcagcctgcgggctgtggattgcagcttgcatattgtcacaattagcagttagcgcgcagggaggaaaagcagactcttagcagccgaaaacatggaacatgatccatgggaacgcccacgtcccggattctggaacatttatgttcccgcaattctcttgtgggagcatggctgctaagagcaagtattatagcaggctgtaagccagctgaatgctgaggtggaggagagagaagaggagagagagtaaaagcgggctgtaagcttacagccgactcagacacaaaaaccaagaaaatgtgtgagacagacaagtgggccatgtattaatggtgatgagctaaccattatatgagtgggctgcaagaaggctataaagaaatcttacagccagcaactggctgtattataatacttgctctaaggacagcagactgttggattgtactccctctggtcataattagatgacggattgtactccctctggtcctaattatagtatgttttggacagcaaatctgacttgtattgtaattagtgttttttgctgtccaaaacgccatctaattatggccagagatagtaaaaatgtggtctgtgtgttgttgtaatctgggacctatctgtttcagcttgcaaggaaaaaaaacaggacctaagagcttaaaacaagatttatttttggcaaaaggcccttcaacagttttgtatctgaactccctaaagatacatgaatggtaaatctccccactcctcacatgtgtgcaagctttctgtgctctgtatcctcacctgacgactatcttttccacccttcacgcggttttctttgtccctggctgctcttgtggttggctgtggaggcccagcttggggggtggcagcggccggtttggggggggggggggggtggaggtggctggctggcggcgtgcgaacgaggttgggaatagcgagcaaatttatgttgtgacaaattgcctccctactcatttttgccacttggtataaataatgatttggcaagttttttttaaggagtttttggtgatgctctaagagccatcatttgtgttgtcatggtgcgatgttatgaccggcctaacctacagcagaaggaagaagtggggcactgcgcctggagacatgggtgcacccatgatctcagcaacgaccgaaccaggaacatgaggattaaggtgtttcggtgtgtgcgtgcgtgtgcctaatcttgtattagaacccagacttggatgaggagatgttaagcaggacaacacagttgttgccccctgtgccgccctagtgctctctttctttcgtgatagtctgacggtgcccgcgcgacggagtccgtggaagtgccaatcagaaatctcccacagctactcccttcgatctctaggcacttacaacttggtatcagagggtgatctgtcgtgccagggtcagccgccatccttcctcaagcactcaaacaattgacgaagatggtgtccgatgtctcgcagcagatgagcgacatggccacccaattcgcctgtctctcaatgtgcatttcggaagtggagtgccaaccgcctgcgctgccgcgctccatgccggagtacccctatggcatgccgctatcctatggcactaacatgtgacttgtccctatttgtaacttcttgtgaagttgtgattgtcctgaatccacttattttgcagagtttgtaaaaagcagaatttgctcgttttgcttagtcaattctctgcttattgatgtcatgtaatctttccctctgacacaacttctgcatatcttggagaaaactgggaataagctgtgccaaacatggctatattcccacatggcagtggcacttcttttggataacggaaaatttctggcttaacatcctctgcctaatgcttcagacagcaagaagtagttgctactgctacaagctagcttgaaattggttaattggtaaaggtacatggattggtgtcccacccaataaagagacccaagtcctaataaccccgctaagtggtactacacacttgctggaaaattagttacatgcattactggttgttcctaggcaccggtgcatagtgtcatcctaggtgtgttgataatgtaggaagagacataataggccaaacttttattttttttatcacaccaggatgtcaaacttgacatgagaagaggtagtaaagagacttgagagaatgaagtatacccaaaaaacttttcctggatagagttgtatgaaaatcaatccatgtgtttgagccttgacccaggctttcgtctactctaacttgcttggaccctaaaggcttttcgttttcattgttattcatggctgacacgatataactgttttggaagatacctgacagggcgatcagtttttttagtttttttagttgataagtttaatactacttgtcctgaaaagaatggctatacacaaatataggcacactttttaaaaattagctttggaagataattttttttatgatgccaatgacatcgagcattttttttaccatccaagctttttttttcttctggtataccctttgtacgaaaaatagataaaccggcagattagcaaactgaagcggaacatggttaaatgcatgtgcaactaaggcgtaaatatcttgcatgtccaactttcccgaaggcatgtatcctgaagtttttaatgctgatgtgaagccatttgtacataggctgttttttgtttatcgaaataagaacaatgttgttttcccaataacatttaccaagcatactgtctcctatctttctggatgttcttgtcatgttcatatgatcatgtgtggcgtttatatcctgtcagtatgcgtgtgattagttgcctgtattaatcttaacctgcattagaccttatgcgacacaactcaaaccagcataagtgtatacaatgtcttggcgtttggttgtgcggttgtgccgcacaggcaagttgcatttagtaaaattgtatttgattgcttgcattctgttgtatgtactcacctccatgttctagtagagacctcatgtttctagtagtgttaggtaggtgagaatatttcatttccccatgggctattgcaaaatctgcattgcctaatatggccaaatctggcataccagccaatgctgcattgggattgctttgagtactgtgcagcctgcataagagcctctgcgggcaataaaaaatgtacaaaatgtagacaaccaaacaggcccatatggcatatatctggtgaagaacacgtgaaagggtaagttgggaaacattttgccatgtctttccaactttgatttggaggcggagactaaagcggcatggaggctgcagaagaatggctgtgaaattagagaggaattaggacaagccttaacagtatgacaggcttatgtcagggacttagggacaagcaaaaattccagttctaatatcctgtgcttgagggtgatacccatatccttcagattacaatgaggaaaaggctacacacttgcaaagtagagtggtgctaatgttgtgatgggcaaaaagtagttgtagatccaaagttcattccacgtggacattataatgattttattatactaaaaaagtagttgtataaacctgttaaaactaataaaaaacacatgtcaaggacttggtgcttgttgctgggagatcaaagtgagaggcatttccaaaaaaagaagtgagaggcaagagacaaagctcgtagattgctggaagcctctgcccccctgctctgagatgcctatttctgctggacgagcatcatcaagattcaatttcagtactcatgccttcgaacgtgtgccacatagctcacaggaggtgaaaacggctaagtgggatggtgaatgtgtgccacatagctcacaagaggcaaaaacgtctaagtcgggtggaaacagctaagtcgggtgagaatggctcaagaacaggtgggccaacctttggttttgactctaccgtttctgcttgctccttgcaccccaaaacgaagtaacagcatgcatagtgcacacgcaactgcacagctaatgagaattgatgatgatcctcctgctgcttgagctgctgcttagcttctcgtgcatttgctggggtacatgctgccgtttagcataacctttgggagccatcataacaaagctcagtttagggtgtaaagggatgtatggatgtatgacattgtagcaagacaacggttctgttttgttgtcttgtgatgaaatccgtcattggtagtggtggactgctagtggtggctttgttttgcttgggacaacttgtgaggacttcacatccgtgaaggtgtagactattgtaaaagtctgctttagcttttcagagggcatgctgcaatgatattggcaattgttttactattgtagctaaggacgctttagccctgctaaacactatttggtttagccgtgattttttttagcactgctaaccctgatggaggattttttttttcttgaacaacacaggagaactgtgttttatttcattaggaatgaaaaaagacgtacaaaatgtgtggagaagtgggggaggcgtcaagaggtcccccctacaaaaacccaatacacaccctgccttactagtctttaaaacaagggaggcgattgtgaccttcacaatctacctaaaccctaaagctcaggggatagcgaccttataaggagctcctggagggtcgtagcacactagcaccaagccatgcaccacaaactgccctccttagtcacattgtataagagggtctgaacatcagggcaggctccttaaaaaacacaagcgtttcagtgcttccaaagctcccaagcaacaaggatgaccagggaattaactcctttgtgcatctcctttggaacacttcttaaggtacgacactaccagccatagaagctactagtagattctggaggtcttactgcatagagttttaatttctcggagatcaaagtccaaacctgcagaaattaaaactctatgcagtaagatcaaagtccaaacctacaagaggatgtgttgaatattttctttggcctgatcacagaaggggtgctgggtgagggagtcctcttttggtgaggtgatccctagtccagcatccgttgttgagagcaagccaaaggtgagagaggcctcttttggcggggcgatccgcagtccagcatctgttattgagagtaaaccaaacaaaatatttgcattttagaggagacaaacaattccaaacttttctccaaaggagcaaacttgatggttgcctgaaaaaaaaattggcacatgctgacttgctgctataggaacccgaattggtcaatttccaccgatgttgatcagcaacctcatgttacaaggtcatcctgtacaccaggtcccaaggaggaaagtattcattctttactttatatggctattcaatgcttcatcgttttgttctttagttgataaatgatgtaatgaactattgaaaaattattgagttgtttatttgttgaatgctgtatgaaagtgaatgttgatagccatgagtatgctaatcaattgaagtactgaaataatggacatgtagtcatgttctctagagcactggacatatatttgaatatttttgttcataaaatttccttagtcccatgtttccgtgcataactggttaggaattttcatgttttctgtaaaactactaaatgaaatagcttttgcaataacttattataacttttggaggaggctcctcctaagtagcttaactcgccatttaaaacattggtatttgcacaaaaatctgacaacatttcttgggtcaacatcatctgactatgattccatgatggaggtaatggaagtggtatgacaagaacaagaacttaaactgatggaagataatggaactcaatttttttatggcaaatatggtgtccatggtgtgtcttttttttgccttagatgggtgtgtgttgagtgtgcttgggagcaggctctccttgtacttgtagcaggtgtttccatctcccttcagagaaaaaaagggaacccaaattgttttttacggaaataaggaattctcgtgctggtttttgctgggcaggtggggatgctagtgatagtttttgggattgaatagtatttagatactaatactatgtttgtcttaactgaatgtcttaagtgatgatccctctgtttcaaaatgtaggtcatttttttttgttttgcctaattcaaacttctctaactttgaccatttttttatagaaaatatattaatatctacagtaccaaataactgtgttacaaaggcatatttcatggtggattaaatgaaactaattgttgtggatgtcggtataattctttgcaacattggtcaaagttggagaagtttgactttggagtttggacaaaactaaaacaatctacattttggaatggaaatcaataaagtataatctgaaagtaacagtgttagtatttggttattttgagaaagcaacccatcattcttagtaggagtccttggttttatatgtggaagttgttggactttgcatgatttggtctttcgcggtatgagcaatgctagaatggtagtgatatacattgtcgcaatgtatccttgggcttctgtattttaaacagtttgctggaatttgttaatacccacagtagaaatggatgctcctgagtcatagtgatactatttaatacttgatgattctttggaaatgattatgacattgtgaaggccccatgaagggtttctaatttcaacaataaaccagggagcttgctgctgttctatacttcggcaagcaggtctcttatgcactcaatttttctgcagcctgcattttggcgcacccccctgcttaaaatgccttgaaatttcctcacttccctttaatgccaattgtttacaaggttatgttcccatattttttgtatcagcttgcattttgccccaagatgtttgatgcagttgcattttcttacccttgtagactgatgaaaaatttcattttgcagaaaaggaagctctactgggacaaacaaaaaaagaa

SEQ ID NO: 4884 - DNA, 1115 bp, Sorghum bicolor
  Intron number 1 from transcript Sb01g032980.1 (locus Sb01g 032980) derived from phytozome v7.0 (chr-ID chromosome_1; pos 55983561 to 55984675 reverse strand)
tctgcaacctagagcagcttatcgaaggtaaaaaggaaaattatatattagtatatgatatataatagctgtagaagaattacaggctcatttttcttgcgaaatatacagtctcattttactcagtgccatgaactattgtctacagcactgaccaacctaagatgcatgcttcaggaaagaaggaagcttacttgtactaaattaaccttgtagtacttaaatagatccaaaactttttagttcaaatattttttttgagtaagtttagagtctcaataaattacaatatttgttgaaatgcatacaaatggatcataccaacaccaacttgattaagagtgattttgagctggagtggtctggtgagcaaggattgagcgaggcttgaggtttcgtggctacatgcacgtgagaaccacgtgacttttgagcttccctgggttaaaaatgtttttgctattttttgggtctgatttaaaaaattctatataacaatttcaagaggcaactagatttcaactagaggtagataggtttggtctctagagatatactagtagagatgagctaaatagccgcctctaaaaatgcttttcgtagtaatgtttagcaccgtcactgcttctccgaccttcatgtacagtacatttagagggttgtgcaaactcatgatccactatgtgcatttgctatgctgcgcaatttgatcttcattttctcttccaattaatatattttatttgttctatgttataagtcattctgccttatctagatatataatttttactatgtatttgaacatagtgtatgtttaggtgtatatcaaaagctatatatctagaaatatcataacaacttattatttagaatagaggggtataacttataataataagatactactagtggatagactaacaaacaacacaactgcgagaaacccatttctgtgtattctctgatatgcaacatgcacgtatgaatttgcatctattgtactatttgcggtaagctctcttaacatataaaattgttttttttacaagagggtcgaagaccctacagctatacagagtataatttttttaattcagtttttgaaggggtag

SEQ ID NO: 4885 - DNA, 1241 bp, Sorghum bicolor
  Intron number 1 from transcript Sb05g018580.1 (locus Sb05g 018580) derived from phytozome v7.0 (chr-ID chromosome_5; pos 45259986 to 45261226 reverse strand)
cacggtcacttttgcaatttttagatgcctctgttccaagggatttgctaaattttagatgtctgacttttagtttcatttagatggtggttattacatatattttatgttcaaattatagttttagttcgttaattttttgttccgagaataaaaaatttgttagagaaaactacgtacaaatctcacaacatgttatatgtgttggtacaaaaataatttaacagtttacaattatttctatagtgagaaaaggacacaaatttgatttgttacgatacaaagacaaataacaaatcacactactatgtatcaacggcaaagaactgagttgcggtaggatagacaatactcaacaacagaatacaagcttggtggttagcactctcgagtcctttggaagagatccaaggtttgattcctaggaatcagcaataaatttttgaacattttaactagaccgacacgattatccatgtcagcaccgtagtagatgttttctgagttgccatctgtgacgtctaatcgtcacaggtgtatcatccttggcatagacaatgtaattctgtgatgatttgtgagaacgtcacaaaaaaaacgtcatgtaaagcactaatttttgtagtgtcaccaaaagtgacaatttacttgtactagctaattggccgtataagactattgtcgaaagtcattttaaaattcaagcatgtgaaatataagagaaggggacaaataaacttctataattatcctaaatcaaactattttatcaaaaatttactaaatttatagaaaaaacaccagtacaagacaaatatgtgtgcacattacaacatcaacacaactcaatgcatcttgaaaccagactcggtaccaccactggacatgatagttgttctaactcatataaacatggatcataagttcgagtcacctatatgagacatagggagtgtttggttggaggtgttaaagtttgtattttcgttttatttgacaattagtgtccaatcatggaataattaggcttaaaagccaacatgctttgtatgtaatttataaataagggagtaatttatttgtgtttccaaggttactgatcgctcctcctgccttgtgcccagtcgtcgtcggagctggtgccgccgtcggacaagacgtggccgttcctgctccgtttcccggtgtcggcgttcggtatgtgcctgggcgtgagcagccaggcgatcctgtggaagacg

SEQ ID NO: 4886 - DNA, 977 bp, Sorghum bicolor
  Intron number 2 from transcript Sb01g045580.1 (locus Sb01g 045580) derived from phytozome v7.0 (chr-ID chromosome_1; pos 68658089 to 68659065 reverse strand)
tccccgcacaactgcaaatactaccaccgaggaatgtaagtctgaaaacacaaaaacacaagtcctgaaaattacatagttttgggaactattgctaatctctggttaaattgctaagaatgtactgtgatacactcagttttatcactttgctattaatgtactttgggcttaaatagtgaaaatgttattttttagggtttcatgtcagatggtgggcgaagaatatgggataacaccacacattctttcacctgagaattaaactttactctcattaatttgcatttctgttacaactggacacatatgtgaagtagacttgtcatgagtaatgtttgtgatcaaggtagttttacatctaaattgcattatgagaaaataatactcccattgaagtttcctttctaagaggaacggtgaacagatatgtatggttgtataaccttgcaactctaatgtctctgtctatatgaactatgaaggcattcttcgttcgctcccagggtgtctgacaagaaaagttttgtagtgtattgccatcagttactgctgttatctgattaggctccatttgttgtctctttgttagatttttggttgtaaaatagacaaccttggacattatactgataagagagcagacgccccaattgtttgaagtttcaaccatatctgataatttgatttttggtttttttcaagttatgagttatgacaagcttagggaaatgcaaggcatgcatagagcaagacctgtttgtgaatttgattgttgcattaacattcactaacaagtcacaagattagatcctttttccttgaagtcaggcagtccaactttcaacttctcataatcatctttggttttgcacatcctttttgacaatgtaatttactaatccatctttacctggcactctgatgttgttctttttacaggcatccaacaggtacaccaaagtccgggtagtcct

SEQ ID NO: 4887 - DNA, 1996 bp, Sorghum bicolor
  Intron number 4 from transcript Sb01g038060.1 (locus Sb01g 038060) derived from phytozome v7.0 (chr-ID chromosome_1; pos 61663104 to 61665099)
gaactgtaagtttacttctgctttagaagctcaatttccttttaactgctgctttcatgctttgtttcaatataaggctgtcacagtactagtacaactgttgtttcattgcattaccgaattttgcctattctactaggccacttagcctgtcctttgttagacctcatctattttagtgctgcacttagctatagtaaaagtttatattctgtgttcgagtcatcttatttgtgcccatgtacacatgaaagtcaatatggcttagttctgtgttcataatataaagtctgcttatgcatttcactgcaaagttttttgttttcttctgaatgacctagtgacatgggttaagactaccattaacagtgatggtaaatgtctttccatcctacctgaatgggtttacactagattgctttgcttttagggaccaactgtaagtataaaggcttactatgtcaggatctgactatgttcaagcatttcttgtggcctatttggatgttgtagttttagaaaactttggtatcaagaaactgtagttttataagccaaaatcattcaaaaccgtggtttagaaaaaaaaagaggtcttgaatggagtttctaaaactccaaaaaaagactatggttttgacaataccatagttttatagaaactaaaaggtttgttgcatccaaacacccagaagttttggataaccaaagtagtcatgtgtcaactttctttgaatttgacctttgtggttctttactgttgcttccttgtctaaaattcttcccttctagaatctagaaagttctttgacaatgtatagctcagtcatcctgtaatttttgagctgcaagattctggtgaatttaacagtgtttgccctcacagattcacatggaactcttctaaatgagcaatttacctctgcctatattgtacttgacagctaagaattgctaattactgttgtggttatcattttatttgcagtattttttttgttcttttgtccattctatttatttttaataagaaaaagaaaatcaaagtggaacgctatccttttttaataaggttagcagatagtacttttgtacttccagaattctttttgccctaactcctgtcacctgaaaggtgaggacaggcctgccactgatttggtacagttaggttgtattttaaagatttagataaacaatacctgttaggttcagaactgtacataaagttgccaaacatcagcatataggtgatgttagatggggtttcctaggaaaaaaattagagtacaaagcaccaggcccatccacaggtcaccgagttcaactaccaacatttagttgtagcagttgttacgcgaatctcagtggcatcagcgaaagattcaaggcagcattgggagtttatgaattttgtctacaattgtaaagttttgtttgagttttattggtctgtgtggtcatggtggaaaagaatctaccatctgctcactgaggtgtttgttaaatattctgagagtgagactagtctaagaaaacctcttgtgttcccgtatttaattctggtttaggtacattagctcatccgtgtgctgataaaatctgctgtcatgatttctcccatctagccatgaagaatcaactaatcaagctcatgttaatgactcttcatcttacatgatgtggatgtaatgggagattagttaggaagatttcatattcttccattggtccagtagccttcctgaatggatcggcatccttatgcataataatgtatctgaattgaaacaggactttggattgtcatctcactttcatgtaattcatatctcaaagacttcaactaatgaaatatctatcactgaagttctaaaatttataatatgtatcccagacctcagtgttagtttctttatgcgcctactaatggttgagcttatttgacaacttgtatacagggctatcaagcgtctcgtctgggcaaggtttcaca

SEQ ID NO: 4888 - DNA, 1241 bp, Sorghum bicolor
  Intron number 1 from transcript Sb05g008570.1 (locus Sb05g 008570) derived from phytozome v7.0 (chr-ID chromosome_5; pos 16390468 to 16391708)
aaatccagttcttcgcacaggtgtgtgctatatataattattagagaataaggcatcatcaagttccatctagcaccacgtgtttttttgaataaagaaattaaacagcatactggattgacagagagattggtttctttcttcctctgttaatggcgtttggattgcaggagaagaggagtttcgtatgggtggtaaaccacgggcaagctcatcttgctaatacttgttagactaacgagacacgctaaaaaaaataaatcctataattttttccagtaataaaaaacactgccctttaatttggtatactctaatcgtcgtcaccgggattcatttggagagcctgttcgcttgtcttgtcagcgtacttttttgtgccagctatagtattttttgtcatagtaaatcagtcaacggtaattccatctataactttttagacctcactcctattctgtattataaaaaccattacccacctctgctttttttaaaaagtatacaaagtaatccacataaatttacatctaaattactcacctatatttttaatatatttgtacctaacttgccaacctctaccattatgaaagataatttaaactaacccctaagacttttcttgggaatatagtactcccttttaatccatacatattgaaagggattccggtgtaaaattagttcattttgcataattaggagggttgagtttattcatataattactaaacttgtaagcattcttcaactaataaatcaatataattcctaatgaagcgctagcaatacttataagcaccgtaattttttcatgaaaaatatgaatataaataaaaacatatagattattagttgataagactttgacaaactggatacaaactataaagtatatattatggcaaatgttttagtagttgagcaaaaaggaatacatgcaaattaatataaataatttattagtcatataaagaataacatctaatactgtctcataacattctagccaatgtaggagtaaaggttgatggccctagtttctttaactggaattcatccattgaacttctacttaaagttaacaggttgttggatttatggaatgggaaaatatgagttatcataacatagaaaaaatgtaaaattaaaataatgtatcattagtattataaaaaatgaaaaattaacatgttctcgaatcataataatgcaggtaaagcctgggcttagtgcgt

SEQ ID NO: 4889 - DNA, 9832 bp, Sorghum bicolor
  Intron number 10 from transcript Sb02g020420.1 (locus Sb02 g020420) derived from phytozome v7.0 (chr-ID chromosome_2; pos 49567144 to 49576975 reverse strand)
aggctaagcccgtggttatccccaggtaatcctagtctcagaatgtattgtccccgcccacaagccaaacatttgctaacttgttcttggtgtgtattttccttacccatctaagctacaagctaagcgtgatcatcgaggacaccactggccgcgtgaaaatattcctatttggaggggtggcagaacagattgttcggcggactgctgttgacaatagctaacaccacttgaatactaggttgtcgttcccagcatggtgccagaatatacaaaggtatttatgaatataaaggctctctagaaaataatctattctatccgcaagcgcatagataaaatacctcattgtagcatttcactaggaaagtattccggtatcgttatttataattttgcttaagagaacggtggaggtgggtaaaatctatcaaggcatagactagagataaacttgcaagaacatgattactaatgaggaactcgtcacacagtcacttgctttggcagggggtaagccacaataataatgataatgaaatataagctcatgggtaaataacacagcgattagaaaatagactactcctcatatatgtaaggtgacgtcggattagctagagaatggattctaagtatctactatctactaagtcacaatctagtctagttatctacaagatcatatatagcataaaagactcttcattcatgtataaggaacattgctaaagtaaatcagaacatcgcaagacttactccgaaatacaaattctgcctgtcctatcaatggagggtggactatataagaatcaacgaagctgtcaccatcgtgaactaccacacgacccggccaataggatacatttgcaggtaaataatatctaagcaccacgcccacatgtaatctaccacttaactcccgcgcgtcaagagctttgtgctttacaaacttatacataaactcattatcaatcataactatatcaaatatagaactagagcaaactaagatcataataaatagagacataatgcaattagaataaagtagtagagaaagatatgaaataataccaatctttattaacgaagatccgaaatccagagcgctaggctctacttctctaattctatctaatcaatcctatagaacttgaaggattagggagtagctaattctaattctctgtgggagagaagttctaaaccctaactttgatggcttcctctaataatgatttcctcctcctccccttgggtggagaggccttgcttatatagccccctcagatgaatctgggccgtccgatcaaaccgacataaatcgcacgattattcttgaagattagaggcggtggagcacgatccgcgagacctactctgattggccaccagagcagggcgggcgcccaaggggggagggtgggcgccctacccctgggcccgatcgacctcccgttcgttcccgtggcttctggactcttctagattaaggaaaattgcgcggcacgtaattatctcgttgtaaacctgacatgtgggccttctctctatattttctgataaccccctgcagaaatagacaaacaccaaagctcgtagaattctgtcaaataaaaccttaattctagatgtttggtgcatattgatccttttccatgtttagttgatggttaaatttagtacttaaggaccgtcaacaaactcccccaagcttaccctttgctcgtccctgagcaaacagctaaactcaaatggatcaggagttgctttgatgttttctttcatgacaggcacacatgctttcacataaaaattcttccagattagagtgaagtgtcatggtgcttagtacctgcacttaagtcttaagtaattgaaagacaaaataattaagtcaagcattatttctcctgtttatacttcacctttgttctggagttttgcataagttttcaaaaataaaactcaaagttcctagcaatgattatctcaagtctctctatatatggtatttgcggatcctcaccaaaaatgtcacttacctatagctaatggaatatttaagtggagctcataggtgtgaaaaacagctcatacatatgttgtctaatcgagccatggatccaaaggaactcaacatataattaaatcaagatgtgcatgtgtggtgcagtaaatgatagtaatggtggaaatataagtaatgataaaacttacttctcattgctcctcatattgctatctctcctcctctttgatctttgctttgggagaacatgggttatctcttcttcttttttttaggtgggtagtaaatacctctaattctactgtcggacacttgtccattttttccgctcagatgggcatcattgtacccctaattctactccagacaattgtccatttttacctctcgtctcactcttttctttctttttcgaggttctgggcacttgccccttttatttcctcgcatatttttgcataacccatgcctcttctgcattgaatctttttggagagagagaataacaacacttgggatagtgagtgataatatttttgataattttaatgaatggtggtggatggtgtagtagatgtgtgcaagtgaatatcttaatttaaccacatgaaaagctcctaagggtctacacagctcgatcaaactcaatgtgaatataaaatgtgaatataagtagcaaaagatgttatagcaagtatggctgttataggaattttgtcatgctaggaactcatcatgtgatttgcaagttttcaaaataaatctccagaacttagtgtagaaggaacaagataaatagtagctcaaactttatatcatgtccttctcttacctagactttggttttaggttcatgcttcccatagatagtaaactttagtcttagtaattcctgggagaactctaatataaaagctaggtacttgaaagtaagcaaacagagcaactgttcatcatttccatcatgcatcttttttttatttttttctagagattaagacttagcagggaaaataaagcacacttatctacacactctttttatgtggttttcatgtttgtagaatgtagtaaattaaagcaagaaaatatttattgggttttctaagtttttctctttaagataaataaaacactaaaacagaaaagaataaataagaaaagtaaataaaaacttacttgataaaacggggaggaactcccccaagctggatgtggttgtcggtcttacccaatgttccagaatcgcatcatggtggtgatgttgtcgttcattgtcgtggtgtcttgcctcagttcttgtactgcagtggcgtggtcctggttccatttttgttgctgttccaggagtcatccatgttccgcttgcatattctggatgtcgaggagggtgttgtcggtacgggtgaagaaagcgccggcctcttggtagtagttgttcgtgaaagcgtaagaggcgtcggagtaccgtcttgcatcgaattggggctgggatctagaccctgaagctccatatggatcagtggagtacctgcccgtatggaaaggcgggtttgtccactggtgctcttggccctccggccatgtctcctgtgttggctcttgtggttgagcatgtcgaacccatgtgtcccgaaggactcggggattgtagtcgcaataatgcaggtgcgctgcttcttccataccaggtgcgttcttgatgggtggtcatcctttcagatgccactcattgtggagctctctggtttaccggtgtcactgcaatctcatcaaataatttgaatgacatagaggccaaggttcgggttaggtaactgaatctttcctttattatcgtataacatatacattacgttcccctcttttttcaacatccgagcttgcctaaatgtgtcatagccatgataaattcgtaactcatcaatgaattccaatgatgagttttctagcaaattaagattagaggctagacgagtgacgagtgaagtacaaccgacaggtccctgaagactaggtatactaagccaatgagaaaccaaaagagtaacaggtgaagtgagtattttatttatagcagcatatagaagttgtaaatctcctactcttacttttctaatatcatcatgatggaaaagattgtacccgagccatttgtggaacatcctcagagtggggtgttccatgtcgctagttcgggcttgactataaaactcatccctagatatctctctttagaactggtgtctctcaaaattgcgcaagtcggagtcaatgtctaggatgcatcttgaagagaaaccgagatggtcgctcaattctctccaagataacataatgtcctgtttgaacatctgaaaagcgattcccccctcataatattgtaaagtgcaaagaaagtcaagggtgagaagacaggaacccaactcagttatgttccaaaaatttgtccatcccaccatctggaaaattaagtcaaattcggtatccatacctgtttcttgtagcaggataggatcaagagtgggggtgtgaatgaaatccttgttctttagctgctggaaaactttcttttccctgcgggtcttcaatctagggtctcctgtcttgaggaggaccttgacttgcggatcagatgaagatgacggagcttgcgggggtgtcaggtcgacactcatctctgactggtgcgaggagtgtcgggaggaactcctcgtacctatgttcttgagggccttgcctacgttcttcaccttcttgaacatcctgccgacaaaagttgacacaaacacaactagtggaaaatgtgagagagaaaaatgttagtggtgagctgtctgaaatgtcagtagtccaggggttagttgtttaagacaagtttttattttggcagcacctccccctaaacaactttcaatttcactttggatagcgggatcactacttactaggtgaccttactctctcacccaaagtctaccaacctccctttcactcttctctttctctcctctctccttctcacttcattacaagagctccttctctagaaactgaaacttgcctggttttctggaatgcttgtgtgaagaagttggaggcaggaggtggcaatttataggctgaaggggggacagggcggacgccctctgtaggtgggcgggtgcccacctttggtggccatcctggctgccttttctccactccctccgttgcatagctcttacacagaataatgttgagtgggtggtggttggacggtggaaaaatgctggtgagtggaaacatgtttgtggatcacaagaagtggtgtatgacatgtgggacccaaggagtgtgggtcatgcttctagaagattgctataattaaatataatgcagggaaatctatgagaattgaaacttattaaaatgataatggaaaatatttttttgtgcctccacaataataaatatgagttgttacacaccataaatattatttatatggggcttttgattattataataatgctatgaataaatatggataatgcgggaattaaatatgagagaattaatgatgtagataaataccgatttacctcccaacgagggtttgggatttttaggtcacccaagctggacctccaaatcttttaatcttctgaattaccttcctccagagatggtatctccagtggttcttcttcatgaacttccttcactgtagagtctctctctggtctgggcttgaatgtgaagtgttcttcttttccgtttatgttgaacttgatttctccctttccaacatcggtgtgggcattggcagtgctcagaaatggccttccaaggatgatagacacttttgagtcgagattcatgtctagtaccatgaagtctagtggcacaaggaaatctctgatcttaactgggacattttcagcgatgcctatcgggtgtcgaactgattgatctgctagttgcaggcacattgatgttggttctagggtcgtatgctcaagcttcttgtagactgatgttggcatcacactgacacttgctctgaggtcacaaagtgcattgctgaagtgttggtttccgattgatcagtcaatggtgggacatccgggatccttcttcttccttggtggtttattaaggatggccacactacattcttctgtcagcttgataacctcagtggtgggcagtggtctcttcttgttaagaatatctctgatgtactttgcatatgtgggtacctgtatggcatcaagtagaggtatgttgacatataatttctgaatgacctctacaaacttaccaaactgctcatctgactgcactcctttgtttcttctaggaaatggcaaatagttggtgtcgtaaaaatctttcctcatttctccagtacttggtggttgtagcagatcttctgcttcaactgagctttcttcttctatcagtgctggttgcactggtgctgatgttctctgtttctcttttgggtatgggggatccctggtggctttgcctcctctagtagttatgttctttacctgctcaatgttagtggcaacaggcaatgcaacaactagctttattaatctaagctctacccttttattgagagtgttctgctcatcaaaggcagttaatagaaatacattttattgtgtatatcttttaaagatgattcatttatatctagcctttgtgtaacttcatcattagttttggtttgttgagcaattatctcttttaatgaaagttgcttgaaagtgttacctgaattcatacctttgctattgggttgacttgaagtagattgatatttgtatactgtctcaatggtcctttgatcttctttgaacttggccctctggtcaatccaatggagcaaattttccatcctggttgataatgcatttacttcttctggtacttcttcagtttgatgacattgttgagctttatcttggaaccagctttggttttctgctatcttatccaaaagtatctatgtttttccaattgtaagctccaagaatgatcctttagcagatgcatctaggcactcacgagccttttgggttaatccatggtaaaaggtctgcataaataaccatctgccattccatggtgaggacaatctgatatgtatccttgaaaatgctcccatgcttctggaatggtttctgtcttctgctgttggaaactaacaatatttcctcttaaggcagctgttttgcctatagggaaaaactttgatagaaaggcatctgacaagttcgtccagttgttgatgttatcttgatgggtgtagaaccacttcctcgcttttccttctagtgagaatggaataaaacgaagtagtatgatgtttttgtcgactccgttgatgcggattgtgcttccaatctctaagaaattctgcaagtgtgcactagcatcttcatgtgcctttccactgaattgtgtagcttgcaccaaattgatgaggcttgacttgagctcgaactcgggtgctccttcctctacttcaaatcttggaccagttggaatgttctcaagacttggagcagaaaattctcgcaaggtcttttgtgccatagcttcagcaattggtaggtagcttcttatttctttcttgattgctttggttctgatgatgaagagttgaatgtatcaaagtcaatcctgatataccctgtataaaaaatataaacatagaaaaacaacagggtgaacctgccaaagcagaggtgccttgttatgatttctcatttaatagttgtttatgcaattatttctccatagtctagtctaatatttttatatgaataaccttgactgacttcctgactttccttaccgttccccggcaacggcgccagaaatgcttgttgacacttgctcacaccacttgaatactaggttgtcatccccagcatggcactagagtgtactaaggtatttatgaatatgaaggctctcttagaaaataatctattctatccgcaagcgcacagataaaatacctcattgtagaatttcaccaagaaaagtatttcgggtatggttatttatattttgcttaagagaacggtgaaagtgaaaactggggtaaaatatttttatatgaataaccttgactgacttcctgactttccttaccgttccccggcaacggcgccagaaatgcttgttgacaatagctaacaccacttgaatactaggttgtcatccccagcatggtgccagagtgtacaaaggtatttatgaatgtaaaggctctctagaaaataatgtattctatccgcaagcgcacagataaaatacctcattgtagcatttcaccacgaaagtattccgggtatcgttatttataattttgcttaagagaatggtggaggtgggtaaaatctatcaagacatatactagagataaacttgcaacaacaagattactaatgaggaactcgtcacacagtcacttgctttggcagggggtaaaccataataataatgataataaaatataagctcatgggtaaataacacagtgattagaaaatagaccactcctcatatatgtaaggtgacgtcggattagctagagaatggattctaagtatctactatctactaagtcacaatctactctagttatctacaagatcatatatagcataaaagactcttcattcatgtataaggaacattgctagagtaaatcagaacatcgcaagacttactccgcaatacaaattctgcctgtcctatcaacggagggtggacaatataagaatcaacggagctgtcaccatcgcgaactaccacacaacccggccaataggatacatttgcaggtaaataacatctaagcaccacgcccacatgtgatctaccacttaactcccgcgcgtcaagagctaagcgctttgcaaacttatacataaactcattatcaatcataactatatcaaatatagaactagagcaaactaagatcataacaaatagagacataatgcaattagaataaagtagtagagaaagatatgaaataataccaatctttattaacgaagatccgaaatctatagcgctaggctctacttctctaattctatctaatcaatcctatagaacttgaaggattagggagtagctaattctaattctctgtgggagaaaagttctaaaaccctaactttgatggcttcctctaataatgatttcctcctcctcctcccctagggtggagaggccttgcttatatagccccctcagatgaatctgggccgtcggatcaaaccgacataaatcgcacggttattcttgaagattagaggcggtggagcacgatccgcgagacctgctctgattggccaccagagcagggcgggcgccctgcccccgggcccgatcgacctcccgttcgttccagtggcttctggactcttctagattaaggaaaattccgcgacacgtaattatctcgttgtaaacctgacatgtgggccttctctccatattttctgataaccccatgtagaaatagacaaacaccaaagctcgtggaattctgtcagataaaaccttaattctagatgtttggtgcatattgatcctttttcatgtttagttgatggttaaatttagtacttaaggaccgtcaacaactgccgccgagcttgttgaagaaagctcaactaatcagatcttgttgcctacaccccttcgtggccttgttggtcgaaggtatgtcttccaggtggttatcagtgaacaaaccttcaggactgggta

SEQ ID NO: 4890 - DNA, 1510 bp, Sorghum bicolor
  Intron number 2 from transcript Sb06g026150.1 (locus Sb06g 026150) derived from phytozome v7.0 (chr-ID chromosome_6; pos 55193103 to 55194612 reverse strand)
ggcgctgtgagtggacctcgaatgttctctagatttcccaactaccgcatttttcgtttgtttagattagaagagtctactttgcagattagcagattatatatcgagtgccttgtcatcatgccatggttcctgctacaacagctcttctgagtcagctatgacagtgtgcttagaccaaattgcagacaggattttgcattttgattctgggttggttggaaacactggagtttgaagtcttcggttggaccagagtgttgttcaagtccccggtagaatctaattgctaggtgcaggccctgttcggctggctgaaaaaaaggccattgccaatgttgatgctgatttgttgtgagagaaaaacattgttccggttgctatgtgctgcaaaggacgtccaagccctctagtttattcgaggggcaaatggtcgtacgctcattgtctttcttttggctattcctgtgggcatatgggtttaggaaatctaatgacataacagctactactcgaatgaacattactagaagaattttcctctcttttttttgcctggtcatggcacgagcaataaggggtccctgtatttattcttaggaagcgtatcttaaaagctatatcgaatcttaacagtaggcagttttccagatggcaatatttcctctggaacaataaccactaaccaggattcctgtggaaatgtattgccattcaaaattcgtgcattattacgaattaggattctgatgcttgtggagttatgagatggaatttgtgaaacgtaatgggaattgttactttgcagtgaactatcgtcatcattcaattcgtgatactacaccaaattgatcatgataagtggaatgatgaggctggttttttgcttttccttcttcttaggaagagattcgaaaagaactactactacgttgaatcttaataacaatagaaagttttctggatggcatatcattcttgtggaacagttaaatggattcctgtggaaatatgtttccaggtttgttcatactgattaggactcttatgcttgtagaattatgggatcgaattcacaaacaagtcttggaattgtcattctgcttgcaatactacaccaaattggacgttgaatcagattcgtaggcatttttcatcatttattccagttatctttttggtggagtctttctacccgagttctggattattgaaaaacagtgaatcataaatgagatattatgtatgaaaaatatgtagccttggcaaatcattgagcttgttgaatttaccttttggtttcagaaacttttatcttcaaagcatgcatgttcatgtttccagttttatgtaaactactgaaaccatgagcttatttatgtcatcgagaatctcagaactaataaagctattctcttctgtttgtaagcagatgcccactacatttcatggctaattttagcgggaacatatggttaacaatttttcttttttgcaggcctattatctg

SEQ ID NO: 4891 - DNA, 4414 bp, Sorghum bicolor
  Intron number 3 from transcript Sb01g001720.1 (locus Sb01g 001720) derived from phytozome v7.0 (chr-ID chromosome_1; pos 1511790 to 1516203)
ttgagtgctcaagaacaagcaataagcgcattctggtatgccccaaactatttcctcctcttaaaagttttatgtgtagtccatgggatgagcttcaatctttgtatggcctatagcaccatatctgaattctggacttgacaactttgctaaaccacactataagatcaacatgctgataaatgatagcgtttgctgcaaagtaaggaattttcttggctagatcaatagtgagaaagtttctttgggcagaagccatgtttttatttaggtcataattcttatagtttttttaatatcctaaaggaaattaaattaaaagtagcctaaattagagtgacatgagaattacagtagtcaaccttcaagtcattcataagtttggtcacaaagaaagatgctacaaggtgatgtgctgatggccttagacgccatctaccgaggccatgttttcaaatttcggctcctaaacacagccttcattaccttgctgcctaaaaaggtggacgcagtggaagtgaaggattatcggcctatcagtctgattcacagctttgccaaattggtgactaaaatcctggctaatcggcttgcccctctcttaccttccctgatttcagtaaaccaaagtgcttttgtgcgggggaggaaaattcatgacaactttatgttggtccagcagatggttaaaactttgcatcagaagaaagaggcgcatgtcctactcaagctagatatttccaaggcttttgactctgtttcctggtcttttcttttggaaatcatgagcaaagtgggtttcggtcagcgatggcgggacctcatttgtttgatcctgtccacttcttcgacgcaggttctggttaatggagagccaggggagatcatctaccatcatcggggtctcagacagggagatcccctgtcacccatgttgtttatcttagtgatggaggtgctgaattccatgatcacttatgctacagtgaagggcttgatgcaacctctggccattcagcaagttcgccatcgggtatctttctatgctgatgatgcagtcctattcttgagaccctacaatttggatctggtcacagttagacacctccttgatttgtttggacatgcctctggtcttagaaccaatttgtccaagagctcaatctcccctatccattgtactgatgatgaggaggcactctcagcaaatatcctctcctgttccataaaggcttttccttgtacgtatcttggcctcccactctcaattggtaaaccaactaaagaggcgctgttacctctagttgataaggtggcagactatcttccaggatggaaggcctcacttttgaacaaggctgggaggttagtcttggtgaaagtggtactgactgctgttcctctgtacctgttaatagccttggaccttccaaaatgggttgtcaaagctattgataaaaagaggcgaggatttctatggaagggtcatcaacaggcgaatgggggcagttgtctggtagcgtgggagaaagtgcagtgaccacttgaatatggaggccttgggattcataatctggaacttttgggctgtgcactcaggattcgttggttgtgggctcaaaagacaaatgctgaaaggccttggggtggtcttccaatctctgttcctcttaaggccagagctctcttcaatattgcagttgatgccatagttggaaatggggaggaaatcttgttctggacagatagatggctagatgggcataccttgtctgaaatagcgcctaacctgttcagaagtgtcccaaaacgaatagccaaaagtaggactgtggctcaagcactgcataatagaagctgggttcaagatattaagggacctcgtacagttgaagtcttgctcgaatatttccgcatctgggatatggtggatggctttgttctgcaaccagaaagtccagaccaatataggtggaagtttacgcaggatggcacttacagttgcaagtctgcatatgcggccttctttgagggctccattaagttcggccctggagaagaatttggaaaacttgggctcccccacgctgtaagtttttcatctggttagtggttcataatcgggtgtggacagctgaccggctagcaaaaagaaatctgccacatccagaatcttgtcccttatgtgatcaagtggatgaaacaataaatcatctgctagtgggctgtgtttttgctcgacaagtctggaccttggttttggaacaaataggtctgttgcttgtggcaccacagcataatgtgtctcgtttctcgaggtggtggaagagatcaattgctgctgtcccaaaagaaatacgtaaaggcctcaactctttaataattttggtggcatgggagatatggaagcatcgcaactcttgtgtgtttgataacaagaggccgaacattcaggaggtttttagagctattagctcggagggggaactttggtgctcagccggtgcctccaagctccaggaacttgttctcaggtcgcggccctttgagacataaagcttgaaggatcttggtcgcttatgaaagtcaagtctgtaacttagttcccaaggggtttgtgtctggtgtgtgtgtgtgtgtgtgtgtgggtgtgttagctgggtctttcttgacccttgtaagacctttcttctaccttaatgaaatgacacgcagctctcctgcgttgttcgagaaaaaagaaccaatacaataaagattctaaaaactacaaacactccatgatggacttgacggagtctaagatccttaaataatggtagaataatgcaaaatgttcgccctccaaaccaagctgtgacggttgctcccatcaagattgttatgggacttccaccaatcacaagatcaaagtcgcaaatccttctaatgttagtgtctgcacatcagtaatctcaatcaaagtgccactctgtgtctgaccgcaccaactcttcagaatcgtcctatcgacctcggatttctctactgaaataactcctccaataccagagagtgaagacagtacattcatgccttgtgggaacatatcattgagaactgagagatggtaagcaacagtatcaacatgaaatgaatttcctagagatcgatacctctctgtcctgcttatacctctggtgtgatccttgaaagtcgagtaggaactccatcccattaggctctagaggagcaaccttgtttaagccaacccaagcgagattccatttcctacactccaacccaaacttctgaactcttggaggtggatctaaactgtgtgtaagggctacaggaagcaaaattttttggaggaagctagactgcaggcccatagactttgtgattcaaaaagagcaacctttctgtcctctttaggactacaaggctgactccctcctgctgtttctcttctttccctctctttctgtacagttgtacagcctgtagactgtagtcctttccgtttctccctttctctctgcacagtttatttatttgattttatataccaacagtgggggcttcccctgctgtatttatggctaaaaaaaactgtgtgtaagggctacacgaatcctctctaacaattttgcactacacacataagtatagaggcaattgaattgtcgtcttgggtcccatgatggccaccacctcttggtacgagataatgcttcggatattgcctttggaggtatggggaggagaggtgacctgttctcaagtggcagattaagcatgtaacccctttccctggcagcagcacagaagtactttgagtccacaaactctggctgaatatcatacaagaaccttgatatggtagtccagacaccttttggagcaagaattactctctcactctctctctctatccatgaaccttcctttgtttctccctccataggaattatcctccagtattgcaaacacagttccactatcagaccattcaattagagctaaatcttattgcagacttggacagttcacctaagatgaacctcatagtcaggcaaattgccacagtaaccatctcctgcggtatgtgaagataaattgataaaaatctttttgtatttcctgtggtctttcactcttcctgttatggtacaagtaacgctacaactggagtaggtaatgcaatatttgcgtaacattatgctggttcaaacatcaattctatgtcatgtctaggattttcattgatctgcttacttcaggtttctgttgccttgcattttcactagtggcatcttttaccgataaataaatattaactatgttatgcttatgctatcaacaatagtttcattctacgtattctatttgtactaatcttggctattatggcttaccaaacaggttttat

SEQ ID NO: 4892 - DNA, 1840 bp, Sorghum bicolor
  Intron number 1 from transcript Sb08g001260.1 (locus Sb08g 001260) derived from phytozome v7.0 (chr-ID chromosome_8; pos 1235545 to 1237384 reverse strand)
gccaacagaacgagctcaagcgacgatccgtccaggtaccttaccctactctaccctaccataccctgccctgcctcctcctactactactgttcatccgcatcctcctcctgatgggggcttccctccctgccgccgccggctctccccaaccaccactctgcttgcttggtgcttgcagcgtccttcccggcttccccacctccctccatccctgttcgtccgtcctcgttccttgttgctctcatgagggcaaggcaggatctctactttactccctgcatctcttactttttcgttgcttttctcctgctacatccttttcaagcccaccccacctaaaccgttccaactcccattttcccttaatcaattgattgacttgatgaacaatttagtccattccgcgtaactgaatctgcttgcctggtaatagcaattgcataatactgctgcagattagacacaccaccagaaccagatcgcgacaccacgcgttgctcactttccacaatcctgtccaattactaccattcacaactgtatcagtggcccattagggaagggacgccaaaaggaggcagctttaacgtttctgttgctgtacagccgtagcatactctctcagatggtccgccggaggggagacgatcgatccatcggtgtcccttccgttcttgaaccgacgggtttcacatgttcatgggccagttgcagtgatcgggcgtgaatgcgacctccaggaaacttccgggaaggatcccacatcctggactgcaaatttgccagtgatgtagggtaggccacaatggcaagtacacacgcaccacacctcctcacgtgctggccacatcctattggtccagccagtcgatgcaggctgctctcccacttgcacatagcctttgtttatagctcaccctagaaaccaaaaacttttcaagattgtccgtcacatcgaatcttgtggcatatgtatggagcattaaatatagataaaaacaaaaactaattacacagtttgcctgtaaatcgtgagataaatcttttaagcccagttactccatgattggacaatgtttgtcaaataaaatcgaaaatgctacagtgtcataatacaacaactttttggatctaaacaaggccataatatctcagaaccgccactgccatttgtcatttggctcgatttaatttatgggctactggtttggcgcatagggtgggtacagattccatttcgtagaaattgttaaagaagaaatgctactctgttactactgatcgaactacaagtactctgtatttgtttatctcactattagcgtcttataatgttgatcggttcggttgatgccaaatggccagcctaacttttcgtattgttttcttaggagaatccagcgttttagatgctctagatttggtgcatattgttagtgtgggtactaatccatttttgggaaaaaaacaaaagaagaaatggtgctaaatgacaagtactgtgcatttgtttgtatctcatatcctgttttgtctgttgcaaggaaaggactagttaatgttattttctactattggttggattgatgccaaatgactcatctaactttcgtattgcttcctaacgagaatctaggtttggcgctgtgggtacagatccattttttttttaataatacaagaagaaatgctatattctgttactaaactacaagcaccgtgcatttgtttgtatctcatgtgttgttatgtttgtgataaggaaagcactagtgtacatcttatacgaagctgactctttgttttattcaccaggaaaagatccgggtcgccctct

SEQ ID NO: 4893 - DNA, 1448 bp, Sorghum bicolor
  Intron number 2 from transcript Sb01g011550.1 (locus Sb01g 011550) derived from phytozome v7.0 (chr-ID chromosome_1; pos 10382602 to 10384049 reverse strand)
agcaaacctgctgttcactcagttccagtaagttctgttagctttagataatggtttgtcattgttctttcttttgttagattttcacttttaaattgagtaacatgataacacctgcgatatatatagtattaagtaacaaagttgaagatttctaacaggtcccatttctaaaaatacatgatgtctttctccagatattttgtgttcattgatttatcatttgatgtactttgaagtcgtcaacaatcttccttgatagtatctttagcctagacagattatgggaaatttaagatgttataaaatatgctaccctattacttctctttagaaaggtgaaatattttactaggaattgtgatctagaagttatatgttctcataccttcaaatctagctggttcaaaagtttattgaattaaataagcttcagtcatacctgttgcttcataagattagtgttatattggtatacaaagtaattaatatctgatttaattttaattttaatggtgtagaaaaacaatagccttcaaaattataaagttacaattgaaacttcaactcgataccgaatgctaatgtcgctgattactgtgcattgtcatgctcttaatttacaataattcaacaagtttgtaatttagaagcaaaacattggataggaagtattcttagtagttagtactgattaccaatgaaggtttctttggtggaatatggtagttggctttccttactttttaaggtgtggatcttagcaacatgttaatgaatgactgtgttgagctactcttcctttttgcggaaaccttatttctggttggcatgtgaaacttaatttgctacttgtgaaaacctctcattgtcatcattttttgggaccattatgtacgcacttggtcagttaatgtggaatctttgttagaatgtccctgaatcatttttcaattgaataatggcccccagaacattatttttctttcaaactgtggtcataattctgaaggctgaaccatggcagttgatactgctgattatgcagctctaactttatcatcaaaagggaatgtggccttgtgttgggatttagaagatggagatgaaaaccaattctccaatgcaaatcttatatacattgtttcaatcatgataccaagctgttttaatttttggacgtctgcttttgtttaatataaaagcttcatatatcatttctaatttgccatgtatgggatggaactgtgtgttgagtcaaatttgttgacatatgaatattttgttatactcacatagcgttatacagaacttttccaccatcaagatgtgatcttatatagtttcaaactctcaattcaaattttgatgtttcagtaaatcgtacttctgattctgattctaattctgcaggttgaggttgagcgtattgacattggtgaaccaga

SEQ ID NO: 4894 - DNA, 1084 bp, Sorghum bicolor
  Intron number 3 from transcript Sb07g004530.1 (locus Sb07g 004530) derived from phytozome v7.0 (chr-ID chromosome_7; pos 5836810 to 5837893 reverse strand)
attcaaggtatgttcaattcttacagaggccagttcatgaacctcttcacccaaagatgggaattcatatgcataaaaccttatgtttcagtttctgtttagattcagaatgtttacataacaaatgaaatttaagccttgagtttgtcaggcatcccaaaaaaacacactactattttttcatctgttccatatatataactatataagcatattgaatcaactgctggtgcatatacatgcattaactctgcacaccaataattttggtatattctgaaggttgaaacataactgtcaaactaaaacaatccgatgtttgaataatttataaatgccttattgtagtaaaggaatcatggtataataggcgtcattactttattgtggtgtttgttgaacctgatttcatgtatgtgtaatactggagttgaaacattcatctaaactgggaaaatatgtggtggaaacaacatactaggtggaaacatggagaccaattcaaaaaacgtattttggtagttttaaaaaaatatatactcgcatggaaaagttgagatgcaaactcacttttaaaaagtttatatgaaaatggcaaatttcaggtgcatgccactaaatgttttctagtgcacatgcatatgcatctaaaatttgtcattttcatatgaatttttctagttttgagtttgcatctcaacttttgcatgtgagtacatatttgtatgcgctatgatataccaaatttcattttttttgactgaccaaaatacgttttttgaattggtttccatgtttccacctagtatgtggttcccgccacatattttgccatctgaaccagtctacaattgcatatcgtgtgtaaatataaacttttgataacttgtatactttctgtgcggaagtgagcctaactctgttggtgggaggtgtgggtgtacagcccccacaactaaggtttgagtcctaatcaagataaatttgggtgcctattttgtatttacaatgtcacctaggttggtctagttatttttgtacacatttatgaggatctttctttgttgtttacaggctgtgcaaa

SEQ ID NO: 4895 - DNA, 522 bp, Sorghum bicolor
  Intron number 11 from transcript Sb10g001630.1 (locus Sb10 g001630) derived from phytozome v7.0 (chr-ID chromosome_10 ; pos 1309044 to 1309565 reverse strand)
attatctcgtaaccctcataatgatgtatgtgctaaaagataataatttagaatttttccatttatcttttgtagccaataaataaagaaaggtcagaatttggactattaaactgaccaagcatatgtttggcttaaaaaattgtgatactaatcagtttaccatcctgtgatatttggaaacctaactctattgctgtcaaaagttgaaagaaaaggatgaagtcaagttattattcactactaattcctttctcatttattgctgagtcaatagagctaggatttgaaatttcatagaatagcatgtctgtgtctcgtcctttgtataagttactaagaaaccgtacaattattcaattggctgtttgaaaagcttcacgtgtttacaggattaaattgttaagattcagtattttcccctcttttggcatacttacgtaagatgtatctaataaagcaagctcgggttacttgctaagtgcaggttcattatcctttggaagctcttagacagatcca

SEQ ID NO: 4896 - DNA, 4408 bp, Sorghum bicolor
  Intron number 1 from transcript Sb05g023050.1 (locus Sb05g 023050) derived from phytozome v7.0 (chr-ID chromosome_5; pos 55459102 to 55463509 reverse strand)
gcagagcaaggtatgtcgaagcttgttgacgtctcaccaactacttatccttggttgaattggccatctcctatctggattcaaccatcctttttctagctactacttgtggaggaggcttgcaaaagctgttggacttttatctgaataattgctattgttaactttttttcttcaaatagttgtgaccatttaatatttaaatttttgtttagatagcttgatggtaaattaataattaatttgttttgccataccaaatagttgtattgtcaatccaaagtgagattatttagtaggctagtcagaggctgaagtgaagaaaactaaaaacagtctcaggggaagtctgatagacgtaatgttcgaggtgcatgagtccaaattttgaaaaaatggactagaaggtgagtattccatgcactcagcttaccggattcaattcaagggatccatgagagataccgaccaaaattttcatataagggcttgtttggatgtagtcggattcacatcaatccacatgtgtttgggtgggttggagtgtaagttgaactaaattccaccctaatccacttcaacacatgtggactcaggtgaatacgacaacattcaaacaaggcctaaaggatttgtgacaacagacaacctacatttgagaggatggccgcatcaggaaattgtgtgttgatcaagttgttgtttttttagggaaacagaaggggttgccccctactgtgaatttattaaaatcaaattatagttcctagagaatacaaatcaggagacgaagaatgtaagaaagaaaatcaaccaaattacacaaagttgtctagcttgccataactgcaactgggaactaacagccttcttagccttgaggttaacccatgctaattcctttttgaagatgaacttgacagcttgcaaagaatgactgcggtttctgaagattgcatcatttctagtagtccagattctccataacattgtaataattatctcgatgaagaaaggcttgttaatatgtgacctgaagagaggaattgtgtctagcaaattgccctaaatcagttgtgctagtccgagaatattccaacaagacatggcaaaagggcactccacaaagaggtattgtagggattcttggcggcatgtgtggcgaggggcgggagcgggtggtgatggaggacagacaacgctatgtcagcccacgcagtgagggctggccacactccatcgtggggctggcttctttctttagctcgagaaagaagaaacatgagagaagtcgcaccaatgcggattgggagtcacctctacagcataacacactaataaatcgagtttttcaattattggaagattgagagttaggatatgaagttattgaagagttttgtttctagtcttgccaaaaatcaagattgagagtgagttttgagaagtattgaagatacacttacgaatgggtatatcaaaattgtagtgttgtcttctcatcaaatgacatgtggttttagtcgattgagttgtccaaatatgggaagattgagagttgagataagaagttattggagagggtttttttaatattgccaaaaattaaagattgagagtgggttttgagaactatggaagatgttctaatcaaagggcatagcaaaattgtagtactgtcttctcatcaaatgacatgtcgttttagttaaaattttaccttagttggttaggatagttgtgttggaacatttccattcaaatttaaatcctcaacttgataggaccattcacattcttctaaatttatttcaggatttgcacactattctttaaatgataagtgatcggttcataaataggaagtagcagtataatacctaccaaatttgtgaaactatatttgatgcaaaattatttttatcctctagaatcccttatatttgagtatattttcttaaaacttgaatgcactacattacagaacgaacatactaatgcccttagttatcattgtgggcacatcaataatcatattatccgaaaatgaaatgttaacctagtttcaaagccctatcccaaaaggatttaattttggatttggtcaaaatcaaactatcttaaatttagtttgtaagaaataatatcacatatgctacttgaatatatgattaatgataaatctaattatacttatttagtattctctctattctaaattataagtcattcttcttatctttttagatatatgtaacttttattatatatctagatatataacaaaaataatatatttagaaaaaacagaataacttatagttatatctacaaacaaaagatatatagaatctagcctctatatccacataggatatatagagccaaaattatacgagctcttaggtccgaagactcagaaacttatagaggcataaagcaagaaacagagcctaaagacttaaaaaaaatctaaaaaagactaagcttcaaacctatatattttgtccttgcgtagcacctcttcatatcgcatgtctaatgaaggaatagaactaagtccctactcttactcaactgcaacattaattaaaacttgcagtcgactttgtgtgaagatagacctctgaggccaagcctccaagaaggaaaaatgaaggtcgctgatgtcatccgcctcaccaaggcaagaattttacccgaagattagaatatatggaggactatggtaatgccatgactatatcttcatgaagagaaaatgcataagaaggggttgccaatgtccaaccggcaagatcaccgttaaagttttcgccagcacctccacaacacccccatctactacccacacgccaaaagtagcctaccacctaactcatttgatgcctcaaggttacagtatggccatccttgagcataacaataggctacgacactgtcgtagaagccgccatgtgatgcctatgtagcaccattgcacagattcgaaggcatgacctaatataatttataaaacccatgaagtatgtttgacaatagtaacatcattgtttaaaattttatttatctataagacaagagagtaataatacatactattatagatggccaatcaggccacccagccttgcccgacacaggctcgataaaaagcatgacctgtgctaggccgggcacggagcatcgggccacccatccaacttagccgggcacgacgtgctgagccatcctaagccaggccaggcacggcatgctaggccagcctaggcccgtgggtcaggacgtgttcgtgctgggccaaaaaaaatagacctttgtgctatctagatatctatctatacatacgatatttttagcgatcatgcctaagcatgtttttcattaagcaggacagagttttgttacaaaagcattggagtagcggtaatccccggttaccaaaactccgaaagcagtagacacgtggttgtgattacagaaaaacagcagattaaatgcgacgcaggcagcacaactagagggacgcgacagctgccgacagctgcctgtagcccaccaaacaccatgccagaacttcctcctagatcaccgcctgtatccgggtcggcaaagctgcagctccaccgaatgtcctcgcattcctctccttccaaatcctccatcgatgagaaagaacaagggattaaacccacggcgagcaggcttcgggacaagctttctgcagcgagtccaccactccatagttggctcttctcgcagcacgatcacaccatggacatgaagcttccttagccatggttcccaaacttcccgacataagcagcagccgaggaggacgtggtctatcgtctcaatctcttgatcgcagatgatgcatgtggcgaagcttgcaacccatgccgaaatcttctgtcggctgtccaacatcggccatgcaagacaagtcaaaagaagaagcgcaccttcggcggggcaacagtattcaaaatttgtttggcgcccagtggcattgaagaacctaggaacattgcaccgtaagcagatgccgcggtgtaagcatggtctgctgagagcgtccagtgatgtgacgcacccaattgtgattgtgtagggcttcggccacagtagctcctcttttccatgatcccaccgatgcaaagatcgcaggtgccatctccttgacagtccaaccatcaagccatctgtcagtccagaatagttacgacatggctttttccattggcaaaccgcttcagtttccaattcgtgggagcgagtctggtcgcgggcggtaggctgcaattataaatcggcggcgcggcgcggcgcggcgctggcgcgtaccctgcttcccataatcccatcccacaacataaaaacttatagacccggcgacagacaaggg

SEQ ID NO: 4897 - DNA, 1987 bp, Sorghum bicolor
  Intron number 11 from transcript Sb01g004375.2 (locus Sb01 g004375) derived from phytozome v7.0 (chr-ID chromosome_1; pos 3501552 to 3503538 reverse strand)
aagatattccaaatagtcagatacgcaaggtaccgtgtttgactttattgatttcagtagatattatgatcgttttctcttatgttaccttaagcacatggtaaactcaataactagcatctgaggtcagtctaggccctgtttggatacttgtcttggggtagcgcttctccctgtagaagcaagtcttgggaaagtgttgaatttcttgcctcttgggcttttgcacttgtgtggcatggaaacgcacaactgaaggtcatttgatgggattttctcatgtccttgcggagcgcaacacgcacacatatccaaacacgccctaagtttagttgtttttttttcaagtgctgcatgatatttgcttttattgagtcttttaaaacatcagtattggctaaaactcagctcccacatttacgccttgctcatttgcaggctttgtttcctctagaagtctatttctcctagaagcttgttttggatgctttgaaatcttaataaaaaggaactcctaaaaagctaaagaactcaattaactttgtgcacttcagcttcaagcagccttaagctcaagggtcaagacaccttgaagtagtaggaccttagtccacacatgtgcagatgtgctatcccttcttgaagttgcagtgactggctccactcatcatcccatgcacttccactgtatttgattatgtgcgatgtgtgacctggctttcatttccttgtaaggcttgcttcattctccagtcatagtttgttaaagtacagaatcttttgacactgaaagaaatattgaccacacgagctccctctgtcttgtgatcttgtccctagctatatggattgtagcatggtcgagagtttcacacaatgaaacagattactgatgaacttcatgttttgtttgcatagtattttggattaatatcaggagcttcaacctgtgaactagtcataggagttcaagcacatataactgttcgttggggatgggttctgcaaatgtgctgtaccagtttatagccaatatcatccatttttgtgtctagtagatcttgctactactccctccatcccaagtgcagatgtgctatcccttcttgaagttgcagtgactggctccactcatcatcccatgcacttccactgtatttgattatgtgcgatgtgtgacctggctttcatttccttgtaaggcttgcttcattctccagtcatagtttgttaaagtacagaatcttttgacactgaaagaaatattgaccacacgagctccctctgtcttgtgatcttgtccctagctatatggattgtagcatggtcgagagtttcacacaatgaaacagattattgatgaacttcatgttttgtttgcatagtattttggattaatatcaggagcttcaacctgtgaactagtcataggagttcaagcacatataactgttcgttggggatgggttctgcaaatgtgctgtaccagtttatagccaatatcatccatttttgtgtctagtagatcttgctactactccctccatcccaaatacaagtcattccaagaatcttggagaatcaaagtatctcaagtttgaccaaaattatagaaaaaattacaaagaattatgacatcaaatagatatactatgaaaatataattaatgaagaatctaatgatacttagttggtgtcataaatgttattatcctatcatataaatttggtcaaacttgagatgttgtgactctccaagattcttggaatgacttataatttgggatggagggagtagtaaagaactgtctttcatgaaaagtgaactcagttaggtctgtgcattacaatgttataatgtatcatcttcatctacgaatccttttcttgaataaagtataatgtatgaggtccatgtttcagcagtgcaaacattttttcttatcatgcaggtcattgcaaaaaggttgctcgaatcaaaacagac

SEQ ID NO: 4898 - DNA, 2623 bp, Sorghum bicolor
  Intron number 2 from transcript Sb03g031920.1 (locus Sb03g 031920) derived from phytozome v7.0 (chr-ID chromosome_3; pos 60320043 to 60322665 reverse strand)
acactacaggttcgttttcgtaaaacagaagatattcataaatgaataaatccactgttgttgtaactacctacctgtcggcgtctagactcgtggtctagacacaaacgagtataagtttgcgtgactacccaagcctggatggtgatgcaagtgagacacagaggatttatactggttcgggcctgaaatgccctacgtccagtgtgatcggggggtttgtatatccttgcacccaaaggtgcttgtagtaggggggtacaagcaggttgcgagagagggttaagtcccaggtcttgactttgtggtggacagagtgttggtcgctgctctgtgaaagagtgtgatggtcgtctgtgtgaaccttatgaacctgaccttagttgtgagccttggctccccttttatagcctcaaggggagacaggcatttacatgagtaaatttccttctaccgagtggaagagttacagttccgaccctgttgaagcttgtccatcttgtccttgagggatggttgacagcatggctgctcctgtagagggttaccgagccctgtaggagtcgtgggggtcggatcggtgacgctgctgatggtcccgttaatagtgggagaagacagtgaacaatgacgctagttaaccttccccatcccttttttactgtgaggcagtacgccacagtgaaagaggtaaggtcgcagtgaccagggtggttggaacagtcgacaccctgccctgctgcggtatgggagtcatcgtgcctgtcacgtcgtgggtacgggcgccgtgtggtggaagtcttgctgacctggtggagcggggtccggcgcccgagcccacaaggatcgggtgagacggaacttgcgtccgaggccctgaggggtcgggcgagtcagaactagcgtccgaggcccggaggggtcaggcgagtcggaactagcgtccgaggccctgaggtgtcgggcgagtcggaactagcgtccgaggccctgaggggtcgggcgtgtcggatgagctggggctcgtgccctggtgattatgtttaacatgctctgttttttgcgttttttattactctgatttgggtatccctttttatggtatctaacactaccattatgatgttgctatggtcatttgacgaagttgcttgcttatcttaattgtgtcgggaacgtctaacaaagtccatctgattgaaaaaatatggtacaagaaatgcctatttgctaacctaaaatgtagttttcatacaaagagtttttaagctccaaatgataagcattttgatgcaatgcatgttctagttgacttgttgacagcgtaaaatccagcactttgttgtttttacctgtttctactttgtcactttgttatttttacctgtttctactttgtcagttcatgcagcaaagtaacagacattgactatcataaagtgctgcatcttttgttctactttgtcagttcatgaaagcacttttgtttgttcttgactttcggcatgccgagtgcatgcatcttttgtgatcatcaaaaaacttactttgctaccattaaaagatccatcatttcagtacgttatttacagtgactttatgtccaatgaccaaagcctccaaatccttgtgaactctgcttccaccattcattcattctggcactcattgttatgcctagttgtttatatatttgctacattgtctcatgaaaaacactgtgggcaagagcagacctaatccaagaaaatgctggaatagtacggacagaaacttgcatgacaatatgatgttttttcagtatgtgagcaaagtcaatcaattaaaaaagtgactttcttgccttaactcaactatctcaaacaattatactagcattaaagtgtaatagatgtattgtagtttccttgtactattcctattgccttgaaaaaatacatccattttcatccagttaaaatatttgaaggagtatcataaattcttatatgttcaacttattgtcaagttagctataatgtggtgcttcccagtggtatacatgatcatatccatgcaataataggattgccagaatttgagagtggtatatgagcaacatattctttttgtaaatgagattctgagcttgtgtagataaatgtttcccattggactcacataagccctaaatttacattttgtgctgttgagtttaaactacatgctatcaattgaaactgaactgatttcttaccttgcaatgtctagaattccaacatcacgaaccattgaagttttatcaacaaattgaggcacatagtaccaatagtttatattgtttgctatttgtttttggctagtttacaaggatgatttgtgatgaaactatacaagttaagatttaatgttttaagctgggctttggttcaaatgaaactcatggcgttgtccccttttctttggaaaatatgacgcactgtctggaatctagattgtataaatctaaacaattgcttttcttggcatatttgtcctgctttgatttgatgttacctataggttaactttaaaatatttgtaactcactataatcattcctggtactcactcttctactgtaattgtacatctaggttaacaa

SEQ ID NO: 4899 - DNA, 1113 bp, Sorghum bicolor
  Intron number 1 from transcript Sb02g006930.1 (locus Sb02g 006930) derived from phytozome v7.0 (chr-ID chromosome_2; pos 8899695 to 8900807 reverse strand)
ttgctactcgtcagtacgctcgcccgcccccatcccctccctccctcctcatcctcacactgcctattgctctcccgagtaggcgagtacgtacattgcacatcagtcgctctgggcctggcgtgctcttggagtcttggccaactttgtgctacacagcctgcagggtggtgctgtgcctgtgctgctggtcccttccagatccgatcatccgagtggctcctcaaaataaaaatcttccagatttgtgaaggccgaggcagcagtcgtgcaccgacgaggctgtcgtagtagtactactttttatgtataaataccctccgaccccgaaaaggagtatctttctagttaactaatcaatcttaacttggtcaaatatataaaaatgtgttaatttattatgcgtaagaagcatcattagctgaataatgaaaacatatctccataacaaatctatctggagcttactccaaacctaggatgtcataagaaatttcccacctgttgactgttgtatcgcactacagattagccatttgtagtttcggatgtccaattttcaagagacgaactcgaagggataaagtgttgctgatttcataaccgtttcattcatcttccactaaataactgtgattatgccatgctgccgtttgaaacaaggctctccaaaagtgctcagatgtactagatgtcgccaaaatattagtcaatggaccaaacttgattttgcaattgaccaggtcttggctccattttgaattcaaaatccacaggtttctttttgactaaaaggaaaatgctttccaaggtagccgaatataagagttattcttatattgtctgttgagattgtgcaagattttgattggatttagcgtaagaaatctgttgatgctgcttcacatttgacagcaatattatgattgttacttacataaatcaaataagatttggatctgctatgccatgtctttgtcaattatgagtataataatgctaattgctttctgtttagtttactctttttcttttgcaaaaattctgtttagtttactctgtcattttgattttgaaggtggactgcagggataaactcgcagaggaggaaac

SEQ ID NO: 4900 - DNA, 17879 bp, Sorghum bicolor
  Intron number 3 from transcript Sb10g016510.1 (locus Sb10g 016510) derived from phytozome v7.0 (chr-ID chromosome_10; pos 34282287 to 34300165 reverse strand)
ttatcaccgaaggagactcggcaaaagatctagctgtgagtattacaattataagtttgttgattgcatattttattgcacatatattccttttttattaacaagagtattgttgtttgcacatttgattgcacatatgttcttttttattgacaacatgtgagtaacataagtttaaaaaccaaattttattagtgctctatgaaacataaaaaagttaatcctggccactaggctaatcactaagggatcaccaaccagcagaactagcaaaaacacctgtccaagcacccagcaaaacagttgcctaagcccagaaacacataagacatgatctgactaggaggtctaatcctcttgttatcaaaacatgtggcatttggagttaaccacagcacccagcaaacagttgcctaagcccaaaatgtagacagatttaccctttggtataatccaatgaattcaagtccagaattggttgaaactgctaggtctacaattagcaccaaacttaatccaatggaactaattccagaattgctccaaactgctgggtctacaattagcaccaaacttacagtttccttctctgtgcctgattcatcacctttccatttttgttttaaagtttatatttcagaggtatcttagccttctaaacttgtttgaagttaggcccacagtcatgcctacaaaccttcttataagtagatttgatagagaagttcccagatttttcccacccccatcttgctctctcaattgagccatcttctaaaagagagatgctcacatctttgtttcataaaagaaatagaactattttgttccacattgatatcatataattgagggaacttgcatcttgctctatcacaatcatcattagtattgtggtataagatatcttgtaactgtagaaacactgcacaccctaacctggggggtgaccttcattatatagcctagaaggcttgcagtacatctacaagttacaatgtggtactaatacaattcaggcaacgagtacaaggcaaatgggccgtaagcccaatacgatctgttataattatattctaacaccctccctcagtctaagcgggagtgtcacgaacacagagactagacctaaaatcaggaaacaactgtacaggtaaccctttagtcatgatgtccgcgaactgatgagacgatgggacatggagcaatcgaaccggtcccaaggccactttgtcacaaacaaagtggatgtctatctcaatatgcttcgtgcgacgatgatgtactgggttggcagtcatatagacggcgctgacgttgtcacagtaaacgatcgttgctgaagcaatgggcgcatggagctcctgaagcagctgtcggagccaacaagtcttagccacagcgtgagcaacggcacgatactcagcctccgcactcgaatgagaaaccatagtttgtcgtttagaggaccaagagactaagttgtcaccgaggaagacacagtagcctgaagtggagcaccaggagtccgaacatccagcccaatcagcatcagagtaagcgatcaaactgtcgaagccgccaacaccaaggtgaagcccggtgaacagagtgcccttcacatactgggggacacgcttgagcaacgccagatgaggctcacacgggtcatgcatgaagaggcaaaccagctggatggcataggcgatgtccggacgagttagcgtgaggtactgtagagcgccagcctgactgcggtactgggtagcatccgccaccggagcaccatccatagctgagagcttggcctgagtgtccacaagagtcgctgtagagtgacacttggccatgccggcacgcttgagcaggtccatggcatactgtcgctgggagaggaagaggccgtcggaggtccacgtgacagagatcccgaggaagtgatggagctccccgagatctgttatggcgaactcagagtgatgaagccgaatgatgcgctgaagtagaacaggtgacgaagcagtcaaaatgatgtcgtcgacatagagcagcaggtaggcgacgtcggcgccctccttgtaaacaaagagggacgtgccggagattgaagcagtgaagccggagcgctgaacaaagccggcaaaccgctggtaccaagccctaggcaacagcttaagtccgtacagggacttttgcaggaggaagacgtggtcggaggtgttggcagtagacagtctcatccagatgattgtggagaagcgcgttcttcacatgcagctgatgaatcggccaggatgaagaagcagcgatgctgaggacgacgcggatgatggccggtttgacaaccgggctgaacgtctcgtcgtaatcgatgttgtactgctgcgaaaaaccacgaacgacccaccgtgctttgtgacgggcgagagagccatcaacatggtacttgtgcttgaagacccacttgccagtgatcacatttgcacgtggtggtcgaggtacaagatgctaggtgccattgtcgatgagcgccttgtactcgtcggtcatggccgcccgccaattaggatccgccatagcagcacgtgagttggcaggcagcggggaagccagcgtcgtggaacctgcagtgaaactgtactgctggatgggcggtggtaatgatgccgtctgggatcgcgtctcccgggagggaggagctgggaccggcggtgccgccaccggtgctgccgctgcagctgtaggagcagcggccgctggtggagtcggacgaggacgtcgagacgcggagaggaggcggtgctgctgtccgtgatgcagcggctgcaggagcagccacgctgcttgcagagggggctggcggtgggggcgaggcacccaagggcacccggcgggcagcgccatgccacaaaatggccaggtccagtccaacggggtcaccggcatcagtggcatcctccaggggcgtcatggcctcagtgtccgaggtggacagaggaggcgcgggcagtatgtcctgtaacaaaaagtcaaaagagtccgagtggggcttggaagccgcaaacggaaagtgagtctcataaaaaatgacgtgtcgcgagattatgattttgcgagtggaaaggtcaagacaccgatagaccttctgggaaggagagtaaccgagaaagacacacgccatagagcgaggagataatttatggggagtcgtggcactaaggtttggatagcacaagcaaccaaaaactcgaaggatggagtaatcgggcatcttgtgatggagaagatgatagggtataccgttgttgatggacgaggatggccgtcggttgagcaaaaacacaacggcagagagagcctccacccaataagatgggggcatggctgcatgaaccagaagtgtgcgaacgatgttgttcaagctgcgcagcatgcgcccagcttctgggcgtaggcgtcgacaaagaggtcgccctggaacatgctgtggaattctcggccgaggacgacggtgcgcggttccttgttagcttggaacaaggcctcgatggagacgtagagggcgcgggcgtcgtggtcggcgtcgtcaatggcgaggtcaaggataggataatcgacagagctatacatccacccatgaatgcaggcatcgggctgagaccatgtagaatctgccggatgtgcgggcagcgtgccgtcgatgtggccaaggagcccgtacatggcacagagggcggtgaagaatgccatccacttgttgaagttggggcgcttgaggctgaggacgatcggcacgtgctccttgacgttgacagcggcgtaggtggcgaagaacgaaggagcgagggcgtccaccatggcgtcaccagaggtcgccgaggaggtcgagctggacgtgctagagtcggtggccggagtcgtcatgacgacgcagcgtgaagaagatgatcgcgtggctggatcggaggcagcgcctcagaaggtggcatggcctggcagtggcgtagcctgagggaggcgacgcagctgggcagcgcggcctggcggcgacgcgacctgagcgtggcttgggggcggcacggcctggtgcggtggcgcacggcctcagagaggtcgcacgggcacagggtggggcgggcgcgagccgaaggaaaaaatcataattaggctgataccatgtagaaacaccacacaccctaattagcctggaagtcttgcagaacatctacaagttacaatgtggtattaatacaagtcaggctaggagtacaaggccaatgagccataagcccaatatgggatgttataattatattttaacagtaaccttctcaattgagccatcttctataagagagatgctaacttctttgtttcataaaagaaacagaacgttttgttcaacattgatatcatataattgttgatgcaaaagttgatctgcaaacacaaagggctaatacccgatttaaacgttaaggcgtgtcagccgatttgaccttactatcggcaaaggtggtaacttgaatactttggtcctgacaacagcgatacgcccggatgtcacggccaagaggcactcacgcggaactcgagaatatgccaagcttaagtcgatgaattcctaagaactcgtagtaaaaaggaaaatatgacgaagtcgtcgaaaaagtagatgctggaatatgagtaaaaacttgtgtttgattggttgataggtatcttattacaaggccctagggtctatatttataccctgctcaaagagctacaatcagacacgactaggactcaaattccaaattaaacagaatccgtatacaaaacgaatttaaataactaagtaaaatataaaactacccccttgtaaccgaccaggacaccaccacggatcgatcggcaatctccacgctttccttcagagtcatcggcaaccttcctgttatggccatcggcaaacaccgatattgatcatcggtaagaacacgtcaccacccctgaacttagtcatattcaatcgtctcttcatctgcaactatcctcatcggcaactcttctgcagaccagttaccgttgctccacctgccgacctatactccacaggtccctgggtatgtgtccaaaaacggtgtcaacacatgccccccaatatcggagtataaaatcattgatgctccaaaattctctgcagtaatgatgcctttccacaattaattctcccaatttggtaaccgaccgtttaaatctgaacaaccttggcccgattctcctacaaattcctcaaccttccgaaccggatctctccactttatgcgcccatcggcaatattaccgttagagggcactgtcgatggaccgaccaagaaatcccgcacagtgaaatatctccaaaatcatgaccgcttcctgtcaaatcacctgcgcaatcccttgattaccgtgcgaacagttaccatatccacctgagtaccctcggattttacggatgcagcgaagagataagtaaaatttgcccttgcccgttttgtcctataaatacttccttctcgggtactccttctccatcgcatcattctacagccccaactctgctttcttgacggcggcactgttcgatagctccaagaactccagcaagaactttctccaccaaccctcaagttttcgatcttcttccccgcggagcaatggccgtcaacttcgtcgtccctgaggttagcttacccctcttcttttttcgtactcatgctgtacttttgttcatccgcaattccttttactgaatattccccttttttcttctttttactttttcttttatccttacaatctttaggatttggccaacaagatcgcaatccctaccgatcaaccccatctccaatgccttggtctactaggaaacttagatcccaccgatcttataaacgcagaaataaacagaatcccctttagagccgagaatttttctctagatctatggaaagatgccttccgttcctggcccagtcctaccaagggatggaaggattggttcctgagtgtcagtaactcaaatgaagtccaatgggttgaacggaaattagatcagtgcattagattgtctcttgccgatatggagagaaatgagtcactactgatagctgcctcatacttttggtcagacacactcaatgcttttgtgtttagccatggcccagcctctcctacacttgccgatgtacttatgctcaccagcttagatgtatccactaccgataccacccacctgttcgacaccaaacccagtgctaaggtagaaactcgtgccatcggcggttggtcagggtacattcagaagtaccgaagaacaggtcctgttaatgcaaatgaacagaccacttttctgaacatgtggctggataaatttgtgttctgtggccgatcagtaggaccaacttctgtttacttgtcgacagcagaaagattagccaatggtggccgatttcctctcggccgatacctacttggctctgcttatcacctcctacaccaggtagcccagaaactactgcttggtcaacccatcggcaacttaggggtccctggtggttcatcaatatgtggcttagtctccacatgctcaagtgccttgagttcgacctctttgcacagcgtttccccagggatatagccgaggattatgaactggatgaagaagaatcagcaactcgttcccctctgaactttggcaaagctgccatagttttgcctggcacaggtggtaacgcagaccaggttagccgattcttcaaaactctgtatgagggtctgaccagagaacaatgggcatggatgccttatgaagatctagataccagatttcctttgactttccaccccttgaacgatgctctcaacaaggaccgtgatgtgatgatggcaattatcaccccaagagccataccagtgaacttctttggtagtgggaaagcctccaacctgacctacgaattttataacctatcggcactagctcgccaactggctttcggccaactgccgattgcactttgctacgctgatgtgataaagccgagggagattgtcaccagccatctagaatggatcagggtagcccaacttccaccaaacgccgatacagatgtcgatctatcggcttggatcccggctctcttcatcactcaagcatacaaacagtggtgggaagaatggaaataacacctattctgcagatcggctctcacataccgtggcatgatcgactcccagtacaaagtcccggataatactgtaagtactctaaaccgatgcttcaatcctttcactttcactttacatcggtatcttactttccttgatgcaggtcgatgacacacccccattggtcagcaggagtggtaagccgattgagctccttccatcgggcccgatttctttgatcggcaacaacgctccaaccttggctgctataatgcatcggggtgtgcgtctcaagaaagttaccaccaagcgggcgaagatatccccatcggtagttgcctctaccctagcacaagccttcaaggtaaattttcgaattcttttactcataccgatttcattcttatacttattacacatgtactcataaacttctcagtgttgtatcagcacactggtacaacggcaaagaccagaagtacgactgctgatgccccccagtccagtcaaccgaagagaaaatgttccaagagtaccagattacaagcaaagcgccagagaacagcaacgccttctcctcccccagtatctctgattctagtagaatcatccccttctcctccagaagcccagatacaacaagcaccgtctcctcttcaaccacaagaagaaacccaaacagaagaactccagccataagaacctcagccagaagaaactcagccagaagaaacatcggctgatgtgcacaagcagactgccgatccatcaagcttaatcatagcatcagtagtttcctcgattcagactagttctgcacctcctcaaggtaacatactttctatttattgctgatgaacccactttttccaatttgtaattacccctgttaatctttcagctgacgtagtctcatcggcaatcccaaccgatcaacctgtggttccatcggcttcaactagtcagaggcgagagatagctctgaagcaagtaagttacccaatccttatttttattgttatcagtacttgatcataaaataacttattatgtcttcttttccaggaacaggattctaccgacagcctattctccttcgccatcgagatctctaagtctgaaggcgaggaagcaagttcttctcgagcagttggaatctcatcggcagagattagagcaaagctggtggatctgttagcccttctccatcaagatacagcacaattggtcgatgacttcgatctagccaaagttctgttcaaggctctcagaggtcaaatccctgccgatgctgaggaggttctttttcaggctacacacttagagagtcgtcaagtgcagtatcaaaaggctacccagcgtcttgccgatagagcttctcacgctcagctctcagaggagatgatgaaagtgaagctccttgccgatgagaagcataagagcatcggcattctgaaatcctcaggagatgtactgaagcaaaagatctctgatctatcggtgagaagggaagctctattggctgaactcagacaagtggaagaagctctatcccaagctcaacaggaagaaagccaactgcctgaagcaatcaagactcttgaacaagagcgaaacatccaggcccgtaaagcactgcagatgaagaagaaattgaagccagtagaaggctctgccgatgatgacgtgaaggagatagaagaagccaaccaggtccgtctgcgcgccatatcgacgatccaggctctgttaaacatgtgagctcttcatcggcagtgtgctttgcttctttcttctaatcattttgatccagccgataggactgttatcggcatccttttaaaacattaagtccggccccagatacactttcaattcagccgataggaatgttattggcacataaactttcatgcatcaagccatatgctggggtaatatctctttaaatatttgccgttcaaagctctgggaaatttaactcctttgagagtttctaagatataggcgttgccaggagcagatcgatttatccgatagggaccttcccaattgggagaccacttcccaaattttgaaattttagtcccgatcagtaagattagtttccatactaagtctccattggcaaattgcttagcctttaccttcttatcataccatctggcaactctcttcttattttcttctatacttatcaaagcccttagccgatgccctgctaaatcatccaactcgtctgtcatcaaagtagcataatcatcgtcagccaattgatcttgaaaagatagtcgcctagaccaagttttaatttcccaaggtagcactgcatcatgtccatacaccaattgataaggtgaaactttggtcgacccatgacaagccatccgatatgaccataaagcttcattcaacaacgtatgccacctcctaggattttcttcaatcttccgtttaataagtttgataattcctttgttagatgcttcggcctgcccattagcttgagcataataaggagaagaatttaatactttaattcccataccgattgcaaactcatcaaactcccctatgtaaacatagtaccctgatcgtagtaattgtttgaggaattccaaatcggtaaataatatgctctttcacaaaatcaattatattggccgatgttactttcttcaaaggaatagcttcaacccaattggtgaaataatcggtggcaaccaagatgaatttatgtcctttgcttgatggtgggtaaatttggccgattagaacaatagcccatccccggaacgaccaaggtttaataatgggattcatggccaatgcgggtgccctttgaatattgccaaacttttgacatccttgacaccctttgaaatatttaaaacaatcttcaagtatggttggccaataatacccattcctcctaatcatccatttcattttaaaaagccaactgatgtgctccacatactccttcatggatttctcccattaaacttttagcctcatcatcacctaagcatttgagaagaattccatcaattgttcgataatacaattcatcttcgaggagcacatacttggtggcttgaaaccgaacacgtctctcaactttcttggatggatctttcaaataatcaacgatctattttctccaatcatcggcactaattgctgatattgtgtttaacatgggctgatatcccgaggcatgctgagccaatcgattggcctcttcattatgcaatcgagtaatatgctctaatcagaaatccctaaattcctttaacagttgcatactcctttcgtaatacgttattaagacctcacttcggcattcataacttccagctaattgatttataaccaacatagaatccccgaagatttcaacagcgtcagcacgaacctctttcaacaaatccaaccccttaattaaggcttgatactcagcttgattattcgtcgacgtggcaagaatcggcaaggagaattcgtatttccttccctgaggggaaattaacactatgtcgattcctgcccccccggtcacacgtggatccatcaaagaagagtgtccaaggcacaatttccaaagtttccaccgcaccgcaatgttgagttacaaaatcggtcataatgtgtccattaactgctttagccgattcgtaacgcagatcgaattccgacagtgccaaaatccacttaccgatcctaccactcatgatcggcatagatagcatataccggaccacatcatctttgcatataacagtgcattcaactgataacaaacagtgtctcaacttaatacatgagaaataaagacacaaacataacttttcaatggccgaatacctggtctcagcatcaatcaatctcctcattaaataataaatcacacgttctttcccttcaaattcttgaattaaagttgaaccgatgaccataccatcggtagataaatataatctgaagggctttccttactgaggtggaatcagaagtggaggatttaccaaataattcttgatttcatctagagccaactgttgctccctcccccagatgaactcttgatcggctttcaatttaagtaaaggactgaaagcacggattttgctagataagttagatataaatcttttgataaaatttaccttgctgatcaaggactggagctcagttttattggtaggagcaactattttgttgatagcatcaatggatctcctactaatttcaatccccctttgatgcaccatgaaaccaaggaattgtcctgccgatacaccaaatgcacacttattagggttcatcttcaaaccatgcttccgtgtacattccaacacctttcgcaaatctgcaagatgttttgtgaaatccccagacttaaccaccacatcatcaatataaattttcaccagcttgccgatgaactcatgaaagataaaattcatagccctgtcataagtagcaccagcatttttcaagccaaaggtcatgactatccattcaaacaacccaacatgaccaggacatctaaatgcagtctttggaatatcttcttcagccatgaatatttgattgtatcctgcattgccatccataaagctgatgatccgatgcccagccgcagcatcaactagtaaatcggcaaccgacattgggtaaccatccatcgttgtagctttattaagattcctgaaatcaatgcaaacccaaagcttcccatttttcttgtagactggaacaacattggaaatccactcggcataccgacactgccgaataaatttagcatcaataagtttggttatttcggccttaatatcaggaagaatattaggattacatctgcgagctagctgttgatgtagccgaaatccagacttgatgggtaaccgatgttcaacaatcgatcggtccaaaccaggcatctcagtataatcccaagcaaagcaatccttatattcctttaacaaatcggttaactgctgcttacactcagaatttaacttagcactaataaaagtaggtctaggtttaccaccactacctatatctacctctaccaaatcatcggccgatgtgaacccctggcctcgttttccatcatcggcgaacctatccattaaaactcctcatcagaaccgactacttagatcggtggagtttcataatcggccactttgaggaaatccttctcccaaatctctcccgagatacacctagtcttcacataggtatctgcctctgccgatgcaatgacataggaagaatctcccgagacaatctcaaccttgtcacctacccattgaaccaagcactggtgcattgtagatgggatgcaacaattggcatgaatacaatctctccctaacagtagattgtaggcaccttttctagtgatcacaaagaaggttgtcggcaaggttttgctggcgatagtcaactcgacgcagatcgcccccttaaccggagacacatttccttcaaagtctttcagcatcatatcggtcttggtcaaattttgatctccttttccaagcttccgatagactgcatacggcatgatgttgattgcagctccaccatcagttaatatcttggtcatcggctgaccatcaactcttcctttgacaaacagagccttaagatgctgcctttcattgtcggtaggcttttcaaagatagctgtcatcggatccagagccaactgagctatctggtcagaaaactccaactcctcagcatcgctggacggcgcgaggaattccattggcaacatgaataccatgttaacatctgccgatggccctttccctttaggatctggttgttgctgatccccagactggccagagttctcgcccttgcttagctcttctcgtctttcgtgttgcagtctcctcttctgtgtcttagtcaacccctctggacaccatgggggaagtggtgactgccttgccgatggacgacgatgttcccttgactccatccgatgagtattggcgtccctacaaaatatgaactcatcggaaactcgtgcattagccatctcttcaagctcttcctggttcctgggaaaatattcaacgcgatcaccaagcctgtcgtgtacactgagtctgccccccagccgatcatgaactgacgctctccccctaatcggcccattaaatcgccgatcatcatcgtggtagcgccgatcggatctgtcataccgatcataaccattgcactcagggcaatctctaacagtgggtaatttgatgttctgctcccagcaatggataaagaatgggcagttccagtgatccttgtgccgattccactcctgtcggcgtctttcttcttcccaacgatagtcttcttgctggcgccgataacgattctcacgttgctttcaagtcttccgaggccttctatgagttatcacaataccagatcggggaggccttcccgagttagttccctcttggatcaagccttttcctttggcatcggcagtagtagtttgatgctgaggatctaccgatgcattcctttcagctgctttcgacgtcaagactttggtctttcccttagcatccaacatatttgttgggaaaggatgttgatcgatcttcatcggcttctgagctttggaactatcaaatttgattctcccagattcaatagccgattgcagctgttgtctaaaaaccttgcattcattggtgctgtgagaagttgcattgtgccactagcagtatttcatcttctttaattctttggccgatggaataacatgattaggcaacaatttgatttgcccttcctgaagtagaaagtcaaatatcctatcggctttagtaatgtcaaatacaaacttctctggctccttatgcccaaaagggcaagacatcggctttttgttcttcacccgctctgccaagccgatgactggctcttcatcagaatctgagcttgctgcctcgtcaacaaatgacacctttttgttccaagctctcttaggttcaaagggtttgatatcctggtcggaaatcctctggaccaagtgactcaggctctcgaactcttgagaagcatatttgtccctgatatgtggcaacaaaccttggaaagccaaatcggctagctgctgatcgtccaaaaccagactatagcatttattcttgacttctcgcaacctctgcacaaaactttcaaccgattcatcattgcgctatttcaatctgaccaaatcggtaatcttcttctcatggactccagaaaataagtacttgtggaactgcttctccagatcggcccaagtaatcactgaattaggaggcaatgatataaaccaggtgaaagccgatccagataaagatgatgaaaacagtcgaaccctcaattcatccatgttagcagcttctccacattggatgataaacctgttgacatgctccatagtcgacgtatcatcctgtccgtaaaacttagtgaaatctggtaccttgtaccgatttggaagtggaattaaatcgtatgcaggaggatacgacgtccgataagagtaagtgttgactttgggttttatcccaaattggtctctcattacttcagtaattttatcggcccaataagcatcggcatcttgccgatggggtggttgtggatctggcgcccactgatacacttccacgtgtcgctgaggcgcgcgatctacatggaacatggggttgatcgtctgaccaccaaactgttgaccaagattcatcggctggttgggcaacccttgattctggaatccaggctggacttggccttgttgaaaccctgaggcctgatgattctgttgaggcatttgtggaaagactagctgccccgtccatccactgttagcattcatcggcatgaaccctgccgatggctgaagattgggcatcatcatcgaattgacaaaccctggctgtgtcataaacctctgctgcgtcggcattgaatctgccaatccgttaggcatctggaatgttggagcttgagaattcccagtgtaaggtcttgcagtagtagttgtggtatactggggactctgattcatcggcagattgggaggtgccgatgccataggagccttgcctgtcatatcagccacttgagatgttccaggagtcttcaacatcatctctggggcataccataaccccaccagttgggaggaatagacctcgacattgccgatgctaatagatctgtggcaagcttaatttgctcctctgaagttgatggattagttgtcatcggcgtagattgcacattagagagtcctagtgtgcttggaggagtggtagtttctgtaccctcagcggccgtagtagccggtggagctgtgacaactggcgatcctggctgatgatagacaaggcccacataatttggtggcaattgtccttctttgaaagttctagccacggcgttgaaaactgtattggacagcacaccagcttgattgatcaaggcacggttaatagcactatcaaccatgtcttgaagtttaccaggattggcttcaaaagtagcctgctgaggcgccggcagtgcttccttctggattacttcgccgctcctgttaatactgaaggacttcaaacattactgcttgtaatcctccatagcttttgcaatagcttgcttcagctcatctctgagattggcttccgtcacggggatgacgttctccaagtcgaacttggtagtcgacatgtcgatcttgatcttgaatctggtcccactgggcgtgccaaaagatgtgttgatgcaaaagctgatctgcaaacacaaagggctaatacccgatttaaacgttaaggcgttccagccgatttgaccttactatcgtcaaaggtggtaactcgaatactttggtcctgagaacagcgatacgcccggatgtcacggccaagaggtactcacgcggaacacgagaatacgccgagcttaagtcgacgaattcctaagaactcgtagtaaaaaggaaaaaatatgacgaagtcgtcaaaaaagtagatgctggaatatgagtaaaaacttgtgtttgaatgattgatagatatctcattacaaggccctagggtatatgtttataccctgctcaaagagctacaatcagacacgactaggactcgaattccaaattaaacagaatccgtatacaaaacgaatttaaataactaaggaaaacataaaactacccccttgtaaccgaccaggacaccaccacggatcgatcggcaatctccacgctttccttcagagtcatcggcaaccttcctgttatggccatcggcaaacaccgatattgatcatcggtaagaacacgtcaccacctctgaacttagtcatattcaatcgtctcttcattggcaactatcctcatcggcaactcttctgcataccagttaccgttgctccacctgccgacctatactccacaggtccctaggtatgtgtccaaaaacggtgtcaataataattgaggaacttgtcttttaaggagacttgatcacaccacttatcatgtcaaaaactggtattcttatttcttcctaatattatcttttcatattccacatccattctcagccaccaccatccaccaccatttacataggagactgatgttcattttccataggtctgtgaccccccaaccctcctttgtttttgggtttagtgatctcattccatttgatcaagtggtatttccgcttcaaatgaccttgccaaaagaatctctttttagccacatcaatcttattagtgccagaagtagtccgttcacactatctcttgtcaaaccccttgtgcccaagacattctagcacaaattataatattaagaagcatgctccacgatggcagcatccccctcaataatgatctcaatatggtttaggcagagaaatggtgttctttctctttctaccatgagctattctatgaaagtactcggagttgttatgatctttcaacaaccacatagaattagatcccttatgccatatccttctcttccatgaaacttagattgactggaagactttatatccagcttgagcacatcaagctcctcctgtttttctaacaccaccaactcgtttttagcaaattcttgtattttctagtatgaccttttagactttgaccccaaccctttattaattaagtccattttgatacaccaagtatcaatggcagatttagtgatttagtgtggtctgtcccaaatttccttgatttttatgaaaaactcaaatttcagccaagagtttaatcgaggcaaaaaggttttgattcagatttttttagtcagctgagtctttaggattaaaggttatgatcagacttgagtctttatgataaaaggttataatcggacttgtatttaggaatcccaagtttcatatgtgcacatatgtgttaatgattagatgaagatgttagaaaaattattttccacgttgttcttattcttatattgatgttcccctgcaattagtaactgttgattgaacatttcattgcacatatgttccttttatattgacaatagtattgagtaagttttgttctcctctgcagctaggttctgttcgtagggactactttggagttct

SEQ ID NO: 4901 - DNA, 950 bp, Sorghum bicolor
  Intron number 10 from transcript Sb01g049880.1 (locus Sb01 g049880) derived from phytozome v7.0 (chr-ID chromosome_1; pos 72877745 to 72878694)
ttaagaagaaggaaaccagtcccggagaatataaggtgctatttctttgtaaaattatgtttgatattaaatcatttctgtctgctttctttcaaccaagggaaaactcaacataccactgaattgtacccctttattaatacataatatattgctatgtcacatgtaagctgatctaccaatatgcttgaaatactttagcaagactttaggggcttgtactttgtgtttgttttttaatggtgtgttttaaggccctgctgggcttgtattgtattttgctcttaatataatgatgggcaggtctcctgctggttcgagaaaaaaaaggaagactttatgggcttgttttcatagttagagatgcaaccaatgcaaaaatgagatagccggaaacaaacacaagctctttattttttgacttcattagcagctcaaattaggtgttattccaattatgagtcagaaatatcagctttggattcattcaattcaatctggaacttgtttcatacctggtagccagtaaccactatgtcagcaaatccaagtaaaaacaatagtttgaagttctggatacagaccccccccccctcctcctctctgatgtatcgcttaaagttgtttggagtttgtgtgattattttagtttctgttctttgcaattgggggcaatcacaaattctgtgatggttttcttactacttgtcccattctgaaggttttaatatgttattcgtgcttatgtataatgtcttgttcatttgactgctgtatttgcttatctttacccctatactacaaaaatgtttgcactatgcctctttgcaatacagagcgctgtcctgtaatggttttgattacagccagacaacatgtactttttatgtgagtttatgtttgtccttgtttcagattgtagatcttgatcttccaaacacaactgagag

SEQ ID NO: 4902 - DNA, 1976 bp, Sorghum bicolor
  Intron number 1 from transcript Sb04g027260.1 (locus Sb04g 027260) derived from phytozome v7.0 (chr-ID chromosome_4; pos 57116418 to 57118393 reverse strand)
cctggcccagggcggccaggacaccgccatccaaggtatatctatgcccccgcctaggttactctcctgctgctattcttcgattcgcgcttcgatctgacatggaatggcgctcggttgctgatctggattatttagtttctggagatgcgaattggccgttgagacgatcggtgttttctgatcttccgtgttggtgagagtgtatcgctggagttaggattttcgcaactgttccccccctcatgactcagggacttgtttgtttttagacgaatcataggaagtaggaatagcagggcacggcagttctaaagatgacgtgatgaagcaagcagcagtgaatgaacgaaggcacgacagcttttatttgtgtatacgtacgtgttcctggatgcatttatatagatagatatccatgttgcatcacaggcagcttgttgcacagtgcagacctgtgtcactgtgtgcagtgcaccaatgatccaatgcatgtatgtatgcgactatgtgcgcatcaaacttaaaaggagatgtacacaaaggtataatatgtagctcattgtgtagcatgttctcactgcactggccatgcactttagattttctctgcatgtatcctttggcgcgaaagctagtttcagatttaaacctgttaacatttaacgtcacatggaatcgttttgtcgtgatctgctaggaaagctttaaattgaatattgcaatttctgacagctggcttatactgacaaaggacgccgattatatgagaatgtatgccatttaaacttaggcagaatacaggctgtagtgtattctgcatccgatatcttatctaattacgctttagtcataggtatacttattgaaacatgatattgttctgaatctattgttattgcgagtcattacattcaatgtatgtaactaactgccatactggaaccataccggaatagtgagatgtaacaacaaaagcattctcctatttcaaaattaggatactaggtactgttattgttggggttctgactggccgaatgttgattctgcattattctgtggtaggtttagatggatttatgccttttcatatatgagaagtgactgcaatagagctgctagctattcattaataaggtaaaagtgctagattaagtgcaaggcaaagtagatttgtatggagtttgtggttgctgtaataagttaggacctctatttgctttctcgtaaagattgttgtatatggtaccatagttcttctcaacccaagtggaacctgaaattgtcttgtgtgaaaatgggtcgtatggagtcatgatcactttcatttgtcacaatggtcatttactccttatactttcctaccttgttgtggataccaagatgagactgtttgggattgcgcatggttcctaattttgagttcaatgtatgtgtgacctttggggaaaaaaaggctatgtttattcactgcctaatgtttccttattcaattgcatcttaagtagtctccagcgcaattttcatgtatgaagttatgtggttaagctggaatattaaagattgtatatcttttcagcactttgagattagttgctgttcatgccttttgttctctggaaactatttttaacattttctttgtagtgagtagtgacacatttgatatccatgtctggaaatgtggatgcattagtaggaactgtatctcaactttcaaaaccttaaattggtatatatatttcaagtcaaaagtgatacatttctcctgaatcatgcttgtagaatggttacacatcaactttaatttagactcattgtccttattagcctcatggaatagtttctgttttgtcctgttttatagtgattgatgtacaagctcctttttttaaaaaagaaaagaaaagaaaagaaagaagttgatgtgccaacttatatatgttctaaacctcattgttttccagttcctg

SEQ ID NO: 4903 - DNA, 2813 bp, Sorghum bicolor
  Intron number 1 from transcript Sb06g003990.1 (locus Sb06g 003990) derived from phytozome v7.0 (chr-ID chromosome_6; pos 8887925 to 8890737)
atttggtaagtcaggatcctaacttactggcatcatttgtacagctttggtgttgatatcatatcagttatcgtttggtagtacacttctgttgtttaaatggttgtgttcagtctctaataaactatcgtttggtaatttgtacttggtagtatgctcttttagcccttgcacccctacacttttactgaaattgatatttgaatacaataactcagttattatctgtaagtatttcaatgtttttttttgttctccacctatgttcaatgaatgttcttatctattgttggcatggaagaatcaattaaacttggaaaagtttttcttcctttcttttttcctttgctatgtagctcatgttagttttcatatctatctaaccacaacttacttggggataaacactggtatgttcttgtttttccatcactatactatgtaagataatggcaaagaaaaacgacaatggaaagagcataaattctatgaatttgtatactgaagatataacatgaaactgcgcaaatatactggagcaatagcttgtacacatttgatttcaatttacagttgagttctttcttttaagaaaaggtttttaaattgaactacttagcgatggaatatttggtcatagctagtgccatgttaggctgcatgtacaacagctggcctcaatttgttgagtgagtccattagggtcagataagctctatataaagagcatttagctcctacagtcttacttggattaaacagtaacaaatctctctagtacatccctttctccctgtatctctgacttgtgtggtagctgtccacagttcctaagcctgtcatgatgatacacccacaaacagacatgcatgtgacaacctagttcatttaccaagctgaactgaaaatgttcctttcagcatgtccaggtctacatcccaccgcttaaagattaatggatatgagctttaaaacctttacattgttatggacccttggccttggctaacctgctctcactatcctttttcaactatgagaacttgtttgcttcttcaaagatgaactgatcgataagaatctttgagatgttgaaacctacgaattgaaataagttggtttaagatttagtgcaactgaaagatcaccaattcgccattgtgcttgtggaggtaccagtgcaaaagtcatttttgttgcaatatgaatcctttggaaggcattcaatgtaggcatgggctgaaatatgctacaccaaactaactgaactgcaccaaatttttttggtgctctgtgtttcttgcggtgggggaatcactaactatttggtttgtggtgtttggtatggtttttgagtctctgaagccgaatcaccgaaatcatcgaatgtctaagcactagcaggcagcctgctggtcgtcagcccatcctctcacgcaatgtcccagagcccatgttatgatttgctccccagcctaaccctatgactccctatgcatggattcaagattgcaactcccctctccatctccaatctgcatgactgcaaggcagtggccatgacgagtgcacaagcctccatggacacaatagaggccagtgatgagcacttggccctgacttgctcgctactctacacatccagggctgtgcaggaggccacgagggtgagccgacagcagaggtgagcatacaggcctgcatggtgagcttggtgccttccttgctcagctcgcgaagcttcttcagatctgagcttgggttctcttatacatcttctttgcttaatttgcttaccacatgtttgttttttgataaaaaatgaacaccacaccgcaataaccaaaacaaaagtttgtggtttttgtttttctcgcaacaacttcagttcacaagttctggaagatgaaatatttcatcactgatgaaactgaacagaagtacagaacaaactaaacaaactgaatacccagctctagttccaggcatcctggattcacaatctcatcattgtgtccttgatgtagctactcgtttacactcccatttaccatctgttttgacacgacccagtagtgtgggggtggggtgtccagttgtgctgccacccaggggctgggagccaggcctgtttgtcgtctgtttgacactcatttaaaaaaaaactaatgagaaatcactgttccgcactgttccaacaaagtactggcccccagactgtaatggtactgaccccggtgcagttccgatctagctcttcccctgacaccattaaccagggttcaagctgggtgagttatgctgctttccaagtgtttctaggtggtctaagtctttggtctcttttcttgagggaggtatttcccatgggtcgaggttttttaacatgtctgaaatcaccattactaaaaccaaggctttgtagcacagttgtaattgtggttgcaaaggttttaacagcacaattttttcgtcaatttgttagtagtcactttacattctgctgtgaagctgagactacaatttttaagatttagtgcctttatatatacaaagtttgaataactggcatcatgcttacatgctttacttttgtggatagatcaaaagctttcagttgacctggtcattgtaaaaccatctgttgttcttgctaacctgaataatttatcatttatatacattacaatgattaggatatgatcattattgctctttctaatttcttgctcttgatgaacaagattgctattggtagagttaatagtactgacattttcttgtcttccctgttggttttggaaggaaaaaga

SEQ ID NO: 4904 - DNA, 782 bp, Sorghum bicolor
  Intron number 1 from transcript Sb01g026760.1 (locus Sb01g 026760) derived from phytozome v7.0 (chr-ID chromosome_1; pos 45788375 to 45789156)
caggtacctattatattatttttatatatacgtcgtatacgtagtttgatttcttttctttccctatataactgttctccaagtgggttctatgttttgtcaaaatcttttaaaatcttctaagaacgtgagaagtggatatggatttctgacatgttttctgaactagttttttttttaacgaaaattctgaaatatttaaccagattttcagatataattgtaattttagcagtgtgctacatctttaatttggcctgaaaatttaattagttcaggcaaatagttcattttaataggtcaagagtcaagactaaactcctgaaaaagtagcttttttcaaagtcaagttagaaagaagtggatgttgactcaaaaggagatatgattatagaagatgttatcggccgaaaaactttttacatagtaatgattttttgttgaagtgccttcttgctataaatttaatttggaaaaaagaattaaaccagtttggtcagcagaaaaaacctgatacctagatatggcagagtaccttgtatatataggttataatcataaaatatttctgatttttggatattttcctttcttttatatatgctttctattgcacagctagaaagatttttatttcagaaaattttctgaagttatttgtagttctgagatatcaaaaatgtatgcactgaatgtataataagtaggttaacataggtaaaaattttcttaccataagtgacttgtttttttttccctcatatataggtgacagaactcaa

SEQ ID NO: 4905 - DNA, 7393 bp, Sorghum bicolor
  Intron number 1 from transcript Sb07g006350.1 (locus Sb07g 006350) derived from phytozome v7.0 (chr-ID chromosome_7; pos 9189564 to 9196956)
tttgatttctttgtggtgatcaaaccggtatttccacaaccacatgcgtgcgcattctttattctaggattatttgagattcgcgctggtcaacatctgtctttccctatctctttcccaaccaacattcctggcttccctttctattcacatctgactcatccattcctaaggttttgttacatgcacttaaaaaacccaaaactttacaagatttctcatcacatttaatcttgcggcactatgtatagaacattaaatatagataaaaaatataactaattacacagtttacctgtaaatcacgacgaatcttttaaggctagttgctctataattgaataatatttatcaaataaaaacaaaaatttcaaaatctaaaaagtttttggatgttggcctaactatcttgtattccatccaccgacgcctctcctctttcccagcgctcgcagctgctctctctctcccaccgccgctgatcctcctctctcctcagcgctcctgcctgagctactctccgacgccccttctctctcgtccctctctctctctctcgcaactttcatctctccctctcatcctgccctctctccctccctatcctctctcttctctctgtacctagatcacatctctcagatccgcttgtttgaaggtttgattattgaccttttgggattctctatagctcattcatccgcataattttttcagattaatgtactggtagacaatcaatttgaactcttcttgattaatttcactcatatttacagttactgatctattagtaccccgtgatttgtttattgctctgtgatttgttttcctcctatagatctagttttagattattcgatatttttatcgatcatccggtcgaaatttttgaactacttcattcactagatgattagtttttttcttatttttgagtacggccacactatcagctttggtagattttttttgttgttctattcaatactatctgttttctattatctgttgagtgatttgtgcagttgtctaaaaatattacctatagtatggtattcagttgaggatgcaccacaataaaatgaagacaacacctgcgtgatatcttttttctctgtcagtttgtcttctatttttaaagtatactagataaatgcccgtgcgttgctacgggaattttaaaattttcaataaaatttaacatcaataaaaataagaaaaaatagtaggttaggagctcgaattttcaatgcagtaagagtatcaaaaagttgtggatcaaaatgaagacaaatatattttaacttggcttagcaacatatgtttcgagccacattcaaataagcgtcaaatttagtaacaatgtcaaaataagtgcatgatagataagtcatccataactatctcttttattgtcttatgcccataatgcggctaagatatttttgtacggatagaggaatcattcatcaccgtgaattcctatcatacgtcaataggtcaatcacaaatttcttctgttgtctttagccatcgtgtgcacaagacaaacataaataataagttgtgtgtgtacgtgtgtgtgtatatatgattggcatgagttttccgttgttccgtgcagatatgaattacagaaggatgaaggcatttaaatcactctagcataataaatgatcaacttaacggatggtgttgccgatcaataaagtggagattaatgtatgtgaaacttactacacaaataggccgcgacacttatttaaacgtggctctactaattcccaaacaaccatgtataattgagagattagaatagtcgaaacataataaaaagtggatagcataaaagggtcctaataataaataaataaatatttctatttaatactaaagtgacaaaaatttagactcaaatttcgtgtggactgtcccaatctaaaattaaataggttttctcaaatctactaaatttatacaaggattttccaaaatcggcaagcccaaatctacaaggtgcccaggaccaaatcaagtctgaatcaaaatccacacagcacaacaatccaaatccaaactcaaaacaagttataaaatcaaaacaatagacattgacaacctcgacgatgtagttgttcatgagagcacgcaacagggtcacatcgaaggtgagcacgcgcgcacaataggcctcgcgcgcattcccaagctagcaacctgacggtggcgatacaccacagtgtggcgcgttcggccaccaaggacatgaccacatggccgctcggctgcataggctcgccgcttgcaacctgagacgcctgagcgccactataggatggctcgacggagccgcgcgtgtggccaacatggatgcaggccatgtggctgcccgctagcgaccgccgggacgcctgagctcctcagaatgattagagatttcaaacggtcaaatattaaatatgttcatgaaagtgagacatgctcataggcagggtgtactgacattatttttcaaaacttttcatcacatagatataagcaaagcagtaaagtagtccattcctttacttacacgggaattctcaacaatctacaaaaatataaaaaagatcagagttaagcaccaagcagcaaataataccataatctgaaatattaatcaatgttaatacagatttccactaactgtgattagagaatccttttgctccgacaaatgtacctatacaagggcatagacttgaacacaaggattctggagtacttactgtgaattcagtaacttcaacggagctggtaatatggtcaaagagctatacaggatgctgactggccatgcatcttcatcgaccgaactatcattctcaggaacagttagtaacttgtcaaatgtaatcccacgtttccttgaaaatcaaacaaaagaactaaataaccatagagcgcaataaaaatcaaacacttgtgtatgtatgggtgatattccattggcaccacaaaaaatacagtgaaccttgctaaagcatcatgcaaagttaatgtgtgtatccatttaagtagctaactatatgtgacacatgttcacagctttttctcatatgacaaggaaaaaaacaatttgctcataacaacgagaagaaatggcagtgcaattctccgaactaagactgtaatgaaacatcttaatgttgagttatctgatacaaagtgttgtgaagcatctaaagttcagtctcatacaaaggtaattttaaactttcaattaataactaactaaatatgtacagaataaatgtgagatgaaaataactaactaacaatatgtccttgttcacaactctagaatgtttatatctccctcttaggtgtgcacaacctctgttaggcttcagggcgtgtcagatatacaaaaataaatgtgagatgaaacttttctaatcaattcacccagtgaaaatagatatcattgaaaggttccattgctaggctccacggcatgtctggtaccacagaataataaacatgtagatatttgtgatattattcaaatactaatcatcaactccaaaggtagccagagcgtctaaattcagccatttttgtccataccaaactaatcaacaaatcaaacatttggaactactctagatatcagcatattgtattagcttaatattgtatctgccagatgacacttggccactacatcttgcctgagtaaacataaagaacaaatatagtaagcacaaacatctgtagttgatgaaaataactaaaatcactgcagaatccagagcacgaattggaagataatctgatctttcacttcaatgactcagttaataatttgttttataaagtatgtaccagtcatgagaaactgttattatagtgcctatatattctgatattgcctcctctcgggcatgcaaaaagttatcaggactgccctttggctatatataatgctaaacaagcaaatgggcatccattgaaagaaacttgccccttgtgtattctcggttagcctcagaaattatgatgttgattgacaagtgaaaagattaatatacactcaaggatctctcctgtagagtttgctgctgcaaacaacactgttcagaacctaacctaactgcttaagcttgctggcaataagaagcaaccaacagtagtccatggattttaagttgcatcactgtgagacattaatacttattagctattgagaagcagtgtctaactccaaaagacacttcagaatccaggaaaaattctagtaaaaatggttactttagcacaagacacagtccaatttactttagcattagtaaaatctactgtatttttttaattggaaagggcaaaataagccaacttattaatggaaaacatgactgaaccaaaagaagcatgattctgagatggaaaattagtttaatataattcagctcccagcaaaacagggcaggctagtgtcatcatcagaatattaaaaaatattgatgttttttgactatcaaagttatttttgaaacattcagggcagtacttgtaatagcagtatactccttgtaatctcagtacaacttattcactttattggtaacttattttgaaaatatttgattatttattggcatcttaatcactttattggtactaataatcaagtgagtcttgagtggatgacctggtttcagtttagagcacatgtttcacagaaatgaccaacaaaaagagagacagaaatagtgtcagttgttagagtgcaactactattttagtgtttacaacacactgctgcacacttgtgaaacgctagtagatatgagtatagctcatggtcagaagttttaaaataattgttttgcactgcacatggaacaagagctagtgtgtgggcattggtgctactattgctatatatatatacaaatctgcagttaaaccacaaatggaaatgaaatgatagcaagcgttaggagtgaaaccatatttgaagtttcattgtttccaaacactcataatattcagtcccaaaagaataacactgataaatttaatcacaataggaattttgtgtcagctagtgatagaaaagatccattcacaataagaattctgtgttagctagtggtagaaaagatccaccgtaaagtgtggcaactatactcagtcccaaaagaaattctgttttttgtgcaatagggattctatggcaactatattcagtcccaaaagaataacactgatctagagtgcttaaggaaaaaaacatagatccattgtatccagctggtgatagaaaagatagatttgcaagaaaattaaatgcactaaagttgtcaaccttctcacaatagcaaatttattcagacattttaaaaagcacgtagcagatagagtgtggcttacaacagcccagcttgtgtatctgtgcttaacccggacgcagtgtgccacagcagcagccggcgtcttcgcagcccgccgcagcggcttggcagactgggctgcagttgctcctcgccgtccacctcgcaccggggctgcggcgcgcccaacagttccgggatctggcgacgcacgcagactgccacagcggaagccgacatcctcgtagcttgagacgccgcagcaggttggcagaccgggatgcgtccgctcctcgccgtccaccgcgcaccggggctgcggcgcaccgagcagttccgggatctgacgacgcacgcagcctgccacaccggcagccagcctccttgtagcctgagacgccgcagcagcttggcagaccgggatgtggccgctcctcgccgtccaccgcttaccggggctgcggcgcgctgagcagttccgggatctggcgatggaagcgcaagcagaaggcgacggtgctggcgatgaacaggagtgaggaggtctcgtgaggatggtgctaggccgcgggcggtggctggcgccggcgtgatgcggaagtcgatggtcgcgaaggaaagacgaggggaagtcgagggtcaggagtgtgggagagcaggaggtggcctcgggagtaagtgcggacacgttgaagagagactttggagtggtgttgacgtctcctggtttggctttttaggggtagagaatgactacttttgaactatacacaccgattttttaagcatttttgttgttatatatgtactgcttctttgcaagcattttttttgcaggtcatgatatatactatggtctccactcttttttaattctagacgttcagttgaggatataatatttagagcaaaatcatcttttttgcaggtctggataagattaagtgttgccccatccacctcggtcgtcttaatcaggtgtcttgatctacctatctttctatcttttttctttatgatttaatctttaccccactccctttatgcaagtacatctgattccgtcccatgctccctcgatttgtcttgaccagagactctcataatctacttggtacacttatgatctaaactttaccccaccacctgctacaagtacatttgattgtcctatgctcttttatttcattgagttgctcaaagctgcagttctatatgcatttgtgtctgcttttttttgttcttcgaatcgctcataggtgtagttgtagatgcaattcttttccaatgacagctcataatttaattaaactttggttgtgaacatatttagttgtacaataaggttgatacagaaatctatcgtctttctgttgacaatatatctttcttcctccctcttttttttctatagatattagggctggtgcttttcaacaatttcagttctctactatcatccaggttatttccaactctttttttatactatagttcaacatatttcctataatacttatcatgtgattttattaaattgataaaacaatataacaattacagtgatatctaaggcatgtctttaatatatttatttactatttttaaatgataatataataatataaacctattttttaatcatagtattggtttatatgcaatcaataatcatatcatttttgtaaggctgaagattcagtacatgatgatatagtggatttcacaattttatgggaggagtgaggaagggaacgaagcaaataaaatgataaaaaaagcataaacaggtggagtgagcagcaggcgaactgtgtctctcgggtgctgggccaggaatcaaacacggatagtaatggagtgggaaaggggaacggtaaaggaaggagtgttgactgtcgcaaatctaaaagcacggccgacggagcagataacgcatgcgcgcgcatgccgttgcggttctgtccattcgttgtggtgatcgattttgaggcgacctgccaggaaggctc

SEQ ID NO: 4906 - DNA, 4897 bp, Sorghum bicolor
  Intron number 2 from transcript Sb02g003870.1 (locus Sb02g 003870) derived from phytozome v7.0 (chr-ID chromosome_2; pos 4289986 to 4294882 reverse strand)
atacgccgtgggacggaggtgagattcccagctctcagctctgccccccctctctgatctgttgctcgtttggtgcctgctgtgtggttgctactttgcttgagggtagtttgattcggaatcgtgcaggtggatccgtaggaattcacggggaataagatatttggttgtcacaggaactgggactcgtttgacaccttatgactgttttagcttgttcctgtcgtttaacctttcatgtccatcatgggggagcattctgttatgtgattcttagctgtctgttgaaatttgtctctggagcatgtctgcagaacgttgaactgtaggttcaagatgaaattctgtaacggctttggtctcagttaaattagaaattgacaaattttgcagggcgaacagatagcaccttctaggatacaacagtaaatccattgccgttttggttactgttaattggaggcgacaaattcttttcgtggtatattaaaaacacccaccatgtagacagttccacctgtggcctgtggaaactggcttgtagattttagcagtttgcggtttcgatttcctaattatgaatactatctgttttctcaatttgcgcaggaattaagaattctgttatgcgatatttaatgctacctgttgagagttgtctctagagcatatgtccctactccattgaacaagggttaactttaggttcaagctgaaattccgtaacggctttggtttcagttaaatcagaaaacgacaaattttgcatggcaataccgttagcacccatttggatagagctttaaatccgtcacagttttggtttctattaattggaaacgacaatttttgtgtagtatactaaaagctcccacttgagtaggcaattcacctgtggtgtgtgcaactgccatgtagatgtttgcagtttggttttcctaattatgaatgctctttgacttcttaagttgcatggaaatatttggttgctatatctgtgaatctttccataccgttaccttgggtttgcactgagaagcatgctgcattattggttcagtgttctgctgcttgcaagactttgttctttgttttttatattgttataggtatagaattaattaggaaataaaagacttcattggcagagccagggagtggtcagcagcggccaggcccttgttatcacactgcatatactttttgctacataacacatagcccttgccaaagcgatggattctggcttgtcgcattccttgttgcgatgtaatattatgcgctgaactactgaagccccctttctgattccctcttggtcctttgttacttcactccttgatttcttgacccaaccaaagccaggctgagctaaggtagctttgctcttctggttagatgatgcttcctttcctcaattctgttaggctattgctgcactcagtcagtaatttagttcccataagcttacattgactaaatttactttgttaatcttacaagggtaattataactaaactagaaagtaaacttagtgattcagatctagtgaaaacgtggcaacataatgtcagttggcatcctttttttatgtatctatcgtatgaaacatcctcactgtaggactggtaatttaagaagagatatctcctacgtctcatctggaaatgttacgttccatcagaaaaggtacatggtgaaatcataattaatgtgaaaaattgttgttttgggtgtaaattaacatgggggtattgtaagcgtgatagttttgggggaaaataacttctttatgatagcattctttatatttgtatttaaggggcccagttggacttgtctcggtgtttattaatgtgtgttattagcaatgtgcaactatgctgcatattttgacttaaatgctacttttgactggataattatatttggaatgatgaatttactaaggcatcttagataggtactcttgaccctcttgtggactgatttgttgttcctcctttaactgtcaatttatagctgttcatggaaacatggacttatgcttaagctaggcatgtgttattataccacttcacctctatatcctttgtttcttgcttttctttggagttgtctttaggagacccttgcttggttgttgtaatgatttccagtattctctctgctagttaactagtgcctgttgctaattttggatggtgtgcttggcagctctattgtgtgtgctatggatgtgcaatgatgagagagaagtgaggtgctatatgttagacagtattgcacctgttgccaagactaaatgcaccaccactcattctctctccatccaccatccatgttaagaaaagttgggatactatatatttttattacatctgggttggagcttgtttaactagtagaacaccttgtttcaaggctagccttgcaccttgctaagaaattatacactggagctgcccttagctttttggtggcatgcactccgaacattctattgaagtcagtcttagattgctatgatatgatgtaacttagattgttacctaggaatgttgactgaattcaactagtgaaactaagatgatataactaagatgacatatgggcctgtaaagtttggctttaaacctatgcagcacggatacggatacgtgtatcagtatcggacggatacggatatgcggatacgccagtttttgaaaaaacccgatacgtggatacgttttttttatttatttttacaaaaaataaaggacattaaaattgttgcagccgatcggtatgtatggatgatctctatagactactacaatcatttcacacctaattgctacttctacctgtagtggcagttggaggggtatttttggcatgtaaatgtacaacacgtcttccctgcctgtacttagctggacccaagattagatttttttaatattctctctccccaacattgttccccaccattttgcacgactgtgctcctgctggcctgctcctcgcagctcctccatcggcgccatgccttcctcttcccgcgccgctgaacgaggtccctctcggcgcaggcggccaagtgaccatggctgcgccccactccaccccacgcgcgtggctagcaggcggcccgtctgacgcgaatgcagcacgcgaacctcgccggcgcagagctcgtccagcgcggggtgcggctcggtgcggggctggcgggcagcccgccaggtgcagatgcagcacggacctcgccggcacgggtgcggcgcggggtgcgggtgcggagctgcgcgtggccggcgattagcccacctcagtgttggcttgttgggtatgctatgccgtatcgcaaacgcccaaatagcttggatacgtatcagtccacgtatcggaattttgttttatttatttttttgccgatacttcatggacacgtatccatcccgtatccagtgcgtatccgtatcggatacgtatccgatacgggatacgtggccaacctcacgtatctgtgtaacgtagctttaaacatggatgtagattttgcttgcctagactgctagagaaaatgctatgatccatttacactcatgcatgcacacagttcagtcactgcatctgggtcacaatatataggttttgggtctggatcataacaacttaagtactgcaatcactcaagcaggaatgaaggatgcttgagttatatctatgttctactgcttttatttttgttcagcgatgtacattagtacctccactttatttttcaatgggggcattaggctctattcaggcactgggttgcacctagtgccttgttatcgattacttaggctaggtagttttttggtctgcattggtccatttcgtaaagctgtctgaatggagtgtagttactgtattgctggtacaaatgaatagagctaaatgttctagcatttatggttcagacaaaaactgaaatgaatctttcaggtatgatcacactccagatggaactggttatttttcccccaaaccaacgaaaatagaaactatatcaaggtgtgttaggcattgtccggtactccggttatgagaatattgtctgttctccatttatatcttgagaactagaaccttttgttggtttaatcagtgtctgattctatacaggcgataactagagacactttttaccggatcaggtttggtcctgatctttctagatcaagcaatatttatttcctggttgagttgcatggttaaaccttgaaacctggagtttgtagatctttaccacctactttagtcattttatggctacaaggaatcaccaacttgtttatatgtgcaagttagtaatttaatgtcttaatatactctgtgtctttgtgctacagcgatctggccctgttactttatatgtaaagcatactgtatgtgggaattgtatgtgcatccctttgttgcagtgtcatatggttaagaaacacgcacaatgagacatacatgattaatcaaatatgaatttaatggattatccccagaagatatgaaagctgttttttatactgggataccctcttattgactcagttagccagttaggtttgtcttttttcttgattcaacactgcggctgtgatcacttgttttacatagccttgaaacatgtgggaaacgttttgaatgtgtgctgaaagttcaatgttttttttttagtttgttaagatcgtgacttctattgattttcatgtgttaataaggtcaatgaggtttcccttagcattgcatgctgggggttttaaatggctatgtgctattatgttagcattgcaaagttcactaacttttgactatgtaacatctataggcacgttcaagcttactttgcagtttacagaagat

SEQ ID NO: 4907 - DNA, 4013 bp, Sorghum bicolor
  Intron number 4 from transcript Sb02g030650.1 (locus Sb02g 030650) derived from phytozome v7.0 (chr-ID chromosome_2; pos 65683888 to 65687900)
aagcatacagggagatacgtgctacgtccgctgctgtaagtggaaacacgattggccttgtctgatatttctacagcatccaaacaatatgtactttcctgtttattgagcctaataatttttttacctttgttgataaaatgatatttctagcttaattagggacgaaatgaacctatgtctatgtcgtggccagtgccatgacgggataaacaccaccaggaagatggcctggtggaatcggtgtgaggtctagattatagatcaaagggacgaacacaacattggaactagattgattgtttcttggttgccttgagtgatacatctcctctccatacatagagaggattacttgactcctatagaatagatccaatgtactactaacaaatttgatcatatctctacttaaccctgaacctgagggaggtgtgctatggtttgcggctcagcccaaagggcccagatggttgctgataacattatacacctttatctataagtcgccttctaaaagctatgcttggtgtttaatgtttaatttaactggcacgaaatttattctttatattaaatttctattttaactttatacgttcaggcatgttccgatgagttcaaatgttggcaggggaaagtttgtaggtgaatttaaaatctattttaagtttataggacaatttgtttcatgccctcactttgaagtccaatggtgaatttgccctcattatttttgacttggtgattttgcctctggttttcaaaatggaggtagagtatacccttgttccattaacggggcttgagcagtgtcctaatggggctttaacagtgtcaattgaagtgtaaaaactaaaaagactagtttgctcatgcgaatttgccctttttttctaagttcatggtgattttaccctagttttaacatataatgtttcaaaagtactctggcagatatgtaaacagttttgacaacaagactcgaccaaatatgcatacatttcaaatcagtgcaaattttgacagcagtatgacagaatcggtcataatgccagggttatttctcaaaatctgaatatttatatatctgactggtatcttgtgactgatcaccatgtttttagtgtgcccacaacagtgttgatatctatctatctggatattttctttactgaatcatttaacaaattattaaaaataataataaatgttgtgcaagtactacctggatcaattctccatttcctgatattttgactgtctatttcccattagtaattggcagtgtcgtagggtttgctccatgtgtcttcatttcttgacatactgttttaaaataatccttctatttcaagttgtagtcttttcagttttatcataagtccaacttttctaactttgaccagatgaccaagtttatagaaataatatattaacacctcgaatatcaagtaaatgcactatcaaaatatatatcatggtgtagctaatgaatcttgtttgatgttgtagatgcttatgcttttttctgtaaacttggtcaaagctagagaagtttgacttcgaacaaagctaaaacgactcacaatttggaactgagtaattagaacaatcgtgtgcatataattcttttgtattaggtaaaagcatgactttactcaacctgtagcaacatacaatgagcatgtctttaggttgtctgtttgatgtacaaggtaaagtcttcttgtgatatttaatggatcagaatctgcaggcaaaattcagttaacttttgcagttatggtctaatgaaagaccaagccatttgaatttagtagttgtttcatgtctgtatggaacctggctatcagacatggaacttgtttgcagtttgaactttcagggtatcggtattcagtacaacaaactcataatgtaatgtactccctctattccaaatttaagacgttttggcttttctagatacataccttttaatatgcatctagacatagtttatatgagtatatctaagttcatagcaaaagcaatgtatctggaaaagccaaaacgtcttatagttcggaatggagggagtaacttgtttgtacagttttaaacttacagtgcatcggtacatcaaggcaggagtctaaggctaggcataaaaacagaagcacagatcaatggatcccagcccctgccaaatgaaccgtagtcgatccttgctgttgtgattgcagtttcttcaaaatgtcttatagtttggaatggagggagtaacttgttggtacagttttaaacttacagtgcatctgtacatcaagacaggagtctaaggctagacataaaaacagaagcacagatcaatggatcccagcctctgccaaatgaatcgtagtccaatccttgctgttgtgattgcagtttcttcacccccccgccaccacacacacacccacccacccacccgcaagtgcttctgtgcctgactgatcttggcatcttgccctgcaacgccctggccgttgcttgcgcactgcactaccacagctgtctccagcactgccgctaagccagttactcgtgcaccctgcagcctgcaggccataggaaagaccgagaggataggggatcatggcctcatgggtgagatagccttctagataaggctagggacagcatagaccatccccattttcctctcttcatttcatttgtttaaaccgactcctaccactaacagagtctaaaatagagcaaaggtgccttcggttgggcctgttttttgagctgcagcttttgggcttttgtctcaaaagctggttttctgccttgtggctattggatttttgctattggcttttgtaataatattttagcttctcaacacaccaaaagccagaaaagctcctctcagcgtgcttttcagcttttagttcatttcctcaaaagccagctcaacgacaggccctaaatatacaggggcaaaatcacaaagttcaagaagtaaaggcaaaataacatttagacttcagagcaggggcaagaagactaatcccccttaaatgtttgatggcatggttctgctgtaggctgggtgatacctagtgcaaattggagctactagttttcttaggcgggatggggcgggagggtggttcctagtccctaagcgtacaaactaggagtaggtggccgtcttttagaacaatgctgttagtgttaagattcaacagagaattaaatgacataattatttttgaattttacagaaactccctctatattcttttataaggcgcacacacataccaagattcagctttaaatctttgactaataatttagctaaatttctaattattatgaattcatagtacaaatttgatacggttagatttgtaatcaaatgttctattcaattatcataaatttggaagcataaacaatataatataaaataaataagtggtcaaaagtgtagtttgggagactgtgtcatgtcaaattgtgcgtttataaaagaaaacagaggtagtgttagataatctggtatcactatcaactagacttgattttctcaacatcgtatatccgtaagaagctgcctagtattgccaggtgctggctagtattgcgcagttcctgtgcaggtagagccttttctttatcctgaaatgtccacaaactcaactaactaaactggaccaattggtatctgttttcatgatactgcaggagctgatagttaccattttgtcgtatttttaaaaattaattagcaattggtattgtaagaaaggtgaaaagcaattgattctgtgagaaatatctaggcttcataatatcctgccgcttgtttgggtttctagaaaccaagttttgtcaaacattggtaattgtaacatccgcagatgtgcctcagctgttgcttcggtggttcctcatttgttcttgttgcataacttcataaaccccatttatgtgcaggaggcaaaacggttggctcagtcccagggtactct

SEQ ID NO: 4908 - DNA, 14930 bp, Sorghum bicolor
  Intron number 1 from transcript Sb02g014465.1 (locus Sb02g 014465) derived from phytozome v7.0 (chr-ID chromosome_2; pos 27599940 to 27614869)
gaagtgaccggcggcagctgctttgttactgtacggtgagaataggacatatgaggtgtagagatggtccaaaaattacagcccatataattacagatgggccttttcagtgtataatgggctcatgattgactggaacggctcgactattcttttgttttattattttactgatgaataatatgtaatgtgaaaggatcaagatgcccaagagggggggtgaattgggcttctctaaaaatttaagcaacctataagctccaattcaaccccttgtgcctaatgtgacctagagagctatcagataaaagttttgcaacctagttccaatcctattctagcaaggcaattctaagaatgtaaaagcacaaattaaatgctagaatgtaaaggagtagtggaagaaagtgctcggcgatgttttgccgaggtatcggagagtcgccactctccactagtcctcgttggagcacccgcgcaagggtcttgctcccccttggtccacgcaaggaccaagtgctctctacgggctgattcttcgacactccgtcgcggtgaatcgcccaaaaccgctcacaagcttgacatgagccacccacaagaactccgggcggtcttcgtgcctccaatcaccaccgaaccgtctaggtgatggcgatccccaagagtaacaagcaaagaactctcacttgacccaaacaaggctctagagagtggtggatgcacacttgactcttggaactcactagagaaggattctcacaagaaatcactcaaatctcaatcctctctaggctcttgctactctcttgctccacaacaagtttctctggtgttcaaatgggcaagagagctctcatggacgaggtgagggactataaatactacccacaaagtccaaaggtcagccaaccgttttccactgaaaacggggtcaccggacgctctttatgttgcaccggacgcactgcacggagcgtccggtgctccataacggctaactgtacttgctctgacaggtcaccggacgctaacttccagcgtccggtgctccgggagttttacatgctccctgcgcatgcgtccggtgctagcgtccggtgctcggggcaggtttacaacctccctgggtatgggaccggacgctgcccggagagtccggtgccagcgtccggtgcttaaccctaagcaccgtactgttccaatgactaaggacctcaccggacgcactcacagagcgtccggtgtagcgtccgatgcccccttgggcaccctaacttcgtcgaaacgcgatcgctccaaaacgaagttggttcctctcgatctaaagactgtctctgagctgcctagtgctaggtttaccaagtgtgcaccacacctaaacctaaagccttgcctaagtcaagctactagatcaaagcccctcttaatagtacggtcaaaggaaaacaaagtcctaaactactctaagtgcccttcttcaccatatggcacttagacctagtctagtcttgacgatgtccatccatcctttaaaaaccgaaacgatttccactattaagtaggcatgtacgtccctatccatcgagtacctattaccatgaccttacctatgactttgcctctgcaaaacacacgttagtcatagtaatcaatattgtcattaatcaccgaaatcactaggggcctagatgctctttcaatctccccctttttggtgattgatgacaataacctcaagtatgaaaagagttgaggttttcaaatgacttggtttcaataagcatgatatgataagaacaaggggattagtcatgcttatatcaaccaagtccaacatcctgcatccaaatatgtgagtgaaatacaacaggatataacacaaggctcataagtacatcggagtaaaaacgcggaagcaaaggtaatatgagccaaaacacatgacatttagataccacaattaagcacaagtcatgtctcacaaccaaagtgtatctcacacaaatacaatgcataaaagtaaacgtgatgcatgatggagtagcacacataaaagtatctcaaaagaataaaagccctctctagctctctagctccccctaactcctaactctcatactaacactctctctccccctttggcatcaagcgccaaaagcctaagacgtcggtggaggaggcgaagcagtggagtccctcggcacgtcctcaaagcgagctgcatcgtctgaaccgtcggccgtcgaggcggaggaagtggagtgaccctctgaagctgcacgagttggcgaagtggtctgggtttgctctgtaggtgcgggagctgtcactggctgtgcgggctgttcgagtcctgctgacgaagctggcacggactcggtcgctgtagctgacgtctctggcacggtagacaaaggtgctagctgctcagacgacactacagatgatgacagacgctcagtagtggtgactggcgccgtaaaggctgcaggagcccgcagaggtggaggcgtagggtcacctgtcagagcactataggtgaagctgaggtgcggatctgtcgacgagtccaacacgagctgtgacgctgacgctgactgcggtgtaaagccagagcggagaggcgtaaactgtggtacctgctcaaagccagaggagatagcaccctgggagacctggtgctgaggcgtcgagaatggctgactctgagcgggtagctggaggggctgctgagactgactctgagtctgaggcgctggagtgggtggcctgacagtcgaagtgtctgggagctgaatctgcggaatctgaatccctgaggcggccatgagagcggccatcatcgatgtctgctgggcctggaatgcaagctgctgctcctaaaaggtcaaaaattgtcgctggagctcatcctgcctagcctgcacggctgcattgatggcaacctggtccctgtctctcctcgcctgctcctcggctgcgcggcgctgatcggccctcatcccctctaaaatagcaagcagagcagggtctaaagcactcgaggagccccctgcctcgtggtcgtgtgctctggggggaaggtctgacactggaggctaatagtcatcatctgagctgtcggaagcaaagtcgaactccccctcagcctctgcatctgccacagccccaatggctatgtcttgctgctcctcggtctctgaaactgctgctgtactgcgagtgcccctaggagaaggagggggcactggtccacgtggtgtacaaggaggaggtgtagctctgaggtcgtggtgtgctctcaacatctgcttggggtcgtagtgggggaagacggtgtctgagtcggtcaactccctctgctggtgagctggcaggggcacgggtctagcacgaagaataagaagagtgatccaatgtgcatacggcaactgacactgtcccctgaaactctctgagatggtgtcctcgatctctgagactatcagatcccacaagtcaaaaggtgtctgcgagatgaggtgagcaactagccactgctgaatccgagtgaatccatctctgtagcctgtcctggggagaagagtcttcctcaacacaaagtcgaggatcctggctgggcgtgtcaggtctcccactgtcctgctggagccctctccaaacggcggacggaaacaaggagccacgaagtcaaccggtggtatctcaccaccatgaggacgacgagggggctcgaagttcccgtagcacagctggtgaatcctggtggagtaagctctcaagccaagtacctctctggccctctgtgctgtgaccctgtagtcagtccctgccagtgcgtagtggatataactgtgatccggagaaacccacactgacgcgtagaactctcgaacccactgctcacagtaagtacccgggagagctggcaactcgggaagaccgtggaggtatgtgaagtactgacgaatatctgccccaaccacgttcccgagtatctcaaggtcaataactcggtgctccctgaactgagactgtgaatgaaccagtgcctcgtagatgtcctcctggaccacagtgtagaacctggcaccggctcgtggatccctagcagctggaaaccaagtaggaaacagaacgaaccgcagctactggatctctctagctgacacaagagtgagatccctgtgaatcctgactggcccctgacgagcagctggtgtgcctctggctggtgtagcacgagcagtgaaggtagactggcccggcgtaccagttcggggagtagcctgggtacgtgcacgagtcgacctcctgaggggctgctcctgtgcctctgctggaccctctgcctaggcctctgtctctgtatctggatcctcctgaaatggatctctgaccacaagcctgacccgctgactccctatcatgactgtgcctggaggggatccatgaagtgcctctgtctgaagaactgcatgccgctgttgtggcgtgaggtcatcaccaatcctcagagcacctgagcgtccacctctctcagctgcctcagccgctgctgcaactgcctctgccacctctgcctctctgtcactggccttgcacttcttggtggctagcttcttgcttttgcctttttctgccactgatgggcgacggggtggatcacctccaccatcaccgcctgaggaacctccagtgccagctggcggaccactgacattcttgcaatgagccatcgcaagagcaaacgactgaacgaacggccgacaacaaatcaactgacaaaggagatcaaagcgctgcagaatatagacaagataaggtatacttaagaaaccataatagctagaggtgagaaaaccctatagatcgtaagattatatagagaacgggcgtgaacggcttacgatccgaagacgggacgcgttccggatgaagtatcacgatcagaaaccaccggagaatgcgaatcctcttcttaaggtgctgcatagatggaacggagaagatcggggtcaaaaacctttttcttatccattgagacataaattcaaacaccttgagggccggggatcaagaacccacccaaaccctaacttactttgagtgaagaagagactgggcgaggagaggatggggaggatgccttggagcagatcaggcatgagaggggaaggaatccacccgagatttgaagcgaatcaaaggctggcggcggttttggcaacctaggctagggctcaggcgcgggggcttcgcgaggaagaagaaagaaactgcccgagccagaccctagggcgcgggttatacctgcgtgaattggggtcaccggacgctctttatgtggcaccggacgcgtccggtgaccaccggactcatgcgtagtgaggtttgcaaatcggcatgtcaccggacgatggccaccggacgctggacttagcgtccggtgctctagggcacgccaggtgagcaccggacgcacctcaaaggacgctgctgggatactgttcctgcgtccggtgagtgcaatcctgcatactcaccgcaccgagacagcgtccggtgcatcgtccggtgcccctctgagtccttttccaacttagctttacatccgactttgacccaaccaagttccattttcaaagacacacaaaataaacactaaatggaactggtatgagtgacttctctcaaaccctcaaattttcacaaatatttagccataggcttagtagtttttatgaaaataattcgagaaaattaccaaggagcatcatatggccataaagctaggggtttgaatcacaacgagctttgaatgctccccctatctatggacaaacatagcagatgctcatagaataaccgaaaagaaacggtaaactaacaagcatgcatatgatatgagttgaaatgcaatacttgaacgtaaactaatgcttgtcaagtttgatccaaggttaagctttttcacacacacaaaggggttatcttaaccatgttagacaagccctacatgcaagttttgtattttagttttagtatgcatgacatgcaaagcaaaagctatttacaagtttcaacacacaacttttatcttttagtgaagttagagaggtcaagcacatttagttcatttctcaacatacaaaacctagcttcatctaggggttttgtgaagatatccgccaattgattttccgttcccacattctctagagatatgtcacctttagcaacgtgatccctaaggaagtggtggcggatgtcaatatgttttgtgcgggtgtgttgaaccgggttgtttgcaagttttacggcactttcgttgtcacacaacaaaggtactttgtctagtactacttcatagtctagcaaagtttgtttcatgtagagtatttgtgcacaacaagcaccagcggcaatgtattctgcctcggccgttgacaaggcaacactattttgtttctttgacatccaagagacaagtgatctacctaggaagtggcaccctccggatgtgctttttctatcaatccggcacccggcataatccgaatcggaatagcctacaagttggaatcttgcacctttgggataccacaaacctaggcaaggtgtgtattttagatacctaagaattctcttgatcgcaatcaagtgagattccataggcattgcttgatatctagcgcacatacacacactaaacatgatatcgggcctagatgcggtgaggtagagtagacttcctatcatagagcgatagagagtcttgtcaattgggttacctccctcatccaagtcgagatgcccatttgatgccatgggggtcttgattggcttgcaatccatcatcttgaacctcttgagaagatcttgagtatacttctcttgagagatgaaaaccccttccttcatttgcttgacttgaaatctgaggaagaaggatagctcgccaatcatggacatctcaaactccttggacatcgaatcaccaaattccttgcaaaaatcttcattagtagagccaaaaataatatcatcaacataaacttggcaaatgaagatttccccattcattttcttggtgaagagtgttgtgtcaactttcccaatcttgaagccattctcaatgaggaagtccctaagcctttcataccaagctctaggagcttgcttgagaccatagagagccttggacaaccggtagacatgcttggggtaccatgggtcttcaaaaccggggtgtttctcagcatagacaagctcattaatatatccattcaaaaaaacacttttcacatccatttgaaataacttgatatcatgactagatgcatatgcaagtaggatacggattgcttcaagtcttgccaccggtgcaaaggtttcaccgaagtcaagaccttccacttgtgaaaagccttttgccacgagccttgccttgttgcgcaccactttgccttgatcatctttcttgttctggaagacccactttgttccaatcactcttgcatctttgggtcgctcttcaagtgtccatacttggttgtgagagaagttgttcaactcctcttgcatagccatgatccaatccgcatcacgaagagcttcctctatagtctttggttcatcttcaagagacacaaaagcgtgatgttcaataaataaagcatgtctagaacgagtagttacaccacgtgatggactcccgatgatgagatcttgagagtgatcttggaggagatgtgatgttcttcttggtgccacttgaggggttggttggggagcatcaacatcttgtgcttgtgccaccgcttgctcatgagtgacatgagtgtcttcatgagcatctctcgcatccttgtcttcatcttgtggaccatgtgaggtggatggtggctcaataatttgcacatcatcatcatcttcttttggcttgatgtcccccaccggcatgttcttcatggcgtccctcaatggttcaccacctacatcatcaagattatcacttgctccttgggagccattagtttcatcaaattcaacatcaaatgtttcttcaaccatgtttgtggcatggttaaagaccctatatgccttggactttgatgaaatagccaaccaagtagccaatgtcacatcttctttggaacttgcccaaatgttggcgcttcttgtagatgtagcatttgcacccaaacactctaaagaatgagacatcgggcttcttcccattgagcaactcatatggtgtcttctctaggaacttgtgaggaaagagccggtttgatgcatagcatgcggtgttgattgcctcggcccacatcttctccgaggtgtcatattcatctaacattgttcttgccaaggtgatcaatgtccggttctttctttctacaaccccattttgttgtggtgtgtatgttgaggagaactcatgcttgattcccactttatcacaatactcttcaatgttggtgttgtcaaactctttgccattgtcacttctaattttcttgatcttcacatcaaattgattttgggcattctttgcaaacttcttgaatattgatgcaacttcgatcttgtcttgcaagaagaatgtccaagtgtaccgagagaaatcatccactatgaccaagcaatatttgttgcctccaagactagcatatgtggttggtccaaatagatccatgtgaagtaactcaagcactcttgaagtagagagataggccttggttggatgagtgtttgcaacttgcttcccggcttgacatgcactacaaagcttgtccttctcaaatgtcacatccttcaagcctctaatcaattctttcttcatcaacttcttgagtgtgcccattccaacatgtgctaaccttctatgccacaaccacccaagtgaagtcttggtgaataagcaagtcttgacatcaacctcatcggatgagaaatcaactacatataagttgttgtgttgaaagcctttgaatatcacttcattgtcatcttccttggtcacaattacttccttcttcttgaataggcattcaaatccaagatcacaaagttgtccaaccgagagcaagttgaaactcgaagattgcacatagagtacattagtgatggagttatcatttgatatagcaacctttcctagtcccttgaccttgccttttgaattgtcacaaaatgtgatcttctcttggttgtcaacatcttcatcaagagaggtgaacatccggggatctccggtcatatgttgagtgcaaccactatcaattacccaatgtgatccaccggtcttgtagttcacctacacacaagagatcaagcttgagatttagggacccacatttgcttagggcccttgaccttctctactagttgctttggcacccaaatcttctttggcctttgcttgttgggcggccccatgaagctaaccttgaccttgccactcttgtctttccttacaatgtagtgagcattgaaggcaaatggtcttgcatgcttgggcaaaggtggtggtagtggtgccttacactcatgagcaaagtgtccttcttgaccacactcaaagcatctctttggctttggcttgcttggttgatcatgagtggctagtgacttgatgagctttgtttgatgtgccttgtagccaattccactattgtccatcttcatgacggtgttcataaaaagctcactttgaaggtccttccccttggtgaactttgctaaccccatggttaggtgttccttctctttcttgagcttgttgtttgttgacggtccttaagtatcaaattcaattatcaaataaacaaagaaaaggatccaaatgaaatcaacatctagacttagggttttatctgacagaattccacgagttttggtgtttgtctatttctgtagggggttatcaggaaataaggaagaaaggcccacacatcgggattacatagagatatcaacgtgccgcgcaattatcttacatctagaagactccagaagccacgggaccgaagcggaggcgaatcggggccagagacagggcgcccgccctgtcctactgggcgcccacccacctcctgtggccaatcacgctcaatctcgcggattatgctccaccgacctaaaggatcaagaataaccgttcaaccaatgtcggtttgatccgacggcccaggttcacttgaggggactataaaaccagaccccctggcccctggaggaggcaaccccttgattattattcattattcatagacagagcaaaagctagggtttagagatgagagctctcctctcttctctaaactagagtagatctagatagtagcaagatggagagcgaaggaggattagaggagaggccggcctgtcggttcttcctccggttgtacttcgccatgatcaagctctaatcaagcttgctcatgggatgactctggtaatctacttctaattcattatgcaattactaatcatgtatgttctggttcacaactcttttgagtacttctaatctataggaccctataggttagagttgtagtataggtgtaagcgtggtgcttagacctagattacttgtggatatcccctgactagctggatcgtgtggtaggccgtgtaggtgacagttacgttggtcccctgtagtccacctctcgttagcaggacgggtagggtttatcggcctatggataagcatcctttgtggtgtactcttatcacgtggttcgtcccagacatagacatacccctttgaagtagagaaaccatagttatcctctctattctgctaccatcgcccatatactagaattgctctactctctattcccatattatcactcactgttatcttacctttaatattgtttttattcaattctaccatctttcctatttacacttatctatctttcttggttaagttagagcgtagatcagttctcccgtttccctgtggatacgataaaacctttaaccgggtaaaagcttcaacggtatccgtgcgcttgcggattatctgtgtgcgtataaataccatagtacactctagtgccatgctggggatgacaacctagtattcaagtggtgttagcaagtgtcaacaagcatttttggcgccgttgccagggaaacggttgctgagttgactacgaactagtttaatcattttataaaaagaaaaaataataaaaaaatattttccttttatcctttgcctcatctctgctattctttcttcttatctaatccttgatctctggtctattatgaattcaaacatgtctatctatgaatttcatagacctatgggcacacatcttgaaccaccaaaatcttcaaagcctatcatagcatctagttttgagatagaccccgaatacatagaatttattcaaaaacaacctttctcaggagaaggtgaggaaaacccatacacacacctaagagagttttatcgagtctgtgacctccttcgcatagaaggcatgtccgatgagacccttaaatggaagctctttccgttctctttaacgggaaaagctagacattggtataaactcaaagtagggagtgttcatggagattggaaggagttatatagtagttttctttctaaatattttccaatctccaaagtggtggaacttcggcgtgagattctttcttttagacaactggacgaagaatctcttggcaaatcatgggaccgctttattaaccttactctcactggcccaaaactttctatttcagaagaagttcttctaattcacttttttgagggccttagtaggaaaaataagcaaacccttcatgcggcctctggaggatctttccaccacctatccgctagtgaagcttggaatttgattgatttaatgagcggaaactctcctagcttttatatccctgagaaagagaaagaaccagttcctagacaagaagaagaagtttcgatagccagaccacaaccacttcaatcccaaactttagctatcgatcctaaaccatcaataccccaaaattctccaagggaggaaggaattccgaccttaaatctttcagatactgatggtttagacttctggttccataagagaccttcaagcagggataattcaaatccttgcaataatgtttctcttagagaatgtcctggttcctattatgaagaagtcgaggatgacatatcaagtgaaggagggctaagccatatagaaaattctaacaccaaccctttcctgatcacaagttccaaatggctagaatgcgtagaatggatggataaggaagaagctttaatggattctgactttggctcaacttcaaatggtgagttcttgactccctttgaatatgggattcatccaactatagaagaggacataagtgagaccaatccaagagaaactatgaacattcagattagagacgaagataacattaatgagcatggaatttatttcatagccacttcgtttactccatgctcatatgcaacatcttcccaatctattggtctccccgacatcaccacacttgagatctccaaccccctcttcctttctatttataaaaactttaaaagggcggttgtcgatgcatatgtctataataaatattgcagatctcgttgagttgatctagatataggttggcgtcggaggggaaaccacttcgccaacataaactaatggtttcccaaggacaagcttagtgtcttaaaataagcattgattagatcgtaacatgagcctttaattatttgcaacattaccttgtgtattgagcatataaggataattgtaaaaaaaaatattcctttgggtattcttgtcactaacctttctaagattggagcaagaagatcggatgaatgacaagcacaaggtatgtccaaccaatcatcatacaacattgaattaaattcatccaaacttgaattttgcaaaattcaagcttgggggagtactttacataaaaacatcctttgccatgttgctatgttggttgtccctacctttgaaacatgctcaatttgttaaatactaatcacactacttcatctccacttgagtagatctctataaacgctgtcatgctacctttgtctatttactagcaagtgttggtttggaagtactcgccatacttccattggcatttaaattaagcatggtgcttaggttaaatagccttccttaatctgattagacatggagtctagtttggttattgaactaaaaaaactgcttgagtagatattggtatattttgtcggactaacccctgcagaaaaactttcaatatcgatttgggaagtcctgagataaactcacatcagagacgaagagagtgacacatgaagtttaacaatttgcacaagaaggacatagctcattcatcatagagagatgatccatggagggtgccacaaacacgacgcacaaccgttaagaaaggaaagcttccacaagatgatactgtaccatcactcttcgagcaaggtaacatcttaaggtacttgactatcacttttataagcttctccttggttctagcgttcatataaataaaagagacaaacatgtatgatttacaactctagattaaccaacccaactgattcaacatgtttagtcctttaatccttgttcttagtactacctccatgatcccacactcctaatcatatgagctaaaatgttacacattcaatcattgagagatataaagaaaaagacatatacatagatagattatctttccataaggttgagcgatctgagctgacaaatgttataagtgctacactcatgaacttatcatccatcaacttgtcttgctcactatgcttaaggttagagaagaacaaatacacttttggttctgttggtgttttccaccaacagggcccatgcacttgatctctgtcttgtctctatgagcaggtacactacgagcacaaacacactgagcaagatactgctaacaccgcacttcgaactgctgggcaaacgaagaacatgggtgacaccgtattaaaaggtgcagacgtcaaggtccgcacctgaatcaaatgacgcacgtgaagaatgaacacgatgagaagtcttgacaagaagacttaaaacattgaaccctcgccgaaaggtaagattggtagttatccatatttatcctttctgcattctcttttccctttaattatttactttccttaaatagattattagttaatcatgctatcttaaaaagaaaataaaaatgttaaaaaaatactaagccccatgtgagtacacgagtgacataaaacccataagtaccttcactgtggtggcataaaaataaaataaatatttcttttctactttataaaataaaaatataaaaaacagggagtaatatttattgaggaagctcaacgtgatgaaggccagatatttatgctaacacttaattagttccacaagctttgttgtctatttgagctccacagaatttaagaatcaagaagttaatggagatgacaacatatgtattctagatgagatccgtatcccgtactctggtgatgccgagaaagatcttcatagtttgattgacatcatcttcccaaatttaaatgcaaacatggcggacaaagactacatcaccactagaacaattttatctacacgtaatgattgggtggacatgattaatatgaaatgattgatatgtttcagggtggtgagacagtgtatcacagttttgactccgcgatagatgatccacataactactatccatctgagttccttacagcctgacccctaacggcctgccgccacacgtcttgaagctgaaggtcgggtgtcctattttattgcttaggaatattgaccccgcca

SEQ ID NO: 4909 - DNA, 3609 bp, Sorghum bicolor
  Intron number 2 from transcript Sb08g006850.1 (locus Sb08g 006850) derived from phytozome v7.0 (chr-ID chromosome_8; pos 11344064 to 11347672 reverse strand)
tggagacgtgggtcgttccaagatacacctctcaggtacggactactggtattatgacagcatctccacgaagttgcgcaaaactaactccctattttttttaaaaaaaagagagattaactcggcttttaataagaaagccaataacagtacgatacaacaactggggttaccagttcactagagaacagcaagaaactaattaactccctagtttgatttttttttaaaagtgtcctttgaccggtttgtggtaaaaacactcattatgaaagataaaaaattatcaaatatcctctcctaaattttcataattgagggaactttgtaacgttcccgtctgtccaatcctcagaaataaaatggatgcatgagtaataaaaaataaatagatggtttcagatgagaaaattggaacaaataataaagaaattaataaaaactagtccgacccatgctctcgcaccagctagaattttttttaatcatatattgtttaatagtacatctgaataataaataattggtttcaaaaaaagaataataaagaattgtttgtattaaattgattgtttttatctttatttgtttctacagaatagacataatagatactacatatggtctatatctatttatcatcaaattattaattatttttttataaagaattgattcatatgatttttatccatattcgtaattttactttacgtggcacctttttatattttaaatatgtaattagtttgaaatcttgcctttaactatatatggcggtccttgttgctgcatcacaaatcttataaagtcatggatctcaatttaaatttttaaatgttattgctattgattgctataaattcttttgtcgtgaagttgaaaatcttgtgattattttttattaactctactttttgcactttttaataataatgatttttgtcttagagtacgttcttaaatactacaatatcaaatgcaatcatttcaaacctgcaccatttcatttaagataagtgatagagagcttgaagtgggatctcagatagggatagcggtgctaataacctcaagagaattttaatgcttaagctatataatgatcgacattttactctaaagtaatcttaaagggttcagaaaatattgccattagtggtctctcatacttctcaaaatgattgaattttccgtaagggtgttatatgtgcaattatgattatactatgaatatagacatgtcaatttaaaaaaaaaatagtatcattagatatgagttgttaagaaattttgtttggatgaaacataacatgtatatttattactcatgcatgcttactttgatcaaatcttaatttattaatatataatagaaatgggtaatgtataaatatatacatgttctatgttattttaatatttttaataaagatgctggtaagttttagaagtagattttagaggatttttttttcaaaaaaatataaagattgggttacgtaaattatctatcataataagagtacatggtaattagatacaaatttagacacatttgagaccatgtttcttaatggcatacataggtaatttgaatatcgagtcatgtgttgccttaagttgttttatgtaatagcagagatgggtagctatttatagaatagttccaatagttattattatcaacggtgattagcttataccgaatttttattcaaatgttttggattttgtgagaatttctaggatctatcattttttcctatcaagtctcatgatgtttaccatgaggaacatacaggctcaactaaagacccctacttagaatttctagtatgtatctttttttagcatgatataggtattttagttgaaacataatattaagatatataaacgtagttgcatcctttctagtagtattattttccacatattaaaattaaattaaaacttagattgtactctagcacgcaaacatatatgtgtctagtattgtatatatctcatagaatgcttaaaattaaattacaaatattaatatgccatattgtttcaatcaaaatacataaacatatttaaaaaaacaacttataaatttttttttgtggtttgtaaattaagaatatttttccttgcttcataagctactcaaataaaaagatatccatctccaatagtttggtaaaactcacttgccaaatcttgtgatttgacaagttgctaaaacatatggcaagtgagattttcttccgtctccaacagtttgccaattgggcttgataaatttaaaaagaagacccacaaccaacaatcaaatcaactaatctgctggatagcaagttaacaaatatgggcgcatggtgctgctggatggcaagttgccaaaagatggcaacccatttaccaaactattggagtgattattttctacttttgccaaataaacaagaaatagcaagttcatttagaaaactgttggagatgcttaatgtttttatgttttcttagtataaatggtgaattataacattatggttatttattttcatggttgtagaagtttataacttagaaatatatatgtctcgtacttttgactatcattttattttttgtaatagcacatattactaatcactcgtagatttgagaaatatattttttttctataatggctgaggtagatacaaataaaatttgtaggttgaatgtttgtttacgaggttattttttatatcttttcataattacaaaaagtggatgatttacaaaatcattattatgtattttaaattttcattcaaaacgacatatgggagtaatctagatacaaaattagtcggttatattataaattatctctcataatgatagatgtggataatctaaatacaaagttagagggttattttaaattatcattcataaaagcaatggtggataatttagatgcaaggcgatgggtttattttgaattatattttataatgacagatgtagtaatttatataaaaaaatttaggggattattctagtttttctttcataatggaagaggtgggtaatttatatgcaaacttttggggtaatattatgcgtttttcataatgatagaggtggataattttttaataaattacaataaccgatggctattattggcgatgatgatcagagtctgccaaattaaagcctaggtatttttaattattgtgagaatttctatgagttaccttttttcctagtgtatctagtgagaattaacgcggtgcctcttttggagcctctaattagtaatagtaagatatgatgtttggttggttagaaatgttttaggatttccaatgtaaaatcatctagaaaagttattataggagactattggacaaaaacaaactttaatgttgctatttcttctcttaacttgccatatccattaatttagcaagtaaactataccaaactcctaaacatgcttttaataatactagtgtatgttttcaaaataaaaaaaaatcagtactgttcttgttgaattttgaagggtgcaacatttatttggatgcagtatctagtgtccaagaaaggtctgcgttcggtgtg

SEQ ID NO: 4910 - DNA, 2185 bp, Sorghum bicolor
  Intron number 1 from transcript Sb01g038190.1 (locus Sb01g 038190) derived from phytozome v7.0 (chr-ID chromosome_1; pos 61759026 to 61761210 reverse strand)
ttgtcaagacgcagctacagtgtcaggtgaagatctagtgcacttgatttgcaatgtgatcaaagctctgatttttaatgctctgcaacaatattagagctgatttgattgatttctgatggcttacccaccaaaaaggagggatctcttataggatctagttatcctattcatctccaagattattggaaacaattgtgcaatgaagctagtagccttttgtgttcctttgatctgttagtggtgatcaccaatctaaggatgcccagtggcaccactgtggaagcctagtgacatagtaacaaaacatttttagtgttgccgccactgaagagtgagatgtaattctgagggcctgtttggaatccaggaatttcacaagaaaaacgtagtattccgggaaaaatcttgtgttccaaatggagtccgagccacatgtccatataaggactagattcatcttgtgtcaattttggatataagaattaagagaaatcaatgtcaaagcaataggtataattgtttgacgctatagagatgatatagcacatgccaatagctgacctagtgttcaacaaggcgctgttccgtgctcgcctaggcacgcctccacgctgagcggaagggtacctccttgcctaggggggcaggtggtacctaggcggtggaggaggaagggacgtcgggctggtgggggaggagcagcctcgggcggagtcggacagtgggcgtgggtgtatgcgggcgcggactgagagagagagagagagatgcgggagagggagaggaaccggcggcggtgggcgcagacagagatgcgggagagggcaacgaacctgtggcgacaggcacggactgagagagagttgcgggagagggagaggaactggcggcggcgggcgcagacagagatgcaggtgagagagagatgcaggagagggagaggaactggcggcggctggcgcagacagatgcaggcgagagagatgctggagaggctgtaatgtgggagagttgggccattaaatgggccttctcggcttctcctctttctccctattccatggccactgatctccttttttttttccttttcttttaagtatttatgcatgtattagccaccgcctagaaaaacgcctaggcaggcgatgggtcaccgcctagcgccttttctaacctagagctgacctgcaaatttgtgctgaaaatcaaagtgtaaattcctagaaatcattaaccacacacatcagcaactttgtagttcaaactttgggccttcaaatatgtttgaataacatcacatatagagtttatacttaacgtgatgtcaaattagaattttagattgcagtctccactgattgcatgttctctgtctagtctactcctttgtttggttgtcatatcatttgcggtgtgtgtttgaagaactttaaatgttatgattatgattgtctggctatgtttaagttgaacatttttgttaaataccacatgttctccttctgtttgtctttatcttttgctagcttccatgatctacattgattctgccagcttaaacatgatataagaaaagagaaacaaatggatacacatgaaaggaacatgaaaacaacctgagaagtgtgaccttgcttgaatattgttttaactgtttttcatttaattcttcaattgtatactgaaattatagtgtttcatattctaacggaagttatcaagtgcaaatgcaccattaagtgaatcataaatctttcttggtttgggttgggtgcaaatcaataggaaaggcgcagctggcatgccaaaataattttctcacagattaaaaatgttggcaaacatatttaccctcatttcctttcctttcccggaggatatctctttggatttggtagttatagtttgcatgcacccgtgattagcttccacattaggaggtagtgtcccatgcttttgtagaatgctattttttaagacaaatttaaacctatacaagttattattttgggaaggaggggagtatattctgttttactgtggatggtttctataaggttttatttttttatatttgtgaatgtgaattcaatcaacctgctttcagtttcatcaagatagtaacactcattttggtgatccagggtgtgtgtggctgtgagcgcttttcaagcagctc

SEQ ID NO: 4911 - DNA, 2615 bp, Sorghum bicolor
  Intron number 7 from transcript Sb04g028620.1 (locus Sb04g 028620) derived from phytozome v7.0 (chr-ID chromosome_4; pos 58766373 to 58768987)
cggctgcacctggagggcaagaaacacaaccggtaagacacaggtttgctgaccacacaaatagtactagagtatttgatttttatttaatatttactcaaaaagagctataaacttaaatgcgctaaattttcaaactaaagtctccaaacatatggtctaagttagctctaaactttattttacctcacgttagagctttagacttcaaaaataagctaaattgctctaaaatgtttagagctctaaaatttaaaggagggcataatattgtctgaattctaaaaacttctagttaacaaatttttatatttgagattatttaatgtgacaattttttaaaaaaataatcagagaaattaatgcaaaataatagcatctcggagtcataagtgaaccatctggtgtggtagtaaggaagctttgtgtgaggttcaatgaatttgaatctttgagaactcacgtgcacaaaaaatgctttgcttgtgacttggacagcgcgataatcgtttgggtatggaaatgttcatttcgattttttgtcatttctagaaacatttttagtggcaggacatataaggccgcttttaaccctgaaaaaaaagaccatgcaaatccatcttacttcttcatatctttagagtaaaggtggttgtaaaaaaccacttaggccctgattggatacaagttttttttttagagttttagatcaatatgatggtttttaaaaatacctaggtataaaaaaggtgtttagatgtaattaatttggagttttggaaactacggtattaataaaaccatagttttctggagtctaaaaaactcggtcccaaccctctttatttttgacagagcttggcgtgggcgtccacatctaatgatgtgtctcattttcactgctatttttagagatgcatgctatctagaagcaaagacacaactaactaatacgaaacagtgtctcatgttcactgctatttttagagatgcatgctattattagcagcaaagacacaaccaaactaatcccaaaattaatgtattaatgtgtacccaaacatgtcatgacttttattaaacatagaaacattgcagtttctaaatactatggttttacatgcctatggtttttaaaactgttgtttcacaatactatagttttagaaaacagcaacgcccaaacatgaccgaattgtccctccatacaccttatttgttcataccccttgggtagttatggttgtagaaccacctagagaaatgaattcgtgatcgcaactaaaaatagttcatatagtagtaagttgtccatcacaactatcagacgatgacaaaacgatgagaaaaatatgtaagattagtagatctaagtgtgagcccatcgttaaagtgggttgtggtggcttcattaccgctgaatggaaagtaactataaagatcggttccgtagttgattgtgatgtgtggcaggggcaaatctagtgttgggggaggggggctcaagccgccttctttagcaactttatatactgttttatagacacggaagagagaaatgccagagagaaagttgaagatgatttggaccatctcttctatgaatttacatatatactgtttagatacgactttactctatcagctagcatcggtcaatcatctattttctacttgctaacgagaattgcgcggaatcaaaccaaacggttcgcggtgctgacgatttaaaaaattactatcagaagtagatttttactatagttgtagctgtgactcatccaccgcgagcttcaacagggacttcgattttacatactgcgactcctaaccgtggttctggtactggcaccgcgtggtgggcaagatcgtatcgaaacagggcatacaccactgggtatgtggtaaaaaaaatacatatatctttccgtttggacatgagatcaaatattctttacttataaccccttcgaatagattgtgaataatcacaatcgataccccccaaatattgatcgcggttagagcatctctaagggttttgcatttgaggtttgcatttgagtaatttgccaaaaaactccaaaagaggtatccaacggttttgcatttggaatttgcaatttgggcaacttggcaaatgagggagcaaacttgacaaaaatgtcaagctgtcgacggctttgcaaacccgatcgcgcgagcagagtcacgcgcgaggaaagtgcgcacgcctagagacctcctatttttatactttgccaagtccaaaagtcaattcctttggagatggtctatttttatcctttgcattttgttatgggagtttgcaaacaacagcaaatatcaagtcaatttgccaaagcctttggagatgctcttattaaccacaatctaactatttacatacattctcctaagttgatcctgatccaaatatttaaataaacccgatatctcattccacctgcgatcattcccttctgtgtctttgactctcccccttcgccaccagatttctccttccgcgcccctcggctttcccgacttgcttacattgtgtccgtgcttgtgcatcaggttagccgtccacctgcagcacctatcgaccaccc

SEQ ID NO: 4912 - DNA, 1124 bp, Sorghum bicolor
  Intron number 1 from transcript Sb10g024510.1 (locus Sb10g 024510) derived from phytozome v7.0 (chr-ID chromosome_10; pos 53587370 to 53588493 reverse strand)
ccaatacacggtccgcggcaccgtgcgcgaccctggtaaggctctcagacctccctctcatcgatccgtcgcgccccgtggcttcttcttggccgctcggcgggcgattcttgtgctccccccgtctcaaaggattgcagtttttttaattttacgaataaactaattttcaatttgattaaatataaaaaaggtagtaatatcagtttagattttttccccctgaagaaccaggagtagccacctactggttaaaatattttatttctattttacgatttgataagcgacttctttttagacgaccaaagacctcacggtcctgctgataagtgacttcaatatggatatcattgataagtgacttcaatagatgtcattggtcaaggggctgatggaagtcagcagcaagaagatgtgctcagtaagcccacaagggcagaccacccaaaaagaagaaataatgaggattttgacttggaaatatcaggggcagaccattaaagaggatttcttcaatatgatctactagacctagtgagggcaaaagttatggtgtgggtttggacacctgctagactgctagaggcaaatcaggaggcatgcagattgggattggcactagccttctgggggttgataagagtctgataattgtttatggaccctgctcagcatgaattttctatggattgtatccatgaactctcggagagggagacaataggaatgtggaatcacattttttatttgaggatacacaggggggatagctacacatccttccactgaaaagaaaagttccattaaggctgaaacaaattgtagatatttaggcctgttttttctttaaaaactaggccaattctattctattctacctaattgaaaggcagagctcctgccattatgttaaaaaaaaagctgaaacaaattgaaaaataaaggaaaagaacactagcagcaggctaaaaaaaccaggcatgattaaaaaaaagttgagcagatatccttttttttgttatgatggaccaagaaatttgttatatatatgatgaatatgtatcttgtttctccggtttaaaaaaagatatatcttgtttgtgctctaggtgctagcaaga

SEQ ID NO: 4913 - DNA, 1543 bp, Sorghum bicolor
  Intron number 2 from transcript Sb06g000500.1 (locus Sb06g 000500) derived from phytozome v7.0 (chr-ID chromosome_6; pos 535333 to 536875)
ggtgccctcgccaacgactcccaaatcctcagcaggtacatactacagtgataactctgctaatactgtagaaatcgctactagcttagttgggaaattctcacacaagtgatcttagttgggaaattgctcctcttcagttaatgttcttgagtgattcaagatcctcatcactgaacaattcaggattgtaggcactaatcaaagatactagttcggtagaacaagacatgtctgtatagcggagtgaagtgatcaaatatttaattcccaagggatccgatagggcactcctcccaatttcttgttagtcaattcagtagatctggattggagattccactaactactaaccatctgaagcaaactatgcttgctgccgtcataatagtcaacactttgaattaggttgtgtccttttcatatattagagcaactccaacactatcctaaacttcacttggcaaattttggattttgccaagtgtaaaactcaaatgccaagtgaaaaaaagaggcttctccaacaggtagctatttttttggcaaatttggactatcttgtgatttctgaaaaaatcagagggacttttatgcaaaagttgcaatctatttaaggcatgcgtgagcgagcgtggtgctggagcgtgcacgctgaatgtgtgggccccaccgcgtaggcaggatgccaagcgctcccaacgctcccaaatttgagccagttgaccctctttttgccaagcatcctattttgtcaagcgcatatagggtagtgttggaggagtgttttccatgttttgccaaaaattaggatttgccaagtgcatatagggtagtcttggagttgctctaactgaagacgtggaacatcggactcttttcctgtaatgagccatgtgaattgagaatcacagaagatatctcgctaggagtttatatgagtggccaccttgcaatattctttagatgccaaatttcatctttaagataagatgctgaaacatgttagacaacttaagttcatctttaagatactgaaacagagttcatgttagacagcttaagttcatctttacgatgccaaatttcatgttgcaacatccttttcccagcttaagttcatcttaaggcaagatactagtaggtcatctttggtagcgaaggacttccaacaatctttagaagatttggggatagagattcttatccagctttcccgcaaaagattcttattcgacatgcttttttcccctttcgataaagtttaacttgggacagcatttagcagtaaattagtatgctgctgccaggctgtgtgaaaaggggaaagaaagaagagacaaaacagacaggttcttatgttttgtggattaataaacaaacctctgtatggttgagtgcaaaactcttgcagaggcctgataaaattcctttatctaaaaaagataaataaacaaacctctttgtctgaatcactctctctcaattcttctgatggatggatgcaggtacgttgggttctacaagggagtgcagagtgcag

SEQ ID NO: 4914 - DNA, 2370 bp, Sorghum bicolor
  Intron number 4 from transcript Sb09g008793.1 (locus Sb09g 008793) derived from phytozome v7.0 (chr-ID chromosome_9; pos 17498933 to 17501302)
ttcccaacatttggcctagaactttataagcataggtggggaatttattcagcttatgtcctacacattttttttgtagtcgcgtgcacaatatcacaaatattggtcatttctattcagaaactccccccatctcttccagaaaaagatattttccgcacattcacaaatggacctttgtatagaaagataaccatagagcataatttgaaactgtgctcctttgacttggaactttccttctatgattatataaataaggagtactctctttgtcttgtaatatagggcattcaaatattcaaaaacctactcaaatataaggcattagggaaaacagtttttgtgttaaatagttgcataaatttggtaggtattataatgttacttccgattagccaatcaccattcaacatgttgatgacagagactaattattaattaaaatgagaacacatgcgtcttttgtgttctcccttagtctgtcttaaagatgtactaaccattgtttcccacatacacccttacattatccattactagaacaaaacataaattcttcaaacaagatacaatattttaaacatgacattaccttagtttttttagaatttcttcaaatattattttctagaaagttatgtaggtatataattttataagtctacaataacaaaatagctataatcgaactccatcgcatcaaatgttcttttgaatttccatatttttaagtatttagaataaaaatctggaaccacaagaaagagtagatacaaattttcaacaaaagtaaatttgaatttttcataatatcaaaagtgtttttatgttatagaaaggcactttttagaacaggggcactggctaattggatttttactccatgaaatatcaatggcagccttttgtttgtttcttacactatattgtcttgggtttattcacgattgaggcaaaggtccgtgtccataataataaatttaccataaagcatggatccacacatatatgatttaacacttggaagaaacatgtgtctactacttcttgacaggttaataatgggtagtaggtccaacatgaaaagcacatgtgatgattatataatacaagagaatgaatcaactaaataaacttacaccgatctagattcaccaaccattcatcaagggtcaatcatattatttcacatttgctagtttacatcaataaaatcaaatctagagataaatttttgcgacagttccttttaactatcaatgaagatatacctttgatcataacattagaggcatccacaatcccttggctccagttggatatgaaaacatttataatttaatatattttgacctatccaatgactaggcgcttaaagcgaggaagaaacattccatttactagggcccactccagaatagtaatatcctttatagacatttctggtcattactgtatttcaacttctgatttttataatttgttttagtactttattaatgttcttaccgaatgaagtatgatgagtttctaatcaactgggaaatgtctttatatagtaaatatcatatccgacttttgcaattatttttatccctgcaaatgacatgccgtagaaatgcatttttataataaaagctacacttttcttctagtttctttccacgctttgtgtagttggttctaccactagtacatggaagctttccaatgttcacttattttatcactttgaatctgctgatccaaaatactataacattccagatcaaattgtttaaaaacatagaaagataaaagctttaacataccattgtattacttccagatagacatataaatagtactccctttgtcccattttaaataagtttctaaataagttcagacagatcaaggaccttggcaaaacacacatgtaccgtcatcacttttctttgcctagaagatatctcttgaatttggcagttgtcatcaacatacacccacaatttgcttcggcattaggagacaataatgttccatgtttgtatagaatgttaattttttggagacaaattttaaaccttacaaacttatttagtatggcatggaggcagtagttttctcttcacatacaccacacatttaacatactcactttccattccatttccagtggaatggtcagctataacatatacgtataaaccaaatgttagtctatatatatatatattatatatagggttgtaactacatatgagaccacaagaaggtttcctttcatcatagttgtagcataaacattcaatagttacaagaatattctagaaagtactaacatgtgttttacatttacagattctatttcgatttctctgcgtc

SEQ ID NO: 4915 - DNA, 3241 bp, Sorghum bicolor
  Intron number 1 from transcript Sb02g018890.1 (locus Sb02g 018890) derived from phytozome v7.0 (chr-ID chromosome_2; pos 45947205 to 45950445)
aaggcacagatctgggacaccgcaggccaggaaaggtccgtaaacaatggatccatccatccatccatcaatccgtaaagttaaaacagataaacttatatagacaaaaataaaatgacatcttgatccaagagatgatgatagtttttttgtgttgctttcttacataatgcctctactatgcatgtttcctatacataaatacataatactactacccaataatctttgttttatgaaatggccttggaatagtgagactgtatgttggaacttgcaaaggatcttactgttttccatgtccatcagttgtacaatgataaattggtgaaattgctggcgaagaggtttgccatcatttgaaattcttgctttggatataaaaagatagatgctgttgagataacagctcactttacattacattgaatgaatttaacaaggagtggaagcaggcggtaaaatattttacataaagattagttgtgtgctaacagtattactacaactaatgcttgaaacatggggggaaatactgtcacgaatgttcatgtgtcttctataccacagtaccacactgtacatcttgtattcatctagtgatttgctagccttgcttagataggttaggtgtttggaaaatcctagtagtgagaaactttcaacattaccaagtttataccagcaagaaattaaaatatttgtgctcattggagagtcaaattagctttccctcaacgtcatgtgggaagttagtttatttccacgaactccagcttaaaatgctccagcaacacgtcccaactgacatgtcagtgtagcttgccatcaaggctaaacgaaccaaatgatccagggtaaatatgaagcaaaatatacccagctctacctgatatgcactagttttcccaactgagctatgtttcggtacagcaaggaataagttgttcatgtagtcaatacagtgtaaatgttttctcttagataaaatccaataggaatataagggaaaaaatgtgagccttattgtatacaccaatattttaatgcacatgtatacgttcaacattaaattttgaacaaacattttgaaaaaaaaaaaattgaacaaacacatgatttagcacaatgcatgcactaggtaaggggaatgtgttcacttaggtgcacaaaatccatgtccttaggtgtatcctctgttttcagaggagaactagaaactgaactttgttctctttttttctcgaatatgcgggagaactgtgtatccttgtagtaaagagagaaaagaatcagtcccttacaagaactaccacctcattccgggcgggtccatgaggggttaatttacaaattttgattaaaaaactatgaaacacacactgcaaagtgtggcctgtctgaacaagaacaaactagtctagactagctcatcaccttgacctagacccagcatgcgcagacctcgagcaccatagctgacgttcgtctctgaattcccggataagttttttggtgcatggctgagttccctcaaaaacacatcaattgcaatgcttccaaatagggatgaaagcggtacggatactttacgaccatatttgagaccgaatccgtttagaggggctcagatttgtctgtatccgagtccggatattcaacatctgataccgtatctatatctgaatactcaaatcacatatttatgatgtcgacatccaatcgaatcctatccggcatggctgacacatccgtcttcaaatccgaatctgaccagaaatatgaaaacaaatgtcatatcagtgatatccatctgtatccgatccgttttcatccctacatccaaatgatccaagagcccaagatgattggtgtgttcaaacctatttttttccttttccttctgaactctctttgttgctttccgctaccattaagaaaagatttctcgcagcaatttggtatttgatcctgcatgcccagtgcggtcagaatccgaaaccaaaattatcaggcgatcattcatgtggtaaggaggtgttgggcattttcgtcttctagatcacacaaaggacatgggtggggcggtcatctcttggcaagctgatccgccatccagcacctgttacatattgctagtcaaataaaaaatttgcacttcgctgcagcccatgatttccacaagcgtctccaaggctcgaaagcgattgagccattaaaaaacgctctgatatgctgattttgaagaaactgacctgaaccatccaatctccaaatgtgtttgtcagacctgaatcatccagtctccatatgtgtttgtcaacttcttgagagagaattgtctcatggaggatatcccataactgaaactattcaaaaaggcatatcattgacagtccgcttctgatgtcggaggcccaattgtgctcttgtagtgcatctgctactgtgcaccggctacgtgtgcgaagtggtacagcagcaaccactgtcggtgctagctcatctaaggagaatcccatgagccatttatctgtgcttggtggcctgagttcgaaactgaactttgttctaattccagaattcatgacttttggcatggagtaatagagtagtagtaacagatctagccatttatataagtgtagactgaaaggaatttgctgatgaagattttctttatttgtagatgtaagggaatggtacagaataaatacaatgctgtaagccccataacaaactgaaacaaacctgaaactatcaccgttgcatcacaacaccaacttttaaatgttatactggtatcttagcataagttttttgtgagggatattttagcaaaagtttgatggatttactctcattattgtattttatttagtagcttagcttttcaaacacaaataagaaaaaattgtggtgactaaattttttcatttgtctcttgaatcatctatcttcaatgttagtaaccattgaacaaagattagttgtattatactacattctaggcagctagggacattagaaagagttagttttatcttttctctagattctgtgttatcaaaactaagcaaaaagagacagttttcactcctataaaaataggggggagggagtctcttcatcagttcatctatgctatctcattatgtatacctttacactacctatatgtaaacctcaactgaatgtggtaacaggtaccgagcagtaacaagtgcctactacaggggtg

SEQ ID NO: 4916 - DNA, 1096 bp, Sorghum bicolor
  Intron number 2 from transcript Sb02g035390.1 (locus Sb02g 035390) derived from phytozome v7.0 (chr-ID chromosome_2; pos 69828303 to 69829398)
ggtgattcttacattatcttgaaggtatcaaagggcatgatatcttcctgttaacagtttgcttcctagatttaggaaaaactaatgtccagccaaaacttttttactggtacccaggcacttagttgatatatttctagaatttacatatgttcttcaattgttatttgtcaaaattctttagcattttgctaaacatcttggcagttcaatccttatattgcacaatgcggttcattctatacgactgaccctgtgattttttttggtttaaaaagaatgaaaaagttgttttagctcctcttatgccacagcctagatctcaccatagccataatagaacttacaaaattacaataacttgtggacttgatttgctaaaaaaactgttaacagtttattctatgggataaaagtagtttgcaaatatttaagtatggatggggacttcgctgtagagttctgatattttatgcattatgagtgttttcgtaaacatgtaatacattctgtggactacagtctacagatgaaaatggatgatagaggaattgtatatatgctatataatgttattaacaagatcaaggaggaccagctaaaataatctgagttattccttgcatgcaaactactgtttgcaaattttaaattatatagattcaattatattttacacttggccttatttccattgacagaggggattaaatgcagccagtatatattatattgttactgtaaaacttcactaaaattgaagatttttcttagtagatatggtagtaagctgcagttcatgaaactggttttattgaggttgtgagctatgcatagttaaatactttcgtataaaatgattcattcaatcagtaaagttccatggtattgtaaagtctgtaatcctactttgtttttgggtagtgtgcacatgattcatagaccttaatcaacattttagtctcttttattgccatacatatggtatcactatttttatttgacttagtatgcttggggattcatttggattctggtcacgggcatgtaactttttctgcatcttttcccttcttacagacaacagccttgaaaa

SEQ ID NO: 4917 - DNA, 5803 bp, Sorghum bicolor
  Intron number 12 from transcript Sb03g023490.1 (locus Sb03 g023490) derived from phytozome v7.0 (chr-ID chromosome_3; pos 46862450 to 46868252 reverse strand)
atacttgcatctatcttccttagcacaggacaaaagtaagaaatgttgaaaccactaattcagaaaagagctctctctctctgtctctctctctctctctcaccgtaaaaacaaaacaaaacagctgcctatgctgtgattaggagataggcagcactccactgcctgcctagctcctagagctcattaggtataacccttgtgtattttacttaatgagatactccctccatcccaaattgtaagtcattccaagaatcttggagagtcaaacttttctaagtttgaccgaatttatatgataaaataattattattatgataccaactaagtatcattagattctttcttaattatattttcatagtatactcattttacgttacaattcttagtatttctctttataattttggtcaaacgtaaaaatgctttgacttttcaagattcttggaatgacttacaatttgggatggagggagtagtatttagcataggttggtatatggaggttggcagaccttccttagctagtaagaagtttcatgtctgcagctagcactaccagccaattttgttttggcctgctgctgatcaggtcagtggcagttgtattcaacagactgcagcaattttgtcctatactggttagtacactcagctgcagtagcaatgtacaaacctgacttaattgttgcagtggttgagtttctccacttgtctcctggacggcctggggttcaattattatccttggttgcaaaataaacaagagtaaggacacctagaaatttcctttcccagtgcacacctcgtatgggagctttcaacactgggtatgccctatcattgatagggcataaatagaaaaaatatattaattgctccattttcttttgaaacagatcaaagaaaataaggacacatatcatgaaaagagatttattagcaatttttggaaaacaattaagcaaacaatcttttgttgccagtttctttgatgagccttccacattttcaggtcaaaaaaatgcttcaaaaaacttggatggccaatgaatccaacagctgacttttttgcggacaccagagccacgaatgaaactgaggtcactcactacttatttgcattattttgatttttgttgagcatgcactcttggcagtttggcatgaaaacaacagattgtttctatttttcaacacattatttaacatcagattcaagaactgtaatccacattgcacacatgtcacaaatcttcagttatctggcttctgtatggattgtcctatgtcgagtttagaaaagactacttccttctagaacttttgactgggtattgtctccttccacaaagctttcagttcatctgtccattacaatctggtccaaataatttttacattagttaattgttaactgcgtcgtggtttagcttatgaacgggatttccaccctaaaaactagagctgtattgtgcagttctgtttttgtttaatgtgtaagcaacaccttttatgttaggcaacatctccacagaatacatataatactcacttcaagtattggaagttggaacaatgatgcagaagtttctcaatacatgcaaatctcactatagagaagttgcatcatatgaatacacgcattatggatcccctcacttgtactgtttgattggggagggtaagtacgaaacagtttggagagacagatttgattggttaggagcgtcatgaagacaagcagcctgcagtatagggcaaacagatggatacataagtctatagaaagggagacatgaggagggtatttgtggtttaatcttcgcataattgatcacaatggtttctgatagaatttctgattggattagatgggctaaccctagaagggtagcaatatagcatgacatacatgggcctcatgggcctaatacactcatactctaacaccccccgcagtctgaactaccggcgcaacggagttacagactggtactgactggacatgaaaagaagcacacacacgagccccccacaggtgcaactagccaccggtgatgttgaggctggagcgaaactcggtgaaggtcgaggacgggaggcccttggtgaagatgtcggcaaactgggaggtggtcgggacgtggaggccccgaacatcgccgatggcgactctatcccggacaaagtgtagatcgatctccatatgtttggtctgctggtgttgtacaggattggtggagaggtacaccgcactgacattgtcacagccgcctcgacactggagcgggagaccaccggctgttgcttggacgaccaggacaccagattgccgcccagaaagacagcatagctgaaggtggagcgccgagtgttcggacacccggccagtcggcgttagtgtagacgacaagctcagtggaggagcagatcgtagtctacagtgccgcggaggaggcgctttagagcagtgaggtgtggctctcggggatcatgcatgtgtggacaaatctactaaactgcataggtgatgtccggcctggtgaaggtgaggtactaaagtgcaccggcaagactccggtatgcaatgggatctgtcactggggtgccctcggcctctgacagcttgccctatgtgtcaaccagagtggagcaaggcttgcagttagtcatcccagctcgctccaggatatcaagagtgtattgccgctggtggagaagtagtccggtgggacgaggctcaatagtgaccccgaggaagtggtggaccacaccaagatctttcatagcaaattcctgctaaagagaggtgatgatgcggcgaagtagtgacggactggaggctgtgaggacaatatctcatggtgatagataaatagggacgtatctgacttggcctccacaaatcctagtgtcaatatgaaagcagcaaaccaagagtaccatgtccgaggggcctgcttgaggccgtagagagacttgttgagccgacagaccatgttgggacgagaagagtcaacaaaccccgctggctgggtgtagtagactgtcttagtgagagtactgtgcaaaaaggcattcttgacgtccagctgatgcacgggccatgagcgagtgagagccagtgagagtactgtgcggacgatggccggttccaccacttggcaccgtcgcctcggccatcctggtcgtgatgctctgataccatgatagaatttctgattagattagatgggctaaccctacaagggtagcaatatagcatgacatacatgggcctcatgggtctaatacactcatactccaacagtgtatgtagatacagtgcctagcaaccttaattaagaatggatgcaaaactaatcatatctacccttatctcaactaactgacttaaggcctagacaacaaaaggaataatagtgcatctgtatcctaatgtatctatccatgttacgttcatctactccctccgtccccagaaaagtgaaatttttaatttgaacaaatcatttttcttaaatttgactaatgaagtttatataaaataatttcaatatttatgtcttcaaattaaataggcttactatgaaaatatattccgtgttaatctaatgatatttattcagtatcataaatgatcaaaaataaaaaattgccagctatagtcttttaggactctcacaagtcacaagctagctgcagatcgtgtgggttttgcaactccacgttgatgcaaagggtgtgttccagtttggccttgaatcatctcccccccccccccccaccccaaacactctgttaggagagactgaacatcgaactgtctcctagtgagataaaccacctgactcgaatctctcttggtactctacagttcctgttatacatatgggtcagcgagctatgccaacccattactcataatccgtatggaaggccttgagtgcaaacggacagaatccttatggtctgtatgccgccatgcctgcattgtgttccagctagtagcaccactgttggctgtcaccttcaaatggtatgatgccagtgaaacaatctctaatagtgccgcatttgaaccatcccatggtgtcatatgtagggcactccagattgtcatagaggtgtattgggtttcacacacttaattcctggacctaatgatgttcatgcttgggtggcatgaaaagtggagggtggtatttcttgtgaagctatatattggtggccaaaggcttgttgagtttgccttcagatgatgtaaataagggtagatctgtagggtttcagaaaatcccagctgatgatgaggcactatgttagggactgatttcttctcaaagtctttgaggcgcatgctgaacgcatcatggtttcctgcaatttctgctagctttgtttctcacacaggagtgtccagtattcaccaacagagggatccctagtctggaaagacatgccaactgcgcctcccaggaatatgcattggatcatcagtgctgctgctggtagttgtatgaggaggatcataatcccaaataattctatcctagggtggagctagagcaaattcgagggggggggtgcggggtgcgcttgccttgtgggtgcataaacttttaccataggggtctgtatatggtgaacactatttttccgttttttttcatgggtgcggatgcaccccctaccatcaacatggatccgccccttcctaatgatatactctaacagttgtctttgaaataggatgcatgattgcatgaatcacttttcgatcttgtacagtctgacaatgtaattgagaagataggagtggatgttctgcactattctggaaattgcaaacattcatgtgtagtattgtagtttaatacatatgaccccaaaaaatcctgattcgaatttctccaagagaaccaaccaaccaagtagctaagtagtgcatgctccagtgcttaactgcttattctgttaaaacactctacattaagatgccattatatttactacatccattagaattttttggaacagtgcatcatgcactttcctagtttttctatcgcgaccttttttggttcatcccaatcaccaccataacttggaaaagtctgttattttgaaggggcataatgtgatttctatatgagaaaatatggccagccaatctatcacattaacaatgtgaagaatttcatgaattgagaaagcacagtagttggaagtgacaaataaaactggggtagaaacacattggcaaaccagtttatttgatcagatttaattgagtttatatgtaaagaataatacattttttaaaggatgacatatcaagtgatttttatatgcctacttttgatgatctgcttgcttatatattaaaaaggaatcccaggccatgcaaaatagcacattttggaataaaaagtcccttctttggcattgttgtaatgtttcatcatgctttcaaatgacatatagtgattgcttcttattgatggtataagctcctaaaaatatgtgtaactagataaaggaacagagaaacatagattgagatgcaattacctttgcatgagttaatatgcctgttgctgaaggaaatttgatcagaataaagtatatatggtgttatggtagaactaactttagctgtttctacagcaacatgatcatgtgattagccgaagaaggcaacatgatcatgtgattagccgaagaagggcgtcaaaaacaaattttgttgaagttcgtacatttttgcatctattcagaagttttgatcgt

SEQ ID NO: 4918 - DNA, 7719 bp, Sorghum bicolor
  Intron number 1 from transcript Sb02g010060.1 (locus Sb02g 010060) derived from phytozome v7.0 (chr-ID chromosome_2; pos 14736563 to 14744281)
aggtcgtcgggggtgttcagaaggtcgtcgtcaaggtacggggcatgtgtatgacgttgcgatgatagtcctagctgctaatggttgacatggaaatttaatgctttctggccgccatcgtcgaaacattagaaatctcacaaagaagaaaaagacgaaactctgatcaaacgaaatttgaataagctgaaattttgcacacacccttttccaggatcaccttgaaacttgaccaccagatttaaaaaacactctctcaaactggggttttaattttttttttttttttgagagaggttgatttgagagtgctcataggaaattgattgaaggcaaagcttacgcatatgtaccccatgtgccatagctgtgaccaagatcaatttcaaaagctttgctcaaaggtctcggaagaattcaccaaaaataataagagagttttggggcttgaaaccaagagaatagaagctaagcttcaaggtatgatttagatacattccaagggtcccaataactcacaaaacatgccaaataatcagccaaatcagtagcacaaaaaactccccaaaatggctagaaaatcaccgaaaaagagaaattggaggagtgaaaggataaactcgagaattcatccaaaacttcaattaccaaaccatgaatgtaattgatctatacatcagattagcctcctcccaaacatcctcccgcttcagacgagatacaaacctaagaggtggttacttctctctagcctaataatctctctaaaacatgaagttcttggctaatcctatggaaaatagcaagggggtgaaaggatggctgtcttgggcagccacttctatttgtagggttattagacatgaaccacttaactactaggattgaaatggttcgacttgatttccatgcattggacggccacaagcccttcatgaagtcgctttgtctgaacacaagctcttcgatgacgccatgtgtcatctcgagattctccccctggtttccaaacacggaaaccactccatctgtagttttgaggctgaaaccgcccaaccctgtaggccatgtagcctttatgtaaagcatgtgatgtcgatgcatgtcctccatgtcctcagcacggtcgtccaccacgtgctcgcaagtcacaacgccttgccttgactttgtccaaactcggcttagacaccaatcacacgttgtcttcatcgttgtcttgcttgtacccttgctcgatgacatgtccaagtgatagccatacatagtccatccttcggccattagtcctttaggtccaagcctctgtgtctacccttcactcctcactggtcaatcgcacatggactcctacttcaccttctctgttgtcgtcgatcgtctcgcgctcaagtgctcaacacttgcacattcataagccaagagacatgttgcacatacaactcatatcttggtcagtcacaaggacatttaactaaagctctaatcacctccttgacaaacactcatcactcacacatggccatatctcaaccatgtgtttgcacagcgaggcagggctaggctagcagtggtcgtagcctacctactggaagaggctagagcaaagaaatctttggagaagtttgaaaggtcctgaatggttagagggaggatgaatagcatataaaaaattcactacaaataaactagggcaagtggttagtaaccaaaatgacgaaatgtaattttgctctggctctatataaggattgcaagtcacttataccaacaattctagttctttacaatctttaggcacacaacaatgctaagtcactactcactatgagctctcaaacaagctccactaaagagctccactatgtgatactaaactagcaagcaaataagctctcaaaactaattacactaaatagcttgctacaactagtttgcaagtaaataaagagtgagtaggatgattatatcactgtgtagatggatgaaccaatcacaatatgaatgctaattcaatcattggagaaatccaatcacaagcaacacaagatttttctcccgaggatcatgctcttgccgacacgctagtccccgctgtgtcagccaacacttggtggttcgacgactaatagatgtttcacaaacctagcccaacacttggacgctacaagaatctatccacaagtgagataactcaatgacacgagtaattcactagagttatctctcggcgctccaccggagaaggcacaagaccctcacaaacaccgggaggtggccaagaacaatcttcaactcttgccatgctcttctccgctgctccaagccatctaggtggcggcaaccactaagagtaacaaaaaatctacagctcaaacgatctccaagtgccactagatgcaatcactcaagcaaatgcactaggaagcactctcaatcttactatgatgataaatcaatgatggagatgagtgaaaggtatttgtttaaagatgtcaattatgtcaaagtggcaaaagtatgagctccaagctagtgccttcctttctatagagccccaaactcaaagagccattgggagctcgcgggctgaccagacgcattgaccgaacttagccctgcgtccggtcggcaatgtccgatcgctccaatggctgtcacatgtccatggttcaaaccttagccatcggattctaatggtcaaaaacctgagcactcacgagttaagtaccgactggttgtgcccctatgtatgacctaactctgagccgaccaactttagatcaacaacaaagagcatccaaatctagtttttaatgacgtacgcgtcagttcaagggtgactagatgcaccgatgcgtctgatcctctctatgctcgccggtggtgcaaaagttaggtgtgaactgacgtaggccctgcacgtctaatcacgcctgcgctcctacgtctgctcgccgagacacacgatgctcttactggaacatgtggctcttacgggaacatgtgattagacactgtaatacctgattttaagaataaaaccaaatatgcattatatgtgagtcttagaagtcaaatctcacatatagctacaaataagacataatatcaaaagacaatgcataaattatataacgtacatattaaattagagataaccttaagcagcaaacaacggaagataactccaacatcgggtattaactccactctacaggatccaactgactggttgatcacaagcctaacactcctcctgaagtatgggggaaatagcaagagtgagtccatgtcgaactcaacaagtatagcaactagattgtatagatcccacaatctcatgattaatgtgacataaataatgtaaagcattaaacaataaacaatgacaggaatcatcacccttagtgtaagaattcccaaggccgctcgtgaccgtgagcacagctagtatactagtttttaacactctgcaaaggttgtacatctttacccatgagtcatgatttaccctttcgcccgaggcccgttgacctcttaacccactaccaaggaaggtcggcagggatcactatgaagcctttcaaaagttcgtctaacatgttagggctgcaaggtttcccgagcacgcagatatagagccccttccgatggcacaatgactcgcagcctatacacatacagacagaggccacactatacccaaaacgattaggcccctctagcgccctttcgggtaacctctaacaagctagaaaaggtgttcatgctgagctcaagccagagccattatagccctcatggttgcactattgtcccggttatcacttacagataaatcatcaagtggctaaaaagtcatttttatcgtttgttgcttaaacattaatcaagtcacaagatcatggtcacagaaataaaatccaaatgctatacttgccttaatccaaatgctcttgttgatcctgctggtttactagttgtccaaggctctgatcttgatcagagaagcactcttgatcaccacgaattgctcatcgactaaactcgatcatcgatcatcaacacaccaacaatcggagaaaacatatacgaagcaaacaaggctacaattagaacagtacaccaacagtagaaaaacaatataaaaagtttataaaatgattctacgtatcgctacgatctcacagatgtaaagttcacgaaaatcggaattaaaacatagaagatataaaatttccaagatttcctatagaaaaataattaattaaatgctactgtgaaaataaaaagtttcaaaacagagaattaatacttctaacttgtagagctcgtaaatacgaatctaacgaaatttgaatgggtcaaatcggagttaaaatgaatattttatggccaaaacaaatttagtggcaattttgtaaatattagaaagcgtattttaaatctaaccgaactgagtttacgttttccaaactaaaaggcatagtgattggggcttacgttggtggacagggagcaggttcaccggcagcgacgctttcttggagctacagcaacgctggagcagccgaccgctcgtagatgtcgtgtataggcgagacgatggcgatcacgttatagagaagaaaatataattttattttactaccttaggaattctcaaattagaggctttccatatggtagtctttggtgtgctttgcctaaggggttggtatatatatatagggagagaaactccccacctccacgtcaactagcgatatctttactaataggcctaattaattattaaagcccattagtaaaaaaaatattttgcctttgaatcatgatgacgttgggttagagtaaaatgaagaatttattattttcgaaattaattattttttagataaaataattctagaaaagtctagaattattatttaaagcgcgaaaaatactctggaagctccaaaaattcagggaaaattatcagagacattacggaatatgaagaacccaaataaagtatttggagctcatgatgagataatttggggcatctaaaaattagatttatgctcatagaaaagtgagaacagaaactggaaaaattcccgaaaagtctgtagagattgctcgatggacgaggaactaaaagaagtgatttggataacaaaaaaaatattttaggaagctcctaataaaaacttgagctgagaaacaagaaatttggttgataaagataaagacgtatggaagatcgatctactaaacgcattttaaaaactttgctcactcaacacataaaggaacaacaagcatcacatcaaaacatatgcaccagcatgtatgtataataatattgctaagccttatgataaattttaatttaataaaaaatattatttttcctatattttcatgaacataaaaataaaaaaataaataattttatctatatttcaaaaggagtaaattttagggtgttacaccagccgtgcatccgaacatgccatagagatagatccaaacctagggtttgccatcggacgcacaaccttgtgaccagcattcggtcattgaccctcgcctccttttctttttctaagtccacaacctcttcacccttgcttccaagatgttaaccacaaagtgtagaacttgtgtgcatgtgtgttagcatttttctaagtattttcaagggttaattgttagaacactaggtccctaatgcatatacaagaatcatgtcacttagtggcattcgataaccacttaggcaaataattcccctctttatagtatggctatcgatccgaaacatagtcacactctctatggtgtcttgagtatcaaaacaaaaacctatttgatacctttgccttgatctccttggtttttgtttttctctttcttcttttccaagttggagcttgatcaccattatttcatggacttctcatttctctatcacttggtatgtactagccgtgctcaaatttacactcatgacaaaggttagtacttaggttttgttaagtatcaatattagggtgtccaacctaggagcttaaatattgttacatggttcgcttaagtgatcaagtgatcacgcccgatcctacgccttcgcggaggaggtctagttcgaatcaggtgacccagttggcaaccccagccgaatccaacaactagagggcacacactgtctccccgacccttggggaaataagggaggtgcgcttgagggcgagaatatgttctccgtcacgccctatgatggactgtctagttagctcagcaggatgccatccctctctcgcctgatccctcaaggggagttttgggctcacccaatggctcaagaaagtcaggagttggaagggggacaacccgattggagtggggcctaggtcacctttccttggaaagtgagtgaacaagagacatgtcgacctcgtactatgacgaggaaagctagcacgcccctagtcaccctccacacgtatttttccacacatatcgatcgatttctattaagcgctaaagtgaagttaagataagtatttgttggagagagtttttttaattccgcaaaaaacaaagattggaagtgggttttaagaaccattggagatgctcttatcttgagatctttgttgaagtaggagtgagtcttcacctggtttaaactcgtaggtaaatgcatgcaactcgctcaataatcttgtgatgctcacgtgagccacctctagatgcactccatttcagcggcagaactaagcaaatccaaaggggatgtgtcttgacttatgggtggaatgatctatgacatgtgggtgcaaatatggtgaaaatttagctcttttcccagtcttttaattttgcgtgggtgcggttgcacccacaacgagtaatacagatccgcccttgctccattttgctaaactgtcattgtagttattaaatcaatcatcctccacgccaaattggcaaaaatggttatcatttttttttgcaaaaaagcaaaatggttatcattgtttctaatatgatatctattctgaggtaacattcataattttcaacctgtcaatgcatcctttttttaaaaggaataggaggggcaaagcctctactgaaatgcattaaagaaaaaagaagtgcagttacaaacaagcagaaagaaaaagaatgcattctttgttttcaagcaaacacgagaagcagccggttgacatgtttgcccaaacatggttttcttaaatccattcacggagccagcggtgggcctggggaggctccagcccccccaccccccccccccctaccgttgccgtgccagtgaagcccctggtactcccttttattttagacacagatgtatatagtacggcggactgagacctttaattttttatgatatattttatgaatttcatcgtggatctgtgttttcaatatagactacttcaaactattatatttttttctattgcaagaggttatagtagagctaagtcgatatagcatttttttagcttcgtccctgcttaaatctgatactaaccaataatagtgaactctgtttatgtattgactcttgatatgttgtttctcttaaagaactttaagaaacattacctcgtaaaaacaatacatttttaggcttacctacatgttctctttttgtaacatgacagcttccttctgggacatctttct

SEQ ID NO: 4919 - DNA, 560 bp, Sorghum bicolor
  Intron number 5 from transcript Sb04g025910.1 (locus Sb04g 025910) derived from phytozome v7.0 (chr-ID chromosome_4; pos 55685576 to 55686135 reverse strand)
cagagccttcattgagattgccagtaagtttgcctcctaagactatgctagctactatggggcatgtattgacccgggatggtctccaaggctacgttttgactgttaatatctcttatgttatattgttaatgatcatgagattgacatcatatgaaagtatattcaaatataaatccaattgtactgaatctgtatgctataatctacagaatcttatttctttataaaagattaagaagtttgcaccttggcttgtgtgcggcccttacaaaaacgaagtatggttttggctaatttaactttctggacacttttcagtaattttgttgtgtgaaagcatatggtttccactattttgggaatgaatagctgatgtatctgcatttgttctgctgtatgtatcatgggtttgtgacttttatgattgtatttgtggatagctattgtgcttgattagcttatataaaatatatgtgaacagctaatacctgacacattctttttttcaattaattatggcaggtttttggtgctctttctgagttggaacttgaaag

SEQ ID NO: 4920 - DNA, 1537 bp, Sorghum bicolor
  Intron number 1 from transcript Sb03g007390.1 (locus Sb03g 007390) derived from phytozome v7.0 (chr-ID chromosome_3; pos 7730782 to 7732318 reverse strand)
gcagcctcgaccacattctctttggtaagagctgctctgcctgttttctgtctgttctgaattggttgccatcatgctattgctgattatgtgtggatagtaagcatttaattctcagtttgattgtttttttactgcatatttgtaaaacgcatcttagtaacacagtcactgaatcagttcattcagttttatatcttcggagttccgaacaacaaatatagaatggggaattggggattagtttgtaacgcaaggcaggtactttttcttttctttttttgttttcaaacgaaaggcagctaattttgatagaggtacaggaaccacccccgtttagtattttaatgctggtaggtgacaggtactgtatgtttttagacaaaatcaagtggaaagaggtaggtacatcaaggtcgtattcaaaaagtagaaaccacaaaagagtcagctctgaagtttatatagcagctgtttcgaagtattaataatctgttgaccttaacgtcacgaaagctacttgattgatttcttatcttaatctcaaaggctcaacatatcacatcacatcacatcacatcaggtgacgtacatgatcctttcattgaccatttctttgattaggattttttgtcaccagaagcatccattgtgaacaaaagaaataaaactaaattttatgaaaaatataggcagtgcgctttcgtcttactcctcaatccttgaaggacaagaattagttgcttggtattacgtacttcctccattccaaatgataggtacatatcaaggtgcatagtcaaaactatgtatctacaaaaattagaacgatttataatttggaatgaggggagtcagcattttggtcgcatttcagataataacagacaccaagtgtcatctacctagggtgagtctgagcgtccatgtacaattcttctgaccccaagggcgccggtaaggcgtgttgtcttaaactttttctctacttaatacaaagacgtgcaaaccttttgtgtgatccagaaaaaaaacagagctgcatacaggtttacccagctacctaccggagctttgtgcaaacttcagcttgcacataactatactaccttctgaaaactgggtgtattagaaacgcatggtgcatacatttccttagatgatactccctccatcccaaattataagtcattccaagaatcttggagagtcaaagtttttcaagtttgaccaaatttatatagcaaaataataacatttttggtaacaaccaagtattattagattctttgttagttatattttcatagtgtacctattttatgacataaatctttatatttctctttatatttttggtcaaacttgaaaatgttttgactttccaagattcttggaatgacttataatttggaacggagggagtagtagattaggatgacacaaaaaatcagttcgttctctaacatgtgcattatgttccgatcctttgactacttcagacaggaaaaagtgtgtccagctagattggccaaaa

SEQ ID NO: 4921 - DNA, 6552 bp, Sorghum bicolor
  Intron number 1 from transcript Sb04g000500.1 (locus Sb04g 000500) derived from phytozome v7.0 (chr-ID chromosome_4; pos 302170 to 308721)
cgcggccgcctctaccagttcgcctccgccgccgagtacgtacagtcgcgccatggcctttgttcttcattcctcttttctttgcttcgtttcgtcatcagccgtacgacgtgcctacttccttccttctctttcccggcggcccggccgtgtgtgttttgggtactaattccaagattaatcctacacagtacgtgtgtgcatgaaataggtagaattaaaatgctgattatccatgcatcctcgcttgttttttctttctgcatccaatgcaaccagcatgtatatatatactcctatatcatacaaatacacagtacactgctagatccacaacattcatcaattcgtgcatattatttcttggagtttagatagattacaacactgatatatacgcagacggaccggtaaattaaattaaaaaaacgcaagtagtagagaatgctgctcactaattcgaacaataacggaactctacagaatcgctagctatatgtactgtatttgtttatctatttttcactcttcattcaattcattttttatatattctcccggaccggaccctttctctgaaggtaaaagataaacctctcaatagaacgcctacgaaaagaaacaacactggcgatcagtcaaacttattttcacttgtcaatcatcagttcattcgtacattgcttttgtactattggcagtggtcagcgacatgcttttgacttgcatctgtaaatacaaggtactatatatgatgagtcgggttattctccatctctttagttagtggcaattaattcatcaacctatagttgtagcactatgattaacatggaacaacttctcttgtaaccaacagctagtacacatgaaatacagtcaacaaacactgtatatctctcccacgcatatatgcccttgtgttctcttttgcatcattgtgcaaaatctcttttaccgaaggctagtgcacatacagtaattctccctctgaagagataaaaatgtaaaacaaaagttagcccactactcaaaagatgtcaatataatatgctaacctattattacagacaactcttagttaatcaaatatcacacagtccaactggtacatataatgtaacttgaacgtagatgagtatcaagtatagcccactactcaagactcttgaggaacatgatgtaaagcccacttcttaatctgatgaacgacatatatttgatttcatctttctaagctcattaatttgtgttatttctcaatattggttccggaattgaactatacccatcaagcccactattacacaaacaaaaattattcataatctttttcatttagatccagatggtttggcttggaattatgctagggaattatattcttttctagatggagggaatacttaattactccctccgtccatatatagaaggcataactccctcaaacgcaaagaccaagaggcgaattaaatgtcgagcctccaaattcttttttggacggaagagtttcattgaactaatggacacatatagtggctactacagctcatcttcactatcatgcttccatacatactccctccatcccaaattataagttattccaaggatcttggagagtcaaagtttttcaagtttgaccaaatttatatagcaaaataataatatttttggtaccaaccaagtatcattagattctttgttagttatattttcataatgtacctattttatgacataaatttttatatttctctctatatttttggtcaaacttaaaaatgctttgactctccaaaattcttggaatgacttataatttggaacagagggagtatatgatagttgggtcacttatgacttgtgcaccatagatacattattctcgggaagatgacttccttgtgtatttcctgatttttcatgcatactatcgcagtcatgtgccaaccaaaaataagggtggatatgaatagttcatatataaaaaaggaacatcagagccccacaaactcattcttcttaaaataatccataacatatcaatgttttcaaactgactattgtttgaaatactttattatccataacatatcaatattttcaaaccacctagtcgatcctagtcgtcaccacaggaccgaccatctgattagtcgccattagctgttgaccagccaaactactcgagcctagtcgactcggtgcaatggtatagttgttatgtatattctaggaccaatatactatacaatatattgaataaaactagagccaaccaacaagtaagcatagaagcagggatcaacaacaatagtggagcatgaggcaaagcaacatccaacaaagcaagtggcaaagggaagagtcgtagaggcagatgacataatcactatcgtagcaagaatcaaagaagatggagaagtacaaaaaggattggaggataaaacttcattaattgttggagtagaagaaggaatcttgggggtcgctgctcggcgaaggaatcctacggtgtgtgtgtgccttgcccttgtgtttatgggggacaggatcccttatccaaatcccactagtgattgaggaagagtagcccaccaaggaagtggagttagtcacgactagatgaagagtgggccacgatgtgaattaatgttgctaggcaaattgaagtggatgtgtgatggcacacacgaaacacacgaaaaaaatcaaggactatgaataggcatgagtctagcttcttcgctgtgagtccctagccttgaaggataaccctactgggacaaatattggtagctgtaaccatgccctcgggccagtctgacagcaacacaaatcttgttgttgttgcttggcccatctgattatatcatgattaggtgacaacaaattggatgactttaatcttggtcgaccaaattaggttgacaaactaaatcggatgtagtgggtgattcggctaactaattgcattaattagaacacttgtaaaaactgtaacatatgacttagaaactcaactatctcacaaaagcttgaaaaaatgaacatatggcaatgacttagaaactcaattatccacgtttatgcagcgagtcagtcctatcgaacttgctaaactacggttgacgataacatgtcaacctccggtgggatggtttggcataccatggtcatatggagtagtgtgtctgcatgcatatattaatcctttatgcctttgaaatcatgcatgcactgtatggcttcgaggtaattacatctacaggttggggaccacaatgtctagtcgaagcatttgcttcatgtgtatggttcatattgttggccacgtactctcgaagagcagccaactcttcttccttccattgagtaacaggtggctcaaatgatggccatgcttcaacagaaggaagaagagttggccgtgagtaagcaaccaacaataatgaaccatacaaatgaagaaaatgctttgactagctagagtggttgcctacctagacctagaattaccctcaaagccatacaaaggaggattttagaaggtgtcagggttcaatacatgcagacacacacacactctacatgcgctagggtatgtcaaaccatacccaccggaggttgacatgatgttgttccaaaataattatgatcagatgcaattaagcaagttcaatggacaggttcgccacatgcatgaacacaaggcacacaatggagctcttctcctcttactgctttagacattgtctaggctggctttcacctggtacaacaaattagcactaggccctagaactaggagcatgtgcaagatgcctttcaagagtgcttctacaacactcaaagaatggagataacaaagttgacataaactctcaaagagcgaatgagaaagttgttgacttcatcaataggtggagaaatccaagcctccaatgcccacaaccaatcacaaaacctaaagcggtttgtatgtgcatgaacaatttgagcatagacatggccatctacctccaaggtgtgcgactactaacttttgaagacttgtcctcaaaggctatagacattgagaatcatatgaatcatgtgtcttgtcagccaatacattctacaagtaagtagaccaactagtcagattgacaaaccaacgttttccaagccaaaacttccaaacttgtcgcactaccataacattccataagtaatacaaaatttaaataggggtagagagtgcaaactcccgcttcacaatttttgccaatgtagcacatacttttccactatatgtaattggttccatctagaggcaccctcatggttgctaactacatggatagctgattgaggttccctaaattggaatggatcttcaccatggttttgtcaaagtgctccctaccatctccccttggtaaagcttcagccaaaatgtcaagggtctctcctccctctacaccacatgtggccactccacaagcatggttaagtggtgttgcaatacttatagagcttgagattacaacattcattgagtgaatgactaacaacaaaataagtgtgcaaactatgcctaaagcaatgcactaaccagcctaaactaggagtaaacaagtcataaaccctaccttaatttccttaatctctagtctcatatcttgaatagtgaagctctctattatgtatttatgcttttagtagcttcaacaacaaccaaatgcctagtaggagcatatttataaccctaagaagaggaagtggccattgcacttcaagatactaagttgcatgcactgaataatctactacacatttaatgtcatcattcaaatatctgttgcatggaatccaactagtcattgggcttgccgttgcaaccctgaccatgtcatcggatgatccacctaacattctagtgcatgcaccaaatcatttggtttgtgctaactccatcttagcactaggctctttgatgttattgtcctatgagacattcccgttgctctagaaacatacattccaaagatgaactacaatagcatagttaagtatccaatgcaccactaaaccttccaatgagtgaaagaaatgtgctcttcccttatttggtgctcataactgagccaacattgatcaccaggccttggtaatgttaaatgctctagtgcattcaatgtaagctcatggtgctcattatgaagcatctagtgcatataattcttcttcaatggtcttgaatttctttgcattgtttgttcggcattcaatcttcgatgtcttgggtggatacgttgccaatcaaccgctaaaatcacactaatctctctagggtcattgatccttacaaccaaagaagatagatgggtactatggtgtaacaaataagtgtgtgtaataatggataaagtatgaagtatcaaaaccttatgtagagttggtgtcctatattacgattgcagtgaagatgacttcgttgtagtttgggtatagatctaaataagtgtaaataatatgtatctaccatgaagtgtgacttgtctcacattgatattcgagaagatacataactaccacatggagagtgtaagagccctatgttgtataagtgttgtgtactgaacaatttagttctcatatcaatttagtctctcataactctcagtgaagttctgatcaatgttaagtgggtatattccacttctagagagtcggtgttcagtttcacgtttaacgacacctatttctcactatttcactggtttggctcatatatgacaatctatagtcaattaccatagataacttgttcctaaaagagagtttgaaaatttgttcacggcatgcattattgatttgaggaaaaacaagagaataaaattctgtaagtttgcttattatctaagggaaacatatatattatgcatattagttggaaaacacatgccaaatctacatattagtgtaagtgaccaggtgtgaactatatgtttatatacaccttttcatatatagctctctacgcctaataaaattaataattacaactatcaaattagcttagtcccgtaggccaacatatggacagtcatttgctgaattatctatgcgttgaaaggtttatgttaccattttacctcttcgttttacattatttgtttataaaaagatgaaattatagtacaagtgtgtatatattgcaatgcatgatacaacaacaaagcctttaggtcatttgcttgtggcttcccataattctatatgtcaatattacttattgatccagcatcagtattatacatataactattctttaactcaataagtaaagcataataaagataagaaggttagctaaaatcaggcgtggttcttgaataaaccgtgttatattaagtgcaaagttatatataatggagttgtacgcaaattaaatggctgtacatgatgaaagcatttccttcatggatccaatcattgagcctaatatacttggaaaaattcacagcttgcagaatacaattgatcggtacctgaagcaca

SEQ ID NO: 4922 - DNA, 4094 bp, Sorghum bicolor
  Intron number 1 from transcript Sb01g046510.1 (locus Sb01g 046510) derived from phytozome v7.0 (chr-ID chromosome_1; pos 69693259 to 69697352 reverse strand)
gagggcggccgtgtcccgtgcctcgcctgtggcaggtttggcgatcccacactgtttgctgccttcttcctggcaagctttctagtatcatttgtagtcaagttcctgtgttggtttcttgctattgttgagctggcacttactttggcttgatacgacttgtttttcagctatgatctacagttaatctggcactatgttatgtctatatctggctggagaaatccaccaaacagtatctccttattgttatgatctagttgaactggaactgactatgttatgtctgggtggagaaatccaccgaacagctatctctttactgaaaaattgccgccaataggtctttctctattagtatatcatgcggcttaattggtatatatgcattttttaaaggcagagttccgtgttggttatggactaacagatatacgtactaggaacgagttagatatcagttagcagtactaggaatgtcgaggttgcttagttttatctggtactggtgttgcagttgctaggtatgtctagcaacagattttctgccttttgctacttggtataatgccatcattgctccaaggattactttgagttatttgagggttttgttttccatcatgagagtaatgatatatccattccagtgaaccatatatctatctatcaccggcgcttattgcatatcttttgatttcgtaatataagcttattctgtacatatttttttttctcttacgtctctttcctacctattgaagactgaattacgtctgaccaacccatcgaagattgaattaaagtggcacttgtgtgataagaagtctacctagaagtatagaactacagtggtttcgtcctgcctttgacatgtagtaggaaactgcaagtttttaataagagccgcattgatgtgcgaggttatctgagtacagatttctgaaaatatatataatctgcatatcctgctttacttcttgcgacttgcaagttcttatatgtggtggcaaggacagctctggtagatctgccactaatatccttgttcactgattgcttggctgcaattctgtgcttgtgaatgtttatttgatcttgttacaactcttatttttgtatgtttagtttattattgaggttgtgctatgtgtttttctttcactctcgcacttttatattttgtattgctggcatgatttatgatctgaatgtttttctttcccaacatatctcaagctactggggcttcagatggtgctatcatataatacgtagcatacttgtgtattttgagtgtcaaatactttgtgcaccattaatgtttgggcgcatttttgttcttagtttctagacaaatataagattgagttggtttcatttttgttcttgtttgtagcctgtttggttgcctgtacaaggcttgagcctgtcccacaggatgcgaaagagctccctcagcctggctcccaggaaatgagtttcatttccgtttcctgtggccctggattgctggatgccgttgtagtttgagaaatggtggtacctaagaaactaagacttctaaaacttatatacaataaatataatactccctctggtaccgtttcttaggtgctggtgtagtttgagaaatgtctgtcttgttaagcaggcattagtgaccgcatggaaaccaaacggttggctgcaacctctgagtagcaaccttagtgaatgcagctaatcaggaatccaacacagggctgcaacctggcaaatatgagctcacaatcctgcgccatttaatacccctcctcggtatccagtgtttccttggtatctagaatttgagcccatgcgggcttaagaaatggtactggagggagtaattacttttgccttacacattttatcaaaacactgcctggatggcaaatatgagcaaccaaacagagcaaccttgtatagtcttgtttgtgaccgcgtatctcgtggtggcggtcgaaggaagcccagaatcctgccaaatgccatgtgttacctttgatttttctcactgcgtccgactcaaacaccacgaagatgaactacggacccaattctacgtatcgtgtctccctcaccaccgctcgtctaccgcaccgtgcggtggggaccgcattcctaaaccagggccatgagtccagcgtggctgagctcatacatgccaggctaggtgtatacaagtaaccaaaaaggatatttatgtcccaagtgccttatcagtagtatctaaagtatctggatatttgaaacgacacattccttgaggtattgtggttgtttgggatgctagaggcatagctttatatgttttttttttctataattgtttctcctgaaattgtgccgctccaattgcttttattgtttgtcgtatcctttattattcgtatattttgcatgatggtatacattattaaacttgttctgtagctggcatagtaactacaatattcctgattgtagcttcatatgtagaccctgtttttgttagcttatattgctgataaggcctgccattgctagaggattaacttttactattctagtactcatacttaacccccatgaggaggatacacctgctgacatcatgtccttctgcttgtatttcacctaaactgcacacattgtgtggccactatgcctggttgagataagctgcagcctgtgtcaggcattctctgccctgctcaatctgcacggccatgcttgcactgtgctgtgtgcaactaaattgtgcaatgttgggattgtgaggagtgggtgagtagctatacttgagaacgatgagttggacagctgcaacaatggatgcactcatgatagctttgttagtgaataaatgcatgagagaggatgcactcatctagggaagctgagaggataaagataacgaggagtcacgacaataaatgcatgagagaggatgcaagttattggatgttagaatgaatttttgttagaaggtaattcatttgtcgtggagttttttctccctcttttttgttggaggtatttgagacgttaaagggaggtgtgaggacatgacataccatcactcaccagccaagcttttgattgtatcattgtagtaaaggtacatcaggctggcatggcatctataaaccacgatatgtccagattgttgaagttctaatctgttggaataagtgaatcctgaaataaaaataaattctttgtgcagaggccaaaatgtattatacagtcttgtggtgaaccagatgtttacaaaaaattcaacagctttaggaaattgttaagtgggcaatttttgaaatatgatatttgagttaggttcgcactctatatgaaatgtctttcctttttttaaaaaggacacaatatccactggaacctcccttctacagccccagacatttttttccttaaatgtctgcctgcgtcttgaaagcatagttgactatgcagctgctgcctaagtgcctaactgatgagagaaaccagttgcttcctgatgcgacagcgggatccatatattttgcctaccttaaaaaggttttggcaattcatgttttgattcaacttttcaatagctgttactgtacaactaataggatttgatttggaagcaagtactcaagcttaggtgcagacctcataaaattacttgttatccattaacatattttccagtgggagcttataaccattccttattgatgtatagtggaactgtggacaatccatgacatatccctctaggctgcctcatcccacgcgatcttcagagcaccagagctatcaacaaacttataatacgtcatttcaccaatgactgaatatgtcttaaattgtttttctcttgacggttgcttctttgccataggatcctatcttactttttagttatgatactttggggatttgcctgtttagattccctcatttctcgatcctattacattgtatttgtaatgaactgtgtttagctcgctagtttccagctgctacttgttggatcttaatttatttgtgatcatgtctggtcaatgtgcactattccaggtcatctaaggactttgctg

SEQ ID NO: 4923 - DNA, 1963 bp, Sorghum bicolor
  Intron number 1 from transcript Sb03g043870.1 (locus Sb03g 043870) derived from phytozome v7.0 (chr-ID chromosome_3; pos 71117303 to 71119265 reverse strand)
gcggcgcccacatcaatctcaaggtcaagggacaggtcagctcgccggcggttcccccttcctcatcttcttccctgcggcgatgtagattagcgctgttaaacccgccctctcgtagcgatcgatcgtcgttgtgcggtggtttatcggaatcccagggtgccagctatgtgggattggtaggtagcgatgtctcggttttttgcgagcgaatgtttgccgattgcgttcgcctatgtgccctaggtctatcgggttggggccctcgattcctggcgattgacttttgtgttggcccgaaaagtcatagctgaaattaactgttggctgattcttctggccgtgcagactgaaaagaagagagaacagactttgattgttcgtacttgcagtactgattgtctgaagagggcatcgattgttgatcatacaacctgtactatttcattatgtctaggcagtttaccttgatatgcatgtcacctattgctattcaatctgtactggggtactatgacactggcagaattctcatatttaagattagtcttttgtttgtaacagtttaagcactgtgtagtttggtatgatcgtgggagattgtcataattttttatatgatagccggaatccggaagtttatgtttggttgctttgttatctgggattcattttttttatctcacatgattctgaatatatgattattcatatttctgttctaaggtaggtctaatcaatagatatttatcctgtagatttacaggatcatacttgtttatactggtttttttttggtggaggatatggcttgtatataaggttgatatgggccagttaccattatttgttgtttgattttattcttttgtgccaagagctcagatttctcttaattttcggtaactttctttgtcttattatttaattgtgaaagaattgttaaagttgcttgacatattactttattcttagtttgccaaataattttttatcttttatatatcatgacattgaatgaatgtcgatgaaattgttttgatctgtcagttgtactatcagtaattttaaaggcattacacattagcttgcaaattgtttatactctcaggacattgaatcttgtctaatgatatctttgtgatctttaagatatactccctccgtccctttttaattgtcgctttcgctttccgaaaaacaactgccgacaattatatattaagaagtattaatatttatatttataatacataattagtatcattagaaagatctttgaatctagtttttaacaaattttaattggagatacaaatgttgcacgtattttctataaatcgagtcaaacttatggcacacacaccaacgacgacaattaaaaagggacagagggagtaagatgtataatcagagttattttagaggcactatagtttgcgtataaaaagaattcttgctaatactaatgggttggtgtatttgaaatatgatgcttgacaatccttgtccgacattgacctatttgagatctagggtttgtgtgaaagtattacttaacttcagttctaggtagtttaatttattgacattttgactgtacacaagtgaccgtaaatggttaatacttaggttttgtagctccgttatttgcaaaaaaaatctgttcaactaccattgcctaatgtaacgtgagacatcctttaagcatccatcaaaaatctaactctgtttttgatttgatttgaaaagttgaaacttaaatttttctgtatttcagtgattgatcctcttcagggatcaatatggcatcatcaattttctgattgagctgctctatgtattggttgaacgttgtggccttatacatgttagattgtttaggttacaatcttctgatactgctgtccgtagtattatctgtcactcactcttttctttatgatataaaataatatatagg

SEQ ID NO: 4924 - DNA, 8493 bp, Sorghum bicolor
  Intron number 1 from transcript Sb03g044170.1 (locus Sb03g 044170) derived from phytozome v7.0 (chr-ID chromosome_3; pos 71474529 to 71483021)
cccggcggcaagctctacgagtactcctccaccaggttcagcagcacccccgcccctctctccctcctcaatcgcttgcctgtcgatcgaagtgagactgaagcaggggaatagcccccgcccaacaatttagcggtggagcaggggcgatcttcgattcgctccggccccattttggaatcccgcagttgctccacggcttctcgcacgcgcagcggtccaccagccgctttgctcgtgcacgccatgtgctcgagataatccccgatacctggaaggcttcgcctgtgccaccttgcatgaacatgaccctgcttcgtttgggatctctatccggtccggcctgccgctgccgctagcggcgcaacctgctccttgagcttgctctggagcttggctgctctggggcgtactcttcagctctctgctcttctcgccgtactgttcgcaacctactccttgaccttgctctggaccttgggtgctgtggggcgtactgctcagctcgctgctcttcatgccgtactgttcgctctgctcctaggccttgtttatttcctaaaactgaaaagttttcgaaactgtaacactttcgtttttatttgacaaacattatctaattatggagtaactaggcttaaaaaattcatctcgtgatttacaggtaaactgtgcaattagtttttattttcgtctatatttaatactccatgcatgtggcgtaaaattagatgtgatggggaatcttgaattgatttttagagtgaactaaacaagaccgactctgcaatgcgcggagatggagtgtgggtgtggctgtttcttctctccttttcacacgtggttcacaggcaggaggaactcggaactctcatgactcgggagcctgcttcaatgccactgtggtcaactctctagcgcgggcattgacaaatagggcgcacgccctcccatttgcacccggttccgttgattcttctgcgcccttgtcgtcgtaatctggttctcgtccttacatcagctccaaccattgacttttaagctagttataaacattcctcttatatttttaatagaagagagtgaaaagttagctcttgatcaagaactaaactcttgcatatatttcaaggttatgtgaaaatatcgtgtggggctatgcatgttaaaagtcatgtgctaaaagttagcactattggagaagttgtcttagagttagtaactagctctaatcattgtgggtgcccttatatggtgttgagagaaagtccgcgctagagattttgataaaaaataccctccaacaaactcttcaattggtcatctaaatttagccatttttacttcagattctttgctagccaaagatagaaaatgagaacgaatctctagagtataacaagaaatagaaaaactgtgaagtgtagaaagatatagaaaatgatttttatgtaaatgactctctaaatgatgattctaagagagttttaaaaagaatattgaagatgctctaagggattttatctattcgatggcaatttaacctgtggatataggtactatgggtacaatactcaagggtggaggtgtatagatacaaaattttactcactagataatctatcataggcaagtaattatttcacctgcactttgcgatgtgttgtcatccctactcataacaagttagggcttcaacagggagcttcgagttatggtggtttcggacataggcaattaggcacgggtgtcgggtggtgaagcaatgtggatgaatttgcagtgagtggtgaagcgatgtggatgaattggtcaaggatagcatcctaataagagcaataaaggctttcaataaaaaaaggtacttatatttactatgcataataagtaccattagattaatcttgaaatatatttttgtaataaacctgtaaacatggtcaaactaagaattgtttcactcttcggaagtatattttcattcttttgggacaaagggagtaaataacaaatgcccactacctatacccatgccacctctggtattagattcccctatactcatatggtaagatatgtccaataagtcacccatagccacctacatatacaagattagagcgaaatagcattgttaaaaaactcgaccagggggaaagacgtccccctgattttcgtcttaagtagatggtgccgtgactcaacccgggctggctcagccaaccgcttctatggcgagttgtgctgaccagttacaccgtgagagtgttggcgcgaaatagtattgttagcaacaacttaattacattgacatgattaacctaatatgaactagttctataaaatcgacattggacaaaatgaactaaacatatcatatagtttctcctagcacaaagagatactagtttttatcatcactatgtcaacacatgtaatgtttcatgaatccttatgacaacatgggtatagggtacacgaggaatgcatccaacccactgtacatcgttaatgggtacaatatgcgtcgagaataatgagtccttatgacaacatgcgtcgagaataatgtgtgatggatgaagaaaatgacatgtagctactcctaaggtaattacccattgtacatcattaatgggtgcctattgccaacccaaggtatggtaagtgcataccctttgacctaattgtgtttgttaacaccatagtcaatgaaataatatatattttttctattgttatatgaagaaatttaaccgtagatgacaattcatgacatagacacatgacacgtttggctaagtacaacaacactatagtattagacaaaaagaagtaaaattaagacttccaaatttaattagatcacataaactttgcagtaattatggtaaaaagaagtaaatgcgagcacctgttattagaacttccacattttttattaaaaagtaaaaagaagtaaattctagaaaattgtgatcacttgtgttatgtctattactaatacatacaagctttcacatattagaggtcattgctaatgcgacatgtgtcggttttctttagtaattgtggtagtttgaaaagtttatgtgattttaactaaatgaaataaaatgatacttaacatatatttttatctttcacgaccaaatcttaagctctcataatacttgtgaaagaattgctatgctatcccttatgccctgttgctagccctagctatcattcatcattgtcgcactagaattatcactagcatacaaggatggcaatgggtgtaaacccattaggtttcatccatctatacacacactcgatgggatatattgtacccatgaaaaacccacatttgattgtgggtacaaaatctcatccacattcatgtcgatatgggtaaggggtacccataggtcattcaataccattaccattgccaacacaagcaaacatatgttaagcatatgcaattatgaccatataagctaacaagcatatagatagtcaaagagttagtatatggcaaaacacaactcaaataggcaatatatagttcattagctcataataaaaactccaatattatttcaagttttcaactaaaagtccagtgagcacataaagttaaactcatcttgacaccaaataattagatcaagatcacctcatcacatttagcacagacactagcaagtacacaaataatagggtagaagatcaatttttacatattaaaccgggtagaaaacaccataggtttgtgggtttaggtacaataagactatactatacctacatacttgatgggtacaatatttttttcacttaaaaactcatgggtttatgcattattcaatacccatgctcatagggtaaaaaacaattaggtttcagattattcctttggtaactgtggaacaatattatttttgtgattttcaataaatgaaataattttgatacttgaacatgtttgtttcatcctagcacctctaaaaaacccccaatgaaaggaacgtttatcgctcatggttatttctcacaaaattgagacatcgtgccttgttgctaaactctttgatcattgttaacttgaaatggtcatcgctcatggttatttctcacaaaattgagacatcgtgccttgttgctaaactctttgatcattgttaacttgaaatggtcacttcgcctctcattttttttcttttatattggtacacttagcttattttataacttgtggtgttttggataatattttgatttatttttaagattttttttgttagtgttgtgggaaaagaatgagtgatctttatatccattttatatacatctaggtaatatagctcaatgttaatcgtaactttcattcattgtgatcgattgtcactgaccacttaatatttaattataagtggactagacctagattatatacgtagttaataattattgactttaatggtatctttaattcattgctattggttactagtttcttatgtgataacttagactacttaattgtataattttgaatttgttaaaatacacttctctttttaaataagataaatttaatttgctaattaaacaagtttggagaataaaagaaattgatagctcactatagaataatcttatattaggttactattattgtgtctataagtatttgagtttgactatattttgactcatggtaattttttgcacccacattttttgtaggaagatcatgcttatctactatcttgttttaatttgtttagttttttatatgtttttaatcacaatctattagtagctatctatagtattggtgtatcgatatttttaagaatttgatggtcactgatatgcactttgatttgaaaggatagacctcacctagtagattatacccgcatagacatgaagttactgatttatctagttttttggagcaacaagaatatgatgcaacgacagggtttacaaggaaaatgcaccatggaggatggtgccatgatgatgtagaaactcaacttttaatttgtgatgagcatatggattgtatatttgatagtacttctgtaaactatacaatggaaatagtttcctcatgtttgagtattcactatttttttaatatccatacataattgtaatgtgaacaaatgtaatataaataactgaaaattatcctcacagtaaagaggactcaagtatgatatacgttgttcttacactttttatgattaactatttttatggtaaaagaaatcatctataacatacttgaattttgctaaacaagccatcgatgcttgcctactatttgtaaaaaataataatgtttaattaggaaaatatcctttatacttgataccttaagtactacttatatctagaatgttcttaacaccaaacaattgtcgatacccacttagggttctaataatatttaattaatatcctttatacttgatacctatagtactactgtatttacaatgttcttaacactaaattattgttggtactcacttacgtttctatgtgtagttgtacccttttgtcttacagttataaatagtgtttttactagctctaacaaaactaagaaaaagacatattggtcctaagtgaaataaaaaggaaaaaacaagatgtagttggtatctatggccatggcaaaatgaatttttcatacttttatagattgtgctaatcatgataacttggggagtctagaaaatatatgttaacttgaaaacatgtattacttgacaagcaagtgtagtcgtgtagataagagttttgttgacgtccatgtcaagttgggtgcataaaaataatgttctacacacaccacatatgctctattttaacttctcttattttgaaactattatatatagtgattatagtaattggaaaacataaacttactaaatatctacatacttgtaaaattctacatgctaaaaatgaaattctacgtacttgcacattacacaacacatacataagcctatcattgtatcttagtttgaggtaactaggttaaaacaccaatcaatattttttttctccttctgccttttgcgcttgctaacaaatatcattgtttgtttctcatttatttcttcattatttctttggtgctcctatgataatcaacaaaagtactttaaaggtggataacttgtaacatttgaaagagaacctaaagttggatatttgaatactagacaagtttataaatattggaagagaacaaaattgatacttaaatactagacacatgtaaaatttagagttgtactctttacatatataattacttattcatctatgatttttttatttgaaagcgtcaagaatgaacttttctaaattatgcatgaggtgttcgtataattaggaatcctacactttgctattttttacattttcctatttacttctttgtcgttgttgtgattgttgttcatataagttaggggttcatgttgagtttcaactctagcctaccccaacttgcttgttgttgttcgttcaagagtgttttctttgtctcatctctttagtggcaatactagggtcaccactaaaccattcaatgttcatattttcaagaaccttcctaacttgttgataaagcattccttgatcttccaagtacttgaaatacaaactttctcttctaagagttctttctagaaatttttcatgaagtctttgctcataatttaattgagttctcgttgaaacctatataaactttctttcttagggttttctctaaagaaatctcatgagtctttgctcatactttaattcgattctctttgaaacctctcaatgccttagatagagcaagcttatcatcattcgaggttgtcttaatatcttcgccacaaagctttcatgatcattgtcgctagatgaatgctcttattgtttttgtttaagttgtttgtaaggcaaacttatgagtcaagttcttaccattttcatttcaaaattttgtgaactcttgtttgtattctctttgaaacctataaaaaccttcttttcttagagttttctttgaagaaatttcacatattttatttgattctctttgaaactgctcggtgcctttagagcaagcttatcatcatttgaggttgtcttaatatcttcgccgccaaagctttgatggccattgccactagaagaatgctcttattgtttctgtttctaagttgtttgtaaggcaaactcatgggtcaagttcttactattttcatttcaaaactttgtgagctcttgtttttaaggctaactcttacgccatgtctttgatcgtctaaagtaaagtatatggcattctttgcccgtttgccaaaatttgcatcttaaatctatcaatgcataactttttgtctttatataactctattatggactcttgatatagatgattgattgaactccaacattttatcaccaaccttatgtggtttctttgtaactgcatctcatccaacatggtaacacctcatttggcatctacccataggaaggtaggtctagttggatagatttatcaatggcatacctagattcaaaccattggcaccgagtttgtggccacatgctagaaggctctatggtatggaagcctacgggctcaaatgtaagtgttcgaagattgtcaagatctttatgagttctcaaatagaaactacttttgtaagacttctattacaaaccatagtagtatttttcaaaaccacgtggctttagatctccacttgagttttcccggtagaaacttctccaactcgaaaagttttctaagatttctattaccaaaacatcgataccatagttcgtagctatatactataaggctctcctaagtatgagaatggattcagacatgggagttctagaatcctcgaggcccaactttatgctttttagtaaagctctgccctttgtccttcgactctagtaccttgctaagactcatattactcattgttgctcgactccagacttcaaaattcaatatgatgttacttcacttcaggattttgtttgtttgttagggaccaagttttttcaagaaactactctactaaatgtcaagatctcatataagcattgttcttttcttcaaagaaagatctaaggaaaattcaaatttaggtgcaaatgcaggttttattctaaaaaattgaattttttgcacttactgctttcatataattacccttagacataaactaacttgtacgttgtaagcttgtcaacatagaactaagcatgtaaattgtgtccagtgatttctctatcgtacatcaaactaaatccaaggtatgttgtgacaagctaaacccaaggtttgttagcttaggatctaatcccacctctcgttaccaaaaggtggatgcaaatagtgctgatgtcctgctaccatgttttccattttcagcatagaagatacat

SEQ ID NO: 4925 - DNA, 1298 bp, Sorghum bicolor
  Intron number 1 from transcript Sb09g020150.1 (locus Sb09g 020150) derived from phytozome v7.0 (chr-ID chromosome_9; pos 49275628 to 49276925 reverse strand)
caggccaaaaccctacgcctctccctcggcgccgggtaagctcctcgtctccccgccctttccttccgctccctgtttctcctcccctccatctatgatccccacgctggttcggttcgattcgattcgggcgtggagtccggtggtgcgccatggtttgatccgccgacgcgcgggaatgccaacgcgcgctggagcgtgcgcgggagccgcgcgcccgtggaattccgacggggaacggccctctcgggctgcaggggggatcgcgtgattgcgcggtgtggatgaccgtggcggcctggcgggcgtatcatgcgcgcatgggcatggaagaacgccccacgccgagaatttccggggaattcgattggggcgcaggtgatggcgcgcggggatttgcgggcgggtcgtctcggtgtcaggatgctggtgaagctatggatgagtacgctgtacagtctcgtgaaaagggaatttttggtttcttatctactggctgatgattaggtcttggaattcaagggatttggaatgtaaaggcagttttttctggaggctaatagatgcaaaacgctcattcagccaaaattctggttatagtagttttaagttggtctttcaaaaaaaatagttttaagattgctgttttgattctataatctgatggcaaacggaaaataagcgaatatactcgagctaatcccatgagttagaattctctgattctgtaacgatttagtaatcacttgctttagttctgttgttatgttggtaaggttgttttctgttgcttggtaatgggacatgggaggttgaaacaaacacaatttctttgctgcagaaaaacaactaaaacaaaacatcattagtggatggaggttgcatgtcaaatgaaattggagccaaaatgtctctgctttagttctttttggcatgggagacctgcggtagttgtcgtgtaacagcaacatggcgttcatttgttatcaggatgtcaggctgcttttttgctgttagcttagcaggaatatggatcatgttgcatggtgtgtttccttaaaacagctgtctgagttggcctagctgtttgtatttcttatgtttcattagatatgtactttacatttgtagttattatttttttacttggatatcgatattctgtatttgttatgattgaactcgcctcattggccaagaagaagatcagtactttacacatgttatcttagagtgctaaccttttttcttttgcaaaattcatcgcaggtataggcagtgtaatcactttgtcagaa

SEQ ID NO: 4926 - DNA, 5551 bp, Sorghum bicolor
  Intron number 1 from transcript Sb02g035540.1 (locus Sb02g 035540) derived from phytozome v7.0 (chr-ID chromosome_2; pos 69954929 to 69960479)
gcccacgagtgtcacgcctgcggctgctggaggaggtgagtgagtattgatcgcttgccttgcctgctacctcgtgtgggactctaggggaaacatcttattttgggatgaagagagtacaaaattcagtgactatcaggcttaattaaaataaatcaatgacactgcatctcacaaatgatcaacggcataaacccacaagaacaatcaacagagatagagttatcataaagaagtgaaactgtttttttagaaaaagtattccgaattttaggaatccaccaatttgaactttttatttaatctaatattttaaatattttagtgaacatttcatcaatataagaaataacttgcatatcatcattgtcctagctgaaatgatttttttgtcccttgggtataaatccaacatttaagatgattcttccacaaaatcatacgaagatctactaataaataacctactgtcccagcatactccctctgtccctttttaattgtcgttgttggtgtgcgtgccacaagtttgactcgatttgtagaaaatacgtgcaacatttgtatctccaaataaatttgttaaaaaactagattcaaatatctttctaatgatacaaattatgtattataaatattaatatttttaaatatataattaccggtagttgtttttcaaaaaacacaagcgacaattaaaaagagatggagggagtacataatggcttacgacctcaacgctgccaccctggtaccctttgactactaccacatccgttctaaattataacttatactatagaatagaaaaattatagaaaatgtgtattaacatctacaagttaaatgaacttccaatattttttcataatgtttgtgtattttttctattaaattgatattttatatgtttgtgtatttttctattaaattggtcaaataaaaagtttgacttaggacaaaaccaaactaaactataacttgaattgaaattgagggtgtacgtttttgtatggtatatgttgcgcccctgtcatccctagatagtgacaatggtcaattcctgcgggtctttcggctaaagaaaattgtatgatttatgagaagaaaattatacaaaacatatttaggctttcaatataattaatgataagttgagaaggagggagggagtaaaatgagcatagttccgctgatagttaatatgtctactctagtttaggtcctcgaggtaggaaagatgctcacaatatggctagttatttttaatgatactcctaaatgatatgtttacatgggtgaggcacatgttggaccatgtgggatactgggatgtattgaaattaaaaaaattgagagagaaggcgcatggataatcatatgtcaagttgagaagtcaaggcagacgacacgtttatttcatatggttggcttggtctaaatcctaataatgtgctttattattgccacttgaacgagggtacaaggaaatgaagaagaggacgacgtattggacttgttgtttggaatctgtccacccaagtttaagtttttgatttgacacgaatgctcgtattttattagatttattctaggatttaatgaccctatgttttaagtggtaggcgacgttcctgttgacagcgaggcacctgatttaatagtgttatactttcagtgttaggcgacgtcccccttgacagcgaggcgtctatgatgactttgtaaatctcgagatgtgtggactcagtctttcgaaggtgctcataggagtagggtttacatatgtgtgttcatagggatgagtcgaaatctgtcgactcagtctttttttttgagtaatctagaggggccaaggctaagaaatttattgaaagaaacggtggacaacgagccagtacaagattaaggaaaaaaaaagaaacaaaaaagagaaaactaaaaggaaagactatggtagagagagaatccattcttgtagattttgatggagactttctttgactctatgcagaaagtagggtcaatttcttcttgaaaactaatttggccgcctgaattgatggctgaactccttcaaaaatcagattgttccttgttttccaaatagaccaacacatcaaaatcgttgtggccatgaagaattgagaccgcatctgatctttgatctgggaaatagcatccgggaacgtagagtttgtaggtgcttcaatctgaatgttctgccaacactgagctgcaaaagggcactggaggaacaaatgctgagcggtttcctcagtgctattgacacaaaacacacagtcatatgattggagctccatatttttcttcttagaatgttcctggtgttcaacctatcactgattagcagccaaaaaaacaccttatgcttaggttgacattgtgacttccacaaccacttataagcgtcatgaatctggttgtgtcccattaatagcttgtaagcttttgaagagctatactgattcccccaactgtatttccactcatcggtccctgagactatggtagctcttgtaacaaggaaattagttgttgcaactgctaaaaggcttgagttgaaagtggtagtgcaaaaagatcaattgggtcatcagtactgaagaccttcttggcagagaccagttcattttgcataggagaacaattcaggcatggcaagttgaagttcctgaccattccatttgtccttccagaataatatactctctccatttttcaggttcgggcatgctagctctttgaagttccctatgagtttatgttgtctctccactagaaggaatctttcctagttcgtcctggcagcttcccatccttgtaatacttttcccagatcatttgcacccagagaatatctcttctgttgaagaatttatccaaatttttcatcagaagagctttattttgttcccctatgttaatgatccccagtccaccctcttgccttgatttgcataccatcttccaagctgccttagggggttttcttgcatttttctcatttcccctccataaacagttttttctgaatttatcaattcttttaatcactgtttttgggatatccagcgtgcacatataaaaggttggtaatgcagtcaacactgcattagtaacttccagtcttctaacctgagttaagaaagcagtcacacttcctaatctcctttcacacttatttagaagaggtaggtaatcctggatcactggtttggttagccccagatgcagtcctaaataagtgaaagggaaagttcctttcgagcaaccaaaggtgttagcaaggaattccaccttatgttccggcacattgattggtagcatcattgatttcgttaagttcaccctaagcccggtagcttcaaagaaggtgttgatgactgactttaggaacagaatttgttttgaatccccttccaatatgatgagagtgtcatcagcatactgaaccagtctttcggaggtgcttatagaggtaggcattgcgtatatgtgttccatgagtgtacatgtgttctactgtgtaattctaaaaaaattgacttacaacaaaattaaagtgaattataatttaaaatacagatcgcatgcaccttcttgtgtgttatattatatatcttgtccctgtcaaactactatgtgggactatatagtcacatgtcaagttaagcagttgggggaaacgacacgtttgtttcatttgcttggcctgtcccaacgtgcactaccattgccacttgaccgaaggcacacgaaaatgaaggagaggacgacatatttggagctgttgttttgtcttggcaatgttttccataagttcttttcaaaggtgtgtagccacacctactcaaatatatgctacgtactctgattttaaatagtcataccaaacaatggcaatgggctatacgtatactgagttagtgtattgacgccggaaatattcatgttttgtatttatctaatttattgctcatcatagtatacacatcctgtttcgaatagtgtattagattctaaaaaaaacaacaacattgtaacactggtacttagagtagaataactccaagagactcatactatatttttttgaacgaagagactcactatattctccctagtttataggaatagagattgttttttttttgaaaaagaatactcttcaatatattctctaattagatcttcaaatatagacatcatctgttccgaattcatgctaaccaatgataaagagtgaggatgactctttagagtaaacacaagatataaaaaagttgttggaaagtacaaagatatagaaaatattttttactcataactcttcaaatgatgatttagaaaataaattttttattaaccaatttaatagaaacatacacaaatatttgaaatatcaaatttaattcattaaagtttttatgaaatatattaaaattttatttatttgaacatatatatatgtatagatatatattttctacaaaatttatctaagttataatttagaacgaagagagttgtagtcaaagggaacgatggttgcagcggtgaggtcctaggctaggtatggtgggagttaggttttttagatcttcctataattcccgtggaatcatctaaaatgttggatttagaatcaaagggccaaaaggaaataaatcatttcggctaggacaatgatcatttgtgagttacaacttattgaggtaacggagctatatatcctcgtttactctcaaggacaacatattgcaatggttactaaaaatataaaagattagattaaataaaatagttcaaaatagtgagtttctaaaattcagaatactttttataaaaaacagtttgactactctccaaacgttgcgtgcacatgtgtaaaaattgcttcgtttcttattaatacatgctgacttggtcgaatctttcaaaaagagagagaacaaattttagaaagacacttgaagatgcttttaggttcagcttgaattagctagagctagttggagctaaaaattatcccccaattagttaggagttggctagttggctaacagctagttgaatacttggctaaaaaaataatcccatttatttgatattaacctttctgtgtttggataggttagggttaattttaactaatttctaaatagctaatatttagtttttataacaaacaaccccttattcgagccgtcctgatgttttttttacgttgtacaacgatatcaattcacaacactggcagggaggaagtatagcgtccccgtctccgtacttgtaatactgctgccgaccatagcaggtttgctggtcattaacctgctcatctggctttgtttgtggagaaggagaccacaaacaggaggaacccaatcaagtatgtagtgtgccgaattattcttccctcatccgctacaggtttgcagcttgaagtgtttagatgaaaaggcaattggtttgctcacgcttcgatatttgaacagatcccactcattccactgaaacagaaggc

SEQ ID NO: 4927 - DNA, 16215 bp, Sorghum bicolor
  Intron number 12 from transcript Sb03g020630.1 (locus Sb03 g020630) derived from phytozome v7.0 (chr-ID chromosome_3; pos 39397666 to 39413880 reverse strand)
cttccattgatcttcataatcattacgcatatcaggtgagcacttgactgtgtttcctacttccactatagcagttcgtgttttgtattgtactcagcactttgttgtcctataactgtttttgtagctaaagcaaagttcttttttaaaattccatgtcagtttattgttcaactttggcagtgatttagaattttaaatgcatgatagcagtgcagttatcttaatatctggattatatttgctaaattatccgtctcattctgtttgtactttagttcgctggaaactagtgtcaggaagactgacttcatctaggagtcatgcctcagctgtcatgtttgttttgtactgtggagcttaatttattcaatttgggatcccttgttaatcagtccttttatttgtggcatttttcgcaccaacacatctagttttatttgaaaaatcatagtatctttttggtaaaattagtcaattatatttacgaatgctttacatactgttagttaagcctaattgctatgtatcttactttatgcattagtagttgcattgccttggcatccaagttaggagcaggcatctttactttttgctttaggcctttagcatattctggagttggtggctgaccacattgctatataaggggcagaccctctgaacccagtctgtaatcctctttgcaattcaatccaagcggtcaagggccaagctgccctctaggctttcccagatctaaatccttgatgaattgggcaacaattggtatctagagccttagggttacccagagagagacatgtccaccgagagtgcttgcgctcgggcagccgccgccgcagcagcagctgtagcatccacggtggagcagcggggcactggagcgcttggcgcaggaggagtcggtgcatgtcctccttgcgctggcagctgaggaggggtgatcagtgcaccacatggacgtgaagtccgccttcctgaacggcgacctcaaggaggaggtatacattggagaagaaggcaaggtgtaccgcctgcgcaaggccctctacggcttgcggcaggcactgcgcgtctggaacgcgaagctggacaccaccctgaaggtgatgggcttcacccagagcccgcacgaggcagccgtgtactggtggggcagcggacgctctgtcctgctcgtcctcgacgacctcatcatcgctggagaggaagaagtcaatgagcttcaaggcgcagatgaaggaaagattcgacatgagcgacctcggcctgctctgcttctacctcggcgtcgaggtgcgtcaggatgccagtggcatcacccttcgccagactcactatgctaggcggatcctcgagcacggcaagatgaccggctgcaatctggtgcacacgcccatggaggagaagctccgcctgagcagggagagcaaggctgaggaggtggactccacgcactactggcggcttgtcggcagcctccggtaccttgtgcacacccggacggacctggcgttcgcggtcagatacatgagccgattcatggaacagcccacggtggagcacttgcaggccgtcaagctcattcttcgctacgtggccgggaccctggactatggtcttcattacaagagggctcctggcacggtgtgcttcatcgactactgcaacagcgacctcgccggcgacgttgacacaagcaaaagcaccagcgggacaatgttcttcctaggtgattgcttgatcagctggcagccaatcaagctgaaggttgtggccttgtcaagctgcgaggcagagtacattgccactgcctctgctgcaatgcactgtggttgtccaggctgctcagggagctgctgggcaaagaagtcgatgtggtggagctgaaggtggacaacgagtctgctttggccctggcctagaatccagttttccatgacagaagcaagcacataaggatcaattatcacttcattagagactttctggaagatggaagcatcaaggacagccacatccctactactgatctgcttgtagacatactcaccaagtctctaggcaaggccaagttccaggagatgaggagaattggtttggagcagatcaaccagcattaggcctaagggggacaatgttagttaagcctaattgctaatcttactttatgcattagtagttgcattgccttggcatccaagttaggagcaggcatctttactttttgctttagcatattctggagttggtggctgaccacattgctatataagtggcagaccccctcctctgaaccaagtctgtaatcctctttgcaattcaatccaagcggccaagggccaagctgccctctgggctttccctgatctaaatccttgatgaattgggcaacacatactgttagtgttcatgaatgcaccaacccatatggctaatgctaataacttatcttgagagcttgtggtagaagttgaagaacttgactgcacactttctagaatgttatatatttatgaatggatggagtttagtgtatatgggagatccagggcgtggggtcggtcgtgttccaggcgatgaacggtgagcaccacgtcctccgtggcgtctacttcatcccggcgctccgcaactccatcatgtccctgagtaagctcgatgaagcgggctcgaaggtggagatcgagcacggcaccttgcgtatctgggatcaccgcaagcgcctcctcgccaaggtaaagcgcggccacaaccgcctttacattcttcacctcgacgccgtgcagcctatctgcctcgccgcgtggaaggacgacgatgcctggcgctggcacgagaggtttggacacctgcacttcgacgctctgcatcggctcggcaaggaggctatggccctaggcatccctgatcgagcacgcagcgcaggtctgcgacacctgcgtcaccaccaagatgtgccgccgaccgttcccacaaaaggccgcgtaccgcgccgagcagccgttggagctcgtccacgacgacttgtgccggcccatcacgccggcgactccgggaggccggcgctacttcctcctcatggttgatgacgccacgcggttcatgttcgtggtgctgctcgcgaccaaggacgaggctgcgcaggcggtgaagaagatcaaggctcaggcagaggagtcctgccgcgaactcaaggtgctgcggaccgactatggtggagagttcacctgctccgagctcgccgagcacttcgccatggagggagtcaagcatcacttctccgcgccgcactcaccatagcagaatggcattgtagagcggcggaatcaaactgtggtggccacggcgcgggctctgctcaagcagcgcagcatgcggctcggttttggggggaggcagtggtgaccgcagttcatctgctgaactgctcgcccaccaagtcattgtagggcataacaccctacgaggcctggcatgggcgcgcggcgtccgtggcgcacctgcgcgtcttcggctgcatcgcctacacatgcgacttggggcagctgcgcaaactcgacgatcgcggcctccatggcatctttgtcggctacgccgagggtgccaaggcctaccgagtgtacgatcaggcgaccgggcgcgtcaagacctcccacgacgtcatcttcgacgaggggcgcggtggaattgggcgacatcggcggccggaccctctgcaatggcgtcgagcgacttcaacattgagtggcccgccgaagcagaggcggcacccgcatctgcttcctcagcaccatcttcaccaagtccaccccgcgcgctatcttctgcttcgggggagcatgatggaggcgacgtggacgtgccgaagactccctcgctagctctgctccagtagccgcggcggttgagaccagcgacctggtggagtttgcctcgccactagagggagatgaggactgggttgatgcctggcaagatgacgagcccctgcgcgaccgcacagtggccaacatcatcggcaatgcttctacaccgccaccgccgccgcgtctctttgttgaggtccacctgactcatgcgggattacaggcgaaggatgaccctgctcaagtccgtggagcagaaccgcacctgggagctagtgtcgctcctggctggccaccggcccatcactttgaaaggatgagcggggcgcggtgaccaagcacaaggcgcgcttggtggcgcgcgggttcgttcagcaagaggggatcgaatatgatgactcttttgcgccagtggcgcgcatggagtcggtcagggtcctcgcgctagcagctcaggagggtggcccgtccaccacatggacgtgaagtacgcctttctcaatgttgacctaaggaggaagtctacgtgcggcagccgctgggattcgtcgtcgccggggaagaagacaaggtgtactgcctgcgcaaggcactctacggtctagccaggcgcctcgggcctggaacgagaagctagacgcgacgctcaaggagatgggcttccagcagagttcccacgaggctgccatatactggcggagcagcggacaggcaattctgctcgtcgtctacgtcgacgacctgatcatcactagcatcgacgagaaggaagtggcggcgttcaaggcccagatgatgaaggctttcgagatgagcgatctcgggctgctgagcttctacctcggcgtcgaagtccgatcggcttcaggaatcaatctccggcaaactcactatgctcggaggcatggagggctgcaatcctgcagcaactcccatggaagagagactgaagctcagccgcttcagcacggccgaagcggtcgatcctaaccactaccggcggttgattgtcagtctgcgatacctggttcacacaaggccagacattgccttcgccgtcggcttcgtcagcaggttcatggataagcccaccatggagcatctcgcagctgcgaagcgcatattgaggtacctcgccgggacgctggactacgggctgcacttcttgagatcccctggcagcgcccacctcgtcggctactgcgacagtgaccttggtggcgacattgatactgttacataccttagggatctgagagcatgaactctccagagggatgatgataagtatatataggtctagagagcctcatgggctggaccatatgggcctacaggcctataatataagagtcttcacagttaacacccccattcaaactcaaggtggaagcggaggattggaggcattgagtttgatcaagtgaagccgatgctgctctcgagtttgtgctatagtgaaaaagtcaaccaattgcaactcagaaggcacatactggagagaaatagttttctgttgacaatgagaccgagtaaagaaagcatccacaccaatatgctttgtaagttcatgcttcacaggatcattggcaatttgtatggctacggtattatcacaaagaagaggtgtggcaacatcacaggaaacaccaaaatcagccaacaaccatcgaagcccgacaatctctgccgtagtagtagcaagggctcgaagatcagcctctgtactagagcgagatacagctgcttgtttcttggacttccatgcaataggagaagaaccaagaagaatgcagtatcctgtgatggagtgtcgatcattggggtcactcgcccaagtagagttcgaataagcatgaagctaaagtggactgtcatgtgcatagaatagactctgagatgatgtcccccataaatatcgcaggacacgaagaagatgtccaaattgaacagaagttggggcacaaacgaactgactcaaaatatgaactgtatggcctggtgacagtgagataaacaagactgcccactatatgtcgatatcgagagggatcctgaagaggtaccccatcagtgagacgaagctgcaagtgaagatccataggtgtagcagcagtcctgtcatcagtgatgcctgaacgaacaataaggacctgaatgtacttagactgagaaagttgatatcccttggtggatcgcttgacctcaatgcctaagaaataactgagaggacccaaatccgacatctgaaattcagcactaagctgctgcttcacataagaaatgtgatcctcattgtcacctataatcagcatatcatcaacatatagaagtcgcaaagtccgaccacatggtgacaaatgaacaaataaggccggagcatgatcactaggtgagaaactagcagcccgtatgacagatacaaaacgatcatgccaggcacgaggggcctgttttaggccatataaagcacgacaaagatggcaaacatatcctggaggagcaaccacacctggaggtggttgcatataaacttcgtcagtcaaatcaccatgaagaaaatcattcttgacatccatttgagagatggaccaagaagacgcagccaccacaacaagtaatgtatgaactgttgtcatatgagcaactggtgcaaatgtctcatcataatcaagaccttgagtctgctgaaaacctctggcaacaagacaagctttgtatcgttctatggagccatctgacttggtgttaactttgaatacccacttagatgtaataggtaccacgtgtgatggcaaaggaacaagatcccaagtgccttgacgatcaagagcagcaagttcctcagacatagctagctgccattcgggaatacaagcagcttcttgataagtggatggctcatcaacaatagcattgacatgaggaaaaggaaaaccatacttgtctgcaggatgaatagagctacaatctcgaaagttatatcgtggaccaacctgtaactcatcagaaacaatagatgactcatcaatagtattattattagaatcatcaacaacgggctcatcaggactggccgaggtggtagaactagaaggaaggtgggtgagggttttgggacgacggctgaagacacgtgtgataggtggtttagaaaaggaatgaggtggtggaggtggagttgctgcagaaggtgaaggtggatcagaaggtaagggtggcgtgatgaaaataggtggatcagtggaaatagcttcaccccaaaaatgggaagggacaaaagatgaaatcaatagggtccgagctgtctctatgagatggcgatgttttcgttcagcgacgccattctgagcatgagcacctggacaagaaagttgtgcaagggtaccctcagatgacaaagattgtcgaaaagcagcttacaaatattcacccccagagtctgagtgaagaattttaataggagtagaaaactgtgtgtgaaccattcaagcaaaagactgataagatctagcagaatgagaaacactagaagaatacggaagttgtatttgtttgccaagtttacaacccttgcaatgaaagctagactcaatggatgtatgacctaaacaatctttatttatcatagaggacaaatgagacccacaaagatgactaagacgatgatgccacttggcgaaggaagcggatgacgatgcagcggatgaggcatgagctgtagatgcaacagacgaaggaagacgtagggtgtcgagaatgtaaaggctggaagcacctttatggcggtggccagtcccaattgttaacgctggatccttgctctaggtgtgagcaggatccttactctcattgagaggatagcacactgagttggggcaattttctgggtttatttctcacacaatgctatgccaacctgaggggttggggatacatatttatagggctgctaaccagccagcatatgccaagatgctagtctaagatgctagtctaagatgctgtcctacagatgctaactgctgtcctaaaagcagtcaagatgctgtcctacagatgctaactgctgtcctaaaagcagtcaaggatgctgtcctacacaaggaccatgtgctgcctactgcagcccacaaccaccagccaacagagacttatccatcattctccccctaagtcttgtgtggctccttgtggggtatctgagccatcccgatcctggtgcgaaattcttggaacttgactcgcccaagggacttggtcagaaagtcggcgagctggtcttgggtgttgatgtagttggcccgaacgctcccttcctccaggcagctcctgatgaagtgatacttcacccggatgtgcttgctgcgctcatggaagactgggttctttgccaaggccaaggcggacttgctgtccaccctgagctccactgcctctgcgtctctgccaaggagatcgccaagcagccgagccagccacagagcctgagtagaagcggtagtggctgcgatgtattctgcctcgcagctggacagagccaccacctgctgctttaccgactgccagctgatcggacacttgccgaggaagaagagcgtcccgctggtgctcttgctcgtgtcgatgtcgccggcgtggtcgctgtcactgtacccgatgaaatgtgccgcaccggggcacctcgggtagtgcagaccgtagtcggaggtgcccgcgacgtagcggaggatcctcttcacggcctgctggtgctccgtcgtcggtcgctgcatgaaccgactgacgtagccgacggcgaacgccaagtccggtcgcgtgtggacaaggtagcgaaggctgcccacaatacgccggtactgcgtcgcgtccacctcttcctccgtactctcccgactcagcctcagcctctcctccataggagtgtgggctgggttgcagccggtgagaccgcccagctccacaatgcgcttggcgtaggctgcctggcggagagaggtgccggagctgtcttggtggacctcgatccccaggtagaaggagagagggcccaagtcgctcatctggaaggtcgccctcatcttctccttgaacgcctcgatctccacctcctcggtgccggtgatcacaagatcatcgacgtagacacccaccagcagggcctttcgtcccctgccccgccggtagatggccgcctcgtgcgggctttgctcgaagcccatccccttcattgtggaatccagtttggcattccacgccctcggtgcctgccgcaagccatagagggccttgcgcagacgaagcaccttgccttccttgccgggaatcacaaatcccggcggctggtgcacgtagacctccttcaaatcgccgttaaggaacgccgacttgacatccatgtgatggacacgccagccctcctgggcagctagcgcaaggagaagtcgcacggactccatccgtgctacgggggcgaagcgtcgtcgaagtcgaccccctcctgctgcacaaaacctcgagccaccaagcgagccttgtgcttgacgatggcaccggcttcatccctcttcagcttgaacacccacttaagggtgatcgcgcggtgaccacgagggagatcagcaagctcccaagtgcggttctgctcgaccgcgtccatctcctgctgcatcgcggcacgccatgccgcgtctccctccgcctcagcgaaggagcgaggttcaccgtcctcgtgtgccaggtgcagctccgcctcgaagtcgtgtgccgctaacccagggacacgttggttaccgaggatgttgtccatggtgcggtagcgtagaggctcatcgtcgtggtaggcgtcgacgcgatcctcgtcgccggacagtggagtggcgaactccaccgaacgctgacggaccaaagctgctggtgccgaccttggagttgccggtgccggtgcaggagagtggggagccggtgcaggagtgcgtggtgtagccggtggtgttggactcgctggtggtgaaggcggtggtgggctcgccgaagctgatggcgagctgagtgccgaggagggcgagctcggtgaggacgagctgctagctcccccggctccctccaagtggacgtagtcgacgacgaagtccctgagggtcgaagccgagccgtcgtccaccgccttgtcccaagtccagcctcgcccttcatcgaacacgacgtcccgggagatgcggacgcgctgtgtcacagggtcgaggatgcggtaggccttggcgccctccgcatagccgatgaacactcctggagtgctgcggtcgtcgagcttgccgacgtgagtgagctccttggcgaacgccagacaaccgaagatgcggaggtggctcaccaccggcttgcgcccgtgccaagcctcgtacggcgtcatgccgtcaagcgccttggtgggcgagcggttgaggagatggatagcggtcatcaccgcctctccccagtagatcgccggcatccctctctgcttgaggagggcgcgggcggtggcgaccaccgtctggttgcggcgctcgacgacgccgttctgctgcggggtgtacggcgcggtgaagtggcgctggatcccctcgtcggcgcagtgcgccgcgaactcagccgccgtgaactcgccgccgttgtccgtgcgcagcacccgaagcttgcggccgcactccttctccgcagcagcttggtggtgcctgatggcgtccgcggctgcccccttggtgtcgaggaggacagcccacatgtagcgggacgcgtcgtcgacgaggaggaggaagtagcgtcgtcctccaggtgtagccggtgtcacggggccgcaaatgtcgccgtgcacgagctccagcttctccttggcgcggaagcttgcttggcggggaaagggcagccgtcgctgcttggtgaggacgcaggtgtcgcagaactgctccacgtggtcgacgcacggcatgccctgcaccatctccttgttgccgagctgcttcagggcctcgaagttgaggtgcccaaagcgctcgtgccaccgccaggcttcatcgtctcgccgagctgcaaggcaaaaaggttgcgccacctgtacgtgaaggacgtagaagcggttgctccccctgttcaccttggcgagaagtcggtgacgaggatcccaaatgcgaagcacgccgtccttgatctccacgcgcgagccattctcatccagctgtcccaagctgatgatggagttcctcagcgcggggatgtagtagacgccggtgagcagccgatgctcaccattcttggcgacgaagattacggagccggcgcccttgatctctacggcggaggcgtccccgaacttgacggagcctcgaacgttggagtcgagctcggagaagaactcccgccggcctgtcatgtggtgggtggcgccggtgtcgaggcaccacccatcgatcttgtcgctgccgccggacccgctgctgaggagggcgtgtgccttggcctcgtcgaggtggagaagagccgctgcagccggtgctgctggagatggctcggcgctagcatgtgccatgaacagagctggctgctcctcctccgcctgcgcgacgtgggcctgggcgcgtcgtggctgcctgcagtccttagcccaatggccagcaagaccacagttcctgcagcagtcatcttgtgccggcttgggtttttcggcggcggcgccttggacacctccgcgggcgcctccgttggcacgcccttgcgccccggcctgggcgcctttgcgtgacttgccgcgcttgccacgcttgcggctggctgctgcagaagaaggctcccccttcttcttgtcaccttgcccggcagcccactgctcccgggtgagaaggagcttgggccccgaggagggctgtggctcgtcaatgtcgacgaccttgaggcgacctatcgcctcctcgatcgacatcgtggagaggtctagcagggactcgattgagcgagccatctgcttgtacttctcggggacgcagcggaagagcttctcgacagctctctcctcgctgtaggtgttgtcaccaaactgcaccactttccgcagcaaagtgttgagacggagagcaaaatcatcaacgtcctcacctggcttgaaggccaagtcctcccactccttgcggagttgctgcagtgtggacttgcgggcgcgatcactgccgatgcgtgctgcagcaatggcgtcccaagcatccttggcagtccgcttgctggtaagtgagaactgcatctcggtcgggactgcagcgatgagggcattcagtgcccgtcgatcctggtcgtagtcgacgtcgccgtaccggactgcctcccacatgtgcagcacctgaagtctcaccttcatcaccgcagcccactcaacatagttggtcttggtgagggtaggccacccaccaccagggccaacgtccctggcaacagcatggtacccgtggtagccacggtaccggtccggggagagagagccacgcggcctgcgaaggccgtgctcttcctcgacccgtccaccgccgttgccatgcgcgcctcctccaggaacgccgccggcgcctccacgcctgtctggactgcggccacgctcgtgggcgtgcacagctgcccactgcgccgctcgccggcgtgctgcatctctctccagcagctccaggtctgggtcagcactgtcatcagcagcgatggagctgctgtgactgctgcgcaggtcctcaacctccgctgccgctgcacgcgctgcatctgcagctgctgctgcctccacctccgctctggctgctgccagctccgcttgggccagcctcgacgccctcgctgctgctgcagcggtcgctgccgctgctcgcctgcgctcctctgctgcagcgaggtcggcctcctgccgacgccgcgcgctcgaggtgcccgagtgctgagactgcccttctgcggccattgcgcgctgctgcgcggagagcagaggcagccggaacagctgctgctgccagccggggctgctgcgaggcagggagctcgactggagaagggattgagcaggaaatgcttaggctacaggatactacagctccgataccacttgttagacgctggatccttgctctaggtgtgagcaggatccttactctcattgagaggatagcacactgagttggggcaattttctgggtttatttctcacacaatgctatgccaacctgaggggttggggatacatatttatagggctgctaaccagccagcatatgccaagatgctagtctaagatgctagtctaagatgctgtcctacagatgctaactgctgtcctaaaagcagtcaagatgctgtcctacagatgctaactgctgtcctaaaagcagtcaaggatgctgtcctacacaaggaccatgtgctgcctactgcagcccacaaccaccagccaacagagacttatccatcaccaatcactttcccgctgtgacggtcctgaataaaacaagatgagtcatcaaatccaacaaagcaattctggtcagtaacttgaccaaccgacaaaagaacatttggtacagaaaaataattattgcaaagtgaaccctgatgagtaatatgacaagtaccatcagctgtctgaatagaagtgccatcagtgaccggcttgcaggcaaccagctgggactgatcggatgtcacgtgaaaggaggctccagaatcaagcaccaggacgagggagtaccaatagtcgaggaagcagcaacagagctgaacctctaggagtggaagaagtaccatgaccacgagcagcacaatgagcgcaaaagtcagccagcttctctggatgcttagcaaaacaattatctgaactatgattagtccttccacaatgcttacagggttcttttaatgtactagtcctctgatgagaagctgccaacacactgtgaggattaggcacagtagacagagcctgaagacgtgtctcttcagcaagcaattcagataatgcctttgcatggtcagagtagaagtatgaagtaatctggtacgaatagaatcaaactctgccttcactcccatgacaaatctataggtaaggaattgctcaataaaggagagtgttgtacagttctgacctgctgtacactgaggcaccatggaaatcaaagaacccatcaaacgatcaaaggcggaataatactcatcaatggacatatctctctgttcaagaccatgaagctgctgcataagagtatgttgaagagcaccactgtcctggacatagcgttccttcagataagaccacataggtttagcttgcttaaacttgcgcagactcataatcatggtttgtttaacactattaaccatagcagccatgactttcccatcattgatttcccatgttttgacagaagcaacattactagtgtcggatttaagagttggtggatcatcagtcaaatgaaaataaagaccatgacccctcaatgcagtttcaacggtaaaagcccactctaaatagttctgaccatccagtgtgatgttgatgacaatagcagaatgatgagactaagacatgatggaatctgaacaatagcagttgaaggctaagaagtgagaggatggatatcaccgcaatgtgctggggagttccacagagacatgggaggtccatccgcgtgaagaccgcgcgtgatccgcgcgcccgcagccggagggcgtccacacggccgtgtgaaggagtccgcacagtccacgcacgcgtgaagaaggcgggtccacgcggatgtcaggggcgtctgcacggccgtgtgagtctgcacgtgcccgcagccgaagtcgagggcgtccacatggccacgtgatctgcgcgtcgcgtctgcgtgaaggaggccgcgcgacgggtcgggtccgcgtccgcacgtgaagacgcgactcgcacggagaataagacgacggacgtccgcgcgtgatcgtgatgcgatccgcgtgtgaaggacaggccgggtccacgcatgactcgcgcagagacgaagacggcggaatcgcacagaggcgaagacggcggacggcgtacgaaggcgtggcgacgagccacacaaaacagaggaggcgcgacgacgggccgcacgaaacagaggaggcgcgatgacgggccgcagaggaaaggataaaaaaaaggatcgtgggtgaattagatgagtctagtcctaaccctaatccatggctttggtaccatgttacgtaccttagggatctgagagcatgaactctctagagggatgatgataagtatatataggtctagagagcctcatgggctggaccatatgggcctacaggcctataatataagagtcttcacagttaacagatacaagcaaaagcaccaccggagtcctcttcttccttggtcagtgcctggtgtcctagcagtccattaagcagaaagtggtggcactctcgagctgtgaagcagagtatgtggctgctaccactgctgccacacaagccatgtggctgtcaagattgctggctgagctacttggaagacctgtagacattgttgaactgaaggtcgacagcaagtctgcactggccttagcaaagaaccctgtcttccatgagcgcagcaagcatatcaggatcaagtaccatttcatccgaagctgtttggaggatggcagcatcagggcagagcacatttcaactggtgatcagctagctgacattctcaccaaggctctgggcaagaccaagtttgaagacctcagaaggaggatcggtctggggcaatctcagcaaaggagaacaagaccaaggggtagaattgatagcagttggtcatgcatctttttagcagggcctaagtattgcccattgcgtttttcagttttaactttcaccattaggttgctgtaaatggtttgcttgggggtcaagaagataaaagacccttggcagccaagtaatcaaagcatctaccttttctgctttagaatatgctatagtcctaggggtggctcacagcctataagagctggagttgggacaggggttttgtaaccacgacttccactttgcaaattcaatcaaaaggccatagcaggcaagctgccctctggctgttaccagaaaattgtcttgtgttcaccaacagtgaaatgttctaggatccattgtggctaagcactcaagtcctacactgttttgtttctttatattgcaaatgttctctccactacattttaatgtttcagaattatttcagcaaattattgttttctttgatttgatcatgtgtttgtcatcttggtgatagatt

SEQ ID NO: 4928 - DNA, 1552 bp, Sorghum bicolor
  Intron number 3 from transcript Sb02g021080.2 (locus Sb02g 021080) derived from phytozome v7.0 (chr-ID chromosome_2; pos 52120930 to 52122481 reverse strand)
atccttggaccatcgcagtcgccatacgagggtgaggaatcttttactctttgttcatctgttttgtgttttagttatgtttggtactatgataactggctttggaaatggtagatggaatttaggttattggaatttttactccattccatatcattcagaagctacaaataccattaagtctcattatctcatttcaataacattgaagaagtgttattaagatttttttcaatgtctaatctttactgttgcctacattttcatttggtacttctgtgatctgatgatttttgggaacataaaagttttggaaagatgtgcctctttactgttgcctccactggtctccctcttttctcggttctgtggttctagcctcttgcctcatggcacaaagtgccattgcacttgcacctcctttctatttgcttgctctctcaacacgaatgagcacctctccttcatcgtttcccaacaatcatcctcagctgatgatcagggcttccaagccctgcctgcagctcaaccatgaagcctctttatcagccagttagttcatggtctccatgcccctgtttcaaaccagagacatgtgtggcttccatttatcaatctgtggcatggtccttcttgtcagtggttctagaacagattcaccagtggcccatgcagctccaggtttgacagcagtatttatgcagctgggtgcaggtcagcgagaaacctaggcgtagaagtgcaggtggagttgagtggctttgactgggcatggaatgaaatggctatggttaattgtgcagagcagacaatgcaaggatgatgtctggtggtttgggttgactgtctgattgaagaggcattgccgcattgtttaaatggttgatcagtaggttgtctccaataggagacccatttgggaacccaaacccaaaataggtttccaacacaatacctatagcctccaacagagtacccatacagaaggctcattttgggtatcaggagaggcataacccaaatttgggtatcctttctcctcgagaccattgcagagagtgttgtcttttaggtcttgttgttggtgaagactaaaaataggtatagaaccttttatctgtagtgctacccaaaggacaaatgggtcttgtattttgggtgacgattgttggagatagtcacactcacattgagcaaattggcatagctaggatttttatgttttaactgtacatatttggaaagtgtttgctattagtttctctaattaagaaccaaattatctttgcaaatcctggtgaacaagtcatccttgctggctttccttgtgttgtgcatgtctccttggtttccctggatattctgatatgtttactctgtctcatgtgactatttcctgccactaatgcatccacgctgccctgtttaaagaatgcaaaacaaagcactggtatttgtcgtttttttgcgttctaatatggtctctatctaatatctttgattggactaattgtcaggaggagttttcaagctcgagttattcttgcctgaa

SEQ ID NO: 4929 - DNA, 4562 bp, Sorghum bicolor
  Intron number 3 from transcript Sb09g002520.1 (locus Sb09g 002520) derived from phytozome v7.0 (chr-ID chromosome_9; pos 2726279 to 2730840 reverse strand)
cagctccctctgcggcggcgccgcctcgctctccggtaaccaccactaacttcctccgctcacatgcatctcgatctcaggcaggccttgtacgacgacgaccatcgccattgcggacatgcatctgtgcggtgcattattgctgctgcgcttgtgtgaactgtgaggcgaagaaagctatagcgtgtgcgtgtgcgaatataggggcgaggtcggctttgatgaatgcgtgcgcgtgtgcgtgttcttgtgtggtcaaatcgtgtccatgcaaatggggtgcaggagtgtcagacgccggggtcggatggagtaaagttctgggcgtgtgctagcttgctcgtgtagggtttttgtctaacgttcctgtgcaccatggctggctttgcctttgcttgctgacccgctcctcctctctcatttctctctcacagatgatagagagagagagagagagagaagagcatggagtagctgctgctacttgtagacttttgtaggctgcctcgatctgacgactgatggaacttgagggagctgcggtgacatgcttgttggatggctttgggaaaagagaatctggctcgtgcatgctaggattgctagtagctacaggtgccagtggctgtggtgatttttctttttttttgctgtgggggcagctcaagatattgggctggattctggcttggctttaatttcctcaaagaaaacatcgtgtgattttttttgttttatgtttaaccatgattttgttgtggtaaccagtgattaaggacagttagttaggcttcattgtgtctggcgatctttcttgtttgttattattttctgtgattcaatacatggccttattgccacacaattattagtaagatccatagttacatgctaatacagcttacacatatcgtaagagcaagttttgggttggcttccatctaagccaatgggatggagatagaaaatttttatttagctgtttacatttataagattgctttgcgttagccattctcatctgcgattgcgatttccatgagcattgtgacatctcgccatcatgaacaggtgaatttgtagtgatgaacgctcatgggcttttggaaaacttcacatgtttaataaagtcaaaaggacggccattgggtaactatggaagcatgtgaaacctttaatacagcctaacaaacagtagcgcagttctgggcagaacagttcatgttttgttttcttgcattccaatgtatttaggcaatgccaagtacagccatgcaggttactgcaaaggggtatgaaacatgatcataccgatgaccacaaatgtatttcctggtttacttacacagggattgtgatttatgtaaactgtgacaattcgatcagaccaatagaattatgctccgcatgttcatacaaaatgtgggtaaggagagtctggcaatgagcagcatgcatataactaatattgtcagtgacaagctactgagataaattgttgtatatgtatcacggttttgttcaataatatattataccactactaatcccaaaatgacaaggccaatcaacatcacattagttatttatagcttggtatattggtaaaactagtaaaagattgtttgtgtgtaaagttttgtattgtttgctcaacgcgtcaattcagttatatgcacatttgtaatagattaattttttgctaaatgcaggcacaaagtagctgttatgaatgcatgcatgcattcattcattcattcattcatctatttactttgctatatgtgttcaacaatgtgttatggtcttaagcaaacaaggctaattgtcttaatggaatgcatctcgatgagaattccaatattagatattataagttattgttatagcgacgagctaggatttcttgtgctgtttgtatggacttcacttttgaacgtatgcgtttaacatgtgtgccttttttctctccatctttcagtggaaatatcctaaccttttgtgtttcaagaacaatatgtttttcttcattaggaaaagaacaatagggttttttcatatcttttaattttataatattctgtgattcctgggggtgaaaacagaaataactgtgggggcaaaacttgtcctaataactggtttggctttggtctatgttgctacgaagccctaatatgatattattctttaggttatttatttataagatcaatgatcaaatatgccttcatgtgccaattatgaaatcctttatgcatcccatgacacgtaaatatctccagtgagctctggatgatccagtaagtaatgagtgaccctttgtttgcaaggttgcaatgtatgataatacaaatgagacactaactccatactaaggttgattatcactgtcctcacaactgatggagtattaagtaaatgagtgtatcacctgcttaggcagcattggactggtgaggaacagaatgatggatgcttttgtatgggcagggaggaacagacgtagactatatattcacagttcgtaataaaaatcctggcttggctgtgttagagatgtgtacacatggttatggctgtcacaatcaaattattttctgtactggtgctttaaatccataataactcttatagaggttagtactgaaggaatactcaaatttaagcaacagtatgcttctacaatatgaaatggtgacaaacatgcaattttcatgcatagtataatgcaaatggagacaaatgtttttgtatttttattagcagacaacaataaaaatgcaatttgctctctagctcaggaaaagatcttttttgtggtcctggatatggtattttcatttaccagaaaccattattagagcaactttaaattaaataaatggcgtattttcatcttcatgtatttaattgagtggttccattcatgcaagtaggtactgaaacccatttgactatgcatgatttagcacagaatgtttgcaataaattctgacatggatatccagttgtgtataatctttcaatgggtcagttaatctgctgtttcagcaaaattttatggatgctgttcactacttaatttgctttaactttgaaagatgtaaggatcttttgttaaattcatttatctagggtcctgctacaaaagaggtacagcaaaaatatccaacttctacgcattttaccattgggaacagaggtacaacacacagtaatagttgtgaggtctaatagaatagtttacgataattttctacagtctgatgtcatggaaagggaaaacatatatgaaggcaggcagacatttatgttatgcatcctatgttttgtttcccctgatatataaaatatttgtttatattaatttttatttatagttttaatatggtgtctactatacttcctctttttttcataaacaaaaccatagagctctggcactaaacatacctagtcaacttgggtttaaaaacagagaaagattgcattgttgtttacgtcatagtacttttctaggaggcctcaaccactgccttgctgcatatcatatttaagatagctcctaacagggctgtgcagcttgctttccagttttgcaagcaaagcttattaagggtgagaaaaattaagacaccaacacagttttcaatgcttgctagaaatatatgctttgcaatacagtatactggaaatattttatctgaagactaaacaccacctggagtttgcttcctgaggacataagaactattgcagtacacattgttctcaaaacaggtgatagctttagctccggtggacaaatcagcattacattccatcacgagcagacttgagtgctgatgtggcacggatgacaatttaagattgctttaggaatgtgcagaagggatgctaatgctttctctgtttcctggaataccaattctaaaattgcaagttttctcttagatttaactgcaattcttcaatgaaatggggaaaaaacatgaactgtggtgattcttttgtttgctattggttatgcagatcaaactgttatgatgtcgcagaataaaatattgatccttaactttatttggtaacaaagtaagaaaaattttggagactagatttgacaggatatttggaggctgatcaaacatctagctttgttttgtttttcattgtagtctgaattgcatctcgtccatatctttgtaaagttaacttttcacgttcactacttttctgtgctgcagtccttggctttctgtttgtaaaacacattcagaaaaaagaaaatctgaatattactgtttttacttactacagaagggtagttctcagtgtctatctgtttggttattgatattgttcaatattattgctgtcaaaaaggggcttatgttcagtttttaccagcctgtggacggcgtcttgtctcactgttttgcattattctcatgtaatctaatctgctccactactgtcctaaaatctgcccaatccagtattgcgcctaacatttccattatgttgaaaactgcaatctgatttggaatgtttgcatcaag

SEQ ID NO: 4930 - DNA, 3160 bp, Sorghum bicolor
  Intron number 2 from transcript Sb03g029100.1 (locus Sb03g 029100) derived from phytozome v7.0 (chr-ID chromosome_3; pos 57229653 to 57232812 reverse strand)
tccggctacacggtgagtcgtcaggcacaccaaacttttatttatcgcgagcacttcttcctctgtgaattcatatagctcacatcacggtcggtagcggtaggttaaagagaagaccacgcgtgaaactacacgcaagcgcttcgcaactgcacatatgagtgacgatgattatgttgcgagtcctttttttttcttcttgatcgacctgggccttgtttattttctggaaaattttgcaaaatattactgtagcattttcgtttagattcgacaattattgtctaattatggactaattaggctcaaaagatttctctcgcaaattatatacgaactatgcaattagttattttttatctatatttaatgctttatgcatgtgccgcaagattcaatttgaagagaatttttgaatattttgtaaatatttttggaaagtaaacaagtttctaaagtccgaaaaatttaaataaagtagtaatgataaagtaaaggaatacaaaaacacaaagcagggcagcaggccatagggctagctaggggttacaaagcgtgatccggccgacacaatgtacgacagctttattgagcggatggttaggatccccaacaaaccagagcaagtaccatggtcagtaacaactacagtaatgaagcgatttagggggtgtttggtttcctccaataaattctatcctgtcacatcgaatgtttggacacatgcatggagtactaaatatagattatttacgaaactaaaaacacagttagagaataatttgcaagacgaatattttaagcctaataattagtctaaaattagacaataattttcaaataaaacgaaaatattaacgtaccagttaaattttaccaataccaaccaaacaccccttaaagtataccgtgattttgacaggaacaacaacctttctggaattttaaggcaacaacaaaagataggtcaccatcactccgtattgatgccccctgcgttttaggacactggacactgggactaacgtggaggcacgcgtgccacggagacgttcctccgcggtcctgctgttggggacatggtaacgtgtgtatcgcagatagccagagaagagagagcctggattgcacgatagtctgataaggagacacgatccaggaaatctgctggggggggggggggcgtaggggataaacctaccgcgagtaagacgttgtcctttcttactcatcactcctttccagaaagaatgcaattctagctaggacagataaactatcttaaaattaattgaactttaaagaattgataatcatactacataatgatcattagattatctatagatatattttttttgtagtatatctatttagaatatagatgttcaaagttaagataactttgactttgacaaaatctaaaattgcatttacggaaagtgtgaaggggagaattctatgcaccctaatataaaaattgaggatagattgtgcaagtcatatggattgagtcccaaatattgaaatctctcagatccaaatagggcctaagctgagctgcttctgctacacccaagtatagtccctgtttggatatttcaattgttgcatgctaattttagcaactgcttgtaatcctctcttgctaataataggcactaatggaaccataggttaaaagatggggctattagcaatttagcattacatgtttggattggatcaatatatcctagctaattttaagatatccaacaacccgtgactctggaagtacaacttctgttgaggaacgaggttacgaggatgcaaaagcaaagggtagctgctgaagaaagaatttcttaattcagaccttctccaactgtactgcacctgtgcagcttcttgaacctttgacatttttggcgttccaactgatccgaaatcaacatggctgactaataagcgatatcaagatttacaagttttgttcatttgaatctgagttgcacacttgctgtataagatccatagaaagaagagcaggcctttgcctttcaactaaactcacctaatctagtgccagaggtctcctctcctttgcactttgtccgtttcttctgattttagatttcacatatagcaactaatggaggtgattaggaaacagaaggtcatacatatcttgcaagtgtgcaaccgctcacgatgggtttataacaacaagaagtgattagaaaacagaaggtcatacgtacctccttcactgaatgggttgtgtactatattgcgtgatgtcgttagcagcagcaggtgcagctcacttatcattcgaagtatacaaattccaggctgaaatcgaggatgatgctacgttgattggtggtaacacctcaggaagtcgatgctgattcagttctcacctgctcactattttgtcgaatgcccagtcagccaaaatatcgttgtcacatgctgtgttaaccaacacttcaacagtgccctggatagccttttatattcaagagtctctctgtatggatccttatcacaaaattttgaaaaaaaaatcagactccaatagattctctaaatccctatatatattttttcgctctctagaaccaccattctctctttttattaatggagattggagaggctatatcactcctaaattcaatatatagtagtagttctttcatgattttttttcacacaagcaaaatggtgatgcgacattggagcacagagaacaaaaatagagtccattggaggcacgagagaaatacgaatggctctccgaatagagacagagagattgaagttcggaaaggcctacaatttcagctgtaaaatcccatggttaaattcggtattaaattctgtaaattttttgttaggtggctaagcgaatcttgagctcgctgctgctgcagtttcagcttgccaagatccatggttaatttgcaatctatctattgtaacaaagtggcttttcttagttttttaacagtaataatgtttcacatgttagcagcatattttgaataaaactatagtagacatttgaacaaatttggtgcattcctcacaaaaaaaaacatcaaaatgacatacaagatgaagaaatttgtggctaacatatgccaatctctgatttgaacagaaacac

SEQ ID NO: 4931 - DNA, 1357 bp, Sorghum bicolor
  Intron number 2 from transcript Sb01g031660.1 (locus Sb01g 031660) derived from phytozome v7.0 (chr-ID chromosome_1; pos 54236214 to 54237570)
ttcggcaacgtggtaactactcctacatactctactctacagtctacaccaaatccacattactgcttatggagtatatccgtatatatacgagtacgctgtcgctggtattcttttataaaaaaaaataaaatgaagtatagctttgttcccgttatgggccttgggccttgggtgcatagtgctactctagtctccgttgccgccgcttccatgttgttgcccctgcgcttctctgccatttccgccttccgctaggcgctcgcgccgtgggcggccgtcgtggtcttggcaccgagccgccggctgccacacggctggatcggagaagagcggtcgtccatggctgcggatcttcagggtggcgcgggcggcggcgcgccgcgccgcgccgtgggccgaatcgtgaattggggggcacaagcgagccctctagggctgctaggtcattctctctcctttctctttgcgccggttcggttttgggtcacaggtattattccttatataagctcgaatattggtttagaatcaaactccgaattagagcctacttgacatgtaaagtctacaaacatcatgttcaaatgtaaataaatgtattgttgcctggatcttctgcatatggattattcgatttcacgtttgggatttgagtgtgtgctaaatgatttgttcatcttaaacatgaggtcaggctccaagttcaatctcatttttctaattgaggtcccattcctgcaatagaagggaaagttggtttggaatttcgcgtctattgtatcaaacattaaaactatcaatctgagttggattattgttgccatctagcaaatctaagttttaattcagatccaaaatttcaacatgttggaacatctagcacagacaattcaaatttcattttgattgaattttttttgtttgtggtaatactttcatatgcccccccccctttttgtcattttccattacttaaatcttttactttttctaacaaactgaattctgcgtattttattttccttttcttaataagttcattttaagaaatgcaatactgtttctttccagtgtccaaaatgctatgtgaatgctctaaaagtttcttggtattacaagctgtatagcgaaaatgatccagtgaccatggccaagtgactcttgatgttgcatgggttccatggaatcttatttgtatgaaaatagtagcattttatcttgacatggaatttggttccctttgacaaaattatgtttacagctcggtacatcttctgtctgattcatatggttgctgaaatagttgactcatgcccttcctcaaagtttacccgtatgttgattctgtcaggtt

SEQ ID NO: 4932 - DNA, 1714 bp, Sorghum bicolor
  Intron number 18 from transcript Sb03g031920.1 (locus Sb03 g031920) derived from phytozome v7.0 (chr-ID chromosome_3; pos 60304467 to 60306180 reverse strand)
ttaaccctgaaaaagataaagttgccctaaagaaggtaatgtcatttattatagttgtttttagtatcatcgatggcatgctatacacaattaacatggcccctgagtacccgacgccactattctacgaacgttcagtggaaatgaaagcaacggttaatttccgacagtcattctctttccttctttggacagtgcatatgttactttctatttctggatagaacaggaatcatttttctttctcttttaaggcattcgattctctttttactttcttttgctggatcacccgtccttaaatattattttttatttttttaagaagcatgtgctcataacttataaaacggaattaaaaagcataactttcacgataaacttaatagtactaacttagaagtacttctagacaacataagttcgaggaatagctcaacattgctaacttagtcgttctcctgcgttctcttttaggtttgtagagtcgttttttctctctttttggaaaactaaacatttgggaaatgggaatagggtttataaaaaggtggggatgaaataaaagtaactttaacaacttatactacataatacattccatataatgatgatgcacccttggaaaaccaagataaaataattgctttttaaacttgtgcagcgataatctcagcatctatttcttcagttcgtagatttgtaaaataattaaattataaaatttaaaataataaatacaaaacataagttagatgcattgctgttaatagtaacttagacaaataagttagctagcatgcatcacatggaaaacacaagttacttatataactttgtacactaacttaatctcgttagttagtagcctatacataaaaagagaatttagataaactcagtacaataaacctaatgaactaagttgtgctgcatagccatggaaaatgtaattgacttttttaaattgaatttactattatctagacacaactgtatatctatacacatagcaaaatcaatatatgtagaaaaattaaaatattttataatttggaatagagggaggcataaattacacaatacaacttaatgtacataagttacacaactaatacactagtgtatatagaaagttatgcagttattatacacaaacagaagttatacaatacaacttagcagaataggttagcgcataactttgcagaataagttagcaatataacttgtatgttataagttaatatacataaattgctactaaaaaataaaaatcttcgaaacatatagaagtggggtctagttttgttcgtctcgtcacgttgaacacaccggtatagacggaattaaaaatagatatatcattcaaaagttatagcaatttgaaataaatattttgctttttttatgatgacgtcaaaagcagagggaaaggaaagtgaggggaggagggtgggcgaccggatcgttcgctagattaaaagctactgaacgaccgtgagaatggaattaggctgagcaccttgtatgttgcactagcctcccaaaataattgagttctcaagagaaacatatatatatttgtggaacattttttgaattccagattttgtacccaaatgtatcctcatggatttgtttaaatgtgtgccatgtgtttttatttattgcatggatttcttcagctgctgatggagactcatttcaggtc

SEQ ID NO: 4933 - DNA, 1988 bp, Sorghum bicolor
  Intron number 2 from transcript Sb02g041410.1 (locus Sb02g 041410) derived from phytozome v7.0 (chr-ID chromosome_2; pos 75240789 to 75242776 reverse strand)
ggccactggtggaaccaggagagactacaccaattgtaagtccctactgtcacggcctaaactccctttttttcccctaaactccctttccccccccccccccctctctctctttctcgaaagagaatgccatggtctaataaactgcagtactgcacactgcaacgatataatccactccgatggaagaagaatacagaatctagaggattaattaagagaacaataacccacttgtgtatatagtgcacactgcaacgatataacccccttctgtccgttgctttcgtacggtacttctaaataactccgagttgtgtaagctaaaatttggcttatactgctatttatgttgaaatattatgagagaaaaacactatttattcactgaaaataccactgaagtagtgttaatatttccaaagatataataaatatattctatttaatttaaaatatatagttcatataagaaaagttttgatatactagacaaaaagttgtattctgattgatgcatgctattttatttcaatgcatgcgtgatctatattattttgcaagtcattaatataatccctaaattagaggattcagaagctgtttaatttgtttcctagcttcaatatactaataccgagagagattaggggactcggaagttgtttgtttcctttttactggcagcggcacaccaaccgagaagggaagagataccgtgtcttttatttttcttacgagatttggggatttggcagtttttcttttcttttctttttctagtttttttacttagttattttataaaatctaaaaaaatcaatggtccaacacgtaatgggaggcgccatagcaatgttcattcttattacaatcagattattccgtgaagcattattgtgggagttaagtaaaaagggactaacgaaaaaaaattaaaatcatttggctctttagagcatctctagactaattaaacccactgcttatcctacctatcctaaatatatatttaggtagtggaggaaaaaaaaacagactaattaaacccgctacctatcctacctatcttatatttagatagtggaggccaaaaaaaactcactccaacatatccctcccactacctacatcctttgggccaacaatcatggctacctattttttttcttccctccctttcctcccgcacgcactcgcacccgacgccgccgcttgctcatctcgcctcgactccggccggctgcacgccttctcccaccggccgcacgcctcctcccaatggcgtgggcacggcggcccttcccgatggctcgcctgcctgcccccgacccgatgaggcctggctagcctcgcacagtgagcagcgagcggctcccgcgcggcgagctacccccgcgcggcgtggcacggcctgtagccccgacaagctacccccaacgcggcgtggccagcctacctctatcacggcgaggattgctgcccccagcgcacctctggctccatctgtggggagaagaagcaaagtgaggatgacaaatgggacccacatgtcattctctacaaggataaaaatgggtagccaattttaggtaattctgctggagttggaagcaaaatttggatagcataaaaataggtggctatctaaacagatatttaggtagtttgattgaggtagtactgctgcagatgctcttagttactactactattattattagtgtagcaagcaagcttgggtcgggcctgtgctttagttctatatcttttcagaacccgacatgtaaaaacgttttgtttctcttaatataaaaaatgcgcaagctttttgtgtgatcgagaaaaaaaaaggtatagatatatccttaattattgttaggagtcgtgatgataaccagggggctaattcttttttgaaggtagttattaatttgtttctcgtgtactaacgtatacgttgtggtgaaacatctgaattgaagagg

SEQ ID NO: 4934 - DNA, 2079 bp, Sorghum bicolor
  Intron number 3 from transcript Sb04g002880.1 (locus Sb04g 002880) derived from phytozome v7.0 (chr-ID chromosome_4; pos 2689320 to 2691398)
ctgcagttgctgtgattctggatttagtcaggaaggtacatctctcaagcacacactgacacatgatatgcttttattataatgtgatgcatataatattaggattacgcaagttaatacaaactgcagctgtgttgttagtccgtgctaatttgacatttaacattgaaagtgtacacttcctgttggttgttgctgtatattaaaatagtacatttggaaatagtccacgtattctatctctttcttttgattcatgctatcttagggcagctccagtgtacgatttgattttggtgctgaggtggatttcaaagttcgcatgctgattatggacttatggttcatgtgtagtagtgtggggattagctggtggggaccataacggaatagaaaaaaaaaggaaagtatgtgctgctttcccttcaacactcatgcaaggacggtagtggtacttccgcgcagataagctgacttttttacttgctcggttcgaactgtagggaagagtcaatttaaataatcaatttgcttgattcggctgctctagtgttggaatcaaaccatacttgtttcctctctcctcacggtttgttttttagcacactttagctgctcttagtgcaacaagtctcatactgttcattaaatcactggcaggttcaatcgcacattagatccttgatttaaacaattctgattattttacagtggttactgaatcttgcttggttaatgagcaagaaaacattgatggttgtttgaagaatgaaataggttcggcgattgatttcactaacgtggatttgtgccactgccaatgatagagacaagcggtttttatacatttgtcattgttatcaatgtcatattgtgtgttccctccattcttttatatatgacgttacattaattagtgcaattgtgatctaaccagcttatataaaaaagaatggatagagtagcattagcaacataattgcagacttgaagcaaataattttgttgaactttatttctctacgaataagagttgtggttttaccctatccatctgattagaatgctaatttttcacttgaacatgacatttcatgtcctggtgccactgttggaggtgtccaaatatttccaaaagcaaaaagaatcatgatgcgggaaaataaaattaaagagactgtgaagtaagggcccatgcgcaaaacaatcgagataaataaaatgctactatcgtactacctctgttgttttatacttgtgttgacatcgacatggtcttgaattatactaggagaataccctgcgcgttgctgcggggattctgataatttaaaaagaatttagactatttatatttattatagttatatgaatgaaactatcttaaattaattttggtgaatggtttgacatcgatgtggacagctaaatgcatgttagtgaatgaagagcactatcataattacatgtgctagttggctatagttgtgagttctagtggatcgttgatgtggatagcttgcatgttgggagaaatctctagtggggtttagctttataagagtgtaggataggataggatttggccattaccctcttctcaagcatttcttgttgaaaatgttaacttttgaagtatttttcatgaaaaatctgctaatattttttttttcatataagactgttatatacagtcccttgatcctaacattaactttaacgatttattatatttaaaaatcttgctgtaatagatatttctttgtcgcaccttactttacaatacattttttgttggtaagatcattgtatccttatcacgagttaccttttagttgcctttttctagtgggtattattgtgaccagatgttatgcctcctagattagtaaatagctctatataagtctaggttatggcagttgtggcgttagcattgtattaattaattatgtggaagttgcaacatcatgcaaaaaggggattatgaactagatgtcatgcatttgcagtggtacatttgtactagtaccattatgtttatttggtatccgctaacctctctgttgcagctgcctg

SEQ ID NO: 4935 - DNA, 807 bp, Sorghum bicolor
  Intron number 2 from transcript Sb03g004580.1 (locus Sb03g 004580) derived from phytozome v7.0 (chr-ID chromosome_3; pos 4838672 to 4839478)
ctcaagtaccactctctacctttctcttaatttttgcaatgagagattggagttactaatggctgcgaattagccaatgagatgttcggatgatctctacactaggttattcttcttattgagaccagaaaatttgtttatgctcttaatagagatgatatctgctggtatctagaactttttaaatggattgaggatggccattagttgaatccttatcacttgatgaaaatttaatactgttgtggaatccgattaatgatccatttgggctgggtttgttactttgtttgttacctgatgcattctgtcaacatacatacctatcggtatacttctccacttgacttatcatgatgtatgaaacaacagcgtataattaaaaaaaaaatcatatgcaatattttctgaaatttggtagattgctgtgtgtatactgtatggtgtgatgttatggtgttattacatcatttgtttggtgcgtggactattctgtaattgttatgagcagattccttgctttagaagtacccatcatataaatattcctgtgatgcattaacagtatacattagtttttcagttttcttgtagatttgttttgacatatgaacttctatgtttttattatttaattaggttgacttgacatgtgattttctcccttgttttactactcattgatgaggggcaactaatcgatgtttgttttcttgcgattacttgaactcaagttcttatatgattgctgtgcatcatatcatctatataacatactggtgactttctttgtttaacagccaacat

SEQ ID NO: 4936 - DNA, 3442 bp, Sorghum bicolor
  Intron number 3 from transcript Sb10g009950.1 (locus Sb10g 009950) derived from phytozome v7.0 (chr-ID chromosome_10; pos 12044511 to 12047952 reverse strand)
ccaagactttaaactgggtatgtaccgccttcatatcatttgttatcgtgtatatatttacacctacctagaccctttttttgaataagaaatacataaaatgaatgcagctaatttaggataagaaaagaatatgagaattgaaggaaaccaataaaatgcaaaactagtttatatgtagaacatgtaaactgggaggtagaaacatagaaagtcatggaaggcatgctgccccaacaatttcaaataatttcctgttttcactcggtattatgacatatatcacttcgccctcatgaacatgcaaatcactggaacacatatcccatgtagaggcattttgcacaaggcatatcaaacgttcatgggatgggagatgttttttaggtattctataagctgtttcccaaacaaaaatcatgtagaagaattctttagacaaacaattttaaaaatcaaggtatcggctactatttaccgaagtttaaataacacctttctttgcattggaaatgatattcccctatattatatcgaaaataagtctactttacatccctgaactttcatgaacttcaaacaagacactactcaatcttacatcatttattttttttaactctgttacacatttaggatagttttgagtgacgctgccatatggcctgaggctgatgcaattttttgatgtataaaataaataaattactttttttatgtatacaaattctctgttgtgcacctagacaaaagccaagtaacctagctataaagcaaatccacattgttgggcaaaaaggcagccccagaaaaggtgttgtgcagtttcttcttccccagtaaggcagatttcacaactgtatgagtcaagagtcattttcttccttctgagaatgtttctagtacttagtttgtcatttaggagcagccagccaaaaaccttatgtttaggttgacaagaggagttccagatccatttgatggctgggtctactgtttgatggcccattagtttcttgtgaaatccttcatatctgaattgtgcgtttcttccaaagtaagaccatgtgtcacagagttgttcatccagagtcaagttgttcattctctgttggatgcgtcaagttgttcattctctgttggatgctaacaacctgttgataagctacttcaggtagaggtaggttgaaaagttcattgaaatcttcttgtgcaaaggctgcatgaacggtagcaagtttattctttgcaaaggagtgtgcttgaggaaaagtttctatgagtggatgcgaggaccatttgtcttccaagtataggcaggtctttccatttcatacttgaacctgggcatactctttgaatttttgaattagttttaagacacccctccaccggaaagatccttttttaacttgcccaggtaacttgccatttttgtaatgtttttcccaaaccaagtttacccatgggacatctttcctgttgaaaaacttgtccaaattcttcattagtagtgcttgattctgtgtttccacacttatgacgcctagacccccctcatcctttgccctacaaaccatcttacaagttgccttgggttgtccccttccattcacattgctccctctccataaacaattttttctgaatttgtctatttgcttaatcacagctttcgggatctctagagtacacatgtagtatgtcggtagtgcggatagaacaacattggttatttgcagtctaccagcttggttcaacatagatgaaatccctcccagtcttctctcacgtttgcttaccaaagctaagtaatctattatcttcggctttgtggttcccagaggtaaacccaagtacgtaaagcgcaaagtaccttttgcgcaaccaaacgttcttgcgagcagctctaaccttgcttctgtgatgttgattggtagcattagtgacttgctgtagtttactttgagtccagtagagtctgaaaaattatgaagaatagcttttagcgacaagagttgccttgggtcaccttctatgatgataagcgtatcatctatatactggattatggggaagtcagtgtcactctccagcggttagcgagaagagttgccttggctcaccttccatgatgataagcgtatcatctgcatactgaattatggggaagtcagtgtcactctccagcggtatgggcagtttcaagagacccagatctttagccttgttgaccagtactgtaagaagtctgctgctagcacaaaaaacaatggagataaggtgtcaccttgtttgacccctcttttgcaatgaaatctttttcctggaataccattaaggaggacaactgaggttccatagccaagaatattttttatccaacatatccacttgtgaccaaacccttgagcctgcatgatgcttatcatggcttggtgttccattttgtcaaaggctttttcaaagtcaagtttgagaatgactacttcctttttagattgatggcagagatgaatatattcaaaagcccaggctaaacaatcttggattgttcttgaccttataaatccatactgatttttgtgaatcaaagatgtgattgagctttgtagtctgactgccaaaattttagtgagcaacttgactgaagtattcagtaaagatatgggtctaaagtcattggcaagttgtgggatgtccaccttggggatcaaagtgatataagagctattaatgctttggaggcaacggttgttttcaaagaaacttctgcacaaatcatagaaatcttgcttgatagtaggccaagaagctttgatgaattcattattgaatccgtctggcccaggtgacttgaagttaggtagatttctcatgatggtgtcaatttcttcctggatgaaggggttctcaaggtgctgaaggttgccgttactctgaattagttcagaggggtttatagtgaacccagtgaattctgaaacccccattctcgcttagggttaaaagactcatatcacaaaattcgatgtgatagaaaatattttttttttatttttggataaactaaacaaggcctgaaccaccccatgcagaaccgtgttcaccgctgccggccgcaggagtccaagatggtacccacggcaacaatataggaatcattgcaacacttaactaaacttgtaatataaattagcccttatttaatttgtgaaaagaaaaataaattagatattatactgtagcatatttgtaactataacaattaggattaaaagatttatctcgcaaaatacatacaaattatataattaattatttttttaatctatatttaatgtttcatacatgtatctaatattcgatatgatgagactaaaagattttgattggaaactaagcagagccttataccttgtttcaacatcgggtaaacacg

SEQ ID NO: 4937 - DNA, 6654 bp, Sorghum bicolor
  Intron number 1 from transcript Sb01g015790.1 (locus Sb01g 015790) derived from phytozome v7.0 (chr-ID chromosome_1; pos 15401438 to 15408091 reverse strand)
tgctcatcaccggcgcctcctccggcatcggcgaggtcagtctagccgccgtttgcaaataataaactctaccaaatcaagctctactactcttaactgtgttagagcgactctgaagagcttattcttctttgttgtttgttgatagggagataaagtttttttttaaaaaaaaaatatatcttccaacgatttcttttatagcagatgtgtctaaatattgaccttcttcttctaaatttgtcgccagttaaagatgacgagaaatggttctttagagtgcatagtacaagatatagcaaaatttggatgatgaaaatatacaaagaacaatttttattgaataaatgatgatttagacaataagttcatgagagactttggagatgctcttagtcggagaagtttgctaacatctcatagcaagttgacatattagctaagaacctaaacaatcatcaacttcaactattcttttattttttttattctcaatctggccttcatggcccttcattagaagacgcaagctcaacgaaatcgcgagctacgtaactgtatacaaattctgagagagaatcatcccacacattgctattaactacgttgagaacaaacaagccagaagctaccaaaccggtaactatccttaataatatattgaattttggctgcacatttatatagataaaaagtagtatacatggccgtacattgcaaccacacgtataactcagcgacgaagccagcgcccgtgctagccgtgcttcaacccgggctaccggccatgaatacactaagccccacctaaggcccccctacgccatggaggaggaagaaggaaaggaagggccggaggaaaaagaagaggaatgagccctcccttggccaaatcctggcttcgtcgctggtatcatgtcatgtgtttcaatatgttttgaaattgtggcttggcacttgctattagtactcatgtagtcgtatgagcacgagtcactagttccggctacaaatgggacaatacacttacaccaattatctctaattgttctctttaatattagatagaaaatatgcttgtgtagatgaaaaaaactatcaaagatttatggaaaatgatatatatttcttcctttctataaaatttgaaatctataatttatttcatgatggcccgttttaacgtccctcttaccctaacattaaaccataaagagtttcatcgttttggtcctctttaatttttaatttttaattctcttgattttatttttatttatattcccgtgtcctcttcgcatgtccttttctcagctctatttgtctttatcattagctctgttattttatagttcgtttctttctgagtgagacatcaggtctctctccattatcatttttcctctgctccgttttcttgagagtccgttcacctgagagtcaaggtttccgtatcgtgttttccttttttttttcaggtttttgtttgatgattagttgggaccacagatgactaagaaaaaatgaagacacatgttcaaacaaaattacagctatctactctcattcctggacttcttattttttgagaagtcaaaaagcttaaagtttgactaagattataccaaaaagacgaacaattatgatatataaaataagtaacattgaattaaatattattatatatttttatagtgaacctagacagagagataaatatcagtactgttactataaatttaaaataaattttaaccaatttggttatatataaatgctccttgttcaacatattatttttattagttaattctgatttattatgagataaaaatactattctgtgaccgaaatggccaaatttggccgcacaaaatcattggccgtgcaagctcctcggcggatttggaggcaatgcaacagaaggcaagcgtggccggccgtgccgtgccgtgccgccatcgtccgagcaaccgcgcacatgcatcgagaggagacacgagacggtggacggtggaagcggcatgcggtgggtgcacggtcaaacgaggatgcataggctgtaggccacgtggagccagccccatgcatggccttggagtttgagggatcggagctgtcccagtcccaactcccatcaaatgatttgactcgaggcacagtatacaatagaacctgtgccacgtgggcgtgatgcttccctcatttccgaagcgattaagttttttattagaaaaaaagttaaactaaatatatcatttggtaaggaattaatatcatctcgtactccctccatacctataaaaaaaaaccgttttggacaagattttagtcaaacattgagaatataaatcatgaatagtaacttttaagttgatgagtttgaaaatgtaaaatccatataaatagatttgtcttgaaaaatactttttcataaaaaagatacatgtaccactttttgataaaatatttttataaaaataacaagtcaaagttaggttttagaaactgtatcactgtcttaaatgacttttttatagatatagagggagtacacactttgaatacaatgcaaatttatttgtgtaattttcatgtcttaaacctgtataatatttaaacaactgatggtcaaaattagtaaattttgtttttgtttttttggtaaaatatgagggttttgcaaatatatccgtgggttgtaatgagagaaaatcaaaacttatatctttgcatagttactaaagatatgtatattttgctcatcggaaatgaagcaataattacattagaacattggtcgtctataaaagtgtacattggaataatgccaacctaattagcaaattccttatatatgtcatgcaaactaagtacaaatatataaacatatattgtttttgaatcaaatatataaacatatttattatccatgaaagagggggaagttattaaatggaaaaaaagaggaatcccctgcaaacctctccctacccccttctccttgtctgctcgcattttcacccccaacaagtcgttgtgcccgcctcactgcctcgcggccaccgcctcccgtggcgccacatatgctggtggcacaacccccattgttgcttcccgattagattggacaataaactatccaagatttctatttatgatttaattatttagaccattaactgatctaggttgcaataaaaataatttttatttttaatcaaattacatcaataatttataattcagtagtaggaatatttgattattaaagattagggaaggatgaaggatctaaagatccataatattgtgtttattatttattttcatgtttataagaataaatattatgagagaaacgagaaaacaaaatgacatgcaaaaaaataaggggaaaaagcatgaaacggacctcatagtccaaagaagaagaaaaaagaggaaaaggagaagaaaaaaataaaagagaaaatcaggaaaaagaagtggaatgtatacgaaaatgaaaaaaaaggatcaaatgcaataactcatcggagatagtgtttaaaaaaaggaaaaggccgaacagataagaaaagaaaaaaacgaattactatatatatatatatatatagtgattgtattgggtatggttttttttgcgcatgagtatgtgctctttggttaaacatagacaattacacaactcaatatgctttggaattggactccatatcacgctagacaagagttattcttcatatatgagcacaaattatacatgcataagggtatgtggatgaaaaaaaatgcatggacgaaaaaatatgtggatgaaaaaaaatggatggacgaaaaaaattatctcaaataagcctccattcttgatttttaaaatgtatgcaacaattaaacaaagtaataagtaattaaaatactttgaaaaagaaaagaacaccggagatcatatctctgtcaggccttcttccaatcttccttgattgctcttctacgccacaattgtcaacaggtgtcaccttccttgattgctttccggccaaaatagtcaacaaatgctacgagtatcaaactatatctaatattctaatatacgtactcctgtacagtacatggcctcggttatgttatgcacacatgtatattgatatatatatatatatatagtgcatgaaccccatgcgaaattatttatgtagctagaaaaggaaacgaagtgacctaatcatttcacgttctcattgtatatcacacacaaaataaaataaaataaaacttatgttcatgttagggcatgttttgtacagctcgcaacaacttcataagttgttgtgtcattttttttaccacacacttattttcaaaatattttcatgggtgaaactgtttttaatcctcttctcacaatttcattagaaataaaacctacaaagagctattatgagctttttttttgtcaaacactcatttccaaaatagcttcatgggtgaagtcatttttcttatcctctcacagaggtatgcgttggaataaagctaaaaaatagtaacttatcatacctttatctcatatatttattttatttcttgttccactactaaacacttccaaaacaactcggctttaataagaaagttgttcatgaagctatatgatgaagctgagctacgccaaacggggccttacactagtgatgagataaattgcaagagtgtttgcttcaatactatctttttttgcaaattcacttagcttttattatatatctagacataatatatatttaagtgtgtagcaaaagtaacttacctaaaaaggctagaaccacttagattttggaacgggaggagttttatatcttgctatgaaacataatctgaagttcctaaatttacatataaattactaatttatctcattataaaacataatataaagtattcctcaaaatttatataaaaaataaccattcaattgttatgatacacaatctaagtaatctatttaattttcacataaattgatatttccaccgttactaaaaataaactaaaataccaccttttgtatctacatttaagttactagcatatgctaatgaaaaaagtttaaataccatagattatgccaatatatatttctaaattatgcagttctatcaccattagtatataaactatttaaagcaaatatacatgttatgctatcgtgcagatcaaatatgcatgcgtgcatgcataaagcgatgtttatgttttaacaaccatgaaatggtctcttgacgactcttatacgagtggcattgacaagctattaaaactatatctagttgctactttatataaatttgtgcattttaactgaaacatcatgattttataccataatattgttgtactatctagctatttaccaaagtataccataaagaatgctttattaataaaatttaatatcttgagcaactgaatagagatagtgaactgtaccgctgatcttaaatggtagacttaaacacaggaatagagctagaattatgtgattggggtgactagctcactgtttcaatttacaattccattttgtctaataatacaaagagagttttacaactttcaaggaggataatgtaagggaaataacaaagtcattgggggtatggaacaactaacctagctccacccttgctcaaaattgttattatttatacataggtcacaaaagccgtaccttttcatattgatgatcactagtacaaaattgatttttttgactgacgattcataatgtataggcgccagaagaaatgaaactataagactatatgagtccttagtgtaaatttattttactggctattttcttaagccaaccgtcactagaaatcatccatttttatactagaggttttcttaacctagtgccactaagataatgtgaaaatagttttttcttatttttttaaatgatcttggatagagaaatggtctgaacgaaagttctagtattcaaaaagatcaacaactttgtagtgactacttttttatttataatcatttagagcttaaaattatgttttaggattaatgactttaaaatttatttattttttgaattttgcaaatgacctcggatggaaaaagagtttaaatcaaagttgttgatctcgacgtgatataaaactttgtaattaaatcattttttcacttgaatccatcttcattttaaaattcggtgaagtgaatactaatggaacatttatgttgtaagctacaagtgcgcatatgcagtatttctcgcgaaaatggataaattgctaagaatcgcatgtggcttcctagtgtcggcctcctcggatattttttttgctattttattttagtccattttgcaatttctgaacaaaacgatttataaagaaagtcgctagtgtaaacatttatagtggcggttttaggtgacgcaagtagagtttactaatttcttgtctttcacgatatctgttgctaaaagcgttagtaaacatatgaaaaaaatgctgtcaataaggatattttgtatatacaagtggaaactgatgaaacatgcatgcatggatgattggacgaaggacaggagctcgcttaccagtacgccaaggaaggggcgtg

SEQ ID NO: 4938 - DNA, 17913 bp, Sorghum bicolor
  Intron number 1 from transcript Sb02g010820.1 (locus Sb02g 010820) derived from phytozome v7.0 (chr-ID chromosome_2; pos 16998794 to 17016706 reverse strand)
agtggcaagttcaacaggtagttgctgattttgcacgaatcctctcgttcaacctggtgcaaggagcagatgcgactctgctcatcaaggccagggtgaaagatctcgatcaagtaccccagtttgttgtttttgaggatccggacacttgaaaggtcctaatatggctagagggggtgaatagcctatttaaaaattctacaaactcactagagcaagaggttagtaaataacaaagcgaagctttttgctctagctctaaaggggtgtttgcaagccacctatccaataattctagttgatataatcactaggcacacaagaactatgtcactacttacactagaaaactacctaaagtttctatacaagtaagtaagctactctagtttgggggaatataaaaagagatggtttgatctttataccgccgcgtagaggggatgaaccaatcaataatatgaagtccaatcaccaggagaaatccaatgaacaatcacattggagacacacaattttctcccgaggttcacgtgcttgccggcacgctacgtccccgttgtgtcgaccaacacttggtggttcgatggctaagaggtgtaccatgaacctcgtcctcactaggacaccacaagaacctacccacaagtgaggtaactcaatgacacaagcaattcactagagttaccttttggctctccgccggggaaggtacaagacccctcacaatcaccgagagatggccacgaacaatcaccaactcgtgccaaagctcctccgctgctccaagccatctaggtggtggcaaccaccaagagtaacaagaaaaccgcagccaaatcgatccccaagtgccactagatgcaatcactcaagcaaatgcacttggaatcactcccaatctcacaaagatgtttaatctatgaaggagatgagtgggaggtgtttgcttaggctcacaaggatgttatgtatgctagaatgccaagagagtaagccccaagccggccaaacacgtatatatagcccttcaaacaaatagagccgttggctctttcgctgggcaaaacacggggtcaccggacgctcttaaaggggcaccggacgctcaacacctgcgtccggtgctccaacaacaaccacgtgtcgccttttgaaattctcgtgtcagagtctaacggtcacctgcagtgcaccggacgctgagcaagttaccaccggacgcgtccggtgcacactggactcatgcgcagagagttccgcaaacctgcgggtcaccggacgctaagcaccggtagcgtccggtgctcaccggacccatgcgcacagagggtctcaaaaacgcccgctcaccggacgctaaccaccggacggttcctgagcgtccggtgcttccagtcaaacactccgaccgaagtcagatagcaacggacgcgtgaacaggagctccccagcgtccggtgttcatcgtccgatgcttaaccctagcaccacagcacaccggacgcacaatctctgcgtccggtgcctcaacggccagcgtccggtggcgcaatagaaaaaatgcactgcattttctcaaaaagcgccgaattccgtttcgcaagctcggcgggagggagagagaaacccatcctctcgctacacttcaaactccacctccttctcaaagtgtgccaacaccacaaagtgtgaaccaacatgtgcacgtgtgttagcattttcacaaacattttcttcgaaggagtaaagttagctcactaatttctaaatgcatgcacatgaacaatgacacctagtggcacttgataaccgcttagttaaagaattcccctctttatagtacgactatctatcctaaatgtgatcacaccctctatggtgtcttgatcaccaaaaccaaaaccctaagcaatacctttgccttgatctccatagggttttgtttttctctttcttcttttccaagttgagcacttgatcaccttgtggtcatcaccatcatcacaatgatcattgttgggtattttaaacgcaaacagaaaaatccgcaagcgcatggataccgatgtagccttcacccgggagtattccagagtatcgattttccacagggaacgtgagtgtactaattaagatccaagatcgcccaaggataactatatgattatttttggtgggaagagaggaagtttcctgagagttctctagttgatctaagaatcaagaattacttcaagattatctatttcgggacatcagaacactaaccacagaaagagatgagaagggggctaggaagctccgactacggtcctacaaacaccgatccgaacgaggtggaatacgtcgaccgttagggctgtcactaccctaaggctaccacaacaatccgcaggattgggtgcaattccaggtaattgcaagactaaacaccacgtctaatctattaattactactctaatgtttcaaagattagagcacttgatgtaagcgggaatccaataaataacttgaatgtaaataaaagtaattaaagaactcaggaattatgagttgaagaacctggagaacgatgaaggacgaaccagttgctgcaaaagtacaatgttggggaagatccgacagatccggctcctcctccgctctcctcttctctctccctattttctagattacaactagaactaactagaactagaactagaggaactagaactagatgaactagaggtagaactagaagaactagagggatcctcactacttggatgaagaattcaaaccctagctttgattctgtagaagaggtatgatctccaggggctagggggggtctggttttatagtcccttcaagtgaatctaggccgtcggatcaaaccgacattgatcgtgtggtttttcttgatcctttaggtcggtggagcataatccgcgaaacgtgtcctgattgggcactgtagctgggcgggcgcccaggagagttgggcgggcgccctgcctccgatcccgatttccttcccgttcgttcccgtggcttctggagtcttctagatgatagaaaattacgcgacacgttaatatctctatgtaaacccgacgtgtgggcctttcttccgtatttcctgataaccccctgcagaaataaacaaacaccaaaacttgtggaattctgtcagataaaaccctaagactaggtgttggttgcatttggatccttttccatgattaattgatggttaaatatgagcattaaggaccgtcaacaagctcccccaagcttaacctttgctcgtccctgagcaaagatgaactcaagagtttctgcagtggtttcataacttaaagatacacatgcgtttaaacaagatctcatctctggttagagtaaactgttaagacttaaaacttactcatttacctttcactatgggacttgtaaccatcacttctgccttgagtagttaaaagatagaacagtctagtcaagcgccatgtcccttgttcttcgattaactatagctctggagtttttgcagattttcaaataaaactcagagattccttgtatgactctctctagtctctcttttgtggtatttctggatccttaccaaggcagtaatggtgtatgccttctctcaaagtatgtggtatttttggtatgaggcatagtgacattgtcttctctctcaccctactctaataaggcttttgatatctggagctcataggtgggagacagctaatacatacttacaagacatttattgcatagtcaaaccatggatccagaagaacaagtcaataagtcaaatcaagatgtgcatgtgtggcgaatgaatgatgtatggtgatgatggtgataacgatggtgaaagtctaattctacttatgctcttttgaggggatacatacctttcttgctcttttgaaactttttgaggagaatgagatgctctatattttctttttcttttctcttaggtgggtatcttgtacccctaattctactgtcggacacttgtccatttttacctctcgtctcactttttttttctttcgaggttctgggcacttgcccctttttatttcctcgtatttttttcttttttttattgagagcactcatctcatgagataatatagcaagtggtagtaacaagataacttgagcatttatttcacagggaaaaaatagaaatatttttggctattctttcccggattaggagtagaatatttttgggtggttctggagatggaaatggatatatatggatggtacttccggagtagaagtagcatgtgtgagtgaacgtgcaagtgaatcttgatttaaccacatgacaagctcctaagggtctacacagcttgaccacactcaatgctcataagtagtaaagtaaatgtgtggttcatagtctagcaagcatgtatatatggctgtggtaggaatttaaactctcatcatacaggaactcatcatgcaacattttaaagattttcaaagataaaattctctagaattctagcatctctaggaacagataaacagcagctcaaccttcccatatcatatccgttaacgacttagactttagatcaaatactcttcccacaagttcaggtttagaacaaatcttaattaataacagtcatgcctaaacttgagagagatttcaattttgagaactagtcatggcagagcaactattcatcatttccatgtgagagcttatcacgagggtttattgcaaactttgtttatttatttatttagcaaactaagcaaagatatatatgtaagcacagaatcgttatttgggtttatatgattatgcatctttttattattagagtaaagtataaatgtgagtagaatacttagctggataaatgggggtgctctcccccaagctggatttttacgtaatttcgtctgatgtagcgagcaggtgacggaggtgtatttgaatgtcggaagcaccctgacagtgattaggatgtcctccgtctgctagtcttctttgatccttgaattctgtggagctcaaatagacaacaaagctttgtggaactggttaagtgttagcataaatatctagcctttatcatgttgagcctcctcaataaatgttactcattagtaggatcataattttatttttataattttatttttataggacaggaatatatttatttcatttttattccaccacagtgaatgtacttatgggttttatgccatgagcatactcacgtggggcttactatttttaacatttttattttcttttcaagatgatatgaacctgattaactaagcaaactattttaaataattgaaaggaaaaagataactgccaagtttacctcttggcaaggcgttcggtgtttttaaggcctccgaacaggattctccgttttctcaatcatcctggaattcgctggatggcgtagtcggtggttccggtggcgcgtactcttcatatataactatcttctttctccacacctgccttggtgcacttctacttcgtactctgcccatccgtcctttatgattttcctcctctggttacggttgcgtcgtcttcttcttgtcctgacctgcttagagtcttcaactatatagttagggtcagtaaaatagcggcgtaccttctcagaggggaaatgcatgtggaattctgcagttccaatgtagatgattgctttaacggtgctgaggaacggtcttccaaggatgacgggtggattgtacttgtcttctcccatgacaataaccttcaacctttcagaatgtctgatcttccatctggagctaaatgtatgtcggttttaggggtatggttccaaacaggagttgataggtgactgcggccattatgttgatgcctgacccggtgtcgcaaagcgtcttctggaagttgtatccattaatggagcactggatgcttggcatgcctgggtcgtcctttttggttaggaatggtgacttaaatagatgatcttgacctccttgaactgcagtgaccatcttagctgactcggtccacacttgcttgttcctattcctcctgttggtcctctttcttggttcatgtcgggattgctttgaaatttgtgtagtcttgttcttgaaggaaaacgtctccttcctccccttgatgtagaaactgatcttggcagcactagcgtagatgatagctcctgaggtgttcaggaatggcctccctagaatgatgagtgccctctcatcagtaccagtctctatcaccacgaagtctgctggggcgtacaaggtaccaactcggacgcagaggttcttcaatattctctttgggaaacatagcgtacgatctgcaagctacaaacacatggctgtttctaataaaggatgtgtaaataatttttcatagagtaccctgggcataatgttgatgctggagccaaagtcgcagagtgcttctaggaagtccaccatgccgatggagatcgggataacggggcatcctgggttgtctctcttgaccggcagaaggtcagtaattacttccacaacggggttactccagtagttacgtcctcaagcatctcagggcaatgattgcctgagtgtccagtatctccagtgtgtttgtgctcgtagatctaggttcttcacttggtggagtctgggagttgtaaaactccttcatattttgctcgaagtgtacctgctcatagagacaaggcagagatcaagtgcatgggccctgttggtggaaaacaccaacagaaccaaaagtgtatttgctcttctctatccttaagcatagtgagcaagacaaagttgatggataataaaatcatgagtgtagtatttaacatttgttagattagattgctcaaccttatggaaagataatctatctatatatatgttttgcttatatctttcaaagattgagtgtgcaacattttagcttatatgattaggagtatgggatcacaaaggtggaaggactaaacatgttgaatcaattaggttggttaatctagagttgtaaatcatacatgtttgtctcttttattcatgtgaacgccagaacaaaggagaagcttatagaagtgatagtcaagtaccttaagatgttaccttacttgaagagtgatggtacagtatcaccttgtggaagctttcctctcttagcggttgtgcatcgtgtttgtggcacctccatggatcatctcttgtgagctatgccttccttgtgtaaattgttaaacttcatgtgtgtctctctttgtctccaatgtgagtttatctcaggacttcctaggtcgatattgaaagttttcctgcaggggttagtccaacaaaatataccaatgtctacacaagcagtttttagttcaataaccaaactagactccatgtctaattagattaaggaaggctgtttaacctaagcaccatgcttaatttaaaaaccaatagaagtatgtacaatacttccaaactaacacttactaggataaacaaaggtagcgtgatggcttttatagagacctactcaagtggagatgaagtagtgtgattactatttaacaaattgagcatgtctcaaaggtagggacaaccaacatagtaacatggcaaatgatgtttttatataaagtactcccccaagcttgaattttgcaaaattcaagtttggatgaatttaattcaatgttgtatgatgattggttgtacataccttgtgcttgtcattcatccgatcttcttgctccaatcctagaaaggttagtgacaagaatacccgaaggaattttttttacaattatccttatatgctcaacacaaggtaatgttgcaaataattaaaagctcatgttacgatctgatcggtgcttgttttaggacactaagcttgtccttgggaaaccatcaatttatgtcggcgaagtggttttccctccaacgctgacctatatcaagatcaactcaacgagatctgcaatatttaatatagacatatgcatcaacaaccgcccttttaaagtttttataaatagaaaggatgagggggttggagatctcgaatgtggtgatgttggagagaccaatggattgtgaagatgttgcatatgagcatggagcaaatgaagtggctatgaaataaattccatgctcattaatgcttagagtgaaatccatgtggtgtggtgaaaatgataaggtgagtgtggtaaaaaaggaaaagaaaaaggatacacggacgacttggttcgaaactagcacagctaccgttccccggcaatagcgccagaaagcttgttgggtattttaaacgcaaacagaaaaatccataagcgcacggataccgatgtagccttcacccgggagtattccagagtatcgattttccacagggaacgtgagtgtactaattaagatccaagatcgcccaaggataactatatgattatttttggtgggaagagaggaagtttcctgagagttctctagttgatctaagaatcaagaattacttcaagattatctatttcgggacatcagaacactaaccacagaaagagatgagaagggggctaggaagctccgactacggtcctacaaacaccgatccgaacgaggtggaatacgtcgaccgttagggctgtcactaccctaaggctaccacaacaatccgcaggattgggtgcaattccaggtaattgcaagactaaacaccacgtctaatctattaattactactctattgtttcaaagattagagcacttgatgcaagcgagaatccaataaataacttgaatgtaaataaaagtaattaaagaactcaggaattatgagttgaagaacctagagaacgatgaaggacgaaccagttgctgcaaaagtacaatgttggggaagatctgacagatccggctcctcctccgctctcctcttctctctccctattttctagattacaactagaactaactagaactagaactagaggaactagaactagaactagatgaactagaattagatctagatgaactagaggtagaactagaagaactagagggatcctctctacttggatgaagaattgaaaccctagctttgattctgtagaagaggtatgatctccaggggccaggggggtctggttttatagtcccttcaagtgaatctgggccgtcggatcaaaccgacattgatcgtgtggttttccttgatcctttaggtcggtggagcataatccgcgaaacgtgtcctgattgggcactgtagctgggcgggtgctcaggagagttgggcgggcgccctgcctccgatcccgatttccttcccgttcgttcccgtggcttctggagtcttctagatgatagaaaattgcgcgacacgttaatatctctatgtaaacccgacgtgtgggcctttcttccgtatttcctgataaccccctgcagaaataaacaaacaccaaaacttgtggaattctgtcagataaaaccctaagtctaggtgttggttgcatttggatccttttccatgattaattgatggttaaatatgagcattaaggaccgtcaacaatcatctcttgctccatcacttggcatgtaccaacctcattaagtctacacatacttagcatagaggttagtattagggttttgttgacagtccataagtaccaaatataatcatcaaataaataaagaaaaggatccaaatacaaccaacacccagacgtagggttttatctaatagaattccacgagttttggtgtttgtctatttctgcagggggttattaggaaatacggaagaaaggcccacatgtcgggattacatagagatatcaacacatcgcgcaattttctaccatctagaagactccagaagctacgggaagaaagcagaggccgaaaggggccaggcccagggcgcccgccctctgttggatgccaatcaggactctcttcgcacatgacgttccaccgacctaaaggatcaaggataacatagtaccacgctggaccaaaaacgcacaaagtaggaggactatataagcaaggcccctggcccctagaggagaacaagtttttcatagagttgagaggagccctcgaaggaatacctctcctctaaataaaatttattttaggcttagcatccaatgtgagtagaaatagatcttctagtttctactagattgagagatatagagtggaggtgtagatcggaggaaggccggcctgtcggtgtctactccgaggttgtacctgcgggatcaagtcgtctaacccgaggcttgctcctaagattcttcagtaattcgacttctaattctagtaagttcttgttttattgttctttggtttatgagtttactttaatcctcttccggttgagtattagagtaatcattgctagcgtaaacgtggtgtttaggctagggtactcatagatatcccctgactagctggaccgtggtagtagcgaggaacgtgaaatttccgagttacctttgaagcccatatctcgttagcaggaagggtagggtttataggtgcgggtcgaacatcctttgtggtgtctagattctgtaagcttccccaatagaacagtagatcatccttaccaaggttagaacgagactacggttgcagtcttctctatacatcactcacatcgagaaacattctttgtagcctaaagggatagtagcaatagatttggttagtcagatgcaccctttctcccagtggtaaaaatataaatacgataactctggataaccttccgggtgaaatgcttactgatatctgtgcgcttgcggatcatttccttattgtgttaccaaatatcaacaagcatttctggcgccgttgccggggagaaagacggtttgttgagataactttgaatcttgctattatcttgtattatacttttatacttttattcttttatctttttacttttatctttatggataacttaaattccatacctattattgaattctttgcaccttcggagaccagccatagaccatgggagtcaactagtcctgcccctaattatgatctgtgtccggagttgattgcaataggtcaaaaccaacccttttctatagctgaggtcctatcttttaatcaagaagataatgcacttttagctacacctagggaatctgttaatctttctataaattttggtttaaacctagcccaacaagaccatgtttttctcgatatttttacattggtcttaatcatataccctttggtagagtttttctttctgttagtaaagcaaggtatgtcttcattcgtggacatccttcttgtactagtcttcatagaaaaatcttagagatagagaaggaatcatctcccagacaaggaaagaaagtttcaatagccgatttccaaacattctaatcccatgattcggctatccaacccatccttgagcttaataatttctactacgctctttctcttgaaccttccgataatcctatgaatctctctagtcattccatgcataagagtcaacaagaccacaaggaggatcgagaagagcaacatcaatggctagagggcattaaaaatccatgtgctatcaccattgaatggatagataaaacaaacttgagagacaatcctagaggaattttaagcatttatgaagaatcatccttggaatttgagaatgagagaaacaacagtgagcatggaagttatttcataaatacctcaccatgtccttgctcatataaaacatctccccaatcaattggtctctccaacctcaccacatttgagatctccaaccctctcttcctttatatttataacaactttaaaagagcggttgtcgatgcatatgtctataataaatattgcagatctcgttgagttgattgatggtttcccaaggacaagtttagtgtcctaaaacaaccactgattagatcgtaacatgaacttctaattatttgcaacattgccttgtgtattgagcatataaagatatttgtagaaaaattccttcgggtattcgtgtcactaacctttctaggattggagcaagaagatctgaggaatgacaagcgcaaggtatgcccaaccaatcatcatgcaacattgaattaatattcatccaatcttgagttttgcaaaattcaagcttgggggagtactttacataaaaacatcctttgccatattgctatgttggttgtccttacctttgagacatgctcaatttgttaaacactaatcacactacttcatctccacttgagtagatctctataaatgtcatcatgctacctttgtttatcctagtaagtgttggtttggaagtactcgacatacttccattggcatttaaattaagcatggtgcttaggttaaatagccttccttaatctgattagacatggagtctagtttggttactgaactaaaactgcttgagtaggcattggtatattttgtcggactaacccctgcaggaaaactttcaatattaacctgggaagtcctgagctacaagctcattggagataaaggagacacatgaaatttaacaacttgcacaaggaagacatagctcattcatcataaagagatgatccatggagggtgccacaaacacgatgtacaaccgctaagaaaggaaagcttccacaaggtgatactataccatcactcttcaagtaaggtaacatcttaaggtacgtgactatcgcttttataagcttctccttggttctggcattcacataaataaagagacaaacatgtatgatttataactctaaattaaccaacctaattaattcaacatgtttagctctttaatcttgttcttagtactaccttcgtgatcccatactcctaatcatataagctaatatgttgcacattcaatctttggaagatataaacaaaacataaatatagatagattatctttccattaggttgagccatctgatctgacaaatgctgcactcatgatccatcaactttttcttgctcactatgcttaaggttagagaagaacaaatacacttttggttctgttggtattttccaccaacagggcccatgcacttgatctctgccttgtctctatgagcaggaacacttcgagcataatatgaaggagttttacaactccgagactccaccaagtgaagaaccaggatctacgagcacaaacacactggagatactggacactcaggcaatcactgccctgagatgcttgaggacgtgaactacatcaacaacaataacaactattactacaaccgtcctcaacaaaatcaaggttggaatcaacagaggcctaattactcagagaggtgatccaggacgccccgtcatcccgatctccatcggcatggtggacttcccagaagcactctgcgactttggctccagcgtcaacattatgcccagggttgcagatcggacactcagtttcccaaaggaaatattgaagaacctctgcgtccgagttggtaccttgtacgctctagcagacttcgtggtgatagagactggtactgaggagagggcacccatcatcttagggaggccattcctaaacaccagagctgtcatctacgttaatgctgccaagatcagtttctacattaaggggaagaaggagactttccttcaagaacaagactacacaaatttcagagcaatcccgacacgaaccaaggaagaagaccaacaggaggaacaggaacaagcaaatgtggaccgagtcagctaagatggtcactgcagttcaaagagatcaagatcgtcgactcaagtcacctttcctgatcaagaaggacgaccctggtgttccaagcatcgagtgcacaatcaatagatactcttttcagaagacactctacgacatcggatctgacgacaacataatggccgcagtcacttatcacctcttgcatggaaccatgcctctacaaccaacatgcatttagctccagatgattttcagctcattgacatggtagaagacgagtatgatccacccaccatccttggaagaccgttcctcaacactatcaaagtcatcatccatattggaaccggagaagtccacatgcacttcccctacgccactactttaatgattctaactatatagttgaagattctaagcaggtcaggacaagaagaaggcgacgcaaccgaaatcacaggaggcaaatcatcaaggacggataggcagactacgaaggagaagtggtaaggtctgaagacatacagcttgaacagaactatcctgaggagaccgtagcatcgagtcacgtgtggagggagaagatagttatacacgaagaggaggcgccaccggaatcaccgactacgccatccagcgaatcccaggacaactgagaaaacagagagtcccgttcggaggacttaaaaacatcgaacgccttgccaagaggtaaacttggaagttatccttttcctttcaattattcaattatagtttgcttagttaatcaggattcatatcatctcgaaaagaaaataaaaatgttaaaaatagtaagccccatgtgagtatgcttatggcataaaactcataggtacattcactgtggtggcataaaataaatatgttttcatcttacaataaaaatataaaaataataagtgcatgatcctgctaaataaataacatttattgaggaggctcaacatgataaaggctagatatttatgctaacacttaaccagttccacaaagctttgttgtctatttgagctccacagaattcaaggatcaaagaagactagcagacggaggacatcctaatcgctgtcagggtgctgccgacattcaaatacacctccgtcacctgctagctacatgagaagaaattacgtcaaaatccagcttgggggagagcacccccatttatcgagctaagtgtttctacttgcatttatactttactcaaataataaaaagatgcataatcataaaaacccaaataaagattttgtgctttaatatatatctttgcttagtttgctaaataaataaataaataaagtttgctatgaacccttatgataagctctcacatggaaatgatgaatagttgctctgccatgactagttcttaaaattgaaatctctctcaagtttaggcataactgttatgaattaagatttgctttaaacctgaacttgtgggaagagtacttgatctaaagtctaagtcgttaacggatatgatatgggaaggttgagctgctgtttatctgtttctagagatgctagaattttggagaattttatctttgaaaatctttaaaataacacatgatgagttcctatatgatgagagtttaaaatcctaccacagccacatatacatacttattagactatgaaccatatatttactttttactgcttatgagcattgagtgtggtcaagctgtgtagaccttaggagcttgtcatgtggttaaaatcaagattcgcttgcatgttcactcgtatatgctgcttctattccggaagtacgcatccacatacatccactcatttccatctccagattcacccaaaattattctactcctaatccgggagagaatagccaaaaacattttcctatccctgctattccctgtgaaataaatgctccagttattttggttactaccacttgctacattatttcaggagatgagtgctctaaaaaaaagaagaaaaaaaataatatacgaggaaataaaaagtggcaagtgctcggaacctcgaagaaaagaaaaagtgagatgagaggtaataatggacaagtgtccgacagtagaattaggggtacaagatacccacctgagaggaaagaaaaagaaaatatagaggatctcattcttctcaaaaagcttcaaagtgcaagaacaggtatctatccctttaaaaaagcaaaagtagaattatactttcaccattgttatcaccatcatcaccatacactattcattcgccacacatgcacatcttgatttgacttattgacttgtttctctggatccatggtttgactatgcaataaatgtcttgtaagtatgtattagctgtcttccacctatgagctccagatatcaaaaccttattagagtagggtgagagagaaggtaatatcactatgcattataccaaaaataccacatactttgagagaaggcatataccattactgccttggtaaggatccagaaataccacaaaagagagatttgagagaatcatataaggaatctctgagttttatttgaaaatctgcaagacacaagtgacggttacaagccccatagtgaaagaaactcttgagttcatccttgctcagggacgagcaagaggtaagcttgggggagttgttgacggtccataagtaccaaatataatcatcaaataaataaagaaaaggatccaaatacaaccaatacccagacttagggttttatctgacagaattccacgagttttggtgtttgtctatttctgcagggggttatcaggaaatacggaagaaagacccacatgtcgggattacatagagatatcaacacaccgcgcaattttctaccatctagaagactccagaagccacaggaagaaagcagaggccgaaaggggccaggcctagggcgcctgccctgaggacctgggcgcccgccctctgttggatgccaatcaggactctcttcgcacacgacgttccaccgacctaaaggatcaaggataacatagtaccacatcgcctgctggaccaaaaacgcacaaaggaggagaactatataagcaaggcccctggcccctagaggagaacaagtttttcatagagttgagaggagccctcgaaggaatacctctcctctaaataaaatttattttaggcttagcatccaatgtgagtagaaatagatcttctagtttctactagattgagagatatagagtggaggtgtagatcggaggaaggccgacctgtcggtgtctactccgaggttgtacctacgggatcaagtcttctaacccgaggcttgctcctaagattcttcagtaattcgacttctaattctagtaagttcttgttttattgttctttggtttatgagtttactttaatcctcttccggttgagtacagcgccggcccttcaagggccctctggcgagctcgtcgcgatggcctctctagtctataatatataggctaattatgtttgtagaggaaaatcaatataatatatatttaaaattaatatgtctgataattatcaatagcgagatacaatgtagattaaaaagcaatatggactaatatgattaccttgagaaaaaacagaattccgtcatattcaatgctttttatacaaatatatttcttcgggcatttcttgatgcaaaatcatcgagaacggtattaagatcaatagtgtccaagatatccctttcgatggtgcacatagccaaacaatttaacctttcttctcttcttgattttcaggtgcatctataaggttcattgttgtgactgccgaaactgttcttcttcgcagcccccgactcatattttttaggtaacattctcaaattctaacacttgacataaattaaaataaaaatatgactacatgagtacgtgtccaaagtaatagacaaaaattgaacaagaaaaaaacctagggtatataaaatttgacatgatcatataaactgaaaatatgaaactgaatcaaatcaatattcaaaaaagatatgattggtgattgcctgattggctgatttgtttgaagtccctcgaggcctcg

SEQ ID NO: 4939 - DNA, 5418 bp, Sorghum bicolor
  Intron number 2 from transcript Sb04g034133.1 (locus Sb04g 034133) derived from phytozome v7.0 (chr-ID chromosome_4; pos 63983532 to 63988949 reverse strand)
attatagcagggataatcccatcgttgtgcagcaggtacacttctatactcatctgtaattgcatgttaatgttgttctttttatgttttaagtccaattctttcacttgcataaagattaaacccacttcttttgatgtttttcacaactacacaatctccttaatttataaaacttggaatagaggggattgggtattggggatatagaactgaagtattatagtaattatgcctttggtttctgtttatcaatagtgttattctgtaatatggaagcgtaggcttgtttttgctgtttatgcatagattttatcagcaacactattctacaccctaggtgtaagatataccactagccaaaactgacccaaaaaaaaatactgagtacccaacaccacaaaatatgaataatactgacacacgatttctgaacagtactgaattctagggtgtagaatagcatgtgtatatattttattatataacatacatattcacatattttattgggaacttggtgtttctaccccttactttataatgcaatggtgattttacccctgtttttttttaactgtgattttacccttgctattttgaaacaaaggctccatctacccctactttgtaacggtgttagatgtagctgaattaaatgatgaaagaaaatgaaaaaaacaaaagtggaccacacgaaatgaccaaactacccttgccttatctagtcattcttgctctcccggacccttcccaaaccgcgaaaccctcgtagtatttggaggtggtggtgacggcgtgatttggaggccggctgcgtgcagggctcgcttgctggagttgggcgcggtagccagctgcgtgcgggtggccgctaggggggtccgggcgcgtgcgggcctcactgacgtccagatgtgtgcaaacaggtggctggtagtggcaggcggcagccggcatgtcaaaggggcgggcggacggtggtgagggtgacgtgtgggtgtcggtgcgcagcgggcgttggcagttccatgtccttcggtcctcccccactggccagtggccaccaacgcgttcaggtggcagcacagtctggcacaatggcgctcgtcttctctagcacaagcatctcaggtgcactctgctcctctcattcaagctccggcagagcacgctggcgtcgtggtcgtgggcatgggccctctgctacatctggagcacaaacaaaggctggaggttgcgctggcccctcaccaagatcccgatgttttccgtgcagctggccaagcacgtgcaggaggcacacgccatgcgcaccttggcggcttcgagctgcagacgaagaggatgcacaagcataggaggagctcaccggcggccagctgtcctgtccagcgcccacaacaagtctggcttcaattccttcctctgatagctttgtcaccataagtccattttgtttaaccccattggagcaaagattggtggtccaaattactggaatttcaaatcgcgctattgctcggtgcacatactatgctgggagctagaagaaaggggaagaagagaccagaatcacatttgggctccactacacatgtataggttgtaaacaaatctgttttttttcatatttcattcacgttcaaaggaatgcaaatggttgcgataaggctatcaaaattgccggttgtaaattgctaccaaaagattttgatttttcatatacattcaagatcaagagaataaaataatccaatttaatcacgtgtctataagcattttgggctttgggccttgtggttttgggctggcatgttacatggcattactgagtggcagctataaagggaagaggtgaaaggcagaggcaggaaaaatatttcagaagcatgaacgggtcatgaaggtgatcttcctccttgctattgagatcctcagaaaaaatatttcagaagcacgaatgggtcatgaaggtgatcttccttctcgctattgagatcctctcgtttgatttcctctgtgatttgctcatgcctgtggttcgacctcgctgtgggcaatgggtggtgtcagtggtatcagcatgggtttcggtggcatatgtcagcaccggtgtatatcggcagtgtgttggtgactgtacagtcgctgtaccatgactgcaaggatttggtcaggtgtgttgtctggtgaatctgtacttctatctgaacacgcaagttcagcaggttggggtagattgattcagtgcagtgtgctgctgtgctggagttgagcacctgtaatttctctccatgcgagtttgatttgcggtgattctcaacggcgccattgaaagtgttagtgctgatgacagcagactattgtgcgctggtcgcagctgcaagagggtttgggtacaggcatactgcaggagtcatactcaacctgtatgacggatggcctgaactgcgggcactgggacatcatgtgagtgttgtggtaatgcattctgtgctttgtgcgcccctgtgatcagcagaatgccacaccaagtaactgcaccccacatgttcaatggaatgcctaacacagcttttgcttcttcctgggagaaaatggaggcagaaattactgctgctgagaaggacctggaccaatctggaaactgagggagtgaatgcagagagcaagtgcaagctggctgtggctggcgggtagtgatccccatggtatgtttgatgaaatgcctcatttggatgtgtgggtgatgccatctattcttgatgtacctgaggacttgacatctgcatttgagacccatggcaacttattgcgacaattggtgggtgtagaaaggagtctgagaaagccggttgcggatcagatcaccaacctggtctcattaacccttgagcactgagtggttaacagaccaagtgtgtgatgaaatgtctcatgtgaatgttgtgtgggattagctgttgcacaggctcaacgcgcatgagggcttattcaacaactaataagtggtggagagtttctatatgattcagaataaaaacttatcagcaataaaatgcttgtctataatggtggcttggctttatcaatgaatcttggttaggttgctactgctacacatcatgggtttgaggaaatgcctgggtttgatatggtggattttgatcaagaatcaaataaaatgttcaatgaggctggtaacaacttgcaattagaacaacatgctgattgaatggtgttgcatgttgcattcctgttggaggcgtggtagaccttatactgaccatcactactagggtcatttataccatgtctgttatggagcatgttctcaacatgagatgaaatctgactgcaaccatttatttgatgaagagcggtgctcagtatgtgatggataaaatgccaccacagagacgaagtgcatttagcccaggaaatggtgatatgttgattcaaggtcagttttccatcaaataccttaatggggttcaaatgattatagttcttggattgtgaactgaataaacaacttctgagttcctattctgacaattcaatcaatgataacaaaagcacaaaattgatgcttgaacttggtgacttattgttgcttctggagctcgctagtggtaattcagataaagagtttgaagaaatgcttgctgtgctcgaggcggttttttttcccttaacggcatatgccttcaatctcccacccattggattcacattgagaagtgtgcaaacacacatctcaaagcagtttcgcattgagatgtgtgtttgcacacttctcaaagcgaatccaatgggtaggagagtgagggcatatgcccttaagggcaaaattaactttaccttgctgtgatctcaagtgctatgatgtccagacttggtgaacagaagactaacaatacttgccctatttgttactcctttgttgttcctagaacatgaagtaattcatgtacatcaatgacaaggtcgaccagggagtaatactgcacaagtgttcaaggagatctcagcaattggttcaagtgaagaaccaaggatgcagcaagtgtgtcgtgttcctatcccatctcttaggcttggacagtttggttgaatgagctgcttcataacctgttctgcttattcccaaagaaaaagtatcttgggagggaatcacacacaatgcatgtgtgcttcgttgtcagcgtgcgtatgtgtagatggccatttggccacaagagtggatggtgagctgtgtggccagattggtggtgcacatgaggtaacaatgagttgctatacttgttttggccctggtggcagtgcactcggatcccccccctcttctccccccaagagttttacattcatatctgcttgggtttccagctttatagaggccaaaagacaacttaaggtgggggctcaaccgatgtcctggactactactgaaagaaagccactagcaaagcaacaccatagttttactgaatcaaactagagtattagctccttcaaagaaggccttgcttttcatagctggttgtgtaagtcctacctaataaactagtattaaggaagcatttgacaaaccaagaaataggggggaaatatgttgaattggcaatccatggctaagctgaactgtgccatcaaattattctgagttgtttgtgtgccagctgccaataataatacctctatctagggacaacaagcttgacatgctaaggacagcaaagggactaaaataaaactcttgagaagtgaaatttgtacctgtcaaatggctggttagatactcttattgatgcatggatctgaattggttccctggcctaggtttgtccaggatatagaaactaacgtaggcttgcacaggactatccaaatctatggtccggctggtctcattcccattctacttggcctggtaaactagtgtgacacctttcacttgcccctgtaactttttcacaagggaaccacatgggttttggcagcacgatttgaggatcttatgttggtgatatagatggatttttatgtaaatatttgtacttgctgacttgctgaaatgttatacaaaaaaatgggttttatatagctgctgatagaatgcaagtatagtgtgcagtaatcagtatgcatatttgctgtcaatgcgttatatagttttcttaccatgccttattatgctttatctaaacacaataactaatctctgtacaatgtatgtttatatagaacttaaatgattgtgtttcctaaagcttcaaaatttatgctattgtttatttgaaaatgttggcaaatggttactaagcatgtatctaagctttagatatcttatgttgttatgtaaagctattaaataatggcatcaactttttgcagggttctttgattgaa

SEQ ID NO: 4940 - DNA, 3370 bp, Sorghum bicolor
  Intron number 1 from transcript Sb02g030900.1 (locus Sb02g 030900) derived from phytozome v7.0 (chr-ID chromosome_2; pos 65892037 to 65895406 reverse strand)
gtcgtcatcgacctccacggcaagctcggcaacaggtatgtcgtgatcgatgcatgcgcatccgtcgcccatccttccattactctgtcacgccatgcgtatgcattcgtctatggtacatgcggcgtagtgcatagcatatatggatatggttcccattgctacgaagagcagttctcatacagaattatttaccccgtgcaccatattatattatgtactaccccttatatgacaataatcaagctaggtacaagaaacacgtacagtatctgtctaggtagtacttcacttcctcattccacataatatatatacgtggcctgctttgtattgtttttgactttttgtgtttggtggcgcgcaaaccactccaaataacttgacaacgaactgacagcttacgtgaccagaataagaatacatatatatatataagctagcaaatattacatgcgcatgacaggatcatacgtaaggcatacgtacgtacgtagtaaaaggcggcagcccttttttttaccaccacgtacgaaaactacgaacagctagcagatgctgtcgtcctacgcacgtacgcaaacaaagtaaaaaaactactggatcgattgtagtatttgaccaatgaccagaatcgtacgcatgccgcccctagctaatcattgtgaaaaaataactgatcgaaacccgtggactcttgaacgtgcgttagttacttgtcaacacacgatatccaaaagagctatactgtccattgattggtaaaaccagtataggaatttctccacatgtatctatcaccaagtaaccaaattcagagaagtagagcccatgcatgcacgtggtatcattgtcaacgcgtgaaacacagccacacaggactagaattgtttggttggttgctctttgacgatacaaagcatgcatagttactacaagtagtacaaaaagcaaggttttcaactttagatgcttcctaaattgcgatgatgcaagccggcaattaggtcatttacagccttcagctggctgtatgtacatttacagccctctcctagtaggctacttatatagtagttgccgcatttaatatccacatttctcctctctccctcactctctcctcgaccttagcatttagcccacctacaaccatctaacctctgaattcaaatagttttgtctgctcctatatgcattatttgatttaccttttttttctttccttaacatttcaggattttagacagtgtatatagatgtatgaccatgtaaatattgtcatgctactggcaaacgtgctttgaattctctttacttacaaaattgacaataatacattaggccctttaattttgaacatgcaaaataatgattaattatacttttggatcgagttgtgatttgtgcagcacaactttattgtacctttcccctcgtactccttagctctttataaacttttactgtttgttgtatgtatatgtgtgtccggccatatatcttttatttattaatttataagtaacacttatatccccttgtgaagggaatatatatatatcccttgtgagtacgtgtttcatcatctatggccataattaaggacatgatcatttttctagcagtctacaaaattttaagttaattgcagtacttgccaaattatatatggtgctctaaaaggttgggtgattttatatcttgaaaaaaaaggctctacttatagaagcataacatgcgggtgacctattgccatcgtacgaggaaacataagacatcacacatgtcattagcttcttatagagattaagaagtatgagtatgtttctttgtggtccttggtatggtcatgcatgaaggatgcaggtctcttacctttggcaaaatttaatcaatgtcctcaatcactatcatataccaactgagatgtagatatatcttgaaaaagttgtagacgcataaatggatgggtgttgcatgtaatgaagagaaaacttcggattcaattctagaatactgccctataaagtaggttgttctatggtagacatttttcttaaaataacttgagtcttataacaattagaataattgtcctatttaatttgtacattagaattttggaaatatagtagctctagattttcagttcatgatggtgcatgcttcagtttaaatatattattttaatttatatgccataagttcctggacatagttggtaccctttaatttgtaagggtgcatcatttcaacgatttcatagattttctataggtatggctctgccatagtcatagcaattcaccagtgaccattatagatttcctatatcactttcttgatgtgtaacctagagcactggccactaccttcatttgtgtggctaagaaaccctacacattggattcagaaatcgcagagcatcccacttggttccacttgcctcgttggaaaatggaaggagctagaattttctttcttgtaaaggtcaccctctaccaaccacttgttgttttctcaccctatatataaaggctgcttcctcacacagtcacatagcttaaagaaaccaatgaggttgaaagctcgatcgtgacctttcatattgcacttgaagccagagaatcagtttttgtaaagaaaataaataaataaataaataaataaataagcaaaagaatctgtgtatgactcagcagtgtaatacatgtacacacgtctcattgaaatacaatggatctgaatttgtgctaagtcaaactactctaagtttgatcaagtttgcagagaaacgtattagcatttacaactccaaaaagataaattatgaaagtgcatctcataatatatctaacgatgctcatttgatatcataaatattgttgttcttttctataaacttgttaggatatttgacttaggacaacttaaatccattatattttagtacggagggtaggtaatattgggtagaaaacacggggagaaaggtcagtctcaactttgaatacccctgacatgattgagtgtgctgcttgtgaaaacgatcggcaaatatattgggtacacgctgttttctaaagctgtttttaaaaacgaaagcgccaatcgccaatctatagtaaatcaaatctgccactagctagagatgatctttaattagtttgaatatgcatatacaagttattttccgttttagcaacacattagcaatttagcatactcgacctgttgattctgtcatttttactcgggcatgcactgccccccactcatgtcttggcgattagacgattagttatgttattaatttcatatacttagtagtaatacttttctttcctatatgcatgatttcgtgtag

SEQ ID NO: 4941 - DNA, 1457 bp, Sorghum bicolor
  Intron number 2 from transcript Sb07g024910.1 (locus Sb07g 024910) derived from phytozome v7.0 (chr-ID chromosome_7; pos 59883594 to 59885050)
acgaagtcagtctatctattattttgtccctcttttatttgttatgcttattctgaaattacttcgcactattggctaagtgatagaacccatcacatttttggaaagagctgcgctacaattttctgtatatgtttaatggtaccaaccagactattaaaaacatcatcagggaattgctacagttccttttttttaaaaaaaagagttacttcagctacacattttaggtggccaatgttttctagtgatgttgtgatgatatttcaataagacaattaatcagatgtttgatgtagtttctagagtcagttggttcaactttataaagctttactgctggtccttttagtaatttattagctggattaaccagtaatcaagccttgttgagctgatatttactaaaatccggaagagtagtgctttgtataaatgggctgtgtactgggcatattcacacatcaaatttgtggtgaaaaggccccaagtattcaaattcgtctaattatgattaattggcgtcgttattggaaattgcagtttggaatttatgttatggattatactttgatgtgttgtgatttcatgcttttctaatgctatgccttttgattggagaagcaagagtgggcataatgccaacatctatttgctaagaattaggcagatgtcctaccctccttttatctcattttatatttacgcatgaaacttatggtgaagttagcacgaagaatgcctttgattaatgaaaattcatttgtgctgttaataaattggattttggatttatgtcattgattatactggtatgttgtgattagacttgagagctactaaatcgaacttctctaactttgacaaagtttatagaaaaatgcatcaacatctgcaatatcagatttgtttcattagattttccatgaaatgtctttgtgtctttatttgaattcttagatgttaacatatttttctaaagactcgttcatagttggagaagtttgatataagacaatgccgaagtgaactgtaagttggaatggagggagtaagtggatgccctccaaccttcatctgaatttactaacttaggacttatatgtatatggagttgatgagtatcttgaagacaatatcaaatttagagctgcaagaaaacaatgaatatgccgatcagtcaagtgttggaagagttgtcaaatatttgaaattggattccccctccccgactatgtaggagcatttaattgattttgttattgcggtttgcatcttttttgggtgttcatgaatttcttatccactctcttttcatggtgattctagagtctaaacaattatcgatatgcacaagtgcttggcctggcttttaccatacagcttaagtttatcttgattgttacagaataattattgcaaaataataaagtcaaacctcttgtatcaatgtctag

SEQ ID NO: 4942 - DNA, 1275 bp, Sorghum bicolor
  Intron number 11 from transcript Sb02g037270.1 (locus Sb02 g037270) derived from phytozome v7.0 (chr-ID chromosome_2; pos 71623291 to 71624565 reverse strand)
caggtttgtaacttcacaccatctgcttgataactttaaatattgtccatgatagaggttttaaagcttcacttggatgttttggtcttcaagaaacagtaggaatactgctaggcatgtactccctccatcccaaattgtaagtcattccaataatcttggagagtcaaaacattttcacgtttggccaaaaatatagagaaaaatactaagatttgtaacgtaaagcgagtatactataaaaatataattaagaaagaatctaatgatacttagtaccataataataattattttataatttaaaaatttggtcaaacttagaaaagtttgactctccaagattcttggaatgacttacaatttgggatggagggagtatttttttagcctgaaagttctgtatcacgatatgtgcagaattgcatgggcccatggtctttatcctgcacatgttgtcttgtcttcttgaagcagaaagttattaccatttctggaataaagatattgctctatttgttgaaatgatcttttgtagaaagcgtttaaaaatatcttctattgttcagtatgtctgagattgttcatccattttttattcagaattgctgatggtagtctcatgtagtgaattatgataaataaaacagtttgaataacattacattgagtggtcagttttttgcactcttgctcaaccaggcaaagcttggtactcttgccaaaggttgccaattggggtctaagcagctaaatttaggatattatatggagtttagatgagtgatctttgtacttctaccagaatataactgtctggattgaagaaataaattgtcagaatgaatttgaagaccttgctgagcttagatgcaccttataaatagaacagagggcaccaccccttgtggtggcagaacatgaagttactgctccaccacctagggatataatcttagtgctcacgatttatgcacatgattgtgctttctgctgttttatttgtcagtatgtaatggggtgtatgctactgggttgtgtttttgtgcggatgtgtgatcatcacttattgattttctaaaaacggggaggaaacatttagctatgttctgtggaatggaagtatggaacaaatgtgcagtagttttgttggtctctccttgcatgagtttttaaatattctctattttgaaataatttgtggctgtgtcactgaacattgatgttactcattgagcagctttctggtcttctgcttgatcaaacccaagtacg

SEQ ID NO: 4943 - DNA, 865 bp, Sorghum bicolor
  Intron number 3 from transcript Sb07g026650.1 (locus Sb07g 026650) derived from phytozome v7.0 (chr-ID chromosome_7; pos 61784664 to 61785528 reverse strand)
gcagcagccaaagaaagtgtaagatactttgcctcaccttaatattatttctttcttgtcaagtgggaaggtagctaatagtgttagaacagggagaaaaaaaatctggttaagatactttgcctcaccttaatattatttctttcttgtcaagtgggaaggtagctaatagtttctgacagtcttcctattgtctctactccacccatttcatgatttgaggaagattttcctataggcttgttcaaaatatgtgacctcaagggagtattcgatgaattatccacctactatcactaattgacaacattgtttctttttcttgaacaatattatgaaattgagagaatatttgtgaatcttcatgtttgtggtcctgaagcacccaaccatttaggttttattgtgccaaaatgcaatgtaaatacacccaatgcttgtactgtgtctccaccttgttaccatttgctttccatcccgagttaaagttttcaatgttgtagcttataggaagggatatcctctgactcctgttcacaattaacagaatcttctattacttaaaacttgggaagttcatgtattttgttttcgtattaattatagatccatttttagaaagtgtccattttacccctgatagctgaaagggagggaagagggaacactaataagtttatattttccctactcattactgtattctgatctttctcctgctgctttcagtttaatccagaaaaatcaacatcaccggctatcgtcacctactattttgtgttcttttgattattgttctataaggtgatcatttgattcaatatatctgtcttatggccttaggtagggcttgagggcagcgcca

SEQ ID NO: 4944 - DNA, 611 bp, Sorghum bicolor
  Intron number 2 from transcript Sb06g016030.1 (locus Sb06g 016030) derived from phytozome v7.0 (chr-ID chromosome_6; pos 44437562 to 44438172 reverse strand)
atatatctggcttacctcctctatttgctgaaaaggttagaaactctttgagaaaagaaggagaaggtagcataaattatcaaaacctagatataggaaagataactcaaaaaatacagttggtaggagctgaactttgcaatgatttaaaaattaaagaacaactcaagaagcaaagggctattgggaaaaggagttgggagaattttgctaccaattcggtttccaagatccttttgaatcccaaagaagaaggtcacatagagaccataaaagaaattatgataagaaagcaaaacaccctatgagaagaaggcataagaagaaatatgacacaggaaatgtcttcaaaaattttaaaaaggaacacaaggcaaatgatttagtttgcttcaactgtggccaaaagggtcataaatcttcaaactgtttcaaatcaaaagtaaaacaagaaattcaagccttgcttgaatcagattctgaggatatcaaaggaagattgggagaaatcttaaatcatatacaaagtgatgatagctcagaagataacactgagataaattgttgtgaaaataatgaatgttcatgttatgaacagggtacctctgaaa

SEQ ID NO: 4945 - DNA, 6543 bp, Sorghum bicolor
  Intron number 7 from transcript Sb08g018400.1 (locus Sb08g 018400) derived from phytozome v7.0 (chr-ID chromosome_8; pos 48453064 to 48459606 reverse strand)
aaaaaactgcacctgtggaaaaggtatgttatacagatgcatatggaattgtgttggcactttctaatttataattctttgtatgtgatcattggcggacgcacgaggggggctggggtggctgcagcccccctcttgggctcaatttttttaacaggttttcttttttagcaaaagacctcatgtatttagtatttttctatgcttattttatgaatctttgcctaggaacactttgaatcaatattgaattattaatcttagctatatctattaggccttgtttagttcctaaaatattttgcaaaatttttcagattccccatcacatcgaatcttacggcacatgcatgaagcattaaatatagataaaagaaataattaattgtagttaataagccctgcttcctaagcatttcttagataactgtgctagttaaatttctgtcattaaaggccttgggtagcccaagagttgtgcgggtacccaggcagctattctgtctagttaaagctctagtgagctgtttgtaatcaatgcaatatctgtctttctctatatatatgaaggagacgcctggggttagttgcctcaaggctaatcaaaatctgtgttacctctaacatttggtatcagagctaggttagacaccagagagccacgaggccaactcctcacctcctccacccatgtcgacctctgctgagcgtgttgccaggctcaaggccgcgcgtttgaaggctgcagaagaagcagcagcgctggcagtccaggcagcacagcaggcggcggctgctgcagaggcggcagcaaggacggcgcaggagctgcgggccgaaattgctgctgagaagggagaagaagaggaggaagaggaggaagaggaagaggacttgaggagccagaggactccatcgcgggacaggcgccgttcgcagtcaccactgcgtaacagaaggcgtcgtggcggcggccgctatgaatcaccgcaaggcagggtggtttaccgcgactccggcagcggcacatcatggccaatgctggacaagacaaattactatgagtggagccagacgatgaagctcaggatgcaggcgcgcgatctctgggaagctgtcgaaggaggcccagtgcagtaccgcgacgacaggcgagccttggaggtgattgtcgcgtctgtgcccaaggagttggggctcccgctccttgacaaggcgacagcaaaggaggcatgggatgccatcgctgcgactcgaatcggtgtggacagggtccgccgagcgacgttgcagcggctgcgtcgggagtgggagaacatggatgtcaagcctggcgagccggtggaggattttgccctgcggctgtcaactctgcaccagcagcttgttcttcatggtgacagggacatcaacgagaagcgtgttgtggagaagtttctgcgcacggtgcctgccaagtacgcgcagattgtcgtcgccatcgagcagttcctcgatttcgaggcgctctcgcttgaggaggtgacaggaaggctcaaggcggtggatgaacgtgaagcgcaagctgtgacagagccggtgtccatcaacggcaagctgctgtacaccgaggagcagtggcgtgcgcgtttgaagaaggagaagcaaggcgcagaagaagctggcggttctggtttcaagaaccagcatggcggtggcggcggacgcggccgtggtggtggacgcggacgaggcagaggtgctggccgtggtggcggacgtggagaaggtaaaggcgctggccgtgttggccccaacacctgcctcaactgcaaccaggaaggccactgggcacgtgagtgtccccagccgcgccgtgaagatgcagagcgcggcggtggagggggaaaccgtgctggccgcggtggtggcaaccgtggtggaggtcgtggcggcggaaatcaggctgggcagcgtggtgggaaccaaggaaggcatgaggcgcgcgcccagtacgctgagtgcgatgaagatggtgctctgtttctggcacatggcttcatcagcctggaacagagcacgctggtgcacagctacacggcgcagcacgtcgagctctctgagccacgcgctcgtgcctacctcggcgtggacgaagaagaggtggacagcggctggtacctggactccggcgcgacgcatcacatgaccgggcgccaagagctctttgctgatctgaacactggcgttcgaggaacggtccggttcggggatgcgtccaaggttgagatcaagggcgtcgggtctattgttttccaagccaagaccggtgagcagagggttcttcatggcgtctatttcattccggcgctgaagaactctatcataagtctgggacagcttgatgaaggagggtccaaggttgagattgatgatggcgtgcttcgcatttgggacaagagtcgccgtctgctcgccaaggtacgcagagggaagaataggttgtatattctgcatcttgaggctgcacaacctgtctgtctcgcggcacgcaaggatgaagaggcgtggcagtggcatgagcgtttcggccatctgcacttcgatgcactccggcgactcagcaaggaggagatggcgcgcgggatgccggtggtcgaccatgttgagcaggtgtgtgacacctgcgttaccaccaagcagaggcggcgttcctttccggctgcagcagcataccgtgcccagaatcagcttgagctggtgcacggtgacttgtgcggtccggtcacgccagcgacaccggcgggcaaccgctatatcttgctgcttgtcgatgacgccacccgctttatgtgggctgtgctgctgccatccaaggacgcagcaacagaagcaatcaagaaggttaaggtggcagcagaggtggaaagcgggcgcaagttgaaggtcctgcgcaccgacaatggcggtgaattcaccgtcgcagagtttactgcatactgcgctgatgaaggtattaaacggcatttcagtgccccttattcaccgcaacagaacggtgttgttgagcgcaggaaccaaacagtggtggccatggcacgagctctgctcaagcaacgccagatgccctctcggttttggggggaggctgtgatgacggctgtacacatcctgaatcgatccccgacgaaggcgctgaagaatgtcactccttatgaagcgtggcatggtcgggcaccaacagtcggccacctcaaggtctttggctgtgtggcttatacccggcggcttactcagcttcgcaagctcgatgaccgcggagaggctggcgtgtttatcgggtatgcggaaggggccaaggcatactgtatctatgatccagtgtcccagcgcgtgcgtgtcagccgtgatgtggtgtttgacgaaggccgcggctgggactgggcatcaccagcagcaggcacaccagaagcagcgggcagcgagttttctgttgaattcccatgggcggaggaactccctgaagcaggaagttcagcgtcgcctttactatctcctccgccacatcctgcatcgcctggtttctctccggtggatgcaggagagcctgcagcagaagcagaggagcccgcagcggaggcagaggtgcctgcgtcacccagaacacctacaccagttccagcaagtcctcaggttgagcatgtgacccccttggaagatgatgaagaaagggtggatgcctaccatgacgatgaagaactccgctatcggaagattcatgacattattggtaatcagccaacccctccgccagcgcagcggctgtttgcagaactgaatctcacccattctggtgagcctacaagctatgaagaagccaaagatgatccagattggcaagcagcgatgaaggaggagctgagatcagtagagcggaatgggacttgggaacttgtttctcctcgtcctggtcaccgtcccatttcactaaaatgggtgtttaagctgaagaaagatgaacatggagctgtaattaggcacaaggcaagacttgtggcccgtggttttgtgcagcaggaaggagttgactatgaagatgcttttgcaccggttgcaaggatggaatcagtgcgtgttttgcttgccttagcagcacaagagggatgggcagtacatcacatggatgtgaagtctgcatttttgaatggagaactccaggaggaggtttatgttacacagcctccaggttttgctgtaacaggagaagagaagaaagtgtacagactgcacaaggctctgtatggcctgagacaggctcctcgggcatggaatgccaagcttgacttgactctcaagcagatgggttttgagcagaatgtgtatgaagctgctatgtacagaaagggatcaggtgactccttactggtaattggagtctatgttgatgatttgatcatcacaggagccaatcagcagaagattgaagctttcaaggcaaagatgaagcaaacctttgaaatgagtgatttgggtcttctgtccttctatctgggagttgaggtgagacaatcagaagggaacatcactctgaagcaaacccattatgctaagaagatacttgagcttggtggtatggcaggttgtaatccagccaccacacccatggaagaaaggctgaaattgagcaaggaaagcacagcaaaagaagtaaatccaactcagtacagaagactggttggcagtttgagatacctagtgcacaccagaccagatttggcttttgctgtagggtatgttagcagatttctggagaagccaacaactgaacattttcaggctgtgaagaggatcttgagatacctggctggtactctagatcatgggctttgctacaccagatcaacaggcaaagcaaggtttgtgggttacagtgattcagatttggctggagatgttgattcaagcaaaagcacaactggatgtttgttcttccttggaaccagcctggtcagctggcagtctgtcaaacagagagttgttgctctgtctagctgtgaggctgaatatgtggcgatgacaacagctgcaacccaagctttgtggttgtcaagactgtttgcagatttgttgggaagaaaagttgaagtggtggaactcagagtagacaataagtctgctctggctttggcaaagaatcctgttttccatgacaggagcaagcatattagaatcaagcatcatttcatcagagattgtgtggaggatggtagcatcaagacagagttcattcccactgcagatcagctcgctgatatactgactaaagctttgggcaaaaccaagttggaagagatgaggagcaggattgggatcaaggagatcaagattaattgaagcaggccttagggggagaaatgtagttaataagccctgcttcctaagcatttcttagataactgtgctagttaaatttctgtcattaaaggccttgggtagcccaagagttgtgcgggtacccaggcagctattctgtctagttaaagctctagtgagctgtttgtaatcaatgcaatatctgtctttctctatatatatgaaggagacgcctggggtcagttgcctcaaggctaatcaaaatctgtgttacctctaacattaattacacagtctacctgtaatttgcgagacgaatcttttgagcctagttaatccatgatcggacaatatttgtcaaatacaaacaaaaattctactattcctattttacaaaaaattttagaactaaacaatgtactggactgagcgagcaaaaaaaaatttagcctatattatttagcccccctcttgatccatttctggatccgccactgtatatgatgttcctgggaggagattttgtcatgtgttatgcatgctgtatttcccctgttacattctgttttggttagttaaacttttttaccttttgacagccatgtaaagtactacttgataagcaccacccctattgtgttatgttatatatcacatatgcgactggaactcatcttgttgtgcacctatgctgagatcctaacattttttcttcttctgcggctggaacattttttttctttgtggaacaagttttttctttgatgggacaaaaggataaaagttgttccagttggggaattttttttattccactaagggaaaaggaaatgttccattattcaaagaaaaaaatgttttacttgggtagaaaacatgtttaacaaagaagaaaattaatgttcataaaaaaatgtttggatcaatgacttctagttacatatgcgacaagcgacgtatagtatttcccggtacacccagaggccacttcttcatggtgctaagtactttactacttttcatgattttatttatgctgacccataaacttgtgatacatttttggtctttttacatgtacctactatatttctgtagttaactgcaatatcattatcttcacattgttttcttatcagcttgagtcttttttattcctgtaggtagaggttgatatagcgctttctgcac

SEQ ID NO: 4946 - DNA, 9891 bp, Sorghum bicolor
  Intron number 2 from transcript Sb07g021915.1 (locus Sb07g 021915) derived from phytozome v7.0 (chr-ID chromosome_7; pos 56172580 to 56182470)
gaggttgcagaagaacttagtgccattgcaacgtcctggttacactagaggaggaggaggcttcactcaagctggtttgatgcacccaaaggacagtagcagtaaaggcttgcatggtaactatggaagggttaacaagcatgcttacccatctgtagccggcatggtaaacctgaaaaaggctgttggagtttagaatgttgcttattgcataaggcttctccagataaagagtcagttgctactagtaagctcttaaattttaattaaatacttgtgttctatatttcttgcgaccttcaattttcttgagaatgttggttctgagcattgtggtttttcaccttgggaattaattaatactctgaattctgataattcttgtcagacaatgaagtcattatggtattgggtccttaatcctgtgtgctttcttgattgtggttttcaattaacttgtctgtagattttcattccactcatatgatgtggtaagttaggctgtcacatgtgaataaacctgcatctgatcctagaaatgaattctatgctccatgcttttagcttcctaataagatagcatttgaatttattggaataaacactagcctgctgctgcacgcctgcactgcatcgattgatagggaagtactgaaacttgtaaagaagatcaaatgagtgtactttgagttcttggtaagttcggtgttttagttcaggattgacagctgaagtgaactgtttggtttctgactgttaatggggtattgggcatgaacctttttttttttgaacgcaatggcaggagctctgcctttcaattaagagaggaaaaaagagtttatgtacacaaaggtcttggagggtaaaactaatattttctgtggatttgtcaggtcgatttggtgatagttaaatcgactgaaagtaggtcgatttggtgatagttaaatcgactgaaagtagaccatatctagcagaaatgtcagtttttccactagccatggttaactcaaaccattatgggcactgcgctgtttcttttttctgttaacagaccacgtatagtattgtccagaatttgacttgtgatgcaatactatgcttaaattcagttggaatttgatagaaacgacaagaatcttggatgccaaggcatcggtttgttttgcttatcgcctaaatcctcgtgaagtcgtttttttatagtctatctgtcctccgttttttttgacaagtgtcctccgttgaatcaacaaagaaaacaggcaacaagtctcctgtgcgcttagtgctgacagtgacaggtctaaccccatcagatagaaaaatgccacgatcagggcaaagattgtgccggaacccgcagaaggctacgggcgttttttagttgtataggcatgatcatgcgaggataacgaactcccctctcccctcctttttttttcaacgaagaacttaagaactttacaggatgctgatagatgcaaattcatctcactacactacacgcgttactaccttgttttctacactacacgtctacactacaggcagggacgtgtagggtcgtccgcgtgtgctacttcacctgctgcctcggcgactccacgcagacaacaggcacccaccagaatcaccatcggtgtcaaactttcaattgtggcaccaccacgatcagagtttttttttgtcaagatgtgtacatgactgatttcagttttttttggtcttggtcatttcatacgggatcacaatgattcttaggatttctaggagatattcacaagaaatttacctctaaacaacaggacagctatgcaaaatcatatgatcacatccttaccaatgggatctgaaagttctcatgggaccattgttcagctttgtccaaaaatactaaacagcctccaactgatagtgatcaacttctgacttgctaggtgcgctaataatagcttttacatgtttctttaattatactcactcatggaatcattattcagttttatccaaaaaaaaactccatctgataatgagcagagtttccaatagttcttacctatttcttcaattattcaaatttcccttttaagttcagtttaccatattgcaagtgattaaactattgtgcatcatagtattactttttttggttttgctcactatcagtgtttcatagtaaaaattgacaaattttctccaaaacataatcaagatttactccctccgtcctgaaatatagtgtattattgtgacttctaaaatgtgtattaaaatacaatgcattctacataatcacataatgattatgttttgatttgacaaggtttgttaaaaagaaagccacaatttgagaagaaactctataattagaataatctatgagtacatgtgtcaattgagtgttctcttaagttatcttaaaaattcatagaacatattatattacaggacaaagggagtagactggagcactgattgacgaggaaacaaacactattatgtatcaggctttgctatggtactattaaataattatggaccattaacctagatgtcaattatcacatattacctcttagaaagtaataaaaatatagaaaaatatcttcctgttagatctaatatgcatgcataatttaactttacaatattatgcaagatgatgagacgtggacaatgctacacacgcatgcaatagttagacacagtgcacgcatgcgataggtcgttttaacctctcttagctttttaaattgcttgattttgcataatggataatgttgacagttttactaacgtggcgtcatattagaggaggtaaatcgagcaaagttgaaaatttacagcgataaactgggctagaatatttaaaaatccaaaaaaatcagaaaaaaaataaattttcaaaagtttatctaatatttttacattgattaaaaattataaaatctggttagattattttagcttggaaaattatgaaactaggttaatttttttctaaaatcatttatggtgcctagcttgatattgttgaatcttgatgtagttgatgtagatccttatttattgatcattcttcggatcatcacgtacaaacatcgatggagcgtcgttaggacttaggaccacacatcatcttgcataatataggaaggtgacgctggccccccacagtctttgacgtcggcttgccgcgtccgccccggccggttcaccgcgtctacgtgggcttcatcgactcgaggagacgcatatcttcaccaaggctgccgcgctgctgctgctcgtcgtctctggatctcgtgtccacgggtttcgccatgaaccgcagccgcggtgcagcccggccacatccaccatgttctctggtgattcaagcttaaaaatattacattgtgaaagatattagtttcttaggtaaatgtcttatgttatagaaattactcttagtttctgcaatgcgaatgccttaattaatcttcatctcagtatcaaatgcagtgtagcgagtcttttcgctggtctgaaaaattatagctgaaattactgttagctaatttattatgagaaaaaaatattattggttggtagaaaaaatacggctgataagaaaaacgaaaagacattgcgtgcgtatcaatatttcaacacgcacagatcgaactggatgctcggtcgggccggccctgggcgctcgtgctaggcaccgaccacggccagtaccgcctgcccgccccgttaaaacacaacgcagcaatctcgcaggctgcatctctcgcgacctcgcggcggtcatgccctgtgccatggacggacggaggacggcactacagaaaatgagccgaccgctggcacgaccaagggatcggtgtatgtaagggctggttcttagcggctaaaattattagatggggatcaaatagtaggcctgttaaggagcagttctaacccaaaaatagatgttttctatatatttgctaattatagggtgccaactaaataaaattgtgatgtgacaaaagaaattaaaaagagaggagcaaatagtatcttagacaagaaaccatgcctatatggaaccaagatatgaagatattagatagatagatagatagatagatagatagatagatagatagatagatagatagatagatagatagatagatagatacacgtgactagataaaaaattattttgaagtaagcatctattagatatatggtttctatgtgtagtttctactactcaagtatagaagctattcccttcgttccgtaatataatgcattttaatatttaaaatttatcctcaaatataatatattctaggggacgaaaaccaattttatattaaatattttctatttatcaaccaatcaccattaatcatgttgatgataacatctgattagaaaataaaataaggatacatgcattttttatgtttgctcttaatttatcttaaaagttctaaatgcactatattacaggacagatggagtatgtcatagtttttggattgggactgtcctaataaatctactaactattagtaggtggagatgctaatgattactccatctatcctgaacaatgatgtatccaagtaagtttaggatcaaattaaataagaaatctgacggattaatttgttcctcaataattagtttggtctgtagttaacttgattaatttttctagtaagatatagtttaaaaatacattgcattagttattttaggcaagatggtgtttaaaaggcatatatggatggggtttcaaaatagacatgcatgatagaattgagaaatatatgatgccttataattgtggataaattttaaaccctcaataccttgtatttcaggatagtggagaagttaattagttggtgaagaggtgctactccctccattaacttttataccaaattacactttaactatttatttattttatgttgtattatttatacttataaacttatggtaattagataacatatttaattacaaataaatccatattaaaatttagagtgaaatgcaatgtgggtccttaaaattttcatgacttcttatctgggtccatgaacctttttttgctcatctaggttcatgaacttttcttacctcctagccgccacccaaaccaatccacataggactctgctgcctacatggccgctagtgtggcgttgttgtggcaccacgtggtccttcttatttcataataatctgactggaactttaaaaatagtataaaatcatagaaaaatcataaaatgggaaatctagttttcctagacttcacatgaatagatctatgcagtagataaataatatgatatgatttagttcaaagtttttattgtatctatagatctattctatgtttaattcataactgaagctcatgtgctccaattgtggtgcaattcttacggtaggctactcattatatgcttgccctatatgataaaaaaagttaggctcaatggagcatttgtgactgagttcttgatttacttgggtttagtcttgtttaatagttaataaatagttactatttggtggtgtaccaaacatttaatttgaagctaagatttttatggtgatagatgataacaaaacatagctactacaaaaatattacatgcctagaattagtagattaactactacaataaaaataagttttaattgcaagaaagcatgtgatgcaaatataaatctaaagctcaacctttttgtaacaacatggtgatttaaagtgtttaaaatgtataacaacatcatgaaaaggcaatggaaccacatcttccattattacacctttttaactatttattaaatattaaacaagcataaacataggtaaatcaataactcagtcacaaataatccattgaatttgaaacttttatcaggctagtctaaagagagttttagtagagttttatggacattaaatatgctgatgtggcaccatattaacgaagaggaagatgataagagtttcatgggagtagagagagtttcatagggataaaactcttctgtaccgtttttaaaatatgaatgtgttgaaaactgtgtcatactcccactaaggatggcctcataagtgaagcatacaatgattagcctaccataaaaattttaccataattggatcatatgagttgcagttatgaattaaatatagaatacatctacagctacaacaaaaagtttaaaccaaagcttgtcatattatatatatttcatagatctactcatgcagagtctagaaaaattggactttcctttttatgattcttttacaattttatatcatttttcaaagtttcagccaattcatgaaataaaaaaggaccacgtggcgccacatcagctccaaactagcagccacattggcaagagagatgtggcctgctttggatgacaactaagaggtaagcaaagttcatggacctggatgagcataaaaaagttcatggacccagatgagaagtgaggaaacgtttaaggacctaaaagcatctaggtccctagaatgagtttcgatgattgatgacaactattgagtactatgactaacatgtgttttgcagagacattagaatgttaggtcatggtaatggcaatcttggacgttcgattagtcgttaggacattgttttcttttgctcgtactattaatgggggtgcaaacaggtagcttgacctaggtgtgtggtgcacacttgtcaaacctagcactaggtagctgcaaaatggccctaaaattgtttagagttaaattcattcacaaaggattctaaattgaaagtgaatgcagtgcttttctattggccgaacgctggaagtgtagacactgaaccctaggtggtgcgtccggtcagtactaggtttcttggagtgaccggatgctataccagacactatggtacttgcactgtagcaatcccttcggttgactaaagcaccggactctgaccgacagtaggaccagacgtaggttgtagcgtccggtcgctacatagagagttctagaatgagctttgagcggttgaacgcgtccggtggctataaaccgaaaacaggcctgcatctggtgcaacatagaaggaactctaacaatctgtcatacattggccattggctactgcccggacacgtttggtgcgtgtcaccagagcgtccactgctctcgaaatttgctgttctagagggtaacagttggatttgaaggctgctcctataaatacaactcctactcatccatgacagctctcttgcccatttgttcagctgaagcaaccatttgagaacaagggagtgcaagagcctagtgaggttattgagatttgataatccaagattacagacctcattagtgcatagggagtagcaagtgtgcatccatcttctcattagacttgttgtggttaagtgagagtttgtgcttgttactcataatgatcgccatcacctagacagcttggtggagattgggagcttggtgatcatcttgtggatggcccaactcatcttgtgagcagtttttagcgattcgccacgtcgaaacgacaaaaaatcagccgtagagagcacttgatccttgcgtggatcaagggggagctacacccttgcgcgggtgctccaacgaggaccagtcactacaggagacagctgctcactattgctctcggcaaaggctttcccctcggcaaatttttggtcggcaaaggtttctttgccgagtgtcttccaagaggcactcggcaaagaaaagttaccgttatgacgggttataaactaacggttcctttgccgagtgtctccaagaaagcactcggcaaagaattgttttaaaaaaaaatctcgaatttctttgccgagtgcccagacaggaggcactcggcaaagaaatttgggatttttttaaaaaaattctttgccgagtgtctccaggcaggacactcggcaaagaaattaattttttttatttaaaaaattctttgccgagtgccttgccaggaggcactcggcaaagaaattcgggattttttttaaaaaaattctttgccgagtgtctccaggcaggacactcggcaaagaaattaattttttttatttaaaaaaattctttgccgagtgttctgctgggggatactcggcaaagctaggaatcctactgggtcaaatggtcactttgccgagtgtaatttccccggcactcggcaaagtgaccagaaccgacctatttatttaattttcacattttctcatgataaacaaaatatatcccatatatttcacatttttcaaagatatctcatatttgtcacataaatctcacatccatcacataaatatcatgcacatcacataaatgtcacatttaaacaaatccataagtacaaatccacaagttcattacaagtccatctaaataaatccacaagtccatcacaagtccaaataagtaacacaagtgcatcgtaagagaactgcgactatgttgtaccatgacactgcgactgtggtgtaccaaccgaacaaacacatgcaaagagaactacccggctccccaaggtccccactgcgactgtggtgtaccatgacctggaatattcgaaccggcggatggaggctgcacaaaagagatatagtattatggttcgatcctaaatccatttggctacatataatatttgaaccgtgctcggatctgggacagagagggagtagaggtcgcatcgatgacgccatcgccaagatagtaccgctcatgcttctttcctcctccaatcctcatgacaacctctgcatctaagtcatgggagctcgggttgtagtcatttccatggatagaccttgctgctgatgtgtactcactgatgcggtcgtaggcggtcgggtttgtatacgcctcaggtgggtcgtccgggttgtaggagacatcggacgtcgccttgcccttgtgagccatagcatatgccatgaatgtagtgcactcctggcccgcatgtgccgctgactgcaaggaccaacaaattagtagaattcaagaaaaattgagcgttaaaatagagaaatgattttacgtacccatgcttgtccgtatgcggcgaggctgcggctgccttgatggtttgttacacctggcataagcaatcgacgctcccgagcagcgttgtgcgcttcagcccactcagggccacaccacctgtccaccatcatcttccaacactcgggatacgcggcgcaccaccagggacacaagtatttgacatatgagagaaacaaatttcacatgtagttcatatttggtagttcatacgtcacagaaatatagaatcactgctcacaggtcacagcaacacgacctcatagttcatacctaacaaatcttactgaaatatctggaaaaaaacttatagaaatagctaaggaagattactgaatatttctaaaaaaatctcactgaacaaataccaaagcaatgcagcccatattatcttttaatagtttaacaaaaagctcaccattaggctgccatatcgtggatccacggcttgaagtggaggtgctgtttggactctggtgaccggagaatgaagcaagcgagtaccagcagtagcagtcgtctagacttcgatcggatctacccgccgccccttgtccttggctccttgcctggcacccagacgctgcaagtgcagccgtgcaggatccacccgccccagccgctgcctgcacgctgctcgctttggctgcttcttgcccttcggtcgccggcacgccgcagctgcccagcacagtcgctccaagagctggggcaggcgcgggaagggccgagctggggcg

SEQ ID NO: 4947 - DNA, 2245 bp, Sorghum bicolor
  Intron number 1 from transcript Sb06g001390.1 (locus Sb06g 001390) derived from phytozome v7.0 (chr-ID chromosome_6; pos 1948032 to 1950276)
ccacttcagattcagaggtgcaaactctcaacttgtcagaaatcaagtccatttgtagagacgttttataatttcagacatattatttaatcatttgtcttattttttttataaatattatatattttgttaagactttatatacatacatacatacctaccttgggggcatgtttgacgttttttacatgcctgttgtgccgtagaagattgctctggcggcaaaaccaaaaggggcagagcggctaccaccaaacattgttgttcgagagtctgatcttcacctgcgccggctctggggacacccgcgtgaggtctctctctctctctcatgatcttcatccgctcatctttcgttgctttcatttaatttgcttccaatcattaactttactgagtcgacactaaagccttgtttagttcacactaaaaaccaaaaacttttcaagattccccatcacatcgaatcttgaggtatatgcatggagcactaaatatagacgaaaataaaaactaattacacagtttacctttaaatcacaagatgaatcttttgaaccaattactctatgattggacaatatttgtcaaataaaaataaaaatgctacagtcctaaaaaccaaaaagtttttggaactaaacaagacctaaattgcgcctcttttttttagatcgttcttacaaatggttcccatcaagagccgtcgctacaaacctatttgttgggctactggtttttacaaacgaacaccgaatagtaaaaattaagttctgaaatttgtttttttcaaataaccttggatagagaaataatcaatacaaaagtcgtagatctcgaaaagttattgaactttgtagttgacaaatcatttatcacttatcacggtttgaatttctcaaatttgaattttgaatttttcaaatgacatcagatggagaaacaatcacaacaaaagttgtagacctcaaaaaagttataaaattttgtagataacaacttttcatttcaaattatttgtcaagcaaaactatgtttgagtttctcatatttaaaatttgatgaagttttcaaatgatctcgaatggagaaacaacaaaaacgaaagttgtagatcttgaaaagctatacacctttatagttgaccattttttatttgaaatcatcaagctaaggataattatgtcgaaattcttaatatttgaaattcaaaattttcaaacaacatcagatggagaaacaacaaaaacaaaagttgtagatcttgaaaagttatatatctttgtaagtcaccactttttatttgaatttgttaagagtaccaaacacacttattttgaagttggttcagcataatattaagagaaacaaaatctgatatgggcacgagtgtgtgcagtgtagtagttagagggaacacacgaccctgaggtcacgaattcgaaccccgctagccacgaagttcatgttttttgcatgaaaaatcatctgacttggtcgctcggtacaaaaaggaaggcaaaatgttttagacatccttatctttcggcttttaaaagaagatattacaaaaacaaggtataactgtcgactctttcctatcaggattttacaacctgaataccaagagagcactattagaagagagcataataagtaaaagttgacaccatcttttactttttggatggtcggcaaaactcgataaccaatactgcagagtcaacaaattcaactaaatagaatcctaaaacaatcttattagagcacacgcgagaccgatagcaatgaaattcacgcaagcagcaatcatccgagcagagcgcgagagtggctgcttggtgggtcctcctaagacttaaaaaaattgctatattttttatcagatctataatttctagaaaattaatttatatgggcggctcgtttttcaaatgcccctacaaattgatcgatttgtaggagtgtcttgagaaccacccctacaaatcattgatttgatttgtagtgacacctgggtagagttggttaggcaaaccacccctacaaataccctgaaagccagccctacaaaggcttatgcaatagtgcgataagcctccttatatatccctagatatactaagcacatggcctcatgtacggttgaattgggctgacgcgtttaattagtaagtataaattttgtttggtgtcaatgcaatgagcaggacacccccactcgcaaataccttgtggcgctgac

SEQ ID NO: 4948 - DNA, 12343 bp, Sorghum bicolor
  Intron number 1 from transcript Sb06g015900.1 (locus Sb06g 015900) derived from phytozome v7.0 (chr-ID chromosome_6; pos 43966994 to 43979336)
gaccgtgaccagttcttcttcttccttgcagacgcgtgagcaaatttttcctcttctttcttctgatgaaattttataatgatactaaacaaattagcaaccgtggatgctgctgcatataaatatgttctttttgcgaagatataaatatgttactccgacagtacgtccgattgaccagagtatatacttgaatttctagcctttatgtatatgaaatatacctgagttactattgttccatttgtaggatcataagctttaggaccagaatacatgaagaacacatattgaacaaacctcgtttgacgaattagccatagtcttgctgaagtcccgtgcatgcttgatacatgcgagatctagacgacatagagcttaattaggttgccctcacggtgcaacaatacagctgcctgatcaatggctatatcttaggatggattcactacgggaagcagtggcttcccctagtgtcaaatgcacttgggaaaggcttagttgcactcggagaagccttccccgagtgcaacactcggggaagaatgtccggggtatctcttcacggaaaaggcgtcttctccaagagccaaaaatcatgcagtcagggaaggcttttccgagagccgtcctagcactaggggaagagttgacaccgttggtggtagccggcgccatttacttgtttaaaaaaaaatcttccccaagtgcaacactcggggaagacaccctcttccccgagagccgcggcccaggcactcggggaagagaccctcttccccgagagctgcagcccaaacactaggggaagacagcctcttctccgagagccacttcccaggcactcggggaaggcaccttctttcccgagagccaaggcttgtgcactcggggaagccactttgaaatttcttttttgctttttcatttaatcaacaaagcatatatgtatatgtatatatatatatatatatatatatatatatatatatatatatatatatatatatatatatatatatatatatatatatatatcacaatccaaaaatcaacagcaatatatcacaaaccacatttatatatatcacaaatgaccaaatttatacgaaattcagaatatattacaaaccacacgttcaagagtacatattattccaagttcacaagttcaatatataaaaaacaacttcaaagacagctcacgacgaccgtccagtgcgatgtcggcgagggttgggacgccccagcttgcgatcccggcgacggtccatgtgtgcatagcacgtcgtgcgatcctggcgaccctccgacatggttggatgccgcccccgatgcatgctaaaaaaagagagagcactagatgtgagtgacaaataaaaatataaagagtataaagaaaaattaaaaatttctgcagctccacaagtttacatgcaaggtaggtattgtcttttggtgagaaagcaaccaagagaatctgtttacatatgcacatttcggtcattagctgttatttgcagagtgtgaacaacgccaaagcatctcatgaccatgatcgctcaaacaaaacacataccagagaccattattataggagtaagaaacatggaaggcacaacatattagcatatatcctaaaattggacgtccggagcatgagcatatggactgaaccaaccacttccgacatactcaccaaagcacgtcgcgaacttgatgggcttcctgccatggccttctttgatgacttgcttcttaaccttgtcatgaagcacctccatgtcagaggaaaccacgggtggggcgctgccatcctggggaggttcagaatgcacgaaagaagcctcttccactggaacctgagaatcagaaagcagcagaagtcaagaaccagggactctccgtcttgaaatagatcccgaattgccacactgcaaggagagtctgcaattcaggaaaaaaaagtgcagtgctactgcggcagcggtggactccaaattggcaaagccgcgggtgggatccgaaactgcctcgtttgctgtaaagtactagcgcccccaactttgctctaatcccccaaattagctgaaacaaacaagctgactgctaatttgttaagatgcttgtccatttcacaatccacattccacaggctgaaacaaacagggcctgaattgctatgcttaaaaaaaaaagttatcgcgggcacggtgctcacatcaagcttctctttcttagcaatggagtcccagtcctttgctgcgatccctgttaaggttaaggttgaccaccattcccttctccagagtctcggtccagaagcaggcaaggtaattgccagattccaccgtggtaaaggcaaactggccatggctaaccttgtcgacgtgatgcaggacgtctcccaaaggcgatgtcacctgcaggaacaaaaacaatccaggaaaaaaaactgcagtgacgaccacatcattacgtttttttttctctcctctcaagtgatagtcgatccatctgttcttgatggagaaatttcaatatttaggactcaattcgcatgcctctcaagatttaggactcaattcgtgtgcctttcaaaaaataggactaaatatgcgaattgcttcaagatttaggatttcaggtatttttagttatttctattttttctgaaatattttcacctctctctggaacctaaaatgaccaaattgccccttgaatctaaaacataacgatctctctccctgtctcgttccttcgtacctcttcggtccgtcgcggccgcgactcgcagtcgcgtgaggcgacgctcccgtcctccgaatcttcgccggtgcttcaccgccggccacggcctccagccctccaccgccgtctgtctccgctgccctccccttcttcccctgcgctccagtccgtcgccctccccatccggtgcccttccctgcgctcaagctgtagcaggctagggtttcgactggaccctaagaggaggctcggcgccgctctccagtggaggaggccatgatcccctctgagatccctccaatgtaaggcacaatccccgatccctctttcaatttgcactatattttatagttcgtagattttgggggcacaagcttatcatgtgtctcttttatttgttttgttggtacacgtagaatgaatgcagaagctgcgtttaggctgtgtgttcacttttctgagtttactgcaaagcttgatgatggttgctgtgttgatgtgccacaaaattatgacgaatggaccgtggattgtcgatgttatactttagacatgctagaaaaggatttggcagctaggataaaatggggcagtgcccagcagctagtagtatctgagtttgtcatgagtggagttggagaaagaaaactgcagaatgatacagatctgtcacttgctttcattgaaagaaagaatgaaaggaagatgcttttggttgttagtgttgtcgacaaacccatagaaatcgattgggacagtctgcagattactcctctaactgttaatcagattggtgcacctatgcctgtgattgatgaggatacaatttatgagtttcttggtcttagagcagaggatgagagagttgagcaagctagggcagtggctgctgaaaagggaaagcaaactgctcttgaaccagttgatgagttggtggttgatgatcatgtgcctggtgagaactcagtgctttatgatagagaaaatcctcctatgaaagagggaaccatttatgctagtatgtctgaattcagggctgcattgaagcatcatgctattgtggagaagtttgaaattggaactgagaaatcttgtaaaagtgtgtttagaggatactgcaaagcggatgattgtccatggtctattgtagcaaggttgatgcatgacaaacagcaagtcagggtactaacattgttctaacttgtcttcatatgcaacatacttacttaatgtatctgttaggacatttttactccacatgtttacttatatctgttttaaattttcagattacattgaacaaagaagaacatttttgtccatctactggtagagtgaaaacgaagatggcatcatacacatggatagcagagaaggcaattccttttctaaagaagaatcctagcatgggatcaaaggaactgcaaaaggagttagaggaaaaatatgatgtgacacttgggtactcaactgtacatcttggtcatgaggttgcatcaaaaaaactttttggtacatgggaagaaagttttggatatctgttcaacttcaaggcagagattgagctcagaatgccaggaagtgttgtagagatagatgtaatcaatcaggaagatggtgtatattttcacagattcttttgctgcttgaaacctagcattgatggattcctaaatggttgtaggccatttttgagtatagactccacagctctcaatggtagatggaatggccacctaccttcagctacagcactagatggttgcaactggatgtttccagttgcatttggatttttctcaggtgagactaccgataattggacttggtttatgcagcaactgcataaggcgattgggaatctgcaacacctagctataatttcagatgcttgcaagggcctagagaatgccataaagacagtttacccttgggctgagcatagagaatgttttgtccatctgatgaaaaatttcagcaagcgttttcaagggcccgcttttgggagaatgtatcctgcagctagaactttccaaccagattaccatgagtatctcatgaacaagatgtacgcaaccaataaacaagtcgagccatggttgaaaaccaatcacaagttaaagtggatgaggagcaaattctcagaacatataaagtgtgatgctattacaagcaatgtggctgaggtttggaacaactgggtaaaggatattaaggaccttcctccagctagccttgctgactcccttaggtccaagtttatggaactatatgcaaggaggagaagaataggtgagaaattcgaaggccatataatgcttccagtcgtggttcgccaactatatgcgctgagtagggagttggcccacctgaaagtcaaagaaggtggaagggaagaagctgaggtgacagaggttactgattcacagaagatcataagacatgtggtcaatattagaaaccacatatgcacgtgcagggagtggcaagtctcaggaaaaccatgcccacacgctatggcactcatcaccacatgtagaaatcctaagatggaagagtacttgcatccttacttttcagtttaccattttaggctagcctatggtggtgtgattagaccactacctgatatgtcccaatgggcacgtgtgaatcttggattcaaagtgttaccgcctctcgaaaagagggagcctggtagacaaagaaaactcagaattcctagctgcattgaaaataagggcaataaacctaggggcaaaggcaagtggcaagtgacatgcaaaaaatgcggaggtcttggccataggtcgtcatctccaaagtgcccgatgaatggaacaaagaaaaggtaaaatgccacttgttttgcttcattaaaatattacattttattaacagctccacaattttaggaaaagccgagctaaaaaggggaaggctgggaggcctccaggctctagcaaaaggcagaaagttgctgagcaaggaagtccagagaacaacagtcctgtgacagcaaggtaaagtaaataacatgatttgtacacttctcctctatataacaacattaaccattttctttatttttagtcaattctcatcggccatagtagagctagaaggcacaagtcaaatcaacacttctcctggtcctgtgacaagaaggtacctctatgaactgtatgaaagacttgagctgtacatttttagtttttatgaacactcaaccagctagaaatttccttctatttttaggcaatcacttttagcaatggtggaggtaggagggtcaaaccaaatcactacaagttttggacctgtaacaacaaggtaaaaagaactactcaattgagcatgcatatactcaactctgttcatgtactgaagcatccctctcctatgttcccatgtattcagccaaaccggagaagaggcactaaatattgttaccactcccaccaagtctccagcaaggcgtcggataggacttaagaaaaagctcactccaaggaagggaagaaatagtgctacctgatcaattgaagaataattatatagcctcttttgtgttctaagttcaaagaaaaactttattcacctgaaggttcttttggctctgttgactgtatgattgtatggttgtaagtttccaggagacgatggttcttttgtgttgcccaggaaaacttgtatgcaccaggatgcttcttttggttttgtgtggtttttagttcctagaaaacctgtgtgcctttagtatggtttgcttataatgactgctttatttttatgaatatataagcatatgtgcatctcgtttatattatggtgtgctggctttgctttgtgccaaaatgtacatttttttctaccaagggtttagtatagtacccaggaaaccaaatcacctgcctctatgtggctgggttcctggtgccaaggcttcagttttttttaatgctgcagcgatcagcagcccatcatccagcgcacagaactgatctaaatgaggcaggggtactttggtccatttaggaggacagagagacatgcaaacatttcatgaaagggaaaagatggaaaaaaggccaaaatcctaaatcttgaagcaattcgtatgtttagtcttattttttgaaaggcacacgaattgagtcctaaatcttgagaggcatgcgaattgagtcctaaatattgaaatttctcttcttgatgtctgttcagtccaataaacaggagctgtgacaaacaaagcgagatggtaccaggtacgcatcctattcgtgctggaattggcatcggtgatcttttccaatccatgtaacttcgctcacatcaagccaaattcccaacagaaagtaagaacaattcaacagcacccgattcactgggcaccagcatgcagccacgcgtgggtgcgaggggtggggggctcaccagcggcgggatctgcagacggcgccgcgtcttcttcgacgacagccatgggatgcgggtggggagagcagagcgcggacggccggcagagacttctagactgcggcgcggcgggtcggatagtgaacttggtcggggtcgaggcggcgcgcggcgcagggtcggggccggctgctgcgcgcggggctgggctggacgcggcgcgcggcgcggggtcagggcggcgcagggtcggggcaagggtggcgcgcgtggagacagagagctgcgtggagaggatggggatagggttagacggtttttgggccacattagttatttggtccccgagtgctgtgagctttgcactcgggaagagtaccttcttcgaaagttacaaaagacactcgggaaattttttttttgtttttgtttttttgtctttttttttttgaggtcttcccaaattactttaaacttcttgttcaaatttggggatatttaaactttttttatatattttattagtttttttcgtttcattgatttttttgcaaacttcaaatttgaactgtaggtgcattaaataatgaaatatctttattcaaaaaattatattcacgatatttggtgtatgttaaggccgtacccagaagctcaaatgaaatgtgaaacatcttgttgtcgtaacatgagatacaacttgcggaaaaaatgtttttaaattatataaaatccttaaaaagtctgaaaataaagaaacttgtctggacgtcatgttatcgcatgtagaggctatgataaaaatttgaaaaggttttgaacaagttgtaacatcggatgtttaaaacctagacatctccgtatatgatcataagtgatcacatgtaaagatgtctaggttttagacatccaacatcacgccttgttccaaaccttctcaattttttatcatagcctctacatgtgataaaatgacgcctagacaagtttcttgatttttagactttttaaggattttatataatttaaaaacattttttccgcaagttgtttctaatgttacggcaggtagatgtttcatatttcattgagcttgtggatatggtcttaaaatacaccaaatatcatgaatatcattttttgaataaagaaattctattatttaatgcacctgcagttcaaatttgaagtttgcaaaaaaaaaatcaatgaaacgaaaaaacaaatgaaatatacttaaagaagtttaaatatctccaaatttaaacaagaagtttgaaataatgtgggaaggcatcagaaaaaatggggcaaaaaaaaactaaaaaaagaaaaaacttccccgagtgcctttcttagctctcggggaagggcctcttccccgagtgcctggaccgcagcactcggggaagccagtattttccccgagtgccacgctttagcactcgggaaagggcgccttccccgagagttttttttgcgttcggggaagaatttttttcattttaaactccaacggcgccgtcggtctgggacgtcaagaaacacttttcttccccgagtgcgtctcttccccgattgttgcgctcggggaagaggacttttttcgagtgtcattcttccccgagtgccaggtaggctacggcactcggggaagcctcttccccgagtgcaattcttccccgagagcaacactcggggaagactggcttgcccgagtgttcgatttttggctctcggggaagcctttgacactcggggaatttccattctcccgtagtgattgacaggaccatgggagtttctcttcttttataccggctattgcacactagggaacatacgtttaggatggctttgggttggtccttattaggcgaacaggcttaggcccggatcaaggcacacctgagctcctccatggcttggacaacaagccatatgactcctttgccagcaattcacacacttagcttgttaatcaaaccacatctcaataaaacaatatatacctagacactagatcagaatagtcaattaagtgcaatcgaaccctaatcactatagtatatcatttcatttaaaaataagagtattgatataaatatagagagtatttacatgattgtcccactttaactcaagaatatgaggctctctaccagacccatgctggcaacaggtgtattgaaaacaataggtagtgggcctttagttccgccaacatcaaccttgtgtatatatttgacatcaatatattggtacgatcatggattctatatttcacaatacgataattattgtcaatgtgtttggcagcaccaattgacatcttaatacttggataggtaaccttctattgattatcgcagatgtgagttagatatgctgtcgaccactcataaccctacgacaaaattcattagccatattgcctagccaacagccttgtaacatgccacaaattctcccaacattgtcaatgatgcagtagcacttgctttgagcttttccttaaaatagctcctctagcgaggatgaagatatatataaaatgatatctagatctcttagtatccatacaacccgcaaaatcaacatttgaataacctacaaagcgagtgcatacacgagcatacataatgttatcaatagctcaagcatatggaacaacacctgaatccaatatatgcttatatggaaatctccacacgtggaaagagtctgcatacgcataccatcacttttacactgtcgtcctcgcttcgtgttaaatggttaaccaagaggtactatgtttgaaacaacaaaagttataagttgctcttcatcgtgataaacttaaaaggtcatactatctacctactacaacttttcatgggccatatgggccaacaatacaattactacaaccttataacgggttgtggtcttacatttaaccacccataagggctgatgcccttagtagctcactgcatatccagtggatgcttaaaacaaccccttggtacacccatccatggacacatgcaacaagagtcgatactctgaataacaccactaacaccccgcatctatttatatgaccaaactccacacgtggaacaggtgtcttattttcacaaattcagaataattcacttataaatagaaaatatgaaagcaacatcagttttttcaatgagatttggagttatttattagaccttatttgtacttgttcatagtgttctattgcgcatagatgtgcttgatatttcttcaaatcatcgttttgtgctatattaaacttagatgttgacaagagaatccatagtccaaatagagtatcaaatatattgcagtcaaattaatcaaattagtttttgagggctagcgaagtcattctaattggaatgctatatatatatacctacaagatcggtttcattttgcagatcttttgtacgtttcatgtgttctcaagacccttgtggtcaatttcagatgtaaaacaatgtaaaatgttctatttattattaaaataagtaatgaatatgactatgatcattaaacacgagtataaattgattacattttaagaaaattattactgacttcacatcatatgattttaaatgaattatttatcaatatttagaactaaactactagttattattattatattagaaaacataacatcaccttaaccaactagcagttgctaaacttgtcaggtattagagaattagtgattcattggtaattttcttttcagattgtaaagttacaataactagtagagaaataaccttcggtcctcacctttatttccaatcatgttggagccacaactaatgtgagcattagttccggatctaaatttcacgggcactagaggcccttttgtcctcctaaaagtcaccctttagaggtcccccacccatacttgatcatatatgttgtgaggaagctacacctgtgacgataaagtccacgattcaaatcccacgcaccgcaagaggttcccaagatttactggcccgtgggctgtatatccaccacatggattactattgctagtggtgatgtatatttcagtgacattctgctaatatgtcacaaaaagttcatcttggattggattaagtggtttgttatatgtgtgcctttagtcccgaatctggtgtcttagttgggaaatcaagactggaactaaagcccattcatgactgagattaaagcccattcctctagtagtgaatatatgcgtgacaaaaaggaactcaagcaaagttatatggtggacttcgccctaggtagagaccatgaaagaaggtgtttcttgttaagtagtcaaggttttagtaaagaaatgtatttcgtttttggataaacttaggaccaccctacttcttctagtgtttttaagtaataatgaaatactaccactggtcatagtatatgagaatctcactaggagacatttaaggggtgtttgggactgcttcactccagtttttgcagctctgctccacgaactccatcatggagcagcttcatcgtggagtttgtggagcacgaggtactgtttggcacgtagctctgctccagctccaggaatgggttggttccatgcaaatggtccattatgtcactgattgaaattgttcttgatattttttgatcaaaatagaaatcaaatgatggagcattaataaaggtcataattaaaatacaagtgcacaggtgaagagacaaggggcggcgtgcacaagaaaaaatgaggtcgcgacgtcgggaggtgaagcatttacgagaattaatctgtgtttaatgagtggcaagatgggtaattaccttataactctatgtgggagtaccaaactctaaaaactacagtacccctactcgaggaaaacatagagctgacatcttgctccaccttttttgcggagcggagtttgtggagctagacgtatttgaccacatggagcggaaaaactggagcggagcaattccaaacatccccttagtagaaaaaaaattatactaaaatttgaatgtaaaacaccttgactactttgaatgctaaaacacctcactacaagaagtattcgccttatccatgtactgctcccgtgcagggctccgcaactgaagagtcttcggcttatctcgt

SEQ ID NO: 4949 - DNA, 2083 bp, Sorghum bicolor
  Intron number 10 from transcript Sb06g024340.1 (locus Sb06 g024340) derived from phytozome v7.0 (chr-ID chromosome_6; pos 53433752 to 53435834 reverse strand)
acccctcttgatagagcacaaaaagcacaacaaaggtatgcttactgtttttttcctcgaattacgcaggagagttctgtgtcatttcactactagaggaaaaagagtaaaagagcaaggtgaaaacagcccccccaaaaacgccacacaaacctggttgtctacacgccacatgctactgactaaagaacacgaccaaggggatcatactgccaaccagaaaagtcaccaagtgctacattcatcatcgaccttgtgcagaagattctgaatattagtgggagctccctcaaacacaagcattcttaaatttccataattcccaggtcaccaaaataataagggaattaagccccttgcaaatctctttgagggagtttctgatggtgttctcccacggtcccaccatctgaagaaacgagttgcatcagctggaggtgccaaagtcgccattggaagtttctgaaacaccaaagtccaaacctgctgggtaaacacacaagagattaggatgtgctggattgtctcctcagcctgatcacaaaaggggcaagcaggctggtggggctgcctgcgcttggcgaggcgattggccgtccaacaccagttattgatggctaaccaaaggaagaacttgcatttgagaggggcccagcttttccaaaattttccagggaccaaacttgatagttcccaagaaaaaggcagtgtaggctgacttgctagagtaggatccagattttgtaggcttccaatggtgctgatgagggacactcagttgcaaaaaccacaccgcccaccaaatccagaaagcaacggaattgcgcaggaatagtagattgattatgaggaggcaataatacaatgatatataggcaagtattgtcctagggttttcttcttcttttttggctaatagaatctgggccaacgaggggcatccttgcctacaacaaatcatcaatcaaccttacagatcatgcatgggcgcaatgcctaaagggccaaccgaactaagtccctctctagctgtgtaacacttatgaagcagtttagttctttttatgatagtttgttatttttcatgcctgctagtgcagtggcaatactggtaaagagaattatttggcatcagtaattcagtacacaggacaaaaaggccacatagcagctgagttggcaatagtgcattgcaatctacatgcagagccatcacactaagcaatattcaaattccacttccatatagaagttgtcgaaatcaactttgcttttagcaatgacaaaaaatgcaaaatatcacacaaacttgcagcaactgcgcactgaggcaaaaataatggcatttctgtatcatgtggttgccgtccctgaacaacctgaaggctgctactattttaatgactaatgactggttcctccttgaaactagataaaacctagttgaaattttgaactttgaagaatttccagcagtaggctaacaccaggagcgggaagttccaggttaaaactagttaaaggcatgaatgttacaagttttgtagaacattggtttgcatatgtagttgtttcacttaaatattatagacttgcacattattgcgtcaatatgcccactactaataacaaatcatgaaaattaaatcatccttttgtaaaacaagcttttgttgatcattgtaagatagttaagcaggattgaagttagtgtttccatgtattgtcacttatgtataccatgctatagtatttcaatggtcgaacggtagaaatataatggcagtagtacataatgccttttgctcgtatgacaatggaagcgtaagtgcatggattggatgtcacaaacttaatataaaccagctgattgtaaactgttttcgttgccaactaattaaactcatggaatctgccatcgttgtttgagtcagcaggcaaacaacattgtaatggaggcatcagtttgcttacgcgttgtccccattgcatctttaaataataccaataccaatgtacatgggctaatggattagactctcttgcagctatctagaagcctacaataagacaaaggcgattg

SEQ ID NO: 4950 - DNA, 656 bp, Sorghum bicolor
  Intron number 1 from transcript Sb04g005890.1 (locus Sb04g 005890) derived from phytozome v7.0 (chr-ID chromosome_4; pos 5718605 to 5719260 reverse strand)
cgcggcaaggtggcttctctatctctcttggactctaatccttcgtttcatctcgctgtaacccagtactgatgatattagtcgttggcgcattggattaatgttgaactgtccttagcgtgccccgaaccactttgccattggtcgttcatgtgaacatttgttatggcaaataggcaaatattgcctcataggagttaggttattctgattttctgaatcttttggttagcataatgttcactgtagttacaatcatgttccttgattggttgcattgtgatgcttccactgaggtttggacaaatcatgattaatggtttgacagtgggagtagagtctgtggaattttcattttagttgagcttgcacttgtaatgggttattgtagtatgttaattaatgagtgcctatggctgctgattgatttggtaggttatcactttgatgtagatccttggtttcttaacttgttgtttcactataaatctataattgcaagtcatttgtttttccatctgggatacctgtggagttttcattttcaaatttaaggaaccctgtatgattgatatgcttattatatacatattttattgtttccttgtaacagtagttatctacatgtgttgttttggcattgcagggtactacat

SEQ ID NO: 4951 - DNA, 5515 bp, Sorghum bicolor
  Intron number 2 from transcript Sb07g024240.1 (locus Sb07g 024240) derived from phytozome v7.0 (chr-ID chromosome_7; pos 59238688 to 59244202 reverse strand)
acgagccatctgcaaagcagcgcgtccagcaagaggtacacgcccgggcatatgcaagctaatagctagtcgtcttcttcatttttaacctgcatgcacactctactcatcttcttcgtcaacgatgtccgtcctattactgctagctagtatatagttgccggcctctgttcgcttggctaataagttatgactaaaaatattattcgctgatttgttataagagaaaaacactgttgaatgatcggcagattcggtagataagcttaataagcgaacagaattggcgggccatcgtgttcttccatcctgcttaattaatttatttctccattacgtaattgttattagcgatgcacagtgttccttctattcctccattacgtaattgttagcttaagaaacgagtgtaggtactccgttaatttattgctacagtgtgttcaaccagtgtgcacgtcgttgtcatgcaattttaactccttgttccgaagagagaactagcctgcatgcggcattgcattgcatgcatgaggttgttacagtgacatgtgttgcttgcatacggccggtaacaacacgatcgtttttttgccttttccctacaccgttcgaaacgcaagctctccattttaattactagtgctgcacacgtcgcaatctcaaatttatataataagataacgtttatgatattaactaattatcattttattatattagttatattttattgtatatctatttgaaattataattctttgaatttatctctattaaactcgagatttattgactctctctaagattgttgttggaattgtaatttgtaaccgagtgagtactgggtcgttgtcatctccttgctctctagtgtcgtcgcgtcgtcctcgtagacgtcgctgctgcgtacagcactgtgcagcatcattgcattgcatgatgggtctagtacttgccatctgccatccgaggaattaatatacctgcttttcgcttaaatttatcagtcgatcaatgctattaggctttgtagttatcaaaaatttttaagatttttaaattttgcaggacatgcatggtgcattaaatatacatgaaaataaaaactaattatacagtttatatgtaaatcatgagacaaatcttttaagtctagttactctatgattagacaatgtttgttaaataaaaataaaaatgctacactattgaaatccaaaaaaatttacaaattgaacaagaccttagctattcagcaacgtttttctctcgtaataaattagtaaagagtatttttagtcgtagtttatcagccaagcgaacagagccttcatgagccatgcgtggtaccataattgacactagctagccacagtataatttggtcattatgtatccgatccagcacacgtccgttccgtcgtgcctcgatcgatccatcgagttgtatgcatggtgtgcatagatgcatgtggcatgattagtccgttcgaaaaaatcatagctaagagagtaacactgctaaataatagatagattaataatcttagatcttgtttaattcacccaaaaaaaactataaattttttacgatttctcatcatattaaatcttatgacatatacattaagcattaaatatagataaaaataaaaattaattgtacagttcgtctgtaaatcgcaaaataaatattctaatttagttcatctatgatttgacaatatttattaaataaaaacgaaaatactacgataaaaaaacaaaatttggaaactggagaagacctgagcgaacagccttgtcagttgcccgtgccgcgcgcggggaggaggacggaccggccggccggaggtggcagtaattgcgacggaacagccggcacgcggcggggggaaggtgaacgcaacgtgcacatggggcggccggccggcggcggcagctggagcggccggtttcgtttgtatttgacaaatattgttcaattatggactaactaggcttaaaagattcgtctcgtcaattccgactaaactgtgcaattagtttttattttcgtctatatttaatactctatgcatgtgtctaaagattcgatgtgacgagaaatgtgaaaatttttataaaattttctggtaagtaaacaaggccctagtagagtagtagctactagctgcggcatgcctgcattgtccgtacgtagtaccttctccttcatgacgccccacctactccagccgtccagcggcggctagctagctagctctagctagtccgccaggctggatctgacttaggccaaaaattttaattttggctgctctatcacttttattcatatttaataattattatgtaattataaactaactagatttaaaagatttatcctataaaatttgatgtgataaaaaattttaaaaaattttaggaatggctaagccttgggtgcgcctggctagtacaggcacttcaattttgcctgttagcgcactcacaatgcagactctatcatggagtctaaaattatttattacctcgaacaatgtgaacttagagtctaaataagacttggagtcttattttttctatctcattcttcaataaatacggtgccacatcaggaaaataccataaataatatgtaattaattatcttggactttgtgataaagtcttacattgagagtgcccttaggccactcacaatacagactctatcatagagtctaaagttatttattacctcgaacaatgtggacttggagtctaaataagacttggagtcttattttttctacctctttcttcaataccacatcagcaaaaatatcataaataatatgtaattaagtgtcttggactctgtgatagagtcttgcattgtgagtgcccttagcagtcatcgtcatcttcttgccacagcctagtgctgtgtactaaactactaatactctctgtctctcaaagcttcaatatttagagttgtcctaagtcaaaattttaaaactttgaccggattttaagaaaaaacattcagatttatagtaccaaattaataccattatattgattatagaacatatttttataagatactcattttatgtcatagatattgatactcttttctataaaattggtcaaacttaaaaaaaattactgccatagattctaggagttaagcttgcagagacaaattaagagagtactccgtacattagtacacaaaagtcggagtgtttaaatccggtggttaaaatttaggagtaacacatcgggtgttataaaaaattatagaagttcttagtaattcataagacaaatttattaagccgattagttagtcattagtaacatatttattgtggcactatattgtcaaatcatagactaattaggttttaaaaatcatctcacaaattaatcgcaatctatataattaattattttttagtctatatatatttaataatttatatatatgtctcaataaagagctaaactttagacgaactaaagaagaccgcaatgccccgctggcgctgggtaaagctatgctatggagcagtttttagtttgtaaaattttttaggtttagctattatagtatttttatttgtatttagtaattattatttaattatagactaactagttttaaaagatttgtcccaccaattttgccggattagtaggtgtgctcctcgagccgaaaaagaaccaccttttaactgaatgcttttttcttttggttttgactatcgtaatacttttattttatttaacaactattgtctaattatggactaattagatttaaaaaatttgtctcacaaattatgtacgtgtctaaagattcgatgtgacgaataatcttgaaaatatttggaaggccttgtttagatctaaaaagtttttggattttgacattgtaacacttccatttttatttgacaaacattgtcgagttatggagtaactaggcttaaaagattcgtctcgcggtttgcagacaaactgtgcaagtagttttagttttcatttatattaaatgctatatatatatgccgcaagattcgatgtaacgaaaaatcttaaaaaagtttttgattttcgggtgaagtaagaaagcccgaactgattgctgcgtaaagattcccgatttctttttttttgaaaaaccgattgctgatgtactgtagctataatacttgctgcagtattttaagagaggagaatagcggctgcacttgttctcgcagccaaacagggaatattgaatgagccgtatgctggctggttggttggtgacttgggcgtgtaaatgagaattcatttcttcatttgacttggccttgtttagttcgcaaaaattttcaatattttccgtcacatcgaatctttagtcgtatgcatggagcattaaatatagacgaaaataaaaactaactgcacagtttacctgtaatttgtgtgatgaatcttttgagcccagttactccatgattggacaatgtttgtcaaataaaaacgaaatgctacagtagccaaaaacaaaattttttacgaactaaacaaggccttgatcgtgccatggtccacctcgctccacccacattatgcacataacaacaacctccaatagttcatcaatcaattgggtaaaagtaaaaaagaagatatattatagtactttactagaactgaacatatctattgcctgtatagtcctagctgggagtgtataacaaagtcaattgggtaaatgagaattcatttattcatttgacaatgcttcttttcaccttgccgttgtttaggcctagtttagttaaaaaaattttggatttcggtactgtagcattttcgtttttatttgacaaacattgtccaattatggactaactagactcaaaagattcatctcgtgatttatagacaaactgtgcaattagtttttattttcgtctatatttaatacttcatgcatatgccgcaagattcgatatgacagggaatcttgaaaagtttttggtttttggggtgaactaaacaaggcctgttcaccacaaaactcaaaaacttttcaagattcctcgtcacacaaatcttgtagcacgtgcatggagcactaaatatatacgaaaacaaaaactaattgcacagtttgtctgtaatttacgagatgaatcttttaaatctagttagtctataagttagacaatgattgttaaatacaaacgaaaatgctacaatgtcaaaattcaaaaacttttcgcaactaaacaaagcccttgtatatatctacttcgagatttttgtagcactcgctgtcctagaataaaactgtgcgtcttgttcttcgatgagtcatcaatttattttaaatttgaactagatttatatgagtaactgctttggtgatgacgtactgacgtgtgtgcatgcttggatcggatacacactacgtgcaggtgatagacacggagctgttcggcctcctgagaga

SEQ ID NO: 4952 - DNA, 1948 bp, Sorghum bicolor
  Intron number 2 from transcript Sb01g001290.1 (locus Sb01g 001290) derived from phytozome v7.0 (chr-ID chromosome_1; pos 1236241 to 1238188)
ctggaggacgcacctcctcgaggcatccctcatcggtgagcattctgactccgtccgtccttggttattcctaactccagtagcttagcgcatttgtaatgtgcaagtggttttttagaagattaatggactagtggtatggatgctttgacgcagtagtgattggctgatttttgctcaaatgcttaggtggtagacaaggtagaaatctaacacccaatgtttctggattcaactgccaatttagagctcattcttgaagggcggaaattgcaggctctgtgatccacattttggattggacccaaagtcttgcctagtctgaaatctagggtcttactttaccattaaggattgctgcttttattaaaccctgtttagtagtagcactagacactggtcacctcctttgtttacctggagagtcaactgttcaagaatagtaggttataagagtctattagaatattataagaattcccattggattgcattgcaatgacttgttgtttcttgctcccactgtagtaataatttttttatcttcagccattgttttgttttgttggaatttgactatagtcattttagctgaaaatgaaagtaagctatccttaccctccaaagggaaatatgttatccagtggcaaatttgttttgctttagtgcagtacatcaagtagcatctctgtacaagttcttggtatggatgacttcctgcttactgacagttccaagctttctagggtgtctgataaagatttaagacttgaaatattgtctttgaaatagcaggctagaataaggacatgagtttgtatgtagaatataggaagggtactgtcttactcagtaatgttaaggagatgccagataaggtgagttctcaatgtaacgtttgtcccccataccaaatatacactctttgtagaagtactgtttgctttagttagtgatctcagttaagtaccgctatggcacgtttgggttagtaatctcagttataacttactttttaagaattatgatgtgcaagctaaaaaagtttggcgtctgggggggaattaatagagaagcttcagtattggttttgagaatctgtttcatacgtgacatatgccaaaataatacaaaagagaaattgggtatagtaattgtagtagtaataataacagcaaaaggggactgatatcttaggtcatggttccaacacgtggattgtcgatttccatgcacttacatgcaaagctggttggtgacttaatattattttgatatatttgtatttgtatgtattgcgaatgctaaggcatggaataaaatttctacctatttatggggatattgtgcttatttagctaccgatccggagtaaggaggttagttttgtaacggtccgttttttcctagatatgcaactctcctgcgtatttgagaaaaaaaaaatagagttgatattggtctacgtagttgtgaagctgtagatccacagggtacaagcatataattgtaaaggtagattgtctgcatgttcagatattaattcacaaattgcacttatgaccaatgctccagcacacaagcaggtccatggcaataaagtgactgacagcatggtttaagcagaatactctctggcttttttgaagctgttggttcaatatagtcttctcgttctttactttacttttgttaacttttcgtttatcatagagacatcatacctaaaatggccaaagtaggcctcagaggatatttgaagttaccattgaacctatactttgatggggatgtcgaacatatacatttttagccctagagaatgtgttttccctttctgaaaagtagcatataatctctttaataattaaatctggcattttatttctcgtacattttctttctccatgcaggatacacactattccttgcatttgtaattgaccgg

SEQ ID NO: 4953 - DNA, 3864 bp, Sorghum bicolor
  Intron number 2 from transcript Sb01g000900.1 (locus Sb01g 000900) derived from phytozome v7.0 (chr-ID chromosome_1; pos 860389 to 864252 reverse strand)
ctgtcttcctcatcaataaggcttccgtatgattccgtcccccgcatctattcgtttttgctctaagtgccttggtttatgctagcaattagacatcggaggattgaatctattgagttacttagatttactttgatgatgccatcagtgccgactagatgtttgatgaattgccttaagatattatcagctgtaggcctgtaactgttagaactccgatgaggatgaacaaagaaacacaagcacaatgatttggtgctgcaagcggcagcgttttctggtttctctctattcattataaagggaaatacatgcatccatacatggttacaaaataactgaggcaatcacggtatgctcacaatctgttgttgtcatcccaacaaccaagacataccgcgttttctggtttctctctattcattataaagggaaatacatgcatccatacatggttacaaaataactgaggcaatcacggtatgctcacaatctgttgttgccatcccaacaaccaagacagaccgtctgccatgcttagtcactaattagcctaagctaccaaatatagttaacaggtgctcagggtttattccaacagtaaccacatgagcatgtgctacctccaatccaccctgcccaatctgtccctgtgcactgtgaatgggtacaccggaagaagttgccttcaaacttactaatccatatgaagatctttcagttctcactgttctgctgggatttgtctgaaatattggtgttctacacttccagtgctgtctatcgtattcttgatcattgagatgttaggtttatgctactcagttgtggggtttcatttataagattatattatagcctagtaattcttacctaacaggccagctaaggagctgttgcactctccagagagaatgttgatagcctcattgtaatgtgggggtttccagatttgttgtctgtcacttctgttcatctgtttgaagtgttacattatctattattcttgatggtaataaaccatctttagctgaattgaccccacttgtccccacccccaccccaccccatccaggtttgatttttctggcatttgtcgagttcatttctttacacaaggcatatattgagcagaagactctttagcaacttagtactggagaaattggtttgaatttatattttgttgtcaatttacatttgcaaggtgtaactagatatgaattgtgggcgtcactatctgatctggagaagtaaacattttctagcaaagcattatatcattctatttggtggtgatagcttaggattgatttcctgagatttactgtgttgatgcaatcaacatcagaaagatgctagatcaattagcttaggtattgacatattgttagttgcaatctcaggaccatgtgctcccctaatcacaccctgctcgatttatgtttctgtgctgcgttgaccaatactgtacataaagctagcgtgtctttatttgcagggagccagggacttatctgaaatattggtgttgtactgttgttgattgtattcttgtgcatttagacattagatttatgttactgagttgctggattttgataataggattatattgacctaataacatagtaatttttacatatacccggagaggatgtttgtggcctagtgtggggtgtccagatttgttatctgagaggatgtttgtggcctagtgtggggtttccttgtctgccacttttgacttttagaagcatgaattatactactagtatctacttgtcttcatgttaataaaccatctgtagctaactggattgtccacataacacaccgcatctaggtttgattctgttgccattttggaccacaggttatttcaaaactcatagactaaaactcagtgaagctttgtatttggagaattttttcgagttctattctgttgatgatttgcatttacaaggtgcagctagacatgaattatgaattataggcttgactagctgattgaggcaagtaaacatgttctactcacttaacaagctaaccggctgatgccttgccactgccagcaaaatcattgacataaaagtttaagtgctttgtgttaatgggctaaatttttacaatttggcccttctttgaagaaaatttacatttggcctctgggagacgtaaactaatctttggaccttgggggtcggcactagaagcccagaacccatagcttcgaggtaatatgtctcagcgccactacctatggctctgaggtgcctggctgcgcacagcaggacaaccgaggtggcgctgatgtggttggtagatcggagccacggatcttggcgccgagctaccaaccacatatcctggcgccgagatagctaacctaaccagacaagccacatctctgtatctccctctctctcgcactctctgattctccctctctccccgccgctaggtaggccgccaccgccgtcaagccgctgtgcctccaacgccttcctgtgcccaaccgcagcagcccggcggccgccgttgcccgctccctcacgccctcgtacgctccctcggccacccttgtctccccgtctcgtcatgtgcaaccggcgccctcacctcctccgtccgccgatgcccttggcaatgaagcaggccgccgaccaccgtcggccgcacgccggcacgctccctcgcgcccccgtccgctcgcaaattcagatagttatttagtaaggttattaggtgatgtagttaggcaatgtagttagcaaatttagttagatcattattaggatttaggtgacgtagcaaagatctaaactcgtcgattcaatgcgtaaaaaatcattgccacccatcgtgaatgagtaaaaaatttatttagaccattatataccaaatcagtgcgtaaaaaatgaggggagagagattaccttgctagcgaagatctatggatcaaatccaagtttctaaggtcaaatttgtcgattcaagagattgggcgggtaggggaggccaagaacctgagagggaggaggaacaaatgaaagcaggcctgggcaggaaaacttggtcgtggttttgaatccaagctcggcgccatgtccgaggtcagagccaagatctgtggctccgaggtagtgaccacgttaacgacacctaggatgctttgttgtgcatggccagacacctcggagctaagatctgtggcgctgagacgttttacctcagagccatgagttttggcgccgacccctagggtctaaactctaaagatcagtttacgtttcctagggggctaaatgtaatttttttcaaaaaaaggccaaattataaaaaaaagggtgtttagtgtcttcaatcttcattgaatggagggatagatgacaccaaaagaaaagattgttggagagtagcttctttcttttttttttgagccaaaaaccgtggggcaaagccccccggcaacatatattgaacagagaggttcagagaaaacttacaagagggaaagctaaccagcggttagaaacaaaagaactgaaaacagatactagggagagggaagcatctactcttctactctaaccaactgaaagcaaaaaggacaactaagaaaactaagattctacagagcactgtccctgttctttgttaatacttcattttttggggataggttgggggaacgatggttgtactgtctactactattacaatttgcacctttcatccctgtaaaatccatttgttcggaagacatgctgacctttggcacttgcaatgatttctataagttgatattgtagctgcacctgtaattgcaggagttctttttggggaagtttgcagagg

SEQ ID NO: 4954 - DNA, 644 bp, Sorghum bicolor
  Intron number 2 from transcript Sb03g025410.1 (locus Sb03g 025410) derived from phytozome v7.0 (chr-ID chromosome_3; pos 51073883 to 51074526)
ttggtgtcactgctgtcactgatcttgttagagaggtatgcgatgcttattttgaacaaagtttatttcgaagaaatagttttaactaataagtagcttatttcttttctactaaagcagtataaatgccattgaatatttgtattttaagcctttgttgaccttttgttttgcctggcacttcaatggtagaccagtatagtagtcttcctatccttcattggagatctgttgcccactgctcttacaagcatcactgcgtcggttatttttgcagttccttggatttgtttgttttgtgtacttgaaagatttggagttatttcaggagaatctctgaaaaatattaccatctacaatacttgatttggtgacaaatcaatttgcagttaagtttctatttcattgctaccatgttatgaactccttaacgttaacatatatgtatatatcatactctgtattatgtaaaagcaaaggtcattaacattcatttttaggagttagtatatcagttgtgttaaaactggtgtttggtttgtagatgtgtagtttgtgatacttgtatgtttattctgccatagttatcctaaatatatttgattccaggtggaggctattcagaagtgtggtgggcagactat

SEQ ID NO: 4955 - DNA, 700 bp, Sorghum bicolor
  Intron number 2 from transcript Sb01g013730.1 (locus Sb01g 013730) derived from phytozome v7.0 (chr-ID chromosome_1; pos 12799013 to 12799712)
ccctgcagatttttaaggtatggctcatgtgcctggttctattttgtgtgttaatgtttggagcttcatgtagaacattgtttaaagcattcttcattctctaacattctaatggttattttagaactctgaatcatctctttgaaggtgcatgatagtcatacttggattaataagacaaattagtggaactaatacagtttcttttgtatgctgatttgatttttttgtaattaagaaaactatgacagaatgtgttctcgctaaatagcagattggaaaactaaatgttctttctctaacgagtatgagtagaaaaactattagcgcgtttggtttacagaatgcaccaatgcggagtgatccgatcctagatacgaagctagccacagcgtttggtttctgtcatgggttgaacccatccctcatcaagcctgtttttgtgtgcaagtccgtcactgactcattctgtgaaaatctatcggacacctcgttccgcatggactcattccggatgtcatcactccataaaccaaacaggctgtatctgtatctgtcactgaaacctggaaactctattttgcaatctagggatttcaatctctcatctgttgtttcttatccacagtgatgtaagcttcatagaaatactaatgctatttaatagtactaatactttgattttattcttgtaagcatc

SEQ ID NO: 4956 - DNA, 1415 bp, Sorghum bicolor
  Intron number 9 from transcript Sb01g031810.1 (locus Sb01g 031810) derived from phytozome v7.0 (chr-ID chromosome_1; pos 54533840 to 54535254)
cttggatctggtaagactgatctcctttctcttgtattcttgctgttaaacaagagtgcactacacatctgtggtctgtattctcttgttttgaattttcaacacataaccgtgtagtcttataataattattagaataatgatttgcaacttgatgtaaacactaaatttgcgtactgtgagcccaattagttggtctatatattgttcaaggttagtagtagggttccgagtgtgtgtatgctgtctgggtgccttgtctgcttgtgtatgtcaagttggctaagtttaccttttgtattcaggtggtaccatgatattagtagttgagacatttctcaacaataagatgcttattcagggaaatgcagtgcatagcatactttgtatccttttattttcattcatagctgttataagtgtgcgatgatgtgggtcagcacaatgttcttttgggaagagctctgcaactctttttttttggaacgcaatagagctctgcaactcgctcaagcctcacatgttacctcatatggttatgatattggttttattgttataaatcatcaatttgttattcaaatggtagcataagttgtcagaacactgcagaacctaaattttgtttgtgtgcaatttaaattattttaattttcttgaaggaatctgtctaagatatatgtgctgattaaaaggaacttggcgcttgattttcttaaacgaagcaaatattcagcagtagtaccatttggggttcattctaaacaaactatgaatgacatgaaaatggtgaaggacttgagagatcatgttccctacaaagttcgtgatgagaaatatgattggagtgcttgaaatagcacttccagcccatcgtccttgtacttaaaataacttaaacatcttatgcaaagaaaaatatatttgcgtctttggacccatgaaatgttaattggcaagttgcagatgtagaatttatgagcttaatgtgcaaaacatctgtaggccctgccatctatgccatccctggatttctgttttcagttttgaagtgtacacttatccattttaaaatgttaattatgtgccattctaccaacgctaattcagtaaaaactacaaatattctttaaaatgacctcatttcaaattcaatagaacctaagccgacaataccattcctttgtttatcagggtaccaccaaacaatctaagttgattaaacttgtataatatataaacaacacatattctagaatgtaagatatgaacaaatttattttaaatactgaattttctaggttaagtcaaactgagtaatatctagcatgcatgcactagtttgttttcatagtcataaatcttttgcattttttctaggtggtgttagaaggtcatcgctaacaaaagtggtg

SEQ ID NO: 4957 - DNA, 1794 bp, Sorghum bicolor
  Intron number 4 from transcript Sb02g039830.1 (locus Sb02g 039830) derived from phytozome v7.0 (chr-ID chromosome_2; pos 73984821 to 73986614 reverse strand)
caagacttgtcaagtcaacaatagttcactttcaggtatatattctttccaattaaattggttcccagcatttgtaatagaatcatggtaacggcaagtggccctgcgggctgttctgtccactcatacgttttcaaatttacgattgaccgattgttactcgtatgccagcagaatgcttaacagtttattaaaaatctgtgcatctgcatcaaacttcgagaggaatgtgttattatcattcaagtcctgctgctcacaagttgttgttttacccttattttttcataatgcattgcattttggtgtaccaagtattacactgcaactgcaacaaagtgtgtgtgtgtgtgtgtgtgtgtgtgtgtgtggtggtggtggtggttcggggacagagtaaggaggataaacacgaggatacagaaacaatgaccgaattcctggaatgttcatgctaaaagttggtgcattcatacccttactctgttttgtagatactacaagatttttaaagctttgactggtttccaattcagtaggtgaagtttctaatttttaattatgcttttccttcagtgtaactgtaatatcatatcgatgactgcaggttgtctgataagtttagttagatatgctagctggagctgtagtatatttctacaattaacactcctgtgatataggacagcatggcaacactatccttccaccaggttccataagcagatggatgagcatccacaacggtcggcgctgttattacgtctatggagtatggtatggtaggttgtttatgtcaagcgagcctcagctggataactcatgctcgcattttcctttggctggttggacttttgacagcaactaacaaaattttatgcaggatgtctcttttgtcatcaacgattgacagattgaagtgtttgtgtattctgttgtagtgttacctgagtgaaatgcttgtgcatattttgtatcttaatttcatattgtgcatacttctgacagttacccgtgcaatttaataacgttttttggttgcttattatgagttctgaatttttttctccactgacggtgtctattcattttcttttaagcgactatatattgcatgcccttaatgctttcatattggtaaaataatgtgttcatataaactgttgttttggatatgtttagttggaaggggaagttacaagtgcttcatatattgtttaattatactgtaacagcgcaccatttttctttctgatgtacctagccgttgtcaaatgctgctactggctagtggctactgctaaccatataactaaacatctagactagagctgatcaaatgagaataatttgcaggaggtttaggtaagtgtatgggtggttatgtagtggccctttggcttgatggaattttgagcttccatcaaagcagactccctcaggcagttggaaaggcagaacattgactgcaatgttctgatttgttgcttgttccttgccatggataatacctaactgtgctgtttgttttctttggttattgtgttgtttttcatccttttctttcagggtgcctttgtcaagcgatttcacaaatcttgttaaacccctagtttgacaataggtggcctgtttttactagagtactacaggtagcctatcgattactgccaaaacctgattgtcagcattttgtccctaggagaaaaaaactgcccattacgtgtgttttttctaagcatcatttatcgcttatcagatatattattacctttctgcactccaaggtgttaa

SEQ ID NO: 4958 - DNA, 8611 bp, Sorghum bicolor
  Intron number 2 from transcript Sb01g009025.1 (locus Sb01g 009025) derived from phytozome v7.0 (chr-ID chromosome_1; pos 7748582 to 7757192)
taagaaaaaaaataagcaagagaacaagcaaggagcaaacccgaagccaaaacaaactgcaacttttaagaagaaaaaggcagatggaggctgctttgtttgcggtagcgatgaccactgggcgagtggttgtccagaccgcaaatttaaacgagaagagaaaaaatcagtaaacatggtcattggcgaggctgaaggaagaacatctgggtatggtaattatttacctactgttctttcagtctgtcattcacctgagtggtggatggatactggagctaatgttcatgtgtgtgctgacatctctttgttttcttcttatcaggccggcaacactggagccttactgatggaaaacggatctcatgcgcgtgttcttggtgttggtacggtcattctgaagttcacttcgggaaagacggtgctgttgaagaatgtgcagcatgtcccctccatcaaaaagaatctagttagcggttcacagctttgcagagatggctataaaatagtctttgaggccaataaagttatactttcaaagtttggaacttttattggtaaaggttatgattgcggaggcttgttccgcttgtctatgcatgatgtgtgtaataaaatcgtgaaccatactgtgatttcgaatgagtcgaatatttggcattcgcgattttgtcatgttaattatggttgtttaacgcggctagcaaatatgaatttaatcccgaaatttaatttagtcaaaggttctaagtgccatgtatacgtgcaatccaagcaacctcgcaagcctcacaagactgcggaggcaaggaacttggcaccattagaattaatccattccgatctatgcgagatgaatggtgagttgactaaaggtggtaaacgatacttcattacatttatagacgattgtactagattttgtcacgtgtacttgcttaaaacaaaggatgaagcattacaatattttaaagcctataaagctgaagtagaaaatcaacttgagaggaaaattaaacgcttaaggtccgatcgtggtggagaatatttttcaagtgatttttttgacttctgcgtagaacatggaattattcatgagaggacaccgccatactcaccacagtccaatgggattgccgaaagaaagaaccgtactctaactgagatggttaacgtcatgttagagacttcgggtctatctaaggaatggtggggtgaggcgatattgacagcgagtcatgtcctgaatagagttcctacaaagaataaagaaatcacaccatttgaggaatgagaaaagaaaagagtaaatgtctcctatttgcgtacttggggttgtttggctaaagtgaatgtgccaataaacaagaaacacaaactcggacctaagacagttgactgtattttccttggttatgctactcacagcatagggtataggtttttaattataaactctggagtaccagatatgcatgttggtactataatggaatctagagatgcaacattctttgaaagtgagtttcctatgaaaagtacacacaatatttctagtcatgagtctataaattcccatgagcaatttattctgatagaacaatctgaggaaccccatattcactatcctgaggaggatgataatgtagtcactcgaacgagcaaaagacagaaaagtgaagtcttttggagatgactatattgtgtacctcgtggatgataccccaacaaccattaaagaggcattttcctctcctgatgctgacttgtggaaggaagcaataaggaatgagatggattctataatgtctaatggaacttgggaagtggttgaacgaccttatgggtgtaaacctatagggtgcaaatgggtgttcaagaaaaagcttaggcgtgatgctacaattgagaggtacaaggctaggcttgtggctaagggttatacccaaagagaagggaaagatttctttgatacttattcacctgttgcccgtttgaccacaattcgagtgttattgtctttggctgcctctcatagtcttctcattcatcagatggatgtgaagacaacttttctaaatggagagttagaggaagagatctatatggatcagcctgatggatttgtaacaagtggtcaaaagggcaaggtgtgtaagttattaaaatccctttatggcataaaacaagctccaaaactatggcatgagaagtttgacagaaccttaacttctgccggctttgctgttaatgaagctgacagatgtgtgtactatcggtttggtgggggtgaaggtgtgatcctttgtctgtacgtggatgacatactggtctttgggacaagccttgatgtgatcaaggaagttaaagactttttgtctaataactttgagatgaaagatttggaagaagctgatgttattctaaacattaagctttcaagagaaggcaatggtgggattacacttgtgcagtcccactatgtggaaaagattttaagtcgctttgggtacagtgactgtcaatctgctcctacgcattatgatcctagtgtgctattgaggaaaaatcgaagaatagcaagggatcaactaagattctcccaaattataggctcattgatgtaccttgctagtgccacgaggcctgatatctcatttgcagtgagcaaacttagccagtttgtgtcaaatccaggatgaaaggatcaagatgcccaagaggggggggggtgaattgggcttctctaaaaatttaagcaacctataagctccaattcaaccccttgtgcctagtgtgacctagagagctaccggataaaaagttttgcaacctagttccaatcttattctagcatggcaattctaagaatgtaaaagctcaaagtaaatgctagaaagtaaaggagtagtggaagaaagtgctcggcgatgttttgccgaggtatcggagagtcgccactctccactagtcctcgttggagcacccgtgcaagggtcttgctcccccttggtccgcgcaaggaccaagtgctctctatgggctgattctttgacactccgtcgcggtgaatcgcccaaaaccgctcacaagcttgatacgagccacccacaagaactccgggcggtcttcgtgcctccaatcaccaccgaaccgtctaggtgatggcgatcaccaagagtgacaagcaaagaactctcacttgacccaaacaaggcactagagagtggtggatgcacacttgactcttggaactcactagagaaggattctctcaagaaatcactcaaatctcaatcctctctaggctcttgcaactctcttgctccacaacaagtttctctagtgttcaaatgggcaagagagctctcatggacgaggtggaggagtataaatactatccacaaagtccaaaggtcggccaaccgtttttcactgaaaacggggtcaccggacgcacattatgttgcaccggacgcactgcaccgagcgtccggtgctacataacagctaactgtacttcactctgacaggtcaccggacgctaactcccagcgtccggtgcaccgtccggtgctcgggggaactttacaagctccttgcgcatgggaccggacgctacccggcgcgtccggtgctcagggaaagcttgcaacctccctgggtatgggaccggacgctacccgatgcatccggtgctagcgtctggtgcctaaccctaggcacggcactgttctaatggctagggacctcaccggacgcactcacagagcgtccggtgcccctttgggcacccaaactccgtcgaaacgcgatcgctccaaaacgaagttggtatctctcgatctaaggactatctctgagctgcctagtgctaggtttaccaagtgtgcaccacacctaaacctaaagtcttgcctaagtcaagctactagatcaaagcccctcttaatagtatggtcaaaggaaaacaaagtcctaaactactctaagtgcccttcttcaccatatggcacttagacctagtctagtcttgacgatgtccatccatccttccaaaaccgaaacgatttccactattaagtgggcatgtacgtccctgtccatcgagtacctatttaccatgaccttacctatgactttgcctctacaaaacacacgttagtcatagtaatcaacaatgtcattaatcaccgaaatcactaggggcctagatgctctttcacgggagatattcattggcaagctcttgagagagtgatgcgctatctgaaaggtattgtgagctatgacattcactataccggatacccgaaggtattagagggttattgtgatgcaaactggatatctgatgctgatgtgctaaaggccacaagtggacatgtgtttctacttagaggtggcactgtttcatggaagtcttgcaagcagactatctaaacgaagtcaaccatggaagcagaactcacagcattagacaccgtcggtgctgaggccgagtggcttcgtgaactcctaatggatctaccggtggttgaaaaacctgtgccggctatttccatgaactgtgacaatcaaacagtgatcactaaagtcaacagttctaaggacaacatgaagtctactaggcatgtcaaacggcgtttgaagactgtcagaaaattgagaaactccggagttatagcattggactatgttcatacgtccaagaatctggcagatcaattcacaaagggactatcacgtaatgtgatagatagtgcatcgagtgagatgggtttgagacccacgtgaggtctaccatggtggcaacctgttctatgtgatcggagatcgcgtgaagtagaatggtgaaacaagccagaagtagattgtgaggaaagaccctttacttaactcatctcaattgcacttctttcctaagtctgtaaggaagactggttatataccttaatgtattccaaagcagcttgtgaagcgatagatgttgtcctacagaacatctttaaggaatacacctatatgagtttgactgctagtcacagtctatgagattttgggtgatctctagatactcatgaatgggccagaagtatgacttatatgcttcaaccagaggggatgttcatgcaacccggtatcagttatgagtgtagatgaaacttatatcacacaaaacttgcaattcaaggcatagtccattgttcaagttgtggctaactgtagtctgtactctaggtggaagttcaacttaacagtctccaccgaaacgactggtatatgaaacggcatggaaactcgagagcttttattatgtgccctagaaataggtggggattgttgaatataatgggccattagcccataattatattagatgattaattcaagggcccataattaatgctataatgaaaatggtttagtaccatattgatgattgaccatgtgttaactcaacttaaataggtagcctttgttagcctctatggagaagttgagggagggtgaaggggtgccacacgcgcgcgctgccgccgccgagccttgtcttaggtcgagacgagcgagcgtgacgtggcacacgaggaccagaccagacgtcttgtcttgtcttgttgaggtcgagacgagcgagcgtgacgtggcacacgaggaacagactagacgtgacgtggcacatgcgtggtgaataaggaaaagaaggaaaacgggatctgaccgttgtgtaattaatggcaattaattgctaattgattgactcggtttatggcaattaaatgagattaattgtcatcaatcagacgtttccttctgaggcctatatattccatacgcactcactctttctatatctgcgagacacactgagttctctctcctgtcgagttgctttcggtccattcccgtcccgaacctctgcgcgcacagagatcgggagagcaggcctccggaacccgacgccttgcaacgagacacctgctcgggtgttgcgggcaatcaggtttttggggagcgtcaggcggatcaccaacgagttcgttgtcttcttcttgtgaacgtccggcggatcgtgatcgactacttcgtcttcttcctggtggacgttcacgcagatcgagttcgactactgtgtctacgtcttcgtcttcttcctggtggacgttcgcgggactgcactgcgaacatcttcctgcaccgactgtggtccgctacttcaagcaacgcactatgtcgactagtgtgaatggagccgccggtgccttcgacactggtccctcctctgggtacaatctcaaacgattgtttttcactttcagtatgtctgctgtagttgcagtagttcttgcaatatttatctctaatctgagtagtgataaaattgcacacgtgcacatatatgccaccactatattatgcgtaattttctggattaaatcaaacattaaaatgtctaaatttctaacaataacaaactaatgtttgctggttaaacattagggtgatgtcttgagctctttaggaagtctaaagtgccctctaggtcgtagtaccgttggttgagagttgggaggatctagttagccgttctagaatctttaaaatccgtgcgaccacgttctcggctggctggtcttctgtgcgcgatcaccgcgtgtagggtcagcgtcgtgactcgactcacggtctcacgcccacatgctccctctttgcgtccacgttgttgctgtctgcgggagcactgttcgtgctgctacacttgcgatgtctagggtaagccgtttatgctcaatcgcgcgctcaactggcctcctcgctcatcagctcaccgaaacgctctcgccactctcgcaggtcgcagcttccatggtggggtcactccgctaagcatatgcccctccaaccgctgtccatccattcgtgcgagctcgaaggtgagcctcggccccttagcccttgctcttgattccctagatggtcggtgttagggttgggcaacggtcggtgtcgctccagttcgcgcgggcatgtctaggggcatctccgttgcgaagacgagttcttccagggtcctaggtgcaaaatcgctctctgtaggaatataatagtggctcagtctgtcgcgtagtttgtcctaactctaagggtgtttatgcaaaacgtccaagggacgtgggtctcacctgcttgggctgcgtctcccctgcgtggccagtcgctgtgttgttgggccgcgtggaccgaatgccctttctctttttcacaggaattaagtagtgtttaaataatttagttcctgtgcagaactttggaaaatcataacaaatcttgtagatgttcaaaattagtgaactaattttgttgtgttcctaaattcatcaaatagtatgatttgttagtaactaactgtgttgttctagaaatcataaaatcattttagaaatgcttaattagttaaatgtttaacttatggtaattttgtgattaatctaaaatagtaatgaccatgaaacttttagagtagcctagttgtaatattaggatcttactgtaatttttgtagcgtaagactagactatttactagggtagataaatatgccttagatataagcttgaataataaagtaaaattgattaataaatcaagtgcttggtaaagttaacgaattctatatgaaatactttgctggttgttgacagtcgatactttgctcctctctcttattctcttcctccactgggcctagctagttagacaaagaggcccagcaaagcagatcaggcccatctaacagaccaactcttgtttggatcccatccatccatccagcgtccattcgcattcccctgcccgtctcagccaacacccacattgccaccgcagccagacgtccgcatctccacctctgccgctgccgcctaacgtcccctcctccccaagagctgcccgacgtccacacctccagctccgccgccctctgccccctgtcgtcccctcctctgctggcgctgcccgacgtctgcactgcctagggtaccgcctaccccccagacgaggcgtacccctatcgcctaggtgactgtggaattccgccttgtcgaacactgcctaacctcttgttgcaaatgcccacccacctactgaattttgttgcataaaccacccaaatacgcacatacttttggccaattctgctttgagctaggaaagatcaaactagccaagttaaacttgtttaaagatgagacttattcatcatttaatgtgaatctcaaactccatgtcacgttttgggtggtttatgcaattttctcaacagtttaccacccagattggtaaacttcattgtttaatgcaattttctgttttagtattggaaagatggtggccaataaaaggagtggtggtgctatctcaagaagcttaaatgagaataaaagaacctgctttgctgcacgagaggcaaccaagtcatcgctttcaggtctgcttttttgcttctttctttcagcagctttaagtactcaacctcttccttctgtgcttctttctttcagcagctttaagtactcagaattgttctgtatcacatttctttacccag

SEQ ID NO: 4959 - DNA, 8245 bp, Sorghum bicolor
  Intron number 4 from transcript Sb09g020040.1 (locus Sb09g 020040) derived from phytozome v7.0 (chr-ID chromosome_9; pos 49100211 to 49108455)
tcaacatattcggagatcctttcgccgcataccaggtataaaccttagactttcaagatatgacctgttttaccctttttattgatgcttgaaagtggattttcttttttcatttgaatatatgcatttcttagctttgcccccttttctttgaatccactatggcatttgcagcacgttctctttggagcaaaggcaaaatcatgccttgtatatctttttctttgtctactctgattctctcaatgtttgcgtggattattgtcacttgttaggttgttacttgtcttactccctccatacccataaaaaagtcattttagacaaggtttggaggctcccacctcgggcgtctccgtgccccctccgcccccccttccgcccccgccgccaccgcgcccgccgcgccacccctctgagcctgcaccgcccccgcctccaccaccaccgccgcctccacctccaccctctcacctcgcccaacctgtcactggctcctccctgtcgccggatgccccccgtcgacttgttgcggctgcgacgctcgtccgtccgcgactcctcgtcgtgccaccatcgcctgcccggttcgaactccagaacctcctcctccgtgagtgcttctccactgccgtccccgacctgctaaccaagtctccggccccggcctccatctgggtaactcctccctctcgcgatgccaagtttaacaggtttttcattgagaattcgttgtgcttcttgcttgctcctcgtccgggtcgcctgcgtgcgcgctgcgtcgatgtcggcgtcttccaggtgacagtagcgagtagaaacattgctaacgttttggttgtccggggtgttctgcgcattggcttcattgagctcttcctgcacccgtcaatggccgctgcgaggctagcgttcgaacgtctcccccacccaccctctacgctgataactcctgatgggactcaaccggccaactgcccaggtacgagcgaagttattacagttgacctgggtgagagagctctgccatcgacccctgccatgcccaaaatccgctttgggaaggtcccccaagatcttctctcttctcccgccctcactctgccccactcgcgccctctgccccttgctgtggccgctgcgaccggtcttgtccccggttccgcggcagtagctaacgttgccccggctttgaatgctgctaaagtctcgctcccgcgctcgtacctacaggcagtcacctccgccgctcccccaaaacaggcacaggttattacagtcactcgccctgcttccctctcaggctgcttccgctgcttagccaaagaccaccaggtgcaggactgccgtgaccccatacggtgccgctcctgcctttcctccggccaccgcagcccccagtgcaaaatgccgcttcgacgtctcctgcgcgtggcttcccgacgtctcccacccgccgtgcgcaccattcatgcttcaccctccgcacgcctttcgccgtccccccttcccctgcccttgccgcctacgacctcccccctgcccacctcttctgaaacgttttttcctagctcggatgatgagcttgacacgctgctgctggaggccgctgcgtctgctatggcgcctgcgaactgcgtgccgtccacctcctcttcggccgacgttgggaaagcggggtcgccgccttgtcaggacaagcatgttctcccggcttccgtccgcctggtcgaccaggtggccagagtcggggatcagctcccggcgggtgcgccggcttcgctgcctgctgcggtctctgacgcctcagcgcctagcccgctacccctgccgcctacgtcggcagcatcctggccttcgcggggaatcggagccggtccctcattctcttccgaggaggagtttgcgagcggtgatcctgcctccgacgactccagctctgacggcttttcctggcaggaggggagggcttcgcacgcggacgcttgggtctctccagggaggccggagctctgtgagcgcatgctttacgcgttcatagagccgccggtgcaccctgatgaggtcagtgcttgcatccgcgcggccctccttggtgtcgcccctttggtccccgttgacctgcttccctcctcgcatggagcaatgctcctacgcgccacctctgctgcttcgcgagactcgctgcgtctgctcagcccaattgctggggacggtttcaccgtcttcctgcagaagccgcacgagacggccaacaggttcttcagggtgcccacctggcttgcctttgtggccgtcgtggacttccccctggaacactggtacgaggacaagatccgggaatgtttccgtgccttcgatgctgtcgcggaaattgaccccctctgcctctcgggcgagcacttcggtcccctgaggctgctcctagagctcaatgaccgcctcgagctgcccctcgagctgcggatttccgccaggaacggtgctggccgtgacggggcggtcgccaggatcctgcccatcagagtgtggccacgtgagttccaactgaacagcaggggggagctctcgcccttcttcggaccgccgtcgccgccctcacctgggcccagccttggacccccaggccctttcagcacgaaccagcagagccgaccgcagccgtacttcttcagcgccatgtacccacggctgccacgttccgaggcccatggcagcctcccttttgaccccctgtcgtcgggggtcagaggtggtcagggcgcagctcgtcgccacgcagcagctttgatggctgctgccctgctcatcggcggccgggtgcaggtcctgcttcgccatgtccaagctctccaggcgccgatgctaaatgcctcaataagcgccattcaagacgaccccatcgacactgctgctccagctgagttgcggggcacatctaccaagaccatcatcacctaccagcgacgtcccagggtcaaagcctccgccctggcgagccgtgggcgctccaagcatcaggcggtgcctccccggcgcgcaagttcgcggctggcggccaaagcaccgtcgaacttcatcgacatgacgacgcaggctgtgcagcgtaaggccctgctcaactctctgtcaggttgttccaaggagctcaagaagcacatcaaaaaacgggacatcctctcaaggaacaacctgcccctaagtgcgaccgagctgaggaagctcgtctctgcggcacagctagacctcggcgatgggggcgccgcggcggtggactccagcgccaatgcctagcttttctcagggtagatctaccggctgtcccaaagaggactgcaagcccgtgtatctttcgctttctagtctctgtacttcgcttttgaaccttgctgtcgggtgcggaactgtaacgacatgaactccgacaccgaaccaacgttgacttcgttccgctcgttttctgtcatttcctggaatgtgcgtgggttaggcgacccggacaaatgcaacattgtgcgcaatgctttcatcaatgctaatcctgttattctgtgcattcaagagactaagctaagagaagttgatttcttcaaagctaaaacttttctgcctcccggtttcaaatttgttctccagcccagcgacggctcacgcggtggccttctcactgcttgggacccaaacgttttttccctgcaaaaccatttttgtaaaccctacactatcacctgtgagtttgcttgcaacctctccaacaccgatttcactgtgacaaacacgtatggtccttcggaccacaccttttctccccactaccttcaatgcctgctggaactgccgagcctaattcatagtgcttggattctaatcggtgacttcaaccttgttagacaccccagtgacaaaaacaacggccagattaactcttccctaaccagtgctttcaactccacgataaatgacctttgtgtcaacgagatcgacctttcggacaggctttacacctggaccaaccttcaaccctttcccatcctagctcgcctggacagggctttcgccaacaaccatctaaacctccttttccctattgccactctgtcctctctaccaagacccacctcggatcataatccgctgctgctatccctaaatacaaaaattcctaaagctcaattcttcaaatttgaaaaacattggcttcaccaccagaccttccttccttccatccttgagagctggcgttcggtggccgacgtcggcgatgcggccggacagattgtcgcccgtatcaagtcggccagggctaaggcaaaggtttgggctcggtgtaacagggcacccccttctatccttaataactgccgttttatcacccaattattcgacttctttgaagaatttcgaaacctgtcgacacaagaatttcaggttcgcagccaagccaggcatatgctgcagcaacatatcagaatgaaggcagcctactggaagcagcgaagcaaacagaaagttatcagagagggcgactccaacacgagattccatcatgccaatgcaacccaaagactcagaaccaactacatcagagaggttcaggttgacgggcaacaaattgtgaaccacgctggaaaggtggctgctctgacggattacttctcatccatcattggggtccagggaagctgccagccgtttgatctcaacgagctatacgcggggtcttactgcccaagcgcaaacttaactgaacctttctctgccaatgaagcgaagcaagctctgttgtccatgaacatgaatagtgctcctggcccggatggtttcgggccgatgttcttcaaagcggcctgggaaacggttcaaacagacatccacagactgctgtgtgcattccaccagggtgacatcgaccttcagcgactgaatagatctcacatggtcttgatccctaagaaacctggggctgtcgaggtcaatgcgttcaggccgattgcccttcaaaactgctgcctgaaaatcatttccaaggttctgacaacaaggctgcaacttgaaatccctaagctcattgacctaaatcaaactggcttcatcaagggaaggtccatcacggacacttttgtctatgcaatggaattagttcaagtttgccataaaaggaaaatgccggcaattgttctaaagctggactttgcaaaggcttttgacacagtaaattgggagggtctttttcaggtcttgagggcaaggaacttcactgacacttggatccggtggatcaggtgcctgttgtcttcagcgttatctgctgttcttgtcaacgggtcagctggcccctggatcacctgcaagcgtgggctacgacaaggggaccctttatccccatacctgttcttaatcgttgttgaaaccctgcaatgcctcatcagacgctcgcagaggatcaagcacccaactgagcctgatctcccttgtgcagtgctacagtacgctgatgacacacttctcgtgttcaaaggagacgtggaaggtgcctctgctgtcagggaaattctagactctttcgcagctgccactggtctgcacatcaactacagcaagagcactctagtgccgattcacatggcggaacaggaagttagtgtctgtgttcaagcgatcgggtgctcgagggggggtttcccccaaacgtaccttggattgccgctgtcagtaagcaaattgccacttaccgccttcaccccctacatccaaaaaactgacagaaggctaagctcatggcaggcattccttctaaacaagatgggcagagccgtgctaattaactctgtactcgattcacagctggtatacatcatgggctcgctacaaatcccttctggggtagtttctctaatggataaaaccaggaaagcttttctctgggctggagacaaatcggggaaggtgcctcctgcctcctgccttgtcgcctggactaatgtgtgcaacccgaaagagcaaggtggtcttgggatcagagacattggcatccaaaacatttgcttgctgctcaaactcctccataggcttcactgtccccagtcgtcagcctggtcatcttgggtcaagaataagatctccttggcaaacttgcaaggagacgtccatggtgaccactggactacacttaggcagcttctgcctctctaccaagctatcaccacggcgagcgtggggaacggtgagtcgacttccttctggcatgatgtatggctggaagatgatgcgcttgcagatgtatacccggctctcttcagtcactgcaaacttcagtcggcctccgtcaaagaaatcattaatgttggcattcagaacaccatggttcctcggctaacaacagctgctcaacaagaactgcgggatgcccaggaagcgataagcagtctgcacctatcagaccaaagtgatgccaggaaatcggtgttcgaaagacaagaatgcagcctggacagcggtgccatttacaagatgatcaaggcaaaaacccaaccctctagccccaaggccaaattcatctgggaatcatacgctcctccacgcgtccaactcttcatgtggctgttaactaggggcaggatccaatgcagaacggttctcttctccaaaaccgtggttgacgacccgacttgtgaaatttgtcgggcttctgaagaatctgtagatcacatcgtttgtgggtgcaacctcgctggtcagctgtggcagaggctgcagatacaagtaaaccccggggacctggacatcattcactcatggtctcccccaccaaccatcccgcgagaggctttctcctccttcctggcaatttgctgctggcaactatggaaagcaagaaacgctttcatcttcagaacggatactaccagcgttcaagcactactcctgcagtgcaaaaacgccgcgaaccagtgggccttcagacttccggcatccaagaggcaaatcacacaggcttgggcactcgccttccagcaggcgaggcagggtgaaggttaacagtcttcactagtctaaacgatgtttctttcttcctctgtgctaagtgaccctagtgtacgcctgtccaggtgcaccttgtacaaaagatctatgtaaactaatttagaggcgttttggcccgtgagtaatacaaaattcaggtggggagcgacacccccccgttgaccgtcaaaaaaaaaaaacattggaaatataaatcatgaataacttttaagttgttgaatttggaaatatgaaaaccatatgaatagatttgtcttgaaaaggtgctctcgtgggtgactggttactggagcttgctctcagttaggagacccaggttcaagccctgcatcctcttaattgaaaagcgggggtgcaatctgctccttcccgtcaagtttttttagatttgtcttgaaaaatactttcataaaagtatatatataccactttttgataaatatttttataaaaacaaggagtcaaagtgaggctttggagaccgtgtcgttatcctaaacgacttcttttatgggtatggagggagtatgctttagtgcgctataaactctctaccatgtatgttcagcttgcatgcttaattacaaataatgcatgaatctgtatttagctcattgttattccatatcagttaacggatcagctaatcagctagtgaaaattgcttctgtgccagataacaactcattctgccacatgataacttattctcccttctataccatcagccattactttgcaaaaaattcataccttccaagttattgccatcacttcactattagtttagctattaagtaatacatacaggtcatttttacctccctcatcatttcccagaaatcagaacaaaaaataagaaaggcctcactatgatgccacaatgtcattcttctctctcgcacatacacttggaccccatcagtaatatagccttcttatatttccccagaaagtatgatgagtggcaaaataaataaatgatctttgcatactttcattgaccattaatttaacaaaatgattgtatggaggatatggattatttgaaatcatggccaataagggagcatggcttatttggtagtagattgtggactgaggagtttatcagtggcatgaaagtattttatttttcaaagaaactaacatttgaaccttatcaggtgtttcactctggtataccaattactcttgttcc

SEQ ID NO: 4960 - DNA, 1392 bp, Sorghum bicolor
  Intron number 1 from transcript Sb01g012330.1 (locus Sb01g 012330) derived from phytozome v7.0 (chr-ID chromosome_1; pos 11405384 to 11406775)
aggaggtaaggatgttgctctaaacctctcttatgtatcaatcaatatatctgcatcgataagtgtgttttcatatgatgaacttcaactcttatacctgacaagtggcacgaaattcaaatctttagctgacaactgccaacttgaaaaatggagtgtaacattgctagttttagatgatatatgatgctagttttgagggattgtctacgtgagtgccattgttaattaaatgttcatggtactgcatatgatccatttacttgtggacaacactcctttggtaggttcctatgtgtatcgatcattcagtcttaattcatttatggactatgttcctttggtaggttcctatgtgtataaatgttaattcatttattttcttttatatgtccacctgtttgcttctgtgccattttacacatgaagtccagtgccatccatcaatctgtgtacactctcatttttgtcattcattgctgttgagtcctggatgagatgaataattgttggtgtcttattccaattttaaaaccctggtatcatattgattgtatatttgtttttttttctggtgcatggaagcaaatcttgtgcaaggttataaaaatatgacaccatttgcatctggtgaaggtgcattgttctaaatgaaatattattctgtctgtttgtaattatgttattgctagaatgtataattcgaggtgttctgggtaggatgtgtttatgttgaactctttcctgcttgatcttctacatagctgatttaccctcggcctgctattttcatgccaatatttttatttcttaatatgtatcattgttgcactgtgtatcatcgaggtttgacacttgtctttttttatgtattatcacctagttatttattcattgttgcactgtgtatcatcgaggtttgacacttgtcttttttatgtattatcacctagttatttattcttgtaaatgcttcgacactccataattatagtttagtcactgagcactcacagttcttgggctgtgagtatgtctatcaccttgattttgttttgacatatcggtaggtgctagtaacatcatgctttgtttgttgttcctctaaacatggtagtgttgaactcttgatgatgctatgtttgcactttgcagtgtgagctggccttgttttacctttaaaattgtaactgccatggcctcgcaaaccattctatgtagctcattcttggacgtccctaccatcatcttgagtgacctaaacaagttggattgagcagtctattttgctgtttgaaacttgattttgtggccaaagaatttggtgaacctaattctgcaataatacatttgaccatttccaggctgaagacgaagacggtgaagctgagg

SEQ ID NO: 4961 - DNA, 1369 bp, Sorghum bicolor
  Intron number 1 from transcript Sb10g001830.1 (locus Sb10g 001830) derived from phytozome v7.0 (chr-ID chromosome_10; pos 1519151 to 1520519)
tgcggcggaacgcgctctaccgcccggcgctcaaggtccagcccttcctttgtgtatctcatttcgtgatctcggtttgggcctcatgaaatagtgatgctgtgtgtgctcctgttgctagatctgatcatgggagtaggatttggagtggggacaaattctgtgagatgtttgctgatatgtgctagtgcggtgtgactcattgacaagatgaaatttcttttcttccaaaaatgtctctggacttggaatgcttaatttgattttggtagttggagtatgcaaagaaatatttcatctgattgctagattgctagtggtggggaaaatgtgaccggaataggcttgaacattgggaaccatactccaggtcaccattgtttgttttatcattgtgaaatcagtacagttgcatgccatgcaaaatagttctcagctattttttggatgtcatatgtgaaattcttactgccttctctgacgtttggatgtcatgtgtacttagaattttaggtggacttgtatagctggttattgagagctaaaaactgttagattggcacaacacatggattagttcatattccttgttatgcaattactcccattttgttgttcaataaagctgcataacttgtggcactggtcttttcattgctatggttagctacttagctgtactgattatattttatctgatattttatccaatgacagacttaggcactagtttcttgctgttcactgttcaaatcagctcactctttttctttccacttggtacattgttttcctaatgaccatggttgcatgctcagatttcttttgtgtctcataggaatcatgctattcaacttaatcaaaagtgctttccatatgtttggcttctcttcaataaattatcagtatgtcaggtttttctgcatcatttcatcttgtcagctttttgtgatgtttgctgatctttgaagaagtttattcgttgtctaatgctgcaactctaatattcccttaatgaagcttaagatgctatgtaaatggtccttttctaaatctagcatcccccagattttttatgtgctttgcgcactcagggtgaaccttttctgttttttttttattgtgcaactaaagaacctttagctaactgggaaactgacatttctagagatgctatattttttgcctgaaattttgttgatattaaatatgatgtgatcattggagttaatgttcaatgtggacattcagatcgaaatcattaagtaattttgaaacttggttatttgcttgtgattgttctgaatttgatcgacagggtttacatggatcctctctcttttgtttattgatgtagctttctgaagtt

SEQ ID NO: 4962 - DNA, 1435 bp, Sorghum bicolor
  Intron number 5 from transcript Sb09g026980.1 (locus Sb09g 026980) derived from phytozome v7.0 (chr-ID chromosome_9; pos 56118160 to 56119594)
ccaggttagttacccatctccaacatccactattcatttttgtagatgaacaggcaagaaattccaaaaaattgattttcaaaagcaagatctatactgtataggggagtgtcggaatgcatcaataatccagtacagacaaaaattcagaacaagatcttttggaagagaaaactttcaatttagcagaatgatgcattatagtttatatacatgtctaaatttgatcattccaattttggttttagttaatatgatcaaggtcctttcgttggacaacagaatgcaatggatctgcatatctttccaacagagtctgtgcttgtgctgcacttttgccctgaaatttgctgtctagctctgccactaatagttcactctattttcttccagtggatgggttgagtagattcaattcctatatgcaatgtgaatggtgcatttctgtgttatagtatagcataccggagttatcctaggtgatcagatatattattacaatctgaaaaaggagatatgatcatatgatgtatagcgaagtaaaaaattgcaatgcacagcttttaaagatctatataactgcctatcaaggacaaatctagtagccattatactgttcctcactatctatttgatcaatatcagacaccataaagttcctttggttcatgtaattttggaaggtcacatttcttgaccactgtggaatgtccaattttttactatctactgcaaaaagtttcactttgtattataccaacgacagtcttacatttctagcttgtaccacttaatttttcagtaatatctaggcctatattagtgtcatgggcatactttagatggtcctgaagcctgaacccaagcagtgttactactaacatatgagatactagaaactaagatttcttactcaacaaaaggagatacaaagccatccttatatatatgggacaacttgaccttaaggaactaatctctgaaattaaagaagcaaaccaacataatattatttctgaataaaaacaaatcataaggctactggaacagtaaacatgcaggaccattagaagtaccaccgtatcataattaaatctgagaaactgtcagtagaaaatgtatgattattttttctgcaggagtagctgtttgcctaagtaatatgaatccagattgcaggcctccatcagttcaaattgctgttgttctaaaaatcctaatgggttactacttgtaatatatgtttgaactttatggagaatttccttgctgcattgtcattatgcttgtctagtacatctcagaagtacactgcacaattttcagatgaaatatttagctgaaatcatgtgcttgacctgtgaaatattttttccatgatattccagactaaccttttctctactgatctattttcgtgtcattataggttctg

SEQ ID NO: 4963 - DNA, 259 bp, Sorghum bicolor
  Intron number 3 from transcript Sb06g017660.1 (locus Sb06g 017660) derived from phytozome v7.0 (chr-ID chromosome_6; pos 47049823 to 47050081 reverse strand)
acgcgtgaaattgatttgcttcaaaagggattcaggtaaagtaactgtgtttcacgtatactgtataagcgctggagaggatgcagcttcatagttatatttatgttccatcaacttaccagtatgagctgatgggtcatgttgaactaccaagaatcctcaaatcacaagaaagtgccagactattccagtgtttggtaaacaattatagtattgattgcaggactcatgacagatctaagcacatccatgcaggtac

SEQ ID NO: 4964 - DNA, 4633 bp, Sorghum bicolor
  Intron number 1 from transcript Sb01g041890.1 (locus Sb01g 041890) derived from phytozome v7.0 (chr-ID chromosome_1; pos 65113989 to 65118621)
gccgtcttctcgccaaacccccacatctcctccaggtcaggcttccatcaacctgctgtcatctgatttccaatttggtgcgcttcactgttagcttgatgcgtagggagtaggaatcgatttggattcgcgctgtaaagattgtgctcatatcgtcctgtggatctaggcaggtccgcatgggccttgattgcatcttttctgctttgttattagttccggttcacgggatgtatatgattagttagaattatacgtaagaaacatagaacacttgtcaattcagggcttaattggacagacagaagatgaccacgcaggcataatctcgtgcaaaaaaatgttactactataaaacctatatttgggttactttgaaggtctgaattgttgagaaacgttggcatgaatttctctctctaagtactactatcaatctctatgtcatgttagattgctagctgggagcttgctatgggtataagataaaggacagggttactgcttattcagacaatacaatagctgctgtgcttgttgacatttgagtcgacatatgaattgtttcttgagtgcaactctcactaacttaaatactgttaaaccatgcgcgttgtttgatggcttcttcagttgctgaagaaatggaattcttgaacctaaaaagaaataggaacaaaatagacaccgccaccaccgtttggaaagaactctgtgtaggcttgctctttgtcaaactccaattgagccagcttacattgattcaagtagacaggtagggcgctaaggttagttaggccagccaactggcctgtctgcccaaagctcctggtttaagctgcaccaagcctgttgatcacaggttgggtgctcaatttctccaggtctgacttggaccacttcacttagatccatagacccagaatatattgtatgttggtattcctgtataggttagcactaataatctgcatccattttaagtaaataaatgtaacagaggattttctaagatgacacaggatgtcatgttggaaacttgaatcaacatttcaagggcattgctgtacccattgttggtaggggtaaaacttctctgttcctgcaatgtgacagcatttgtcaggtcgacaccttgctgttgtgcctcaccttttccatgcatgcaaatctgtggatattggcatgcatggataagaagttatggtaagctacgctaagtctatgatcttgctagataagcaaccatgatgccacatgaggccacctaggttgaatggaaaaacaccaatgtcatgctcacacaactcctagggagcaccctttaaggtgaaatggaaaacaggagggttcctcacttctccacatttagtcaaatgaataaggttttctaatgctgtttcaactgtcaaataatgggaaaaagaacagaactaaaggagcgtcatttttcatgttgacagaaatgtaatggaactcagtgtcagacatatgaacatgtgacgaaagactaagcaaaatgtcctgctagtaataaaattccctttatgagcaaagctagggcaacgtttttctccccttctacttgagttctctcagtaaatatgtactccatctgttccaaaatgtagggtttttttttcaacgtgtcttgtatgttcttgattatacacagaattctgcccttcatttctgaactctgagcatacagggtaacgaggccagcaaaacctacttctcattcctgcatgtctttttttgaaggccaattatgaatgttcccttgttttttttcaactttgttattttaccctcgttttttaatctgaagccaccattcacccctgtttaggctctgttagctaaaggctgcatgaatgaattgaagaaaaataaataataaaaaggttaaaagacgacactaacccctgaccttatcctaaccctcccggtttccgccgatggttgattaagcgtgtgcaacttgttaaggttttcttagatttgaaatatttgcaaattttgctgtaaaaattctttcaaaatgctgtccagatatttgatgccaaaatagaggtcaaatcaaagattagtacaaaaacttagcggcaaattcacatgggacaactagtctctttttttcccctaaactgacacaactcctctaaacggaacagtggtaaactctgtctttgtttttaaaaagcagaggcgaaaatacatagttaaataaatgagggcaaatccacaattagactttaaaacaggggtaagaacacaagagccctagtagtaaaagcccattcacgtcaacctgagtaacaccaaatgatctgcatttaacacattttcttgcatttgtgtggatttgcatgtcttgatgtcctcggtgctagactactaaaccatccaattaatcactcaccgaaagtaaactatttttatttagtaatttagtatcataaataacttctgcattgtttgcacattaatctggatagtggaaaatgtcattgacataaacaattatcccctcctgctcctcgcttttttcatggtgtcattgtgtggtttttcaatgtagaatatgttgtttgactgcgtatcagtctgtatactctacgtttattatgctcattgtgacagtgatataccaaatatctgctcactacatgtgggcaatagggaagccagtgaacaatgttaaaacggtgctttttcaacactgcaatgtctgatgtgaaacttatttgtctatgtctgggaacatatgtacttagtgagtgaagcatcgttaatttctctctatgcagtgttgttacattcgtcacagatgagtcttcagttacatgctagggaaattttgatgtgggacattgaacaaacatgatattgaattggtcagttcacactgatattgccaaaattttgctaggtggcattatgaaatcacggtcatttgtcgtaggacaccgcaacgaattttttccctcagatctaaggagagaaaagttagggaagatgtcctgtttgccttgtcttcatctcctttctgtcactcttatcatgctgtagtccctccaccacttagcttgcgtgcgagccactgcttgtgtgactaacctgtgaactataaaaaatacttgtgatgagacaagcatcaagctgagttgatcttaccccaggtccaaacattagcaaatagcttgagtagagcatcacatttatgagctgcaactgcaagttgcaacattatctggaatttggaaaacagctggtgattgagctccactaatctcctgcaaagttaccaacccacatgctttcatttttcaaatgagcctacggcggtgcaggtctcagtcaacttcatttaggtgttctccatgtccgctgtagccagcggagaccagggcgccatagtggcctcaatgcgcaatggcttcgcgagggtgctgatgctgtactacctagtgatccgctgcatcatgaatgtgagccccaaggagccactacaccggccagggtgtttcgtgtaggctgccgtgaactgtgccttggccaacgtgaactacatgtctacatcagcagctcatccccaaccccaacccaagggagttcgatgggtagggtgcggtgcagtttctcaaggcggcgggtgagatggagcaaaggctgccagcaccatccacgatggtgtcagaagagcatgacaaatatgacgaagacaagggcaaaaaggacattttctatatcttttcactccttggatctgagaaattaataaaataattattgtgatgtcttacgttcatggtagtttggcgttagcgatgtgaactggccaatatcatgttcgatgtcccacaacaaaatttccttacctgctacgatatatgctaagcaatcgtcttaagtatccctttctacaacttttgcagcacgctagcattcttcatagaagagtctggtcactactgcattgatggccacaagtcataagtcactactgcattgatccttgtaaccagcagagttagcttattttattgatgatgaatttctttgttttttattataacaaaggaatacattgtatcatcagctattcagcttccctgtcctgaagcatattgcatttggtagcttccgaaacaaatgtctgaacttagctctttttcgttgtaaaataatatatctgcttcctgatgtagcgtcaagactatgtgttcgaggaaaaaaatgttttgccaagtgatatcacaagaaagaatatgtttaattttctccattgcattttataaatgtggcatcttttaaatatctatttggatcaactgtccctaaatgtacaaatgtaatagaaagatgatggttaatgatagagtatacttaacatcaattagatttagtatttcctataaaatccttgatttaatctttgcaaatgacctaatgtaaatgttttggttagtgtaaaagcaatttatgttggttgttttaatcctgtttgtgcctgagctgtggagctaagtgtaattgctcttgcatttagtcagcttttaatcagtgttacttaaattctttcttctttttctttttcacaggagagatctcaaggttgctctcatct

SEQ ID NO: 4965 - DNA, 2564 bp, Sorghum bicolor
  Intron number 1 from transcript Sb10g023170.1 (locus Sb10g 023170) derived from phytozome v7.0 (chr-ID chromosome_10; pos 51654249 to 51656812 reverse strand)
gccgccgccaaagggagaggagcatcgggcaggcacacacgcgagcgagtgcatcatcaggaacgagagcaagtgggcctttcacacgtgagctgagtgggcttccgcaggccgaatgtgagagagacagacgaaaaatggcccagacaaaaaatgaggctgaaatattgtctttttattattaaagatagattatgtatagatattagctatcgcatagcaacgtacgagacaataatatagcccttccaaccattagcgcttcctaaagaaggagcgttcatacttcacaccactcctaatttgaaacaaaaccatcaattatatttaagctttcttttagttcatggatcaaaccataaactcacatcttgagtgatttgttatctagatcggtatgaatagatatactcccaagctatatgtatataccagtgcaattcttatagaggggcaaaaaaacatgaatagtcaaaatagatctccctcgtaatcatctatggacaaacagatctctaatattcggcaacgaaactcctagctgacttatatgaaagattagaattacaatgtggggagaaacaaggatagcattccctggtcttctttttttttaataactttgtttctcccgttgcaacgcactaagacaccaaaagaatctctcaaggttatatttaaatttgatacaaattaaataagatattgtcatatttatattatggacatcatagacatcgtaaaataaattacaaatttcaagatttatagaaaggataaattataaatagaaattatatcattaccacggtccctttccattaaggtttgaaagcttgtttttcatccgttgcaacgcacgggcatgttttgctagttattatgtaaatgcaggtgctgttttctgtttatcctgtatttgttgcattgtttgggtacccccccccccccaacccacccacccacacgcacattagcaccacagaatgcgcttaacatgtttctcttgaagaaatagtttgctcgaccttgctatgcgcagtaaataccgtccagaacagcacatatataggttcttacaaaataacaaattggaatgaccagaagcggtaatgacttaccctggatcatctaatattaaattcagaaactacctggttaccttcattttgaaatatactatgtttacgacaagctaattagttatttttaaactgattagcttgtcctaaacttcatatatttaaaaacgttaggagtattacaataagcattttttgcattgcagctatacttttctcacctactttaaaattcaggaccacctactgcatgtgggttctacgtttaattggtaattatggcagaaatcaattccttgaaattgaatcttgaaacaaagaagaaccaagcaaccatgctccaaattgcacagatagatgtgcacttgcaaattgcttgtctggagtctgcagcaaaagaccaacaccacaataggcagcttcccaaaaggagtacatataagtctgttagacctggttggcccttgttagagttagtttaatactatttgtagtaatactatttagagttaggttgtggcactggagtttcttcaactgctattcttttttatcgtaaaaccaaatgcttttggcaacgaagctgaaaatatatgttcatctccaatagtttggtaaaactcacttgccaaattttgtgatttgacaagttgctaaaacatatggcaagtgagattttcttccgtctccaacagtttgtcaattgggcttgataaatttaaaaagaagacccacaaccaacaaccaaatcaactaatctgctggatagcaagttaacaaatatgggcgcatggtgctgctggatggcaagttgccaaaagatggcaacccatttaccaaactgttggagtgattattttctacttttgccaaataaacaagaaatagcaagttcatttagaaaactgttggagatgctcggaacttagagtggacctttatatgcttttatcattcatttatcactatttggaaatgtagagttaactggaaaataagtaaataaaacaaaaataaaatggaaggccttggtaagaatatgtatgtttggtctcagtatttggactgtcacggtactatctgagtatctgatcttacatgttgcactgtatcagcttgattttgattttttttcttttggttcttacatgtggaattttcactttttatgttaataaaaaatcagaactttctcatgcctgagctcgtaccatctataccttaatatagatttacttatattattatcatgtttagggtttagggaggcttgcctcaattttccccttccctagaccccactcatgtgggagcctccagcactgggtctgcccttttttttagaagttacatatatatgctaacttggttactaaaattgtcctgtagccttttctttggtctagctcttcagaatgcgttctttccttttactatcatttgttctgcaggtaactgagttgcgttggaaggagggttctc

SEQ ID NO: 4966 - DNA, 1255 bp, Sorghum bicolor
  Intron number 5 from transcript Sb02g009870.1 (locus Sb02g 009870) derived from phytozome v7.0 (chr-ID chromosome_2; pos 14394673 to 14395927 reverse strand)
gagataaccagttgaggttctgtcttttgtgccttgtaagtaatccaatttattcatgtttacatatgcttagcaaacccatgcattctctttcctaatttaaggtatactttagtttttttagtaatccctggcgactcttgatctcttggactcctagaagcccttattggtgtagaatctcattgtaaaattataacttctcctttttacaaaatacatggatgatgcaactttccaagcaaaagttgttggatgggatttctatatttgttacagaaaagactgtcacttaatgtcttctgctacaaccattgcagctaaagtgaagcaactaaaacaccgaagattgtgtgatgtgccattttcaccttgtcatataagcattgttgccacactgaaaattgcccatttgccccaataactcttgtcatcaacacaccccaccccaccacactgcacagtccccactccccattttcactattttcacataaactagcatgagcagcctaataaatatatttttttttactttactttagcaactgcaagttttattattgttgatggtaaatttacttttggtttagttgagcaaaacaatgttgttgtctgactgcttctgttccatgttatccttagcagcaagtgtgactatgcctgtggcatttgctttttctgataatgctacatcttattgaccatttggttttctaatcctattcatagcataactttcctgtactgcaccatctaggtatctactaagagaatctaacggtctaaccgctaatgttagatcaaatggcttattaaacatgacaagttttttaggcagggcaaatactgtttcaaaatgaaatcagtaaagttgggcaaggtaatgtgtccctgagttttctaggcttttgcggtcacattgtgagttaggttggtcttgggtctcatattcttaggagtcaaggatgaaatagtacgaaggaaaaaaaaatctgtctactcattgtccttatcaacttttcaagttcatgccatagtattgatgcagcctaggtgcgggaatatgggttgaagtattaatagtagtgcccacatgtcttccatttggcttatacttttgattgctttggtcggtgcagaagctcagtacactgcaatccaacctctctgttttatatcattttattgtttttcttctaacccagttatccctttaggctgcattggaggctccaagagttctcaatctcaa

SEQ ID NO: 4967 - DNA, 2205 bp, Sorghum bicolor
  Intron number 1 from transcript Sb01g046015.1 (locus Sb01g 046015) derived from phytozome v7.0 (chr-ID chromosome_1; pos 69086998 to 69089202 reverse strand)
ggcgtgcggggggtatccgcgtccgcgccccactggtgagctcagctccactcccacctttcttggcctcgagtagcaaccgcggctcctagctgcgagagaggtaggttagctcagagatggtggttcctgtgccaaaggcgccacctttggcttgaggcggaggcctttcttctcgaatgaatctggcgttttcgtgcgtaaggcttggaggattgcaggctttggggatggttggaacttggatgtctcgatctgggtccttaaggcttggttttggagtctagatccagttatccgtggagtgtttggtaatattttctggcttagcactagaagtcttctaggggttagtttgctagctgtttttgccttgagtaatgttagctgcggtgtggatatgccacttgttattcaggaacaatgttacagggaatgagtatcaccagaaatctactgcattttattattggccccacttgccacgaagtcatcctcagtttagtaacaatggactgagcttagaaaaattttagctacaagctaagatagtctcattgccctgcatatactctagactgctcatgagccacagacagaaggcatactatcaaagaataagtcaatcatatggaatgagtaatgaatgatagcaagagacatttcatataatcatatgcgactgaaattatagagctaatcattacagcattatattttgcatacgcaccttatttagcaacgttaccttaactggtaacactaatatagcaatgctagtacataattagcatgcataagcataactgttgatggaaacataaggggcatcaaaatggatattattaggtgtctggaattccagtagccttgatattggtaaaaattgttggggtacttagttgcactgttgttcctcttaacctttttacatatgttttgaaagctctagagtaaagcaccccaaacgttcatgcattaaatgacaatagatagtatagatgaaaaaatgatcgtcagcggcttggacaaattgattttttacttaataccatcagaactaaaacatggaattatggaaagtgaatcatggcacattggatgcaggaggataagtcctatatctcctgtatctatttttggtttctgcaagcaagagaggggggagatctccgttttttaggcaaagttgtgattcattgcagttttactcaatcttgagattgaattagctcacagatcaaaggcatttaccaacagaactcatgtccttcgatcactagtgagatttgcttgcatgtctacttctctatcctcaagtgctgctcttattttccctcagtgcgatgtttttaggcctgtagtcagggttattgtttcaggaggccgtaccattgattcagtgttatcatgttcctctcaatctagcatttcgctttttagcaattgagtttctgtgatttgagtttggatcttggtcctcaaggtttgtttctggagtttgggttcaaacttgttgtagaggtgattagatcacccctctttcatagagatgtttctagaaggtgctacttttgtaatttgcagctaatttatactggaattcgatatcagtatgtgagcaccatttagcagttagcacagcgccatctgttttcacatgaaaatgttatgtgcctaggaatatttgatgcatctgttaatgaggatggagtggaggtacttagcaaattttactaatataattttatcaaatgggattgtaagcaaaacaaaccctagtgtaatttcagatctgctgtacttgtaaagtttttaattgtagaaccacttttttttctttatgaggagttcagtggagtaaggatatacccagattttgaactactaaatcaacttacagttatcaaatagtttgtcccaatttgtatgctgaatgatctgttcccttgattttgtattttgaaactcccaagatagatagtttcaaacatagttagtcttccagcactaattgtctgaatctcatctgcataacattttactagtaggtggacaaaaaaatcattaatttcataccccagctaaaagtgtggttgcttcgttttaatctccttcttttcatgttcaggtcaatataagtgttctaacttgattggtcaatgtttctgcaggtagagtctgtctcctgctactgcagggtag

SEQ ID NO: 4968 - DNA, 8706 bp, Sorghum bicolor
  Intron number 10 from transcript Sb01g049840.1 (locus Sb01 g049840) derived from phytozome v7.0 (chr-ID chromosome_1; pos 72833538 to 72842243)
cccaagaaaaccaatccacttctttccaggtaaaatctttcatgagaacataacctttcccttgtagaaattgttaagagtgaatgtaaatgaacagtgaacaacttatgtctttcattgatctcatagaatatatacaagtgaagggggcatgtccgtacggacacaaccgttcagtttacagaaccaccgaagggacatgcctcttcagggattactaactgctaatcctatgattaactgctaatccacttctctaatcttgttgtatcaacggatgagatcattagtgataaggtgtctattcaccaacagacaccgtttcgcaacactcccccttgatcgaatcttcctttgagatcaatgtagctgtaagcttagattcctcgaaaaaccatgtgggaaaaatctgaggaatatgtatgtatggatatgctgtaaaactcctttaaacctttataggaaaacaaggagaaggtagcatatatttgtgtgatttaaacaaaccactatgtcattagtattccaattaaaaaccccagtggggaaaaatattggagatacgacataaagataactcctctaaaaaccgtttaggaaaaaagtgaggagccatattaagagatatgtcgctaaaactcctataaaaacccagtgggaaaatcaggagaaaaatatgacgacatactataagtattgcctcttgaaataactctcatgaaaaacctttttcaaggaaaaaccatggatgagttgggagggcaatatgtgtctttgatatttcccacaaaaaccccggtggggaaaatagaaaatatgacacatgcttatgttaatattacctcattaaaaactttaacaagaaaccttttgagtaaaacttgtgaaagaaaagagtataatatgatgctggtacaggtggcatctaggagatgtctcctcctgattctggcaaatctcgaagtcgcctcataccaattccatgtaccaatttttgaaacacagaagttggtaaggacttagtaaataggtcagcgagattatcacatgacttgatttgcaagatgtttatttccccactttcttgtaattcatggggataaaacaatttaggaacaatatgcttagtgatattgctctttatgtaacctgtttgcatctgtgtaacacaagcggaattatcttcatagataattgttggtgattcaattgaaccaataccacatgtctgttgtatgtggttaatcattctgcgaagccacacacattctcgtgatgcctcgtataaagcaataatttcagaatgattagtagaggtggctgttagagtctgcttagaagacttccatgaaatagctgtacctccatgtaggaatacaaatcctgtttgggattttccgttatgaggatcagataagtaaccagcatctgtatagccaatcatactggaatcatgatttttcttgaagaataaaccaagatcctttgtgccattaaggtatctgaggatacactttgctcccgtccaatgacggtgagtcgggtccgcactatgcctagctagtaagttcactgcaaatgcgatatcaggcctggtgcaatttgcaagatacataagtgcgccaataacactgagatatgggatttctggtcccaacgtcttctccccaacatcccgtggtctaaatggatctttccctaattctaaggaacgaacaaccatcggggttttattagggtatgatttatccatattgaatttctccaatattttctggatataggctgattgatgcactaaaatccctaaaggacggtgctcaatttgtaagcctaggcaatatttggtctttcccaaatccttcatctcgaattccgtctttagatgtttgcgtgcttcttctatatcctttggactgccaatgatatttaaatcatcaacatatacagatataatacaaaatcccgtttgagatttcttaatgaaaacacatgggcaatcatcattattggtgtatcctttgtttaaaaggaattcactcagtcggttgtaccacattcgtcccgactgcttcaagccatataatgacttttgtagttttacacaatacatgttacgatttgcgtttggattcggaatttggattccatcgggaaccttcatatatatgtccgaatcaagtgacccatataaatatgctgtcaccacatccatcaactgcatagatagatgattttgaactgccaatgatattaagtatcggaaagtaattccactcattactggagaataagtttcattataatcaatgccgggtctctgcgtgaacccttgtgctactagccttgctttatatctcaccacctcattgttctcattccgtttccggacgaaaacccatttaaagcctacaggaaagactttggagggtgtgggtatagcttttgtgaatacccctcttttagtgagcgaggctatctcagctttaattgcttctttccattgagcccagtctgagcgctttttgcactctgccatggtcttaggatctggatcattgagaaagatttctgcaattgctgcggagaaatatgtgtctattcgtatgattctccagaatcaatataattgatggaaatttcttttaccccattatttgactcaacatttcccaaaactatggagtcagggtgttccgatgtcccaggatcagaatttggatgcaccgttgatccgggttgtggatttggtcctggtgttggatttttatccactattgggtgtctaccaacttgaggttggcttggatttactgatttggaggatttacctctcgatttccttggacgcttacttggagcattatccttaggagcggccgtacttctccccctcttctttggaagtgggagttgaatggtttttattggtacctccactctttcgggcgcattgcgagcaggataagaggatttagtgacacccttataatcagtaaatgcttctggcaggttatttgcaatatgttgcaagtttatgattttctgaacttgttgttcagtttcttgagtacgtggatctgagggggaattgccttgggcattccagttgatttcctggcattcactttggtacttgaaatctccccctaatgctgggaaatggtcctcattgaatatgcagtcagcataccgggccgtgaataagtcctctgtaagaggctcgaggtatttgataatcgatggggattgatatcccacatagataccaagtttcctatgtggacccatagaggtacgcttaggtagtgagatcggtacgtatacagcgcaaccgaattttcgcagatgggaaatatttggcatattcccacgtactaattgcaatggggagacaacatggtatgcagttggacgcaattgaattaagtcagcagcgtgtaagactgcatgaccccaacatgaagttggtagattgcaattttgtattagtggtcttgcaatgagtttaattcttttaataagagattctgctaaaccattttgtgtatggacatatgggacagagtgctgaacttgaattcctaaagccatacaataatcattgaaagcctttgaggaaaattcagcagcattgtccattcgaattgattgaatttgatgttcaggattatgtgctctaagtttaataagttgagcaataatttttgcgaaagcatggttacgtgtggataaaagacacacatgagaccatctagtagatgcgtctattagaaccataaaatacctgaacggtccagatgttggttgtatagggccacaaatatctccttgaatgcgttcaagaaattttagtggctcattttggatcttgacgggcgatggacgcaagatcaatttacctgtagcgcatgaagtgcacataaaatctgaagatttcggaaatttagcagtatttaactcatgaccatttgaattgctgataattttccgcatcatccctataccaggatgaccaaggcgatcatgccaagttttgaatgcatcaacattctggaaaattaccttgtacgcaacatgtggtacgggtttgatgtatgtgtagtacaatccggacggaaaagagggaattttctcaacaatttgtttgccatatccattgtttttagtaacaaggagaatttcctcattattgtcatcaagggtttctatatggaaaccattttgacggatatctctataacttaataaggtacgctttgaatcgggatacaataatgcatcctcaattgtaatttgggtacccatagggagtatgataatggcacgacctgaaccaattatcgtagcatcgcgcccagcgattgtcaaaacatttccttgtcttttagtaagagtttggaaatattttgtttccctaagaatagaattagtggtaccgctgtccactaggcataattcctcttccatcagatcgacccccgtagaaactatatataaataaagaatttgatataaaactctctgataatatatagaatacatactttatttattgaatatcaaatgtgtacaatacatttattggatatccaaactaagtagtgatgacatcattaaatatttacaacacataggacataaattgtgtttattattacaatcactagaacataaagacattagaatctaagggattgggagcctagtgaaagtctccaaatatgtcgttggatgcatattccacgatcatattccctgtatcagcaagatcctcgcctcctcgtatgatgttgttgcttggttcctcaggaacttgttgcgaacaaccagcctcttccctggtggtgtcaggtcgaagattgaaatgggcttcatacttctgtcctggtgtagctcgtccacgacccacagactttaagtaaagatcaactagatgacttggggtacgacatttctttgtagtatggttataacaaccacatttttgacacacaggtttatcatccctgttcttggaaatgttcttaccctttttgtaaggtttacctttgttggagtcacctttttggggcttcttattgcgtctgcgcttgtttttacccttcttggagtttccttgttgatagttcttttcagatctatcattagacatgggtttattctgagtatatgcatgtacttcaggcaatggagcagacccaacagggcgttgctgattattccaaaccataagttcagaatgtttttcggcctcaagtaaagtttggataagctctgaataaacttggaaacgtctttcacggtattgttgttgaagaatcctttcagagggaagcatagtagacaaagtcttttctatcttatccgcatctgtaggttctttctcgcagaattgcaattttgagcaaatcctatggacagcatgattgtagtcactcacagttttgaaatcctgtaagcgaagttgcgtccactcatagttggccgcgggcaagacaagtgccttttgctgttcatagcgttgcttaagtgaagtccatagattgtgtggattttcttccaacaaatattcagccttaagatcagggtgaatgtggctcctaataaggtatagggctgtataaacgtgttgatcttcaagcggtgcaaccccatcttcgggtggtaacacagctcgataaagtccacgggacgaaagactaacttttacgtctatagcccatgtgggataattgtggccgtctagagctagtaattcaaactctttgacagtcattgatcctacatgatataaaaaccatcgaaacattttaagttattaaaatgttgaggtgtgttgtaattatgggatgcaaataaaaacaagataaatcttgtatcggtaatggtgtaaaattcttatatgcataataaagcaatggaggtagtcaaaaaaaaagggtgtagacctctaattgggcatattatgtgtaaatagtatatgccaattaattatgcaaattgtataacgcgtctgaaggtagtcatcaagaattgatgtagaccttagtttaatttgcaaacgaattgggtacgcacgctgaggatagtcactaagtagtatacttagtgtagatcccacagtagcaacaaccggtgctaccttgtgtatggccaatagggatgcaaattaatggtagtcatctttgtgaaaagatgtagaccaaatgttctaaggggtaatgttgggtacgcacgttgaggatagtcactaagtattgcttagtgtagatcccgcagtagcaactatggtgctaccttgtggagtggccaacaaaacgactctagaacatgcgtgttatataattgttaagaaaattacacataaattgtcgcatccattatttaagtgcgtagtgctttaaagttaaaagcgtaaaggaacttaaataaaaaaaatgatcgattgcgaaataaataaataattgcaagatcatggtcacaataacaaggatattatttattggatttgtcattcataccgggacaaacactttgaataatatcacaaacagatattttataacaatataaagtatcacaagtacaactatagttaaaagtctggaactaaacatataggagtactatttttacaacaaataattatacgagaccacaccagagtcatatacgaattattgctgaaaataaataagatgaataaacaagtagcctgctgtgccaaattagagttcaagtgaatttgaaatgggcacagcagcctgtgcgagcgtgcaagtggagactggaagcagggcgtaggccttcatgggctggcccatttgctggagcagcacatatatatacggggctggaacaggcagctagggttgaaatccaaccacacgccgccgtatagcctgaagaccaccgccgccactttatctggatgttggtgccgctgctcccttccactgcgccgccgctgctgcagttcttcagttcgaggaagactccccctcatcaggggagtagaagccgctgccgttcaccaactcgttgagggtcgccgcagacgggaggccgtgcgtcgccgggttccgcgatcctctgcggatctcagggcgccggtccactgcagccacgctacgacccagaaggcgccggatcgacggagttgttgtggttgtgccttcggtcggagttgggggcgccgccgggagggcctgcgcagccatgcgtgccgcagcctccgcgcgtgtcgctggtggaggaggagccgagggcccggccctgtcgaggaagaagtacggcgagatgccggtcctcgcagcggtgttgaagatgtcgccgagattgaagaggttgccgacgccgggtgcagccaccacatcgacctcgtcctcgaccttcactgcatcgagcgcaggggcagcctgcgtgttcaggaaccacggatccagtgggggaacgccattgcctggcgccattggagtcggaggagtgggcgtcggcatcagcgtgtgcgggatcgacgtgtactccttgcagaagtcgcaccagtagcgcgacggtgccggtactggcgatatgggctccatcggcatgtaggatggagttggagcagcggcgggcatcatctccacggcttcagcaagcggcatcggggcttcgacgattggtggcgccgcgacttcaacagcgggcggcgccgtgttgctggggccggcaccgtccgcgccaaggcgaggagacggtggctggctctgcagagggcgatcttgcggcgaagcgaggcggccacgacgaatcggggaccaacggcgacggtgaacatctgcacggacgtcacgaacagccgagtcgaagatgcggccgtatggaccatggccatggccatgggcagcagtgcggcggagacgaggcccaaggcgctcgaaaacactgtgacgctgtccatggtggccgtggtgacggatcgggccacgacggactccaccaacgcgacggagagcgaagaacaatccacgagcaatgtgtgaaggtaaatcgacattgattcgcgccatagggcttaccggtggtcggtatagaggcatggattgcctctgttcgtcgttctccttctgtagagcaaaagtgctgataacgtgttaagagtgaatgtaaatgaacagtgaacaacttatgtctttcattgatctcatagaatatatacaagtgaagggggcatgtccgtacggacacaaccgttcagtttacagaaccaccgaagggacatgcctcttcagggattactaactgctaatcctatgattaactgctaatccacttctctaatcttgttgtatcaacggatgagatcattagtgataaggtgtctattcaccaacagacaccgtttcgcaacagaaatctgcatactgatatttatcctaatgtttgttgcctttgattgtccatgcattcataactaacgcgtgcacaccaagtcataaatgctgcttcaagtttgccattgctattttgtgacctctgttgatcttttaccgtctatcaggggtcatatttttttcttttaaaacaccattcaggaactattatctctttttttttcttttgtttatctaactgcctaaacactcgatgctgacacatttttaatctgatgatgggactgaactaggtattggttactggctccctgcatctcattggtga

SEQ ID NO: 4969 - DNA, 2672 bp, Sorghum bicolor
  Intron number 3 from transcript Sb07g003890.1 (locus Sb07g 003890) derived from phytozome v7.0 (chr-ID chromosome_7; pos 4803978 to 4806649 reverse strand)
agaatcttcagagttgtcttcataaagcaagcaaggtgcaccatttttgcaatttgcatcaatgtgaaatacattgtgttgatggcatataatcgatgtgcatcttttagttttcctggcctccttttatagcttgtttatttaaaactagtgtagatgcacgtgcgacacgcatgtgtctataaaaaatcttttataataaaaagtaattaaatttataagtccaattattataactacaaattcgcagtctctcaccaaaaatttactttccaaatgcatagtctataaaaaatctttcataatgaaaaaagaataatcaaatttataattctaatttttgcaattacaaaatcgtagtctcatacaaaaaaaaaacattttccaaatgcatagaccataaccataaagcctgatttttctaatgcatagaagcaggttcaaactcatatcaccattggcctagtcacaaattcattaaaaataacaccatcacttgtaatgtcatatggaatgaaaatgaaatgtagcttccaaatttgtactcgttgcatcctttgtatcctttgtactatctaccaatacaagtttttattccttccaaatgacatattcatgggttctgatgacctaatgtataaaaattgctaaatgaaaaataatataatagctataatttattttggtcacccgcattgatttgtagtctcagatgcattcctcttggcctttagcttctttttcccccccttttttgtatctggtgttatggaattcccctagcaggtaaagcaaaaaacataagcctttatttgttctaaaaatagtcaaattttcctcaagcagaaactacagacaggcaaatagattatgccaacatatgtgtagcaactttaatgaaaaattgccaccgtttgcgaatgttgtccagctaccctgcacgtaaacatctctattaattgagaagtgggagcacattagtttctcagacaagctagagcaccaccacctgaaatgacagtatgcagttaagcattcggaaaatctatatctgctatatgacatgctaactggatactgtattttgtaggataaaattctagcatgcctgattagtgcattttgttcaagacaaaaatctagactgtgggatattctacatagttgaccctattagttatagtaatatttatcattgcattaccaagattgttaaccgaaagttgcatatcaatggaccgatcacttaattctttcaagatatgagcagcaacatcgtcagtggactgaaaggttgcatattcaaccaggaagttggtgttgaataaactgaggttggtgttgtataacacactaaggttgtgaacaaaaactttatttagattcaaatggctaaagtgatcaaggccaggacacatttgtttattcctatatagaaatgacagtgccaagacagaacacagaccatggaacttctttggaagtacccatgtcacacctcaagctgatttcataatacctaaaacactaatatagtaatattatatcaaaactcaaggggttggagattagatgaaaaatcaagtatcgggagctgaccagggagagatgcacttgaggaaaaaccatcaagaagatccgcaacttgaggtgcagcaggtacaggtttagtctctgcagcatggtgtcagataaataagcacaaatgacaaaaactcaaaatacaaattgtacctgtaattaaccaagactacactgacaaagagtcatggatgcgccttggattttgtttcttaaaaatgcagtaggctgcgcaatttgattgttgttgaagcacgtaggccaatggtgctttactaagtatgccttgtggcaaaatagctgcagaaagaaataggtaaaaaaataatgtgaactttgatgcatcacccctatgccttgtctgaaccaacaatcaaaggctacatgcagaaagagaaagaggtctgatgtatctgaacctaatgggtgcaaaatatgattattttttctgcgtcttctaaatcaggtacgtaaatgagatttgatggacaactaaggttgagtaaacacagacaaagctggaaatgtcaaaggctaaaagtaattaataatttcatttgtgatttaaatagaacaaactgttttttcttcgtcgaagcaatcctaaaaagaaaaaaggttagcacagtaactgtgaggaccatagtgaagacatcatgaagcaaaagaaaacccactgaaccgtagattggtctgcagtttatagagacgaacctatagtagcagagagggagagatgaacctatagcagcaggggggaagatgagcacgaaacgtggaatatgtacctagtaactcgtgtttgaggattggagagctgctcaaaccatggcttcaggagggagcacccagatccttatttaaaataagagggtacagttaatctaactattctggtttgttctgtcttttgctttaatttggacttcatttttctctctggtgctaaattttatttatcccatgttctcttagaaggaataactgtgaatctttcttaaaccctatctgtgtaagatcggtgagctgtatgttttctgcttctgtgaaattttgctaaaccttgttttggctcttactaggttcctgtt

SEQ ID NO: 4970 - DNA, 11644 bp, Sorghum bicolor
  Intron number 3 from transcript Sb06g014676.1 (locus Sb06g 014676) derived from phytozome v7.0 (chr-ID chromosome_6; pos 40595475 to 40607118)
gttcaaatcatagagaaaaggaactagagcaggaggtccgtgatctaaaaagacaacgccaacaggactgccaatctttttataatgcatttgccaaattcaatgaagatattgtaacaccccagtgttatggttgcataagtcacatgcataacatgagcatcatcatttactcaagcatagcatgatcatcatctaccttgagccatgtcattttatgccttagtgtgatttaacttgcttaagtaggctccatatgcttgtgttggtgtgtatcatgctcatgcttgtgtgctaagccttggtaattagtttctctttgcttaactcaaccttagggacaatgttcatgttgatcacttctccaaagtaatcacttaagtcatacttacttgtatagaccctagaaacctcttttgcttaggattttaaaaagtgtttcataaaatgtttgcaagtcaaaactctctaaagcaaagttgtagcacattttataaggaacaaaagttgttttatggccatctcatgaaaatgaccacatcttgctcaaaaagttctttcaaggaagaattgggtgttgttttggcacttaaccaaatttggctaagtcctggctttaacagtttgctcgatcggttctggaaacttcatatctttcaatctaggccgatctggcttttgctctagttgaaaatgttgtagaactcagctagtactccaactttgtcaactacaccatctcctaactcgctttggtttggaagttattcatcgtcgaagttgctctgtcagtcggtgatcgcgttgtttgattcagacccgagctcgccgtcgtggtcacccagcgcgacacctgtccgccatttattgcccgtacactggcgttggccccgcccgtcaggtcatcgacgtcgtcatggatgccacgacgccccgcactcactcagcgcccgtccattctctccctgcctctctctctcgcgctccgccaggcgaaagcgccgtcgccattgccgccgtgagcttcgcgagctcctcgcgtcctcgcctctgcgtcttgcctcgccttcgagcgtctccgagttcgcctcgagctcctccatcttctccacccctcggttggatgagatctccccgaggtgagcgacatttcgcgagttcatcgtcgtcgggttcacggccgtcgcgacaccgattgcggcgaacctcgccgctgctccatccttgcctcctctcttccttctaagtcacgttaaggtcggcctaggtgttggtgtcggtccatgccacaccattccagctggaacaccactgtcgcgcgggaacacggccgccgcaccgccgtgctcaccgccgacgagtacctcgcacgtgagcagactcaccggagccattagggttaggcgtttctacctagaaagctccgcgctaactcactggtgcttaagccgcctttccccgacgctctaccggtcggagatggccggcgtaagccgaggtagctccgtcgtgccgccatggccgacgacgacccctctccgtcgctgtaaccctagcaccacttacctccatcgatgcggaaacgctccaggagcacgctggtgcccttggatccgccggagaagctcaccgtcggcgagcatttgccggcgaaggagtcctgggtcgccgacgcgcgggtcccgctgtcagtgactcaacggtctcctcctttcttttattcaaatccagatttttggctttcttgcaaaaatcatatatccagtttctgagatccaaaaattgtgaaaccaattttgtgagattctttgagatggctattgtcttgtaaaaatataaaatgaactatgttttctgggaaaaataattattaggatttaatcttgttatttatgagtaaattcatatctcttgttatactgctccttttgttatgaaaattttatgctaggctctgagtggcatgagaatgctaggataaatatttcatgatttttggaatgatatatctgtgatatgtaatttatgattgaaatatggcttgttttcttatttaaatgatagtaaataattgatgcttatgctggtgttctactttggtgtcaaacttgtttgtggtattagtagcatgtaaataatctaaaatctgttgtttgacactatataagctatgtttcttaatttatgaaataagcaccttgtcacatgttaaatgcttatcttaattttggcatgtgcatttgctctgaaaattttagggtgatgtccagatgctatgcttgtgcttctataatttttgtagatttttctgagcacttttgctagtatcttgtaattatgtcctttgatagaattaaattaataaatgccttgttattaaatgtttaggggttaacatatgatgttctgggtatcttatgatatgcttgtgcttgtaagtcaattggttggcactgaatatgctttggctatgacatcgaataattaattggaggtttataggtattctggacagcaaggaagtaatccaacctttgttaatgataacttggttttctggaagacttgtctaaattaaagttgttgtaaactctatgaactagctgtggtttaaatttgggatcatttggtccaatagtttgaaagttatagcttttccaagttgggttccagaaataggtgttctctgtttttctgggacagaacctggaactttgtttaaatgacttgtttaacttatgaatcttgctgtgaggtttaaagatgaaatatagacaatttcataagctttctataatgtcctcatttatatttgttggatccttatagcaatagttatgacctgtttattgagctgttctgttatatgatgtctgctgtttatggtttgacttgctaagttaattagttatcctttgtgagttgatcttagaagtttactcagtaaatgagtgtctagtgaagttctattgcattgtcaagcattcatcctcatctagtatgcacacatttcttattcattatgcatgcaataggtgcaccggaggcaacgaccgcgttcgagctccaggtgaaccccgaaggccaggagggcaacccggaggtggaggtccagcaagccggactcgaggagcccgaaggggaggttgagtgcccgaatcacgagccggcctcattcgtgaaaggcaagccccggagcatctaaagttccccctttaatttcgaaagcttatttgagtatgttatatctattgatgcatttacgtataggagttgtgatgaaacctttgctgcatgttactcaatccttgtccagatatattaccattacctggtcatagagttaggatcgagtagcggcttagtcatgctttaatcggtagaagtcgggtgatatcctgtcacctgcgcgagatagggttgtgtcggatcacgattgtctatatgtgctatcgtggaaagaacctgattaaattgacttaagccgggcggagttttgcaaggttgtagtaactccgtctgtggcaactaaggaccgatcgttgtacgttctcttgtcatgttgaacgcatgcctaacacttagttggccggataactcgttccgaccgcgaagcctagtagtatgactcaagccggaagaccggcaattataaagtgcgcactaccggaggaagtgcggtgtgcagggaccattggcgtaagaccaaaggcaggtgagttaaaattcctgacctccctggcagagtggtagccctgggagtgcggcgctgatcggagccgcgatttctgagtcgtaccaaaggtgacccgctggcactccgacggaggatgcttgggtgagtgctaggaataaccctccaggtggataggaatcgattcgaatcgccgtctctcccggatagtgagaacttgacagagcagcggcaaacgtagcattcactaaagaacaatggttcgtgttaatgatgatagcgagaaagagcatatgatgaacttgatatggttattattgattgtaataatcaagtgatgttttttagtacaggtgctaatctagtggtaggctaatgatggttaatatgatgcttttacataatgtagctatcaattaagcttttggcaactgttgagtcaagccagctctactttatacttagccttgcatgatccttggtgtcttttatgttttactaaacgggtaagtctagctgagtacatcctcgtactcaggatttattcccacctgttgcagatgatatcttttatgatggcttctgcaagacctgtctccatcccgctggggatgaggactaaaccggtggtcacggttctctaacaaactcgtacctgctgcttttggatggatggtgtacgactctggccataacaagaacttgtgaaatgaactttggaaagtgtgtgtgtaactattttgcttccgctactacaaacatgtgttgtaagaactaagtaactccgatgtggtgccgcttcgacgacaatgaatgactatgtaacattcactgtgttatgttgaactattacgatcttggtttgttgcaagttggtttgaagtccttcgtgatttcagttgactaccgggaatatatggtctcaagtttggaaacttgattgcttgtcgatcatttctacacttgaactcttataatttggtcggtaaatcgctagttatcgtatcgagagacgaatgtatgccaccgtatatctgttagaaaattatttttgtaagtttgtgaggacgtacggttcgtgcatgcatcatgtcgcattcatacatacattctgtctactccttcccttacaatgtcgtcccttttaattaaataaatgctgcttaaattaatcctctcttacccatggtattcctattcctttccacagatggacgtgcccgcttcacctcgccccagtgacaccttcttgagcgagtttggcactcctaccttgctctggagggtgctgcagtctgtgggatatactgagccacctcagtattcttggtgggaggtggatatgacaggagagttgcaatggtttgctatgcagggagttgtcccaccacatgggggcaagcctgcgtggacagggtggacctgcaactctgatgggcagactccaagggaagcagctcaggtggcggtttatgcgatgctgctcaacatctgtcagaggtttggcgatgagctgacaggaggaccaacggcctccattccccgtgctgacccagcagcagcggagtggaagcaggctgatggatgtgcgttggtccgaggcagaggagagcgagctgagagttctagtgctgctatgagtgctatgatggctgtgctcaagctgttcagtcagcgagaggacacctatgcacaggtgatggtggctgttcgccaggctcaggagatgcaacagaaggctgaaaagcgtgctcgcaagttttgcaagcaagctagactcctggagcaagctcaaaaggaccccaatgactgggaagacattgcggagtaccgtaggcagcagtgggtgaaggccattagggagagagatcataagcatgatcagatgagtcagttggctagagagagggagacagtgcaggagcgcttggtgcaggtcactcgtggaagggatgctgcactccgtgtgtcggagaacaggcgccgggcatgggagatgcaccggattcagttgcttgagcgggagaactatctacgggatcaaattgaggctggacttgtggagattcactgtctcaacaacttgctacaccctattcctcgccctgtacccatgtatccagaggtgggacctcaggtgatcatggctgatgatgatgctatggaggtagatggaccagcagcggctccaccacctttgcatgaggacgtggaggacgaggagcttgagccggttagcgacgaggatggagaggcgatcttcgacgctgactcgggcgacgagcctggagtgtagtgagtagttgttgtgaggatcttttgtagtatggcagtcagcagtggtacttttgtaatcatgttgtaacccagaaccttgacctttgactatgtcatgtaatgggatggtgcaataactttatggacccaatgtgttaacgttatcatgttcgatcggttgtgacgatattttccgttgttgtgcatattctggatatctgtgtcatgtgttggattggtgatgttgttttgtggaattgaattattgtgccttttctgtaaagctattctctcgaatactttcaggcatgaatataagttcttctacggcaaatcttgtcatcatcaatactcactgactatgtctttacagatgtctcatggcactcgaggtgtggaacatcgtgcgaacatgaacccaccccctcctcctccaccaccaaatccagctgagctgatgcaaatgatggtggaaaatcagaggatgctcactgagaccatcaaccggatggcaaatcagggtggtcgtcatgcacaagaagggccagcacctaaccagtatagcagcttcaaggatttcatggatacgaagcccccacctttcagagaggctgaagaaccccttcaagctgaggagtggctgaacatggtggaacagaagttccgcttgcttcggttgaccaagggtttgaaagcagagtatgcagctcaccaactacagggtccggcagccatttggtggaatcagtatcgggaggctcttccggacaacaccgtgcttgattggaatcttttccgtgaagctttcaaggggaatttcattcctcctggtgttatggagatgaagcatactgagtttatgcagttgagtcagggaaacaaaactatgaaggagtatttgcatgctttcaatcacctgtctaggtatgctcctgagtttgtgaacactgaggcgtagaaaattgctagcttcaagcggggtcttggccccaagttgctgaaaaccatgggccgctctaagtgtgcaactttcaatgagtttgtcagtgatgctctcactcaagagaactataacattgtgtacactgcgaccaagactcgcaagagggcatttgaggccggggcaggggcatctcagtccaaggctccagtggcagctagaccccagtaccgtgctccaactcctaaccagcgatatcgccctccagtgaagaagaatcaggcgaagacaggtttctgcaaggggtactctattgctcttcctaggggcaacacgggtcccagctataccaagactccacctaccaaccgtccgtgctggaactataatcagaccgggcattggcagagcaattgtctttacccgccaaagaagggcaaccaagggaacgtccgccaggggcgtgttcactacacaactatacaggcaatccctgctggtgaggtagttacgactggtaagtttctggttaaccaatgtgatgcacttgtgctttttgattcaggagcttcgcattcttttgtgagttcagactttgtgtctaagcataatctcaaggcatttacaattgataagggcaattattgcattagtgctgctggaaatgatatttctaccaatcaagtggttttgggggcaactctagaaataggagaccgacagtttcttgctgatttggttgttctacccggtgtgggcatagatgtaattctgggtatgaagtggatgagtggcaacggagttcttatcgacaccactactcgcgtagtgatgttgggagacccgaataccaaagaggcgttcttagtgcaacttcctcgggatattcatatccgtagcatgatgaatgcggttacatctaggaccatcgaggatattccgatggtgtgtgagttcccggatgtattccctgatttacccgggcttcctccagatcgggatgtggagttcaaaattgaattaatcccaggtaccgctcctatctctagaagaccatatagaatgccaccaaatgagctagctgagcttaagacctagttgaatgagttgttgaagaagggtcttatccgtcctagttcttctccttggggttgtccggctatctttgtgaagaagaaggatcaatccttgcgcatgtgtgtggactatcgtcccctgaatgcggtgaccatcaagaataaataccctcttcctcgcattgatatcctgtttgatcagttgtctaaagccaaggtattctccaagattgattcgcgatctgggtaccctcagatcaagattcgtcctgaagatgtacctaagacaactttctcgacgaggtatgggttgtatgagtatctcgtcatgtcctttggtcttacaaatgcacctgctcatttcatgtatctcatgaattcggtgtttatgcccgaattggacaagtttgtggtggtcttcattgatgatatcttggtatattcttgcaatgaagaggagcatgcagagcatctgcgtatagtgttgtcgcgcttgcgtgagcatcagctttatgcgaagttcagctaatgcgagttttgcccgaatcacgagccggcctcgttcatgaaaggcaagccccggggcatcttaagttctccctttaatttcgaaagattatttgagtatgttatatctattgatgcatttacgtataggatgtgatgaaacctttgctgcacgttactcaatccttgtccagatatattacctttacctggtcatagagttaggatcgagtagcggcttagtcatgctttaatcggtagaagtcgggtgatatcctgtcacctgcgcgagatagggttgtgtcggatcacgattgtctatatgtgctatcgtggaaagaacctgattaaattgacttaagccgggcggagttttgcaaggttgtagtaactccgtctgtggcaactaaggaccgatcgttgtacgtcctcttgtcatgttgaacgcatgcctaacacttagttggccggataactcgttccgaccgcgaagcctagtagtatgactcaagccggaagaccggcaagtataaagtgcgcactaccggaggaagtgcggtgtgcggggaccattggcgtaagaccaaaggcaggtgagttaaaattcctgacctccctggcagagtggtagccctgggagtgcggcgctgatcggagccgcgatttctgagtcgtaccaaaggtgacccgctggctctccgacgggggatgcttgggtgagtgctaggaataaccccccagctagataggaatcgattcgaatcgccgtctctcccggatagtgagaacttgacagagcagcggcaaacgtagcattcactaaagaacaatggttcgtgttaatgatgattgcgagaaagagcatatgatgaacttgatatggttattattgattgtaataatcaagtgatgttttttagtacaggtgctaatctagtggtaggctaatgatggttaatatgatgcttttacataatgtagctatcaattaagcttttggcaactgttgagtcaagccagctctactttatacttagccttgcatgatccttggtgtcttttatgttttactaaacgggtaagtctagctgagtacatcctcgtactcagggtttattcccacctgttgcagatgatatcttttatgatggcttctgcaagagctgtctccatcccgctggggatgaggactaaaccgttgggcacgattctctaacaaactcgtacctactgcttttggatggatggtgtacgactctggccataacaagaacttgtgaaatgaactttggaaagtgtgtgtaactattttgcttccgctactacaaacatgtgttgtaagaactaagtaactccgatgtgtgccgcttcgacggcaatgaatgactatgtaacattcgctgtgttatgttgaactattacgatcttggtttgttgcaagttggtttgaagtccttcatgatttcagttgactaccgggattatatgggctcaagtttggaaacttgattgcttgtcgatcgtttctacacttgaactcttataatttggtcggttctgtgacagatatggcctaggttactgttctatctccatccttaatatgttgctttctaagtctgtatggacctatatgccatagcccccataactattacaatttttgttagagcaactccaatagtttggcaaaaacaactaggcaaatctaggcatttggcaagtgactaaaacttataccaagtcagaaaatgtagtatctccaatagttttgcatttgagcttggcaaaattaggcccactccaaccgttcaactattttttgcgtggagcatcctccttggccccggtgtacgtcacgggacctctcaacgccgccatcggacgtcgtacggtgttgctccgccactctccatcgtcgctagtgccctgccatctccttcaacgagcaggacaactcgtccaccaaggtaggcactaatctcctccaagacctcgtaggtttgcttttttattcagatttatcattgcagatgatcagatgagcaccagctatagcatcaaggcactccccgccgccaacgcgttgcagcggcgctgagcgcgcactcggcggtggtcccggcgaaggaggccgattagagccgttcatgcatgttaacaacagactcgcacgccgatcatggacgcggcagcgagaccgattgaggcgcgccccgctcgggcgcgctccctgaggacctactccatcatttcaaggagcttgtcgtcgacgcgcctgacgtcggggaagtcaaacgagcgcgcgacgccggcgtcgtcgcaccagaagtagaagccgcggagcgcgacttctctgctcaccacgacggaggccggcacgatgtcctggatggaggatggcgcgatgtcgtcgatggaggatggcgcgatgatctggatggagcccgtcatgatttctgtggatggacgcgaccgattcagattggaagctgtacggggttttcacgcgagtcctggcggcgccccggaagtggagggcgtgaagtttcctggactacgcgcgagaggacgcgcccacggcaaaatcgccgatgccaagtggaagggagcgcgcaaatatgcgcctattcaccagggaattgccaagtgcgcaaattatgccaagtgaattgccaaaactgttggaacatggtttttcaagttttgccaaaaaactaaggatagcaagtacttttgccaaactattggagttgctcttagtacatgagactgggatgcgccaatgctcctccacctcagatcaatttggctgcactgttccctaaccctctatcaacaccttctgagatggtaaaaatttagatatattatattatcttgtttgtgctctggatttgataacctacactatactggttgaattttagcttactgtctaatttttgctgaacttcttacatcatagtatagatattagttactaccttgttcattagtatgtgaagccatgatgtgaaaatgctccatctcagatagatttgtcctaattattgttccctaacaaagtatccattcagtagtcctttggaatgttaaattttagtatctgacaagttaaactgttttcctatgtatttgaagggcacc

SEQ ID NO: 4971 - DNA, 3445 bp, Sorghum bicolor
  Intron number 1 from transcript Sb07g001270.1 (locus Sb07g 001270) derived from phytozome v7.0 (chr-ID chromosome_7; pos 1255412 to 1258856)
cttctgcaacggctacaccatcgtcgacgagctcggtacgtgctgcgtttgctaataatgtatgcacattcttggtcagttggtccacatatctcttgttcttcagggatcaaattcctcctacaattatgagcttgttgctggctacctcagccgtcatatatacacaagtcaattctgcttaattaatttctttcagagaacaaaaaaaaactaaaaagagtgtgcattctgtgctgtctgtttctggcggccaattcgatctcatataagtgcctacttttctgaaaatgggtaaaactaacagcttggtaattttttttcccactgaaatcatttttttttctattttcaactactagtattaaaaacaacactactcaaacatcatcgatccctcgaattcaggatagattttaggtgaaaaatatggcgctgctggtgtaacgtcaagaccaaggctgaagtagtttttagagtttttaaaattgagacgataacacacctcactccatttaattgtgtttactggtgaaaatttaacctcagtgagaacaaactgttttatttttttcataattgctaatatcatatactattatttttcaaagtagacatggttcaagaaatttagaaattagagtatagttttgacaaaagtatagttcaacacagaattgtttacaactaattaaatcaatttattattacgcagtgaattattgttttacttggcatgatgaatttttttactttgttttaagcacgacattttcttagtcattttatactttattttactcatgaaaatcatttagcttataaatattcctctgtactaatgttggtctcatgttcttaccctaccatgctgccgagtgataatgttggtccacaactaaagtacaaacaagaaacactaacagtgtagctggagacttcttgtcagactgaataacaagcattgaattgacaatcacagaatagcacttctttgtcagattgctagagtacaactatcagaagttgcattaataatctagtgcttttttatatataagaataatctagtgctggtagtacggaagcactctataattcaagtcgcctctatttatggaacacgacaagtatctttatagatcactgaatcctttggtgcagaggaaatgcccatcttgtgtttgtcgcttcatttttttgttcagtagttaaatgcctgcatgacttgtttatgcaacaggggcagaaatgacttaaacttttaacttatcaacacggcttagtagtcattgtctaattttttctctcataacaaatcgacgaacaattctcctagtagtgtaagcttctctcagtgttttaccattcaaaatttagtataaattttctctactaaatgtttcctagtgaaaatcccatatgttataactagtaataatagtgttttattactacttaaaaacactaggagaaatcgacctttttggtagtatgatcactacagtgatgatcattgtttttcattgagttgataacctcaatctctgccaaaaagaaaagtgtttacttttatgtgataggtaaatcaagagacgaaactaatctttctcatagataattttttaccctcaactaccaaaccacacatgcacatttcattttctgcagaaaaatgtgcttagttttctataatgggtaaaggaagaacttgaccttttccagcaatcattttttttgtgagacattccagcaagcagcaatcgtttttacccaaaggctgaaaatatttcgagctcctgtcgtgtaactcagcatcgtatcctggactgcactgccgattagaagaatttattatttatatattactagttctctaatctaaacaaaaaaaatataggcttgttaatcactgagttgctaattatgaaggccttgtttagttccaaatttttttgagaaatgagtactgtagcacttttatttgtatgtgacaaatattgtccaatcataaactaaataggctcaaaagatttatctcctaaattacagccaaatcgtgtaattagtttttattttcatctatatttaatattttatgtatgcgttcaaagattcgatgacaggaatgttgaaaaattttaagtttcggtggggactaaacaaggcctaagcttcggtatctgaaagcagtgagtgtatgcctcacggccttgagaacttgccctgttcgatatcctcctccgtttcttctcctcacgtaatgggccctgtacgccccggcctcataacggcccgtatgagtttctttgcatcccgcctcagcccaccttttctgccatatcgcgtgtcgttctccaataccaattattagtatcctgatattctgtaatccaataatcctgtttagttttgtaccgtaccgccacgggagaaaggttgtaacccgtaggaggtaataaaagtagcccaaaacaaaccgtataattcatgcctttctcggccttttggctaagatcaagtgtagtatctgttcttttgaagcactgcttcacaatgttgtattgaacttatttttttatggggaaggaaccataatagtggcttgccactagggttccttacgcgtcgctaaagcgttgcactatagcttgagcttggcgcaccccaaccaaatcaattctcaacgttttgtgtttaaaaataagtaagataagataacctaaatctaatttacatgtccaagctatacgtccaagaggtaataaatcaattctcaaaattttgtgttccagaaaatggcttaatgacttctttacctctcgctttgttctatggagattatgtatcctaaatctattttataaatttgaagtaaactttatacaattcaactcttgagaacaaattgtttcaattttgaaaacccatatatacacgagtaatttttcaaagtagccatagtttacattgcaaatgttcgctttcttatacaattggagggttactcctactggtaaatattaaacaaataaaagagaacaaagtattttaaaaattacaagccaacgtttaatttaataattagcaaaatgactttgaacaattgtagaaaaaagtttatttccacatacaatcatttcaaacctaaatcaattttatatgtggtgaactaattataaattaccaaataaaaggtgaagttcatttgacccacctctgaacttgtaattgaatctaaaaaccaccctcaactcaaaaaccataaatcttacatccacccaactttgaaacaaaaaaagacaatactccctacactagttaattgaccactgtgcactattggtcaactaaaatgtcatttttttttgatagaaactaaaatgtcattgtgttctatatgtttgcagccgaactgcttggactgcccctagtgccaccctac

SEQ ID NO: 4972 - DNA, 686 bp, Sorghum bicolor
  Intron number 2 from transcript Sb03g002330.1 (locus Sb03g 002330) derived from phytozome v7.0 (chr-ID chromosome_3; pos 2110733 to 2111418)
aatcaactggacttctcagggggtatcttctctcctctgttttccactcgccgaaccaagctataaatgctattgatcattcacatttccttaagtgacctttatggctttgtctaaaaaaacatttccttaaccaacacttgtacagttgggattgctgtcttgttatctaggctagtatctggtgcaacttggattaagcaaatctagttagaactttggctataggatttagtggaagcaaatatatatcataggatagaaacatgaaaaatcattgctgattttggagggcttccttatatttccttgaccttttagcactaggcatgatgtgacattataagaacgccttgtgtacctggtaggtgtttttgtgttttgtattgacctagaagctgttgtaattcgttgttggcacttgaggtaggtaattggagggaggaacgtcaggcagttttttttcagttacaactggtagtttattctgtatttgtagtgctcatagacaatgacacttctgtacctgttctgcatgcagtatatcatagtgtcgcattgcacatacgctctttcatatgcatttaaaaagtttcagtgcaattgagttttcttccatatgatcttaccagtcaccttaggccttgcatttaaaaacattggcaattttattatctgttaggttc

SEQ ID NO: 4973 - DNA, 1387 bp, Sorghum bicolor
  Intron number 1 from transcript Sb05g011010.1 (locus Sb05g 011010) derived from phytozome v7.0 (chr-ID chromosome_5; pos 22809356 to 22810742)
caggtctgtatatgcatcatgtatacgtaccatacatgttattgttggaacacatggacaaaacaggttagcattatacaatcaaaatacaaaataaataaataaatgatatattagacacagtagtttcaagtaaacacgtgaatagaaagtgtgagaactaaaacgaccagaagttgagaagcacgtatagaacataaaagttgttgatacgacatatacttaggccctatttggttccccctgctaaattttaactatctaaacttttgtcactttagtagctaaagttccaaacacattgactaaaatgattttaaatagttcagttccattagtcacccaaaaataactaaaataattttagctagctaaatatttattaaaaaaattacctgacacgagaaaaagatgtatttcttaaaattacaaaatagatgagcagagatggagccagtagggcgaactagggcgtttgtcctagactcccgtccctaatcccatgccactaggcgcagccacgtagccctcccacgtggacgtgttccagctcgacaaaggtttctttagatctaaaaagtttttagattttgatcctgtaacactttcgtttttatttgacaaatattatttaattatggagtaactaggcttaaaagattcatctcgcgatttacatgcaaactgtacaaatagtttttgtttttatctatatttaatattctgtgcatgtgccgcaacattttatgtgatgaagaatcttgaaaaaaaaataatttttagagtgaactattcaaggcctaaggtgcgaaggagagaagaggaacagataatggaggagaaacgtaggagacacaaacccatcgaggcgcataggagagaagactatggcactctttggatctaatatttttctagattttgacattgtagcatttttgtttttttttataaccattatctatttatgtagtaaataggcttaaaagattcgtatcgtaatttacagttaaattgtgtaattagagtttttatctatatttaatgctctatacatatgacacaagattcgatgtaatgtaaaatcttgatttttttttatgaactaaagaaggcctaagcgatggggagcaaacaaacaatcgcccttttgatttattcataaaagcagtgggctccacacatagctagttgataattaatgtcttccctggatcatttctttggctggattcaccactggtaaatggacacaaatggtaacgaagagagagatagattattagctaatgaagaaaataattatttattattactactctcactctcagagttcttattccatgcatatacttatattactcacatctgttttcctttctccagt

SEQ ID NO: 4974 - DNA, 3077 bp, Sorghum bicolor
  Intron number 1 from transcript Sb04g001090.1 (locus Sb04g 001090) derived from phytozome v7.0 (chr-ID chromosome_4; pos 935429 to 938505 reverse strand)
tccgcggccccgcggcaaccagaatccagatcgaggtattgctcgtgccgcggccctggcgacccgcccagacctgtctcatctacccccgcccctgcttctctgcttcgcttcagattgggcgcagcgggtgattcctcattcctgttttatggtactgtgtcgtgtccttgtcgttggatggtgtatattctctttggttcattgcctcgatctcgattgtctggtcacgttaggcttattcgtttaggaacttatttcgtgtatggagtggtgaccgtactgcactggaagccttgattttaggaggtagttaagtgtagatttactgtgcgttttgttcttgcgctggaaattgctgtgatgacttacaaaggacggtatctgagcgaggcaactattatcctcgcatgattatacctgattcggagacaaattgtctgagcaagtatcttcaatcaatcctagtagtttatcctgtttgcctgcctgatgtttggttgaaagtgctgtcatagagtttcatgctttcctcgttcacttgtttgctatgatgacatctacaaggacggtatctgagtaaggaggctcttaaaatggtgccccttctttgattacatctaatctgaatgagattctgagcaaaaaggtgatgtcctctattgaacaggaagcactgtaccagttgagctctacatcaaatgttatcctatactttcttttatgtcaaccataagtatcttttggtacctgcctggtcccttgttcgagtccctaccgtaacaagctttcagattttattatttaggtgtcagttttatgcaatctctagcttatggtgatggcttgtataaggaggtatctgagcaaggtggctctccaatggctggtccttgcatgattacatccaaaattgaggctggacatctgagcaaacttaaatattccagcccttaggatcatagttattgttcagtgcagttgtgaaagcttttccttcccttttgtttgtgctccttgggttaaatgttttgcaactgattacatcttttttagtttttgtgaaggtgtgaacataagctatttttcgcaacaattgtttgccttgataactatgcttatctatggatgtttgctatgatgactcctattaggacggtatctgaagggggtgagttttcattgcatctcatctgattataccaaaactgaatatggtttctgagcacatccagccgtactgtcgaagaacccaaccaatggtttgcctctttcatcagcctgatcgatataattacattcaccgctttcccagtggcatcattgttatagaattggcattgccttatctatttcctagcacaattttgtcttctcttttgggtcatgcgtattctctttttgccatgatgactcctattaggacggtatcttaagggatgacttttaagtgcaccccttctgattataccaaaactgaatatggtttctgagcaaatccagccataccactgtagaactcagttaccttttttatcaaccttgattgatgttgctacattcttcattttcccaatgccaacactattatggcatggggttgccctattcaatttcctaggacagttttcttctgtgtcctttcttggatcatgcttgttctgtatatttgccatgatgagtactattaggacggtatctgaagggggtagcttttaagtgtactcttctgattataccaagactggatatggtttctgagcaaatccatacatttcgctctttttgttcaacctgattaatgtaaatgtgtaccaattttttttccttattttatgctctattttaggtcatgcttgttctcgttttgccatgatgactccaattaggacggtatcttaaggggatgacttttaagtgcaccccttctgattataccaaaactgaatatggtttctgagcaaatccagccataccactttagaactcagttactcagctaatgatttgccctctttgaacaacctgattgatgtagctacactcttcacttccctaataacaacattattgtggcatgaggattgccctattcgatttcctagaatagctgtcttctgtgtccttttttggatcatgcttgcgctgtatatttgccatgatgactactattaggacggtatctgaagtgggtagctttgaattctacctcttctgattataccaagactgaatatggtttctgagcaaatccagccatatcaccaaagaaccaaactgatgatttaccctgtaaatgcatgcttaactttcccaatgtcataagatcgggattgctgttttctatttacaatcacagttgtcattttctatgtttagtttgctatgatgatttctcgtggatggtacctgtgtgagtttccttatgattacatccaatctgacaaataattcttaatgtaatttttgaaagtaataaagaaggcagtcaccgtttgctttctgcaaaatgctgtgttgccacattttcttctatgtttgtttcatttatccatttgtagcattcttatgttcctttacgttcgatccagttatttatctttaaaaaaaattggcttccatgtgagtttggctaccattgcctccttatttcagatattaatccttaagaagattcttgtttatttcatatacctaggcacctagcagtcctgatatataatataagttgaatctttatttgggttcgcttgcacactttttactcatgttttctgatcttatgacttctctgaaattgtccattgtagttggttattgcactttgcatttttgtacaatatatatccatgagctgtactacttaaactgaacttttttattgatgagaaattgctcccagctctatgttcttgtgctgtcaactatattaggaagtggttttctctcagttgtgttttactgcaatgatgtgatggtggcttttcatactgaagtcatcttattggaatatcatttcaaattacccttttatgctagcactgcatatttcttaacacacttaatcttctgtcagg

SEQ ID NO: 4975 - DNA, 5157 bp, Sorghum bicolor
  Intron number 2 from transcript Sb09g016520.1 (locus Sb09g 016520) derived from phytozome v7.0 (chr-ID chromosome_9; pos 41689448 to 41694604)
ggcaaggtaaatcagtccaccacagttgccggtcccgacccttcggatctcggctgcctcatatttagtcccttttgctcctagcgtgcgtatgtttaggccgttgttgaactggagtccaaaagagagggggcgaattgaacttttcaaggaattattaaatggattgtgatgctgctgtgtcgtctgtcttaggcttatctgagtgatgccactatgtctagctcgttggtttgtgagaacatttgttgtgatgttccaagaactttattgttggcagaacaaatgctcttaaaacccttgcaattgtgggggtaattgttgcaggtgttcactgcagttgtattacctgtgaggtgtgagctgaggtcagtgccccgaaaaagaaatatgcaggcagttagatcagttttgcatatgttgtaaagcacaatagtaggtaaaatagcagctacattgggctcttgaacttacaaaatcagtcgagttcagccgtatgagctctgttcattctaaccttgaacctggatttgagtcaagcctattatctgtaaggtcatccagcttagcttctttctagtgttatgcccatgtggctaattatttacttgcttctatgtatagctgtaggatattctttttctttctggaaatcctatgttgtgcacactgccaggtggctagatagtcgctttgcctcctccccccctaccatcacattaacttctgagctaaaatgatatcatttagtacatgatttcaaaccatttaacttcaatgtaattaaattggacacttataccttttaagtcaaaagatgtgataatgtagaattatttgtacacttgaacagttaacgattagttgctcaccaatttttacttgtcaggtaagacagttacagtctccattagttttaatagatatttgcagtgaaaattgctaaaaaaattaatggtacaatttatcttgatcaaagttttcaggtttgaccgcaccttataatgtaacttctattccagatcaaagagagcagaatttagtctgtggaattatcgttataaactggtttttatgccatataggaaaaatcactacccccgatatctaattatagctacatcataatcattcttgcagatcatgatcaggctgtagtgtgtagactcaattctagaatggtatgttaatgtggtgtgaatccaattaaaatattttgaaactcaattcttattcctaaatttctcttaagttcggggttgatctggaagaaagagataatccctttataccactactttgaatgccaatcacttatctaccttcaatcttggtattcaggctttgctaaccaagatcccttacagatggtgatcagctgttaagtaatagtgctgaaaatactaccttggctttcaaagccatgtgcctacatttggcatggaattggttgctgacacaaaatagaaggggtcttttttttccacaatttcattgagacctatcccttcatgccatttgttgagacaccattttgactggtttgccagttgccatggtctgcaacactaatatgacactcggatttacgccattgaaaatacaaacacttctgtctttccaaatttcccaggtcactagaataatgagttgagcccttttctgatttctacttgattacacggcaccaccagcttgagaaatagctggcattgggctgtggtgagatggaaaataaacccggcctctgaaagatcaaggaccatacttgccaggcaaagacacaagggactatgtgttggattgattcttgagattggccacaatggggcaggcatctgtgtggtactgtggtgtggcaaccttcacttagtgaggtgatatgcagtccagcagcggttattaatggtaagccatataaagaactagcaatgtaaaggagtctaagttttccaaattctcttgatctcttcctcggagcgaaatagattgtcctgaggaagaaggcgctgtaggctgattttctaaaataagtgcccgaccttgaaagcctccatcgatattgatcctctatgccttgctgcaggttcaagccatccaccaaatcccagataaataagtgttctgtcaggataggaacggtgagtaaccctttgatattaccaacacaactgccattatctaaagcctgagccacagtgcaccatttgatggttcttttggggatcgtttttatgagatttggggctcattcagagattgttctgacatctatctatctgacgagaacaaggtggattcatcattaccaacaattaattccatggccatgttgaataaagcttggacattgcacagcacttgaatgggcaaacctacccatggtcacgactagcgaagcatcagttttctccaaccaaaagccaccgtatgcgaaaagaccagcccaagacctgaaggttatgaataccaagtgtccaagactcctcctatatttgcggtggccgattcacttgttcccaagagaaagacaattgccaccatttgccttctcatgtgaaccttccatctcttgtcgatggttctgatcaccaatttggggagatccattgcaatcatgagataggtggggacagcagtcagcaccacccaacacagttcatgggagacactttccagtttggagggttatccgccactttaccgatcgaagtatgcatgtcaagggcattggtgctcaaggtagctagccctcgactgcgaaactcgtagcttgggttggtaatggcttggggtttatcccctgaacgccctatgttgaaggggatgagattaagatgaaggggatgagattaagatgcaaacagggagattaggaatgagtttgttcttgcttgcctcaacataagcacgttataggatataaataggagggaagctccttggttctagcccggtaattactcctatgacccaaccatcatctaagtgccattgatcatagccgcctggacctcctcgggttccagcttactgccattgattacagctggatgtgcatgcgcctccctgggttttaacccctaaccggcagctttaactgcctttgattacagtttctaagcatgcacctccttgggtgcgcccctggcagcatctcaagccctgggctgatggccccacatgacaatgcaactcagatttagatggttttctcacaagctagcctgctatccttttgcttgcactgaagaggtgtttctgaaagcaaggcgatcaccccgcacttattacatcgattgctactgattaagcaattcaattgaattagtaggtttctgtgctcagctaaaattatgatcactgtcagatcctttcgtaatcagaagtttgggtacctgattcaattttgttcatggtagttcaggcttcactattcatctcagctcgacgggtgagtcttgtagtcaagctcccttctgcctttgcacttgtccgtctggcccaaggaaacctttgcacgtctcctttaccttttggattatgtactccatacttgatttttggtgcaaatctacattatgacatgacaatggacaaagcaatccaagaggctaattgaactcatggtattggaatgagatgacacaaatttatcaagcagttggtatgaattggtgttcatgctgaaggggaatatgaatattcatggtaagttcttaacatatttttgttgaccccagatggaaacgaccacattcctctagcatgctcaactatagggtaggtcttaaaaaaatccttaagaccatcctggagacttgagtttgttagcatctcaaaggaatcatctcctacaccacaataataggtttgaggattggtgctcttgtccagcttttgaatggggctcatggattaatgttaacatgtaaccagttcccaactattgatgtgaacttttatcctttgctgccccaaccacaaccagtcaatttgccttggaatggtcactcttcattttttgtttggattaattttgggaagctcttcatcttgggtttacatttgcagtggttgggataatttcttttgcctctctgtagacttgggttgactatatcttggtttcccctgtctgggccctgggccctgtttggcaaagttcatttaggccttgtttggatccatagaattgaatcccattcttgggatctgattctagcaattggattcaacaagaaatgaattaccccaaatttgtttcaattcaatattctcgtttggttgtacatggtcttaaattccctttcagctgtgatcttggacgaccatcttggttatctcattcgttgcgattcttctccagatttccagcgtgtgcacttgtagatcatggggtgatgaccggagtgcagaagttcattaaggttcaggccgatctcagcgtcacggacgggcagctggtggtgctcatcatcggcgccaccaccgagtcagtgactctggtggcgggttgagcttgtgaccgcacgggtggcgctggatcatcgtgctctcggtggccttccttgccggctccatcatcacagtcgccgtgcaatggctatgccacgctcatggcgggacaactcgtcggttgtgtggcctgcgggttcggcctcatagctgcattagcagcatggcatcctcgagggaagggggagggatgggctcgtgaatcattttctgtctaagcgggtgtcgcgggcgttcgattcggactgtgccactgtggaaacgatctgaatttgatttttttgattcggtgggcaggcaaaccggccacctttggaaaacaattccaattcatcctatttctatagaaccaaacaggccctaatctagtttactagttggagaatggagtattggaaatagcttcatgtagatgcagcatttttgtcatgctaatgattgtcttatcgtcctatcatttatgtgtcaactgtacctactttctagttggaacgtggaactagtatttcttgcataaagaaaatacattttatttttttgtccttcagacccattgattgtaaggctctggtccactgacacctctggccatttgctacttcaggggcggagagctcgaacaaaaattacaaggagcag

SEQ ID NO: 4976 - DNA, 2142 bp, Sorghum bicolor
  Intron number 1 from transcript Sb03g030030.1 (locus Sb03g 030030) derived from phytozome v7.0 (chr-ID chromosome_3; pos 58323240 to 58325381)
ccatccaggtcgccatctccgtggccgtcctcaaggtcagtactcagtagagctctccctactcctcctcctcctcatcagtatccatcttatgcattgcatttgcatgcatctctgatcgttgatatctggctagttattagaagaaggattaaccaagcaagatatagaacttgctgtcgtcctcgccctgtttttgcatgcatgcatgctgtggaccgctctataaattaaaagcgcatttttttttcatcataacatagatgtatatagacatacaggatgtggttatacaagcttcaataacaatagggcaatggtttttattgtcttttaacattgccccaaagccacacaagtcacatctctgtggctctgtctcaccgttgcaagcaagaagaaacgagatgttatatgtgcttggaacggtgggcggtggtgttatatactatactatgaatgaaaaggatatagtcgttctaaactagagtttgcatagtttacacgagagataaatttactagatctgttgtcaaaatactaactaataaaacgtggtaaaataccgaggatatgcttgagaagctcggtgctggagaatttttatatactcggtctcaatcagtgataaatatatagaatatcgctctctctggtccgaaattaattggatggaccctgagctggtctcagtccttggacagtcacatgaagcgtgtctgaattttgaagccagtgaagctcccgttgaggaaagggaaggagtgtcgtctctgtcctgtcgtcgtgcgggcaaggattggtcaaaactagggtcaaccttgcatactccctccgtcgtccgtcccgtcgttttagattttttctacaaatttgacttgatttgtagaaaagaaatgtaatatttttatttctaaataaatttattaaaaaattagacttaaagatatttttaatgatactaattatatactataaatattaatactttttaatatatatttagttaaagttatttcttgaaaaacactcttattttgagatgaagggagtacatgcttgcacgcacgacattcaaagcaacctgcgacaaacaagggaagtgatgctagtaccagggccttgtttagttcaccccgaaatttaaaaagttttcaagattcctcgtcacatcgaatcttgcggtacatgcatgaagcattatatatagataaaaaaaaactaattacacagtttgtctgtaaatcgcgagatgaattttttaatcctagttagttcatgattaaacaatatttgtcaaataaaaacgaaagatttcagactacccgctcttggttcttcccctaggtgttttgtgcattcttttcacatggcttaagatttcagacttcacagttgagaccaaaacgcctactagtgcttgacacaatctaccacaactaacttttgacaaatgtggcaagtcataaaaagtgtagctagcaaattagttaccacactttgccatgtctaaagaaatcttgccacactttttaactctatgacatgtggagcccaaaagaattatgcctaagcttagttatgaaccaaacacttaccaacttagtcaaacttgtctaaagtaaagtatggtaaattgtagttagcaaccaaacacgcccacagtgtcaaagcctccacagacttcggtcaagtggcactccatggatgggggaagctcgcctgcatctcgaatggctaagcctgacaagcattgaagaccggtctgcgctctgcaccgctggtcaatgcctgccgtgtccacgcagcgcaggcaccgcaccgccccgcaccagcccgtggccatgcacaggggcagccgcctgctgtaaattgtacacgcgtacgtacgtgcactccatgatatgcacatttgttgcgcgcgtgcgtgcgccgtgtgaactacagtaggactgtaggagttatcgtgacataggagtatctatcacggggcggtttctttggaatccatgcatttctgaccgtacgtcatttatgcaggatgcatgcatgcacgcacccacctaatactaatcctttttacgcccgtcaatccgtcattgtgcagctagagggtcacggcgccaccgccaacgacaccga

SEQ ID NO: 4977 - DNA, 7886 bp, Sorghum bicolor
  Intron number 10 from transcript Sb03g020430.1 (locus Sb03 g020430) derived from phytozome v7.0 (chr-ID chromosome_3; pos 38807284 to 38815169 reverse strand)
ttgctccgctgtaagttatcttatccctaatatccagtgacctagttgtgcctgctttatcatactgtgccttttttgtccttctgattgctcttcatttaggcatttctatgtttatattaaatagcagcaaactgttgctaattgataggaagatgaaggtagtggtagttgagagatatgataactaatattgagttatgttaatcgtgatgttttcaagtcatccaactaattgtggttagtcaggctaatcgatcctctgaccacgattaggcactatgcgattagaacgactacaaattaagttgtctttttagttgtcacgactaaacgtctgattaggtggtggacaactagtctgacgactaaacgtctgattaggtggtggataactagtctggaagggatgaaaaatgcaagtggggcttggcagctgcgacgtactccgcctcacacgtcgacagcgccacgatcttttgcttcagcaactgccaagcaatgggggctgctccaagtaagatgagcacactggaggtgctccgtcgaccatcaatgtcacctaccatgtctgcatcgctggaaacagtgagctccggctcaccttcttcggtcttgcggggtgcctcgctgaaggccgtgagccttagcccacctttgccgccttgcctggagaagatgatcgcttgatcaagcgaccccttgacgtagcgtagcagcctcttcactgctgtccggtctccacgcgggtcctccatgaaacgactaacatacccgaccccgaacataatgttcggacgagtgtgtgaggtagcgcagcccaccgacgatgctccggtagcacgtcgcgtccaccttcgtagcggtgctgtaccacgcacggtttgcactccgccatgccgccgtgctctagcaacttctctgcataggcacgctggcccaggcaaatgtgctccttcccctgcctcacctcaatgccgaggtagtaggagagcatgacaacatcactcatcttgaaacgagctaccatctcgcgcttgaagggatcaatgtcctccactcgtgctctagtgacgatcaaatcgtccacatacacgccaacgacgagccccttccccttttgttgtgtgtagagcgcgtgctctgtggcgcagcgagtgaacccaagctcgcccaaggtagcatctaacttggcgttccacgcccaaggggcctgccacagcccgtagagcgccttgtgcagcttgagcaccttgtgctcagcgcccttgacggtgaagcctggagcttgcttgacgaagaccgtctccgcaagcttgccgttgaggaacgcagacttgacgtcaaggtggtggacacgccaatccttcgctgctgccatagccaacaccaagcgaacggactccattcgcgccacctgagcaaaagcttcctcgaagtagatgccgtcatgctgcacaacaccgcaggcaacaagccgggccttgtacttgacaatggccaccgcgctcattccgcttcaccttgtagacccactttagcccaaccggtctgtagcccgccggtggatccaccagctcccatgtcccattgtcctcgattgccctcatctcctccaacattgtccggtgccaactggcatcacgttcagccactgtgaacgttggcggctcctctgcgctgacaaggagtagctctgggtcatccagaagccggctagccagcctaggagcttccccttcatcgacgatgttgtcctcccgtctgaaccggacctcctcgctgtcatggaaggcgtccacgtactcgtcgatgtcggtgggtggagaagcgaactccagtggcggtgtcccctgttcaggcatcgtaggggactgtggtggaggtgaatgcgccgctgttggtggagactgctggtacctgctctttagcagcagcagccttctctctagcagcagcagcagcagcttgctcttcagtttaagcagcagcctgctttttagggccacctcctcctccttcgatcaccaagtgctcgatggtgaaggtgttgctaacaccaccagcttccccgacgccttgctgcacccaatctcaagcagccatctcatcaaacacgacatccctagagatcaccaccttgcctctcttgggatcatagagccgataggccttgctgccctcctcgtagcccaacagcaccatgggcgtgcttctgtcttccagcttgccgaggtggggctttgtgttcttgacatggccaatgcaaccaaatgtcctgaggaaggtgtggcagaaccaccctaattatatggtccacatgcacttgtcattgtccttaatgttagagtatgtgtaatgcaggcccatgaggcccatgtaggcaactatattgccaccctaattagggttgtcccaaaacaatgaaaccctaattctaacatggtatcagcctacccttctctccctccctcctcccagctgccaggcagcccctgcgccgccgcctgccggtgagccttccgtgggccgccgccgtgggcgccatggctgaccagcaacctcctcctccaccctcctatttcaacgtttttcctcttccctgctctgcgtgggcgtgggtcgcgggcgcgcaggccgccgcggcgcgggccacaggcgtgcaagccgccggggcgctggtcgctggggctcagcaggctgccggggctttggccgccaccggggcgtgggcccagcaggccgcgcgggacgcaggggcgctggccgccggcgccgccactccagccggtgccgtcgctgctgctcgccttctcatggcagcggcgggcatggagcctcttacagatgacgtccaggccgccgagaacgccgacgccatcgcagctgctgctcatgctgccgacatggggatgccactgggcgctgctgcagcccacgctgctggactgggcatgccggtgggcgcggccttttccccaccacctccgccgccgaactccgccctcaccaccgccctcatcgctgcccaggccgctgcaacggaaggccgggcccacgtgtgggcggctgccctcgcttgggagcgtgagcgcgatgcggccgatgccctagcccatcagatcgccgaagcggagcagctcctcggcgtccctgcctcaccagacaccgggaccacgccctctggatcagccggtccccgcgcgtctcacaccgcggtcatctatatatttccatctggcccgcagcccgttggcacggcccacggcccgtcgatttggcccggcacggtggctgacgggcctcgggcggcacggcatggggggcaggccgtgccatgggccgccaccctagcacgtggcccgacacgggcacgacctgacttaccgatgcggcacgaaggcggcccgagcccccgcgtcatataaaagccggccagttctcccctggccccccacccctgtcgaaaccctaaagcctccgcgttgctctcagcctctcaccccacgccgcagcccgcacccgcagctctcagtcttccactactcttcctccgtctccgtctcgatctagatctgctgccagccgccgctctggtagcgtcaccggctcgcaaaccttctcctccctcctttcccctcttttcctctcctccggtgaaccatgtgagttcgtgttgcatgttcgtcactctgccgtcgctcgtcatcgtttttccttcggctcgctagcctcttcttctccggcaccgagctccggtagcacaggtcagtgttgaaccctaaccctagatctgaatctgctccgactccttcaatccttcttgctccgtctgtcatgcatctcgtcgttcttgtttgcaagttggtgcctgccgccgcgtcttcctcctctagtagacatggccaggccgccaaagcgcccgccgaggggaggtgctggagctggaggtcagggtcggagttggccgtctagtggtgttggtgctgggctcgcaacgtggggggcggatccgcattccccccttgtcgacggagaggacctagcgccgcacccggatgtggtcgaggatctggaaatagagtgcgaggacgacgacgacttgcgtgatgacactcgtgcgtttttcggcatagatgtcggtgaccaacctgtcggcaactgcaatcagcaacccatcgacctcgatggcgacgacggtggagtgactgcctccactgacactcgtggtacctcaaccacggcctctggtaagcgagtttctgctgtttggagtggtttgatgagatcaaggatgacaagttgcgtaccggtgccatttgcaaacattgcggtacgaggtattctgctagatccactggtggcattgggcacttgattcgtcacatgagaagttgcatgaaaaaacaaaaacatgcaactatggttcaatctagacttgctcttaatcctgatggcttgaaaaattggcgttatgatcatgctgttgctcatagtgagttatgtaggttgatagctaagctagatcttcccttaagcattggtgatacataggcctgggaagactacattaagcgtgctcataacccttgccaccgctgccgccgccaggttgggccgggccggcacgaccctcgccaccgccctcgtcgctgcccgggccgctggagcggaaggccgggcccgcgtgtgtgcggccgccctcgcttgggagcgcgagcgcgatgcggccgatgccctggcccgtcagatcgccgaagcggagcagctcctcggcgtccctgcctcacctgacaccgggaccacgccctccggatcagccggtccccgcgcgtctcacactgcggtcatctgacatgatccggccgatcctctcatggcgcagctccactaccaggccgggggtgtctagaacatccgcctcctcgttccggtcgtcctcgagctcgagtcgccctcctacgcccgctggcgggacctggtcctcctcaccctccgccgctacaccctcgacgaccacatcctcctcgacgcctcggtcgcggtctagacccccgcgtggctgcgtctccacaacatcgtcctctcctggatcctcgagacgatctccctcgacctccacaacctcgtctgcaatactccgagcgcatgcggtgcctggctggtgctcgagggccaattcctgggcaacgctaaggtccgggctctgcggctcgacgtgagcttccgtaccttcgtccagggcgatctctccatcagcgagttctgccgccagatgaagggcgtggcggcctctctcggtgaagatacggtcctccacgggctcgatgaccgtttcgcctacctccggacgtggatcaccttacagcggcccttccccaccttcctgcacgtccaggacgaccttgttatggaggagcttactcagggcctctagcctgggtccacctccgcgccaggttcctcgtcgtcctcgactgctctcactgctactcctccgctatttttgcaacacagttttggtttgttatcctgcaaggctatgggctggcagctcttgccctgcagcctaccgactcctttgatgtcttgtgggacaatgcggatttggcaaccagcggagatgggcgacaaggtttgaattcacttatcatcttaggcgcctggaccatctggaagcatcgaaatgactgtgtcttcaatggagccaccccaaatctgtccacggctctgactcttgctcgagaggaagctctgctttggtcgttgtctaaggccaaggggctgtccctgaacccagctcgaggtgtcggttagggagggcttttgggggcctggtcaggtccttttcttgtctcaggcgtttcttctctgtcagttttgtgagtggggtttattgtgtccttgtgtgtgtgtgtgtgtgagagagagagagagagagagagagagagtttgtgtgttgtgtgtgctccctgcatttccagattcaatctacgaaggatgtgggagacagaatagttcatcattgtgcatgcaaatctggtactgcagcgactcaaatgctgtggcaaactgctcaactgaagtggtttatttgagttcgaagatttgactgagtgtgcatcacagtaactatgagctccaaatttctgctccaccacctaaacaaaattgtcccatgaacccagtccattcctaatcttgtagatttgcaaccaacgggcagtgttgccctgaaaatgtaacacagcggcagtcgcccacatgctctcatcaatggcgaagcttaaaatggtcaaggcatttctctttccaaatggttggatcaacaccatcaaagcgaggaaaagacattttgggtaatgtatgatgaggaatgacagcagatcgctcaggccgttgttcaggatgaggaccacctggtgggcgccgagggttgggttgatgaccaaacgcacgatgattctgaaaagaagaaggcgctgaagaaggtgaagacaaattggacgtgtcattgacttcatcctcttgacgccgtaattgctctaaaatgagctgagcaatggcgtggccagtttcctccacttgttttctcaaatgtgcatggtccttggcatattgctcagtgatttgaagaaactgttcttgcaactgcttttgtgcttcaccaatatcactgacctgaccaaatagtaggtccatcatcacgcgggaccaacagtcttcatcctgttgttctgttgcatcaattgctccaagcacaaactgagtctgcggggagggctttggaggcgccgtgatgagtttcctgaagcaaatcacaagcggccatcaaacgccaaacgaacgaacctgtacccatgctgtgttgtctctgataccaactgattgccccatggccgctgccgatttcccgcgacgtgagtgcacacaagaagcacgtgatagcgatattgggaggagaacctcaatccctttctgtttctgatttagaatagacttgtctcttacagtgttcacagggtcacatgtatatgtgtttaccatctcctctcactgccggtaggcccaacttaactataacattaacgactaagcaatggaattaacaacttgtaatacaccttgttcattaagccaacgcctgctcttcttcacatcacgtgttgtgctggtacagtactgacacactgtagcagcaacagcagggatgatatccactaatgagcccatgattccatcggcgtgtccaaaataaagtgcttctaccatttcccacatttgtgatcaccgagatggcaaatgtggcttggacatttggatgtgtagggatgttcaaaccatgccaagctctatcagttgtgattttctgcaaccaaaaccatttcatttgaagaggtgatcccaaatgatatacaccattctgttcagtgtccgtgaaaagaatatagcgatagaattccagttgccccttttaattttggaaatttaatcaccaagtggtatctttttcatgtcaaacatttttatattatgatgaatttagtgtataccaaattaccaatgaatctatgtgaaatagtagttaagaatggttttactttttgcttcaattttgggctggaaagccaaggaggaaaaacatatgcaaacaatatggtgtaatagttgtctataaacttgtttctatttctttggacacatggttctcataggctaaagtacgatataatcatctagatgagtaaggctgtatcatgtatgtagattttgttcttttactccgcctaccagagatgccaatatatcttgtttctttcacttatgtttcaatattctttgtaatattatcataattttctatgtttttccaggtattatttaat

SEQ ID NO: 4978 - DNA, 2423 bp, Sorghum bicolor
  Intron number 1 from transcript Sb04g025110.2 (locus Sb04g 025110) derived from phytozome v7.0 (chr-ID chromosome_4; pos 54965036 to 54967458 reverse strand)
cgaacgagcgtaaggaatcattccacccgtgtccccccctccggactccggtggcctcgttcttcctcttcccttgtttgcgtctagggccgggttttctgcagccatgttttgctggagtttgatcgcctctttatctttaccaaaaggggcgaagtcttccttgtctcgtctgatatagatagatgcgaagtttcagggcaccgtgcagttgtttcgatcgctgggttgctctacctacccaggcttgcgttaagggagggtattcctgtttctgagtatgcttggtttggtgctgcgcagattgccctggaacgcagtcggaggaggcggggaaggcggatgcctgcgctgggtgccccaaccagcagatttgtgccaccgcccccaagggccccgaccccggtaattggatcatttcatgtccttgtacagattctgtgacttgctctggtgctggtgtactgttatccccatcatatcattttgttttatcagaaattagcttagtttagtttcattttattacagtggttgtggttgtggttgtggatttggtattttctgttttcagtacaaaatccccactaaagcattttagatttaaggatttgcaacagctgcagggtgcttatatataagtaaaaaaggccaagttatggtaggaagtagcatgtagttctaagcagtccaggcccaaaaaacaaagcgatttgaatcagaaattttagcaccaataaaagagtctgatttgcacctaccccaattatcagagttagtgaactttatgacaaagtaagtgaactttatcagagtagtattaaaacaatgtgacactgagggaagaagggtaggctttgggatgatgtggttcctgtatagcaattcattgtgatcctaaaaacattgtgatccaaacttgtattaatatcctgatgtcacatcctactaccactgctgctaaagaaggttcaaacatggatcgattgacctttaattttgtctacaaagattagaagagcatccagatttcatatttgaatcctgttccaattgtttgaggggtttgctaaatagtagattctgttgcttcaagcctgtgttgactgcaatataaggattaacagatcacaagggaagcctcatggttaaattgttataatgtgatcgtggtaaccatagtttgtgaactcttgctagtcaacaaacctgtctttattgtgaattgtactgttaatcatggccttttgagcactcaaggttcaaaagtgaaggacgttgaaactgaagtttttcagttgcccaataaaaatattttcaggacaagtgctcatctagcgttcagtctaatccaattgattaattaaatattgaagcaattaaatttgtgatttcttcaaagttttgtctattagcataaaaacactgggggaagtggtggagacttaggaaaatgcaattcctgaaaacaattcgccaactcattatgtccttataaacaattcacctgtaaaagaattcatgatgacccgttgtgatatctatttgccacatccttttagtccaaaaggatatgaagagtccaatacaattaatgttattgaacgttctaacttcgatgaatcttgaatgagattaaaaagagtgcatggttttcatatttgaaccttgttccaaatgctaggttgtaggctctgttgattcaaacctgctcattttcttaccctacaaggagtggcagatcacaccacagataaaagaatattctttggaaaaatatcaatagtcattttttgttacttctgatacaaacttcttagctaccttgggatctccatgatctttgagaggttgtctatggagtatgaatatgagagattttacaatttgtgctacttggatgtcagtatgttgaactatttgctaaagttgcttcaatgaattgcctccattttcagtaatgagcaccttcacaaacaatgtacacaatccatctgcttgtagtaaatgttgaggattgaataatttcagattgagcaggaaaaaacactcaatgtgattatgtacttagtggatgttaaagactacaccatcaagttttcagtgtgactcccagcaatgctataaataaatgctttgcccaaatgctattgccaacaattctagatgtgatttagtcattgtagtttattttcgatacatttcactggtgcaaagcagcatgttaaatgtgtgattgccttagcttttgtagctggtggccatttatcttgagctaggattttttttgcatgcagttcaatgtgattataccatcagccatgggtggatgaatgaattatatatacagtgacactatttacttgctgcttgtatatctgttaggtgaaagtgaactgattattgactggtttattttgcag

SEQ ID NO: 4979 - DNA, 930 bp, Sorghum bicolor
  Intron number 4 from transcript Sb04g008910.1 (locus Sb04g 008910) derived from phytozome v7.0 (chr-ID chromosome_4; pos 10624725 to 10625654)
ctggtgagtcacagtcaattctgtgaatattatgaatcttcgacggtgtttcattcctcaaagttgaatactgacagtataaactatttagaaataacaaacaactatcccacaatgaattcacttccatcgtacaagaattaacaatgcttctattaggacttgatacgtcaaggttggagctcacttttgtctgtactgctacttctgtcagatcattatccaatgtgcagcatttcgtggtaatgaggctaatagaaaatagtggaattcaaacagtaaatatgacaatagatggtggttcgattggataggattaaatggaaatgacctgctaacttctttccgtcatgtaaatttatctacattaccttgctgaataaaagcgggaatgcattggcataagaattgacaacttgtacaaatcagaaaaaacagacacattggcaccttttttatccaatgaaaaaaatgcaaatctatatttaattctactactaggatgcaaatcttattggttttaactgactagagcacttttctaaattgtagaccttaaagcttagttgaggtttacaaaaagcttgaattgcaacaaagattaacagtaaagctggaattctgttggttagtcagatttccgtttaatctactgatgtatttattcattttttgtagtttttgaatatttaacattaaattatatttttgttagttactgaaccgaatgatcattgcattctggaaaaattgtaacaactcaagtttgtgcataaataaaagtataaaaaaggggacttgtagagatttatgtagagagtgagctcaactttttttgggggggaggggggaagagtgagcttaattttaatgctgttattttttgttgctgtagatttccatttccgaaaatcaagatccacgtcaagt

SEQ ID NO: 4980 - DNA, 611 bp, Sorghum bicolor
  Intron number 5 from transcript Sb02g032760.1 (locus Sb02g 032760) derived from phytozome v7.0 (chr-ID chromosome_2; pos 67413549 to 67414159)
agcctgtggaggatcaacctctgctgctatatcaggtgaaattcagagaacttttcttttagttatccaatactcattgctctactggttactcttgacatgtggttgttggtttcacttatctatcgtttcttatgtagctgactaaaaatattctagaaaagaaaaatcttagtctacgaaaacctaataaatgtctctgctggtgatcagcaggaaatatcaaaggatataccaactatgataacaaactgaatgagattctgtattttgaatacgattctagagacgcacacaccctgtaattcagaatatgaaggagaaaacctctttcatggcagtttgtggtatcttttaatttgttaggcaatgataaagaactgtgtttactttaactaaaatatgggttgctcaagttgcagtttataaaggtcacttttacctggcatgaggttgatctactttgtggatcttggttgctttgctttactgtgattctacatcatgccacctattgactaaatgcagataatcaaatttcctctctgcaaacaactcacatgaacttacttttgctcttaattgtctgggcagaaaaaggtgacttgtac

SEQ ID NO: 4981 - DNA, 4649 bp, Sorghum bicolor
  Intron number 8 from transcript Sb04g036540.1 (locus Sb04g 036540) derived from phytozome v7.0 (chr-ID chromosome_4; pos 66326225 to 66330873 reverse strand)
gctttgatcaatattgaggatcttgatctttacctgtatgttctaccttatttcctggatagtgttgtttcttatttttactctttgttttacctttgcttggcaagagcaccttagctatttgcttcttgccttgggcataccaaaatagactcaagtcagtgcgcccttaaacacctggctagtgattccacgctgctttccgttagaggctatgcggccactaatgaattatcacaattctggcgattctagtcttataatgtaagaagaatattggaaaatgatattatattgtctcttttaatgggaaatgcaacatacccaaacctcggcccacaagttcacagccaaaccaaatggaaataacatacacccaaccagctgagtactcagaactgttgttgagaaatgatggaacaaaagttccttataattttctccaaatttctgttaattcattcaggaggatttgttgatttttttagtaaagtatgtatgatagctcttgtcaatttgttcaccttttctctcccccagcttcttacatttctttagctctgtatcctttgctcgttgtcaaggtagtcttcaccatctctcgaacattcagcagagctgtgtattactccctctgtctcaggatagaaggcgcaactgtttttttctagtgtcctaggatacaaggcactgctctttaatcctctaggtcacacgcatgcagccatgcaatatttactgcacctgcacggtttctcaccttcctagtcacgcgcatgcaagttactctctttctctctctgttggggactggttagcatgcacttagcatttaattgagcgctggtctccatatgcatgctacaggaaccaaagtatcaatcgtgggagagatcagaaattaaaatttttcttggtctgctcacagaaggcagttgtggtttctatccttagacggagggagtattgtataataagaaaaaggtgtaagggcccttacaacacatacctacccatacccactcaagaaaaccttacaattttaccttttcctagacagacaacaactctaccacacaaacacgttggactccatcgcattggccactgtagcacccggttttaagaacaaaaccagatacacaccatatgtgagcccaggaagtcaaatctctcatatagccacaaataggggtaatatcaatagacaatgcttatatatataacgaacttagcataaaagatataaccttagatagcaaacagcggaaagacactccgttcttcaggtgaaaagctccaaatccacagggacaactgactggttgagcacaagcctaaactcttctccaacttgcaagctggtacccatccgggatttttatccaaataaaatgtaaaggcaagcgtaagtacatctcgtactcagcaagaataacatagggttcatgaggctcaaaggctagacactggttgaactgcatgtagcttttagttgtcacaattttagcatatgaatagcatcaagttgtcaaatcccaaagtaaactcatgatcaggtaaaatgaataaagaatagcataaacaacatattaacaataataacattaatgttttgccattagtgatcatttattctgtattggtccaaggccgctcgtgaccgtgagcacggctgatatatcagttttacactctgcagaggttatacactttcactgtgagtcgtgatttacccttttacccgagggcatgagtctctaaacccccttcctagggaggccggcagggttcactatgaagcctttcaaaggttcgtctaacaagttagggccgctaggtttcgttagtcagtccgtgtgactcacccgcaggaatccacggtctgctatcccccacttgcgccacaagggtaaccactaacaagctagaaaaggtcctcatactgagctaaagccagagccatgtagccctcacagttgtactgtatgtcccggatggtcagatacagataagtccttatggagagaaaccagagcaccataacataagatagcccaatgctccagccctcttttccaaagttgctaaaaagtcctcttttaatgtttattgcatattccattaatcaaattacaagatcatggtttagtggagcactagcataagctacccaatgcaaaaccataggtgacaaggtataagatcaatactaggaaatccttatcaaggagacacatgcaatatgaattgtgtgattaaagttattaggaaacaaggatgatcccatgctatacttgccttgaaactcagatccttcttttagttccaaaccttccacaaactgcttcttgaacaccacgtaaacgctcaccgactaaacttagtcatcacatcaacatcaatcatccagagacaatcatacaaagcaaacaaacatataattagaacaatacaccaacagtagaaaataagatgaaaagtttataaaacaaatctacatcgcactacgatcacacagacgtaaagatcacgaaaatcggagctataacgaagaagttatgattttcctaagatttcctttaataaaataatagattaaaactaagttcagatttaaaaagttggaagcatgtataacagagctactaatctatagattacccaaaaacgaatctaacgaaatttgaacggatcaaaacggagttaaagcgaagaatatatgaattttctaagattttctttagaaagacaattaattaatttgggtcacggaattaaaaagtttcaaactgagaaaacaatgttactaacatgtagatcttttgaatacaaaaccaatgcaatttgaatgggtcaaaacggaattaagatgaatattttatgagtaaaacaaatccagtggcaaacttgtaattttctgaaaacgtattttgaatctgcgcgaacgggaatacgctttcggagttagaaaacacattctggaaatccgcaaaggactgcaggttgactctttaaaaagcacggggggttttctgcaaatttggcggccgaaggggtatcttttgatttgagccgtcggattgcgaatcaagggcctagattagatcgcaggggggatggagtcggccggccggagttgaggtcggccgcggcggctccatggccggacttggccggagttggccgtgccggggctaggaaacggtagggagcaaagcgaatacaccgggacactcaggagcttgtcgcgaactcacctgaggcaagaaccgcaacgaagaaaggccggctcgggcacgcgacgacaaacggcggacggcgaccctggagagaaatccggcgagggttagtgaggcaccgaaagcacgaaatcgggtaaagaaggttccggcgactttgcaaacgtagcgggaagaccggcaagctgctcacgcggctcgggacgcactgcagcggcggattgggtcacggcgcggatcttggcggcggctttggcgaactcgacgcggtggctgcggctcgggatagattgaggggctagcggagctgcgggtcggtatttaaaggacggaaaccgggcgaaatcgggactcctcgcgcgaatcgcgcgcgggattccgttgcggctcgtgtccggctcggacactgggtagaagacgggtccgacaggtgggtcccgcctggcagtggcacagcgcgcgggaccgccttgtcagccactgcggcgaaggggagaggaggcgcgcgctggctgtcctcctgggccacgaggtgggccgtgcgagcgctggctgggccgaaacaagaagaaaggggaaagggggcaggcaggccggggggaggaaagaggaatgggccgagcccgagacagggagggagagagggaattcttttccattttctaaattctgtttccctttttcttttaaaacaaaacacatttcaaaacaaaatttgaattccttttaaactttagtcaaaaccactcatcacaataaatccaatgcaaaggcatgcatgctcaaacaagttgctagatcctatggtaaattttaatttaaagaaaaatattatttttcctatatttcatgggcacaaaaatacacaagttaacaatttatcctattttggaaaattgcaaattttggggtgttacagccacgaggtaagaaataccccaggccccggccagatctcaatccttcttagcgagcaggattgctctagctaagttgagcgatgctccatcgaaaacacagtggctcctctggttccaaatggaccaagcccctaagtccctttctggccataccatctacctcattgcttatccttgcctgccaaaggatatttctcccacctgtggtgctagatcatggagtccaatcgagaggaggaaagtgaaccgtaattgctttgcgaagacgtaagaaagcagcaggtgctgaacgtccttccatcgtccttgtacctctgtcctgataagatatgctaccaggcacacagttctgtatttgcagatatgttgtgttttcatcttcttttgagatttcagtagctgattcgctaaaaatgaacataaattttactgtccaatcatgtgataactaaagtagacattttgttatggtgtattcgacaggtta

SEQ ID NO: 4982 - DNA, 4751 bp, Sorghum bicolor
  Intron number 1 from transcript Sb07g021270.2 (locus Sb07g 021270) derived from phytozome v7.0 (chr-ID chromosome_7; pos 55198501 to 55203251)
tgcggtgactgttggccgcctggctgcccaaccaggtgagaagcgagatccaaatctccattcttatttctccatagtctatactctcagcaacatttgacaattcttaactcttaattcatatccaatgtgtcttaggatggaaagatattatggtaagaaatatgttatatccactagttgaatgcccgtacgttgctacggaaacaaaaaaaaaatatttagaaacaaaatcatgcccatgcccactcatcttagtttcagcttggacatatgcacttccctattgtcaaatagcttggaaagtaaacttttgcttacattcaactgccctgaattaatttgcttaggaaatccgaagtttaggtgccactattgccttttccaatgtttgtttacccaacaacatttgcaggtaagcaaaatatagaaatataagtgttttgtggcttcacatgtttcacattacacaaccaagacaccagtggaaataaacttcacgggtgcagggggctttaaaaaaatgttatctgaacacacattgaaattatagaaatgtattgcacatatgacacagatattgcgaatggcaaaggcaaatgcttccatatgcttgtaccatggtctcccggtgagtcctcggttggtgaatgttagttcggctatcatcaacctgttgttgatctcccttcctttcactgtgtactaccttgtctttaggctccagtttttgcttgcagcaactacatacgagaaatgaggtgttgaagttttaatttcaaagttacacatctgcacattgcacttatgcagaacagcaagcactgagtaacaataataaattaagactaaaatcagaaagaaaaatgaagctttaatatacatgattttgcatccaatataattagatttctatagcaggagcagggagaagagagattcttcacatgtaaggattcatcctctactctgacacttcacatttatcatggtcatgtatgcttgacagccacaaatacatataggataatactatgatagtactattcttcagcagatgttgagataaaatcacaaagagcatctaaacaggccttgaaatgttttcctcagttggacagcactctagaggttgaaagcattagacttagtgcggaatgacatagtattgagtcatctactctttgtgctctacctgtttattatctcgaattaatcttaaaactattgcctcaggaatcatttaaaaaaacaaaaaagggaaattatcttcgatgagaaatttcagcacattgtctgaacattttgcatcaatgcaggccatcactaaaatccataatctatttagtcattgcggatggaatttttgtagcatttttcagtactatattagggaaagcttaacattgacaatgtcatgtttgcaatttttagcttaatatggttctagataaaatatcagccccaaataaaaccaggcaatatgcacctgtgcacacaattgtcctgagcccatcgacccaccaaatattacctcctttgataatagataacggaggaggggtacctgttctgtggcaatggctatcacgagattctcgatttgctcctgctcagccttgtgtgtcaaaatcatgtgtgcaactgtactgtactttagctaccccagcatgaacatgtgtgccaaggtatgttcagaaaatctctactaaaaggcatgatcatgtgtgtcaacatcatctcaaggaaatagaatatttctatagtccatcagacatattatcatccttctgttcaacaacgccagcatgaacaagagcagtggagctgtttttgcaagacaggttatcagaaaatccttatcttagatccaagaagaacctttttaccacccaggagtgtggagttctcatcagtcagaaaattcacaagtccaagcccaaccttatcgccaagtaaaatttctggttctggccggcatcaacagaggatgctctgggtgatttggtgccaaggccagtgaaaaacttgaggtctaggggtgatgtactgatgttgaatagcaaacatgcaaggagacaaggacgctatatacaatagacataccacgttaaattttagccacagcaataagctactctccagaggaatatatgcacaagccaagagagcaaatcaaaacactggacatgggggaataattcttggacctgcatctactaacagaaaataatagatctgaatttcttacctctgaatgaaactatagtgaaactatagtagggctgcatatttttctcagacattactgctgcatatttacatgtggatgaccattttctttgtgttgctgcagtatcaggtaagacataaggtagctaatatgcaattatgcacttatgctagtaaactgggggtgtcttggcaggattatgcagttatgcacttatgctcttctgcaatccaacaacatcaataaaaatagagatttttcttaggaattagcagtaggcttatcctaaattagcaggagacttaagaatatttatgttagtgtgcgcatggacaggcgggtttcggtgagccagctgcaacctcgcctctcgccggcggccgtggagggcatgcgccgaccgtggaggacctcgcctctcacctctcgccggtgacccagctgcgacctcgcctctcgtcgcctctccttggtggcgttaggcgcgtctcctcctcggcagctaggtgggaggggagcgaggggagtgcgtccaggcggaggtatgcgcagctcctcgacagctaggtgggaggggagcgaggggagtgcatccaggcggcaccgacgttgccgttcggccgtaggtaagcgcacgacggcgaagtgggcggggccgttgctcgtcgtccggtattttcctggcgcacggcgcccgttgcacggcggcaaggagggagtggcgtgagtttgaaggcgatagggaggctcgctggattgagagcgaggggattgagatcggggattgtgggaggggagggagtgcggcgttgttggggcttgcgggagcgagggagtgcgggagagatggatgggatactgaggggtggggaggtgtctagaagagagagtggggcccacatgtcggcgcaaattcactcggctgagtgaagcatcacgcggcggcttcaccatggagccatagacgggtccgtttcacgttttttaggtgtagagattagtgtactgtgtacagtgagcaaaatttttttgccctctgttatttagccctccccttggtccatttctcgatccgccactggatgttggtacagatgggttgaacccgcttccatgggctggatcggggcgggttatttgcttcaaaatttgggtggggttgggttaggggaacaacttgatagcctgatgatcggggtgggttaagggtggatttagccccattaggccttatttggatgtagtcggattcgcatcaatccacatgtattggggtggattggagtggaacttgaactaaattccaccccaatccactccaacacatgtggattgaggtgaatccaataacatccaaacaagaccttaacagggcgagatcctggtctggatccgatgttggtctggcaccaatacggtgctcccgaacgaggccttaattgggccgaaagcaagccccccaccccgaggccctattgagtgacaactcttctcttcttcttccccagacgcccgcgatcgcaatccgccgccgcagcccggcaccagacgccatctctgggcgtcaaggtcaagcgactctcacccccactcccagtgcgttccccttccccgtccactctcaccttccagccctagctagaggctagtgcctagaccggtgtaccttgggagacgagtgccaggtgcggcggccggcgggatctagtcatccgggacgtctgcacttcgccacagcagcaggcatcccgtaagccgacagggccgcagggcgccgcaccagaggctcagccgcgcaaggcaccgagcagccgagcaacaagtagtcaggcagcctgtgggcagcggcagacggcagcaaggctggaaatcacgaagtacctataggtatataagttcagttctccattatctgtaattttccccacttgaggtgcattgtagattctcagcaattgattagtgatttaatggcagattgtaatcaactcaacgtgacgagaagaacatttttgtgctcacaattttttttagttcaagcaatgtaaatattggtggtacttccctgagtgcatatcaatgctctatgaatgtaaaatttgatcttcaattgtttattggccctataaaatcgtacaaagtttctccaatatacctattgatccattaaaattgtctcataacttctgtttacggattttgggactgcacaactgatggattccgagagatgtaacagacttacagtagggatgctaggccaaagagttaaaatatatttacatggtagtatatttcgtaactgtagtagtttcaacattatatagattaatcatgaacttttagttgtattaaacaaataagatgcatatgttcattgttgtaactaagttcgttatgaatttgtgaaggtatatatttgtatatgaaacagctttggactagcaaattttatgtatgtgatatgtttgtgtcttccttagagctcagccctgcctactattttagtctgagtctg

SEQ ID NO: 4983 - DNA, 2043 bp, Sorghum bicolor
  Intron number 1 from transcript Sb05g001970.1 (locus Sb05g 001970) derived from phytozome v7.0 (chr-ID chromosome_5; pos 2148385 to 2150427 reverse strand)
gaaggtgcgaactccggttccccccctctctccctctctcgctcgctctgctggacttggttttcttggggggcgtagctgataccttccgttctagatctgcccgcggggtttccctcagctgagttgtacgagtttgggcgcgcgctctttcgattcgcccggatttttttttcctccccacggttccggcctgctgcaccttggtcgaagcacaacaaatcctgttctgggctgattgcttgtgctgctttttgatttttcttgattcggattttgcggtgcgatttgggggagctgcaggggaagaaggttcagtttttcgcagtgccaaatgtatgtatggcttaagacccttaggatcccagcctttggttttagcttggaatgcgggcgcttgatgcggggtctatagttagcttgatatcgggcgaggcgttcctcatgctgtgtatgaaggtgggctgtgagtgttttgcttgcagctcatgtgtgcttgctgataagatttaatttaacttcctattttaaggctggagctggaccagttcagttttgggaatgtatcctactcatgtttaggtttcaggaatcaggatcgtgtgtgaacggaattgggatgggtattttcttcttctttctatgcagaaaggaaagcaagtccattccagtcctgtcggcaggttagcctgaaaatggaatgatattacataaattaaattgcaaatcgcagctccccaatcacaagtttagttgaataataatataccacattttagaattcattgcttattcagccacctaagtttgtgcgtttttgtggtgttcaagcatagatcccatgtatacttctgtcagcagcaatgctgtgttcttgtaccccccttgtgacaccacagtatataaatggagtgaagattgcaaaatgtaggactgctagttcagttcatttggaatttccgtcatttgcgaagttgatatcgtatattctgtaactgtaaacatctacagtgcccttgcatcagtgactaccatggtacaataatctttggcgctggcagaccatcaagtttcactgttttttgtggtggagatggggggaatatgctcatgtaaagttttgtagaaggaatgaaggataggatgtgattactgcatttggttactcagaattctattgtccagtaaataaagtgactgctcacaagtttagttgaataatataccacattttagaattcattgcatattcagccacctaagtttgtgtgattttgtggtgttcaagcatagatcccatgtatacttctgtcagcagcaatgcttgttcttgtgccccccttgtgacacaatctaaatggagtaaagattgcaaaaatgtagcactgtcaattcagttcatttggagtttcagtcatttgagatctataaagcagaagttgatatgatatgttctgtaactgtaaataaagttacagaattctaatatccagtaaataaagttactgctcatatttggttgtctctgattctctgtatttcttgagtttctaattctagtgatcattgtggtaaattcaggttgactagataagtcgttttcgttagtagtttggtgatcgttctctgatcgtcctgaatattggatccatatttaagtttttatgctttttttctttgacttgtatggacttgttgggcacatccagaaaaatctccaaaaagatcatgcccatatatgattgtactggtattgtgtttaggtactgattgattaaaccaagtagacatctttgtagagtaacttctatgtgccattttttcttgtgatgtattgtttcatgctacattttctatcttcagtaccctattgtttatctgctacttgttgtttgattgctcatcttggatccttgagtttctcgaagctttcatattatattatttgaacatccatttgtacaaactttacacttagtaactgaagggatttgacgtaattttgcagaccaatcgcctgaccatatatcagttggttcagca

SEQ ID NO: 4984 - DNA, 18748 bp, Sorghum bicolor
  Intron number 8 from transcript Sb02g016600.1 (locus Sb02g 016600) derived from phytozome v7.0 (chr-ID chromosome_2; pos 37823952 to 37842699)
ctggcctgaagctgtctgcactgagccaaataaaggtgagcacaaaatcctctatttgttaaagttctgtggtgatctgaatgataattttttttatcgcatttcagattccttaaggaattaactggcttagtattgttggataaactgatgaacacgagattgatctggcaacagccagagggcagtttgcctgctatggccttttgattgaattgcaaaatggtattctcggttaacaaaaacccttacccaactccagctcttataggctgagggccacccctaggattaagcatattctagagtagattcctagataacttggctgccaagggtcttatcttcttgacccccaagcaagcctattacagccacacaaggagaaacaattaagacagaaaaacaaaactgcaatgggcaatacttaggccctgctatactagatacatgaccaactgctatcagttctcccccttggtcttgatcccgtttgctgaaattgcctccagaccgatccttcccctgagctcttcaaacttggtcttgcccagtgccttggtaagaatgtcagccagctgatcacctgttgagatatgctctgccttgatgctgccatcctccaaacagcttcgaatgaaatgatacttgattctgatgtgtttgctgcgctcatggaagacagggttctttgctaaggccagtgcagacttgctgtcgaccttcagctcaacaatatccacaggtcttccaagtaactcagccagcaatcttgacagccacatggcctgtgtagcagcagtagtagcagccacatactctgcttcacaactggagagtgccactactctctgcttgatagactgccaagacaccagacactgaccaagaaagaagagaacaccagtggtactcttgcttgtatcaatgtcaccaccaaggttactgtcacaataaccaatgaaccgtgcactgctaggggctctggtgaagtgcagcccgtagtccagcgtctcggcgagatacctcagaatgcgcttcacagctgcgaggtgctccatggtgggcttctccatgaatctgctgacaaagcagacggcgaaagcaatgtccggcctggtgggaacaagatagcgcagactgccgatcaaccgctggtagttggtaggatccactgcttcagcagtactgaatcgaatgagcttcaatctttcttccatgggagttgctgcagggttgcagccctccattccttcgagctccagtattctctcggcgtagtgtgtctgccggagatagatcccagaagctgactagcggacctcgacaccaagatagaagctcagcagcccgaggtcgctcatctcaaatgccttcatcatctgagccttgaacgccgccacttccttctcgtcggtgccggtgatgatcaggtcgtcgacgtagacgccaacgagcaggattgcccgtccactgctccgccggtacatggcagcctcgtgagaactctgctggaaccccatctccttgagtgttgagtctagcttctcgttccaggctcgaggcgcctggcgcagaccgtacagagccttgtgtaggcagtagaccttgtcttcttccccggcgacggcgaagcccggcggctgccgcacgtagacttcttccttgagatcgccgttgaggaaggcggacttcacgtccatgtggtggacaggccatccttcctgagaaccctgaccgattccatgcgcgccactggtgcgaaggaatcatcgtagtcaatcccctcttgctggacgaacccgcgtgccaccagacgcgccttgtgcttgatcaccgcgccccgctcatccttcttgagcttgtacacccatttgagggtgatgggccggtggccagccgggagcgttgctagctcccaggtgtggttctgctccacagatttgagctcctgctccatagccgcgcgccaggcaggatcgtccttggcctagtcaaagttcgccggttctcccgcatgagtcagatggacttcagcgaagaggcgcggcggtggtggcggtgtagaaacgttgccgatgatgttggccaccgtgcgatagcgcaggggctcatcatcgtgccaagcatcaaccggatcgccgatctcaactgccgcagctggtgtagtagagccagcgccaggagtcttcggctcgtccgcgttgtccctctcatgctcccccggagcagaggacagcgcgcgaggtgggctcggggaggttggcgctgacgcggatatctcctctgcttcggccggccactcgatgtcgaagtcgcttgaagccgctgcagaggatccggccgccggcgtcgtccagttccacccacatctttcatcgaagatgacgtcgcgggaggtcttgacgcgcccagacgtcgggtcgaacactcggtaggccttggtgccctcagcgtagccgatgaagatgccggggacgccgcggtcgtcgagtttgcgcagctgccccaaatcatgcgtgtaggcgacgcaaccgaagacgcgcaggtgcgccacggacggcgcacgcccgtgccaggcctcatagggtgtcatgccctgcaatgacttggtgtgcgagcggtttagcagatgaactgcggtcaccactgcctcccaccaaaaacgagccactgcttgagtagagcccgcgcggtggccaccaccgtttggttccgccgttccacaacaccattctgctgtggcgagtgcggcgcggagaaatggcgcttgactccatggcgaagtactcggcgagctcggagcaggtgaattctccaccattgtcggtccgtagcatcttcagttcgtggccgatctccttctcagcctgagccttaattttcttcaccgcctgcgccgcctcgtccttggttgcgagcagcgccacgaacatgaagcgcgtggcatcctccaccatgaggaggaagtagcgccggcctcctggagtcgccggcgtgatgggcccgcacaagtcgccgtggacaagctccaacggctgctcggcgcggtacgcagccttctgcgggaacggctggcggcgcatcttggtggtgacgcaggtgtcgcagacttgcgccgcgtgctcgatcaccggaatgcctcgggccatctcctcctccccgagccgatggatagcgtcgaagtgtagatgtccaagcctctcgtgccagcgccaggcatcgtcgtccttccgcgcggcgaggcatacaggctgcacggcgtcgagatgaagaatataaaggcggttgctgccgcgctttaccttggcgaggaggcgcttgcgctgatcctagatccgcaagacgccgtgctcgatctccaccttcgagcccgcttcatcgagctgacccagggacatgatggagttgcgaagcgccggaatgaagtagacgccgtggaggacgcggtgctcgccgttcttcgcctggaacacgaccgagcccacgccctggatctccacgcgtgatgcatcgctgaacttcaccgtgccgcggatggtcgtgtcgagctcggagaagatctcacgacgcccagacatatggtgggtggcgccgctgtcgaggtaccagccgtcgagcttgtcctcgtcgctggcgtcaccgaggaaggcacgtgcgcgcggatcggcgaagtccaggaacgcggcggccttggtgtagaggacttcaggcgtcttctccagttgcacaacgccgtgggcgaagaagagcgcgccatcatccgaatccgcctcggcgacgtgtgctgcgccccgcgcaccaccgccgccgcctccctgctgctggccaccgcgatctcttccgccgccaccgccttgtcgcggaggatcacggcagtcgcgtgcccagtgacccggccgcttgcagttcagacagatgtcgtcgcggttggccttgcgttcgccgtcgtcttcgcggcgctcgttcttggccctctgcttcttcccgccacgggggcgtcgccgcggctccttgccgctggcggaagcagagtactgggcacccttcctcctctccttctgccgagcgtgccactgctcttccgagagcatcagcttgccggcgatgatgaggggctccccggggacctcctgcaaatcgtccaccgccttcagtcgacccgacacctcctcgatggtgagatcctggaagtcaaggagggtctcgatggcgatgcagagctgcgcgtacttggctggtgcagcgtgcaggagcttctccaccgcgcgctcctcgttgatgtctgtgtcgccatggagggcgagctgctgcttcagggcaaccaggcgcagagtaaaatcctcagcctgctcacctgggcggaaagacagcaactcccactcgcggcgcagacgttgtagagcggtgcgccgagctcgttctcctccgatgcgtgcagtggcgagggagtcccacgcctccttcgccgtcgccttctccgacagcggcatctgcatctcctgaggaacggcggcgatgagcgcttcgacggtgcggcggtcttcatggtggggaagatcgccgtactcgatcgcgtcccaaagctggcgagcttgaagcttcagcttcatgatcgacgcccactcgtggtagttggtcttggacaacatcggccaagtggtggagccgccggagtccttgtacacggcctggatcaccggcgagcggctcctgccgccacgtccgcgaacacgagattgatctggcaacagccagagggcagtttgcctgctatggccttttgattgaattgcaaaatggtattctcggttaacaaaaacccttgcccaactccagctcttataggctgagggccacccctaggattaagcatattctagagtagattcctagataacttggctgccaagggtcttatcttcttgacccccaagcaagcctattacagccacacaaggagaaacaactaagatagaaaaacaaaactgcaatgggcaatacttaggccctgctatactagatacatgaccaactgctatcaagtatagtggaagtggaaattattcaaaaaaaatctacctgtgatgaggtctatttcgctaaattgaaactgaagcctgaggtagagaagcaattataggtagttgggacttcatatcctggttatctaataaatgttccaccattaggatggtgagtctagatcagtttgttaagggtgtgagcatccccatgttcaagtccttgcctagaccgttttgcgttccgctgtcttcttaatataaagccacctagttccgcataggttggtctcttggaagttcatctgtaggtgaagagtgactaaatgactaactgcatagcaacaataagcacatgtgtaattgtaaaactcaaacagtaaaagaagagaaatcttttttcgaaatcttccagcatggctagtctagacttctgctgttcatcactgagtaaacacttgttcatgattatgtttataggctgggtgtcttcgtactagtgcagaagcagaatgcacaattagctcattgttcaatcataaccttgaaaagttccagtttaacaataaatgagtttgatttgatagatcttgaactcaggattgacttctacaattatttaggagcttaagcatttactagtaaaaatgcccgtgcgttgcaacgggagaaaaaatgctatcaaatattaatagaaaataaggacaatgttacatatttacttatattttaccctttctataaatattaaaagctataaatgcccgtacgttgcaacgggagaaaaaaagctatcaaatattaatagaaaataaggatagaatgttacatatttacttatattttaccttttctataaatattaaaagctataatttatattacggtgactacattacgtgcacctcaagctaattgcacaagttgattgtaaattataagacaaattttttatgcctaattagcccatgattaaccataattactacagtagcctctctctctctcttatatatatatatatatatatatatatatatatatatatatatatatatatatatatatatatatattaaagatcctttattttcggtgttgaaccactgtagacctacagtgcttacctccacaggccttattcagttcccaaaaagtacccaaaaattttctagattcctcgtcacatcaaattttacggtacatgcataaaacattcaatatagacgaaaacaaaaactaattatacagttgatctgtaatttgtgaaacgaatcttttaagcctaattagtttatgattgggcaatatttatcaaatataaacaaaagtgttatagtatccgaaaccaaaaaatttaacaacttaacaaggcctcacattatactgtttatctacagtgttttcctcctgcccgttcgatcctgcgtgcactggacacatgcgccacgcagttgccgccgccggcctgcaggcccacctatccaccgctctagccccccatgggccccgcaacctattaactcagcacctggttgccttccactacaacgccgttccatctctccatctgttcctctctttccatcccgacgttatccattctgcagcttcacagctaaataagtcttttttttccaaagatttttacgaatacgcttttttgacatcgaagtacgtttttttggaactgccattcaaaaagggaattacttttttctagttgtatgtgaaagacatctattgccgcaaatcaatcattctttctgttttttcttagtatttacctcctgccgatctccgctgccgtctccggatccgcttccagcggcatcgcgttgccggccgccgtctgtgcgactgtgccaccctcttaaagatggcaaccggcaagaaatatccgcgtgcccgcgggcacccgacccggcagacgcggatacgggcgtcactttgtgcccgcgggcacacagttgtgtccagcgggcaaagatatacgggcaagagaataccttgcccgcacccgcaaatccgccaaacccgcactgacaagtggggtcacttagaaagaggtatatattcttcaaattagggtttctttctcccaaattgccgtcccagcaactgagtagcggccgccgccgccactcgcgcgaccctctcctcgcctgcatgttgctcccctcctcactgtcacaactcacaagccatgcggctcttgctctgctctcctccacttggtcgcatgcgcgggctctgctctcctccactcggtcgcgtgagcggtcgcatgctgctctcgctctttctccactcgcggcgaccggagacacccaccgccacagaccctcgccgtcacccacgcgactcgacttttgctcctccactcgtggcggctgcgtcgcgcctccctacttgcgccgcggtcaagctgctctgcatcgggttactttacgccggcgcacatccttgtcctcgtcaagctgccttccccgtccagttgcctttcgccgccagatctggcgggcatgcgggacgcccgcgggcaaggaatgcccgcggatggcgggcgcgggcacaggatggcgcccgtgacagatgacgggcgcggacacgggcacgcaagtttgctcgcgggtgcgggcatgcggcactagtatccgcgggcattgtgcccgttgccatttttacaccctctcccctacacgaggcccgccggcgccacccacccgcgccatcgtgccttcgccgctcctgcggcctctaatcacgcgcaagcgtcctctctctcactctctctgcatccacttctttcctctgctgccgcatcaaatccttcgccgcctcccgcactggccttattcagtctgtatccagagctcccaacctttcccggatcgagccccatgttctctagatctgatttcctcgtccctcttccagctccgtccatgttctgggatgtctggtggtggcaggtgcccgaggcgtcaccggtggagccgccgtcaatggaaccgctggtgagcagcagacctggggacgcaacaaccaagccgtgaggagaccacgctccatcgttgattgtggcaggcgatgtcggatgatgccctggtcgtttgtgtttttttgttatgtggttggtgcttgatttgcaatgtatttgatcttgatctggagtaggagcatatttatgatggtcttgattttgtattgtattctatttggtcttgatctgaatttgatctgagttgtattcgatttgttctattggatttcggaagggagtcatcggacgtggggctttcaggggtagaaaaaacctatacggactgtggtcttgattttgtattgtattctatttggttttgatctcaatttgatctgaattgtattcgatttgttctattggatttcggaagggagtcattggacgtggggctttcgggggtagaaaaaaacctatgcggactgtagattggcagaaaaaaaaaggcagactaaaattttggctctttatagataggtatagatgcccccattttgaagtgaaatggtggttttgccctcgtttttatttaaccttgtgtttttacccctgtgatttcaaaactaagagagactttgcccctattctgttaagtccacctaatggtgttaacttttgtacaaaagcacaagtttgcccatgcatttttacccctgttttattttgatatttatgtttgtacccctattttcagatcagcattttggcaatttggatacagaatttgacaattcaatcagtgcaaaattcaacaatttttagaaaaaaaatcgacaacatttcaactaataatccatataaacacaaattaatatcgtgcaacagattaatatcacacatatcgcattaatggtaacacaccaggtcactttagtatgtctagatgacatgtcgaataccattatacaatactatattacatgccaacatagaggtccacatggcatgtaaaacaccaacatacaggtccaaatgacatgtgaaacaaaagtagaagctaactgctaatatctacgtggcagtttccacacaccacaggtggaactgcctacatagtaggtgcttttagtatagcatggaaagatttgtcgcttccaattaatagaaaccaaaacattaactgatttacagctgtagcctagtgagtgctatcactaccaccatgcaaaatttgtctattctgatttaagttagaccaaagccgttacagaacttcagctcgaacctacagttaagtgatgttctgcagagataagataactttcaacaggtagctaaagaatcatataatggaatgctcccccaagtatcttagggaaaaagtctacataaccccccaaactatctagagtggactacttcaccccccgaaatatgaaaccggatattctaccccctgaactttcaaaaccggtcaaataaccccctcgagtggttttggagggtggttttgtctttttctttttttatttattttcgctgaatctttgaaaaaacataataaatcatagaaaaatcataaaatgaaaattttaattttgttggactcctgatgagttgatctacacagtgaatatataatatagtatactttagtacaaaatttttgctataactttaaatctatatttttctgtaattaatttgaataattcatatatgcagttcctgtggtccaattgtggtaaaatttttatggtgggctcattattatatgcttgaactatggtaaaaatttcataatcattggatcactataacttagttatagataaagcatagatttaacaagaataaagctaaataaattgataactaagttatatgtgattcactaggtatgaaacttttaccatagttcaagcatacaataatgagctcaccataaaaatttcatcacaattggatcataggaactgcatatatcaattatttgatttaattacagaaaaacatagatttaaagctacaacataaactttatactaaagtatatcatattatatattcactgtgtagatctactagatctactcatcagaagtccaacaaaattaaaattttcattttatgatttttctgtgatttattataatttttcaaaaatttagcggaaataaataaaaaaaataaaaagacaaaaccaccatccaaaaccactctagggggttatttgaccggttttgaaagttcagggggtaaaatatccggttttatagttcggagggtgaagtagtccacccttaatagtttgggggttatgtagactttttccagtatgtatcttataccccatgattccaaatcaaactgccttcaagcaagtaccaacaacacaacaagcaccaaatgagaaacagatcagagaggggatcagctgggaatctcacctcagtcctgcaaaaaccagcacaacaaacacaagtaaaatgaaaaggaatagctgagaacctttctccctccctgagatctggagttcctgaaaccctataacaggaactgcagcctgggggggggggggggggtggaatctgcggcgcaggaagtcgccgggctgaggttgcctgagtaccggcctgggagggcctaccggtcgccagggccgtgctgcctttttgacgccagctggtgaaatagcagtgtctgaagcccgcgttactctctgtccacggtccagtgaaaggagagaggcacctgctgctgagggtgtattgtggtctttttgtgtgggtatgttttttgtttttttgtccatttagtccacccaggctaaatggtgtgacaaagtaggggtaaacgccagcttcatttcaaaattgtgagggtaaaattgccattgaagtcggagtagtggcaaaaacaccaaattcccaattattcagtttcacgcatctacgaatcattcaaatgtcgtgcgcagagttattttattagcattaggcaacttgaatattgtgcatacctcttgtatagtatcctgaagcttacacagggacacaagctttgctgcgaattacagcacacaacagtggtcaggagtaatattgattgaaacatgccatttgaagtaatcagatgacttcgttttttatattctattgactgtattttctgtgaggtcacaaaaagatctaaattactaagagttctcgctctctagacattacatttcaatgttgaaactaacaattatgcctaaattttcttgaatattgctgacttgccgtattacaatatttttttttgtctaaggccttgtttagttcgcaaaaattttcaagattccctgtcacatcgaatatttggtcgcatgcatggagcattaaatatagacaaaaataaaaactaactacacagtttacctgtaatttgtgagatgaatcttttgagcctaattactctgtgattgaacaatgtttgtcaaataaaaacgaaatgctacagtacccaaaaacaaaaaattttgcgaactaaacaaggcctaagttgagattttttcctctttcatgaaatactttgaaatattccctaaaatatggtcgtatatgttatttcttcactgttagaataggcgccctatgggctggccatgggcctggcacccaagcctattcggcttggctgctcattgttatagtaaataggaatagtaccacattgtctacccacatggggtgttagtcctatgtatcctatataatcagcctatgaggctcaatgcaatatatcaaccaataccgagacatattctctctcatggtatcaaccgccttttgatccttttctccgctgccctatcagcgcgcaggccaggacctcgcgacgcactcctgcgagcagccttcccaacagcgtcgccagcccagccatggcatccactccaccaacctctcagtcggatgccaccgatgcaacctctgctggggctgacgtccaggctgatgcagttgcccagcgcctcgcccaggagaaggccaacgcggctgccgccgctgctcagcatgccgagcgcgcacgctaggaggctcaggatgctgctctagcacgtgccgtccaggccgaagacgaagccaaggctgcaaccacggagcgtgatgccgctgcacagcgcgccagcgatgccctggcacgggctgccaaggagcgcgcggctgctgctgtcggcctgtcaccatcgcgccggagtcttctggtgcgtcatttggaggtacgccggtgcctgatctgcgtgcagccatgcttcaccacgaagctgtggctctcctccaactccactctcaggctgttgcggtcaacaacatccggaaccacgtcaccaccatcctcgacgtcgattctggtaatttcagccgttggtgcgatcaatttctcctcatcctcggcaagttttcgcttcaggaccatgtccgcgaggatcccccggacccgatctctcctgattgggctcggatggactgcgtcgtcaagtcctggatcatcgccatgctcaccgatgatctaggcgagatcatctccgcccggggctccactacccgacacgcctggctcgccgtcgagtcgcaattcctcggcaatcgggaggcccgctccattcagctggagacgcggtttcgcaacttcgtccagggcgacctctccatcaccgagtactgccgcaagctgaagaagatggctgatgatctcacggccctcggcgaggtcatctccgaccgcactctcgtcctcaacgtcatccgcggcctcaacgagcgcttcagccacgtcgggacgctccttcgccgggccaaacctttccccaccttcctggaggcgcgtgaggatctcgtcgtcgaggaactcaccatggagaaccgcaaggaagctccagctgctacactcgccgcctccaccaccaccaccccggcccctgcgtcctctggtccgggctctgggggcactggtgggagctccaaggctcccaacaaccgtcgcagcaagcgcggcggtggcggcaaaggccacggcaacaacagctcttcaggacagggctccagacctcctggtggcacaacgcagcagcagcagcaggccactggacagcagcagcagactgtcggagggcgcccttggcccagcttctacaatccttggtccggcaccatccagatgtggccagggggccctcgtccacctctggcgcccatcccggtgccccctcacctccaggcgcagcaccaggcacagcagcaagcgcagcagcaggccctgcttgcccagcagcagcagcaggcgcttgctgcccaccagcaggctgctcccattggtgctggaccatgggtcgctccggggttttacaaccctatgaccggcctcccctcctgggacttgacggagctcgccgcggcattcagcacgacctcattgacccctccttcgagcaacgagtggtacttcgacacaggtgctacctcacatatgacatctcagccttcttcactttcacatgttctattcccgcggtaccctaacccttcatctattgttgttggtaatggctcacttattcctgttactgccactggctccacagagttatcacctactttacgtcttaataatgtccttgtgtcaccacaaattattaagaatcttatctctgttcgccaatttactaccgataataattgctctgttgagtttgacccgctggttgttctgtgaaggttcttccaactcggaaagagatcgtcaggtgtaatagctccgcgccgctataccctctttgccttccactagcactctccttcgccgctcagggctcctctccactatggcatcggcgtcttgggcaccccggccatgagaccgtctcaaagctcgcgtttagtgtttcatttcctattcaagactgttcagatttatgtcatgcttgtcaactagggcgccatgtttgtttgccctttcctgtgtccacctctcgtgcatctagcaagtttgatctcattcattgtgatttatggacatctccggttgttagcatttcaggttataaatactatttggtcatacttgatgattgcactcattatttgtggacctttccattacgacttaaatatgatactttcagcaagcttgctcacttcatcgcccatgcctccactcaatttggcgcccgcgtcaaaggtgtctagtgtgacaatgggagagagttcgacaactccagcacccggcaattcttcctcacccagggcattcaccttcgcatgtcttgcccttacacctcgcctcaaaacggtaaagctgaacgcattattcgctctatcaataatgttgttcgctccctgctctttcaggcatccatgcctccctcctactgggtggaggccctctccgcggcgactgttcttctcaacatattgcccaccaagactctagagttctccacgcctcaccttgccctgttcgacaagccacccacatatgatcatctacgagtcttcggttgcaaatgttatcccaacacgtccgccactgctcctcataaacttgcccccaggtctgcccaatgtgtttttctaggctattccgctcaccacaaagggtaccgctgccttgatctatcatctaatagagtcatcatctcccgacacgtcatctttgatgaaacagctttcccttttgctgagcaccatggtcctagtactcctgtagacctcgagttccttgctgatgacactactgatgtcgtgcccgcttctattggaccgttgcacaagtttttgcctgcaggaactccacctagtgccgccgacaccaccagcgccctgccggtccctctgtggccatgcctggggcgcccctggagcttccagaacatgctgatgatcctccgacgcccgcgctctacatccccctgcgctgcgagcatcgaggactccaaccgcgccacgcgcggccacagagctaattggcgcaacgcctctccacgcctgccgtacgtcccgcccgcgttgcgcgccggctcgccatccacgggctcccctgcgcctcctcatgcgcctcgcgggcctccaccggggtttccacctcttcgcccggctcgcgacttcacataccactactcgcgtcgaccgcgaccaccaccgtctgctcctgcactggccgccccgactgctcctgcaccagccgcccccgctgccccttcaccggctcctacggaagccgccccgctgcccaagggcgcggttcctgttccactggtggccaaccaacactccatgggcacccgttcgaagagcggctttcggatgcccgccgcctaccatgttgtgcctctctccggtgccaaagacctttcgaagcgctcttgctgaccccaattggcgagcagctatggaagaagaacacagtgctctcctccagaaccacacctgggatcttgtgccccgtccggctcgggccaatgttgtcactggaaagtggatcttcaagcacaaacttcagtctgatggctccctcgagcggtacaagacacgttgggtcctccgtggtttcacccagcgacctggtgtggactttgatgagaccttcagtccggtggtgaagtccgctactatccgcatagtgctctccttggtgctctctcgccgttggcctattcatcaacttgatgtgaagaacgcctttcttcatggcaatctcagtgagacggtgtattgccagtagccatccgggttcgaagatccagctcatccggatttcgtctgcctcttgaagaaatcgctctatggcctgaagtaggctcctcgtgcttggtatagccggatggccagttacttgctgtctattgggtttgttgaagccaagtcagacacctcgctcttcgtctaccagtgtggatcagacacagcctatctgttgctgtatgttgatgacattgtcctcacagcttcatcgaccgatcttctccggcggatcatctcagcactgcagcgagaattcgccatgaaagaccttggtgaactacatcacttcctcggcatgcatgttcagcgaagtggtgatggacttctactctcacaacgacagtacatgttggatattttagatcgcgccagaatggctgagtgcaaaccatgctctactccagttgacaccaatcctaaggttgctgcagctgaggaggcccctgtgtctgatgttacagacttccgcagtcttgttggagctcttcaatacttgaccttcacccgtccagacattgcgtatgctgttcagcaggtctgccttcatatgcacgacccccgggagcctcaccttgctgccctgaagcggattcttcgctatgttcgaggcactcttcaccttggtctcatgctgcgaccgtctacttcgactgatcttgtcgtctacaccgatgctgattgggctggttgtccggacactcgcaagtccacctcgggctatatgccgtgttccttggcgacaatcttgtctcctggtcctccaagcgccagaacacggtatcaagatccagtgctgaagccgagtatcgcgcggtggccaatggagttgcagaggctacctggttgcgccagctccttctcgagttgcatgcccctcttcggcgcgccacactggtgtattgtgacaacattagtgctgtctacatgacctccaacccgattcagcatcagcgaaccaagcacattgagatcgatcttcacttcgttcgggagcgagtcgccattggtgatcttcgtgttctgcatgttcccacctcttcacaatatgcggatatcttcaccaaagggctgccttcttcagtattcacggagtttaggtccagtctaaacgtgtagagtggctgacgattcgactgcgggggcgtgttagaataggcgccctatgggctggccatgggcctggcacccaagcctattcggcttggctgctcattgttatagtaaataggaatagtaccacattgtctatccattagtcctatgtatcctatataatcagcctatgaggcccaatgcaatatatcaaccaataccgagacatattctctcgcattaacccccctactttctctgtatttctttgaaataagctacatgcatggagacatatgctgagacatgagattcgaaagtcctgggacatatatataacatgagtcatgagataatataaaaaattggaatgccaatttatatattcagcatattcaaatagttgcattggtcgaacagcctgaatatccaatatgtgttctatcgggagcatattttgattgttaattgaacaagggctgtcaaatgaactttgcagcttggttgaagtgccacaatgtaatgaaagatactcttgagtagtttaatgtatagttttcatgctgtaggattatgaggatgctacactagctagaaaacaaaaaaaattgtcctcataaaacaggatctactgtgtccttgtgctcaacctccaaggtatccacacgtacagggaggaagcgtcttgcctctggactgctaggtccgcgaggagcaacaggcgcgggcgcgggtgtgcggcggcggctgccaaatggcgtgtgattaaagtattaaacttggccgcaccccaccctctctttatataggcgtgccaaatgtgctcccatgttggaggcccattagtaaccatatgccctgtctaattcgggtccaatccgaattaggcttccagccccttaagcgtgcgaccctatgggtttacgcacacagacatggcccgagtactcttactcggccattagttgatagcggcctctagcaaggtgtgtcaactcctatgcgtacacaaagatcacatcagatgaaccatcacaaaacatatacttgttattcccttgccacatgaaatttggaccaactcataggttaacacttaatccaaacatggctatgcatttcttgatttaatcattagagtcatcctgtgatatctttctcacacagagaggggcaaattccatcttgattgtctatgtctcacagcatgtttcctgagaaacccgaaaaccacctttataactagcccattatggagtaccgtttgatagtccctgagtaggtcgtttcacatcttgaatacatacaacatctcagtctacagacataacatatatgatgtgatcatgtgaatagagataataataacatctcatgtcgggtcaatccagccccatgtcatacatgtgcccatattattagttcgacaattttgtctatgacttatgaaacctagtcatcaactaatacatgtgctgatctaatattcacgtgtgttctcacacaaactctgattcggacaacttaagaataaccatacaagtaaaagagcttcacaaacaattcacataattgccaatcgatacaagttgtatttaatggatatttattgaacacataatatatatcatggatataatcgcaatatcatcatctctataattacctctagggcatcttcccaacacatgcatgatgcatccttttgcctgaggcgtagcttgataagaatcaaaatagtatttgattcattgtgtcattatttctgctgttgtttgtgcatttcttatttttcaatcatatatgcttatattgcttacaggttgcagtaacacttgtcaatatttccccatatgcag

SEQ ID NO: 4985 - DNA, 4758 bp, Sorghum bicolor
  Intron number 2 from transcript Sb02g025330.1 (locus Sb02g 025330) derived from phytozome v7.0 (chr-ID chromosome_2; pos 60099757 to 60104514)
ctctaatcgagagggtcggcaaaggggtaagtgcaatatcaaattttcaagttgttaatttctacatactctcattctgttactacatgttttacattgcaagattgacattttatggtctctataacaatgccaacgaaacattcgtgttgaaatctacattaaatgacataggagtgcatttccttcacaacaaaggttttagatttgattatagatatcagatctagtagctattttttttctcggatatgcagtgattgtattaagagagagagaaatggcctcctacaaatcaccaccacctcactccgagccaagccgtgagggattgtaaacaaaacaaagttttgtagctaaataggatattctagcagctattgattgtcagttagtattgcacaagccaattgttgcctaaggccttgtttagttccacctaaaatttttcaagattctccgtcacatcgaatctttagacgcatgcatagagtattaaatatagacaaaaataaaaactaattgcacaatttggtcgaaattgacgagacgaatcttttgagtctagttaatccatggttggacaataattaccacaaacaaacgaaagtgcttcagtgttgcgaaatttttcccttcggaaactaaacaaggcctaattgcataggcattagtttgcttttcttgtcttgtcttttttttcttcggtgaggacactatttattagttacattctcgaattaattttttgggtctttcataatataggccttgtttagttccgaaaagtgaaaatttttcgataatgtagcactttcgtttgtttgtgacaaatattatccaatcatggactaagtaggatcaaaagattcgtctcgtgatttacagctaaactgtataactattttttattttcgtctatatttaatgtttaatgcatgtgccacaaaattcgatttgacggagaatcttgaaaactttttggttttcaggtgaactaaacgaggccatagttataatataaaaagagcacgtgggttcgttgacttcagattattccttagcatagactttgtccaagcacgcgttcatgacatttgtcttctagtcaagtcttgtcacataggagtactccctctgtcttttttaattgtcgctgttggtgtgcgtaccacaagtttgactcgatttatagaaaatacgtgcaacatttgtatctccaaataaatttgttaaaaaactagattcaaagatttttctaatgatactaattatgtattataaatattaatattttttaatatataattgtcgtcagttgtttttcggaaagcacaagcgataattaaaaagggacggaatatttctgaacttctctatcgttgctgaccgtatcttttgactcggaatgcattgaccggttgaccgtttccaagacatacttgtcacacaaaattggctccaggactgatccttggtccatgcatggaccaaacgaagagttgcatatataaggagttgaccgattccgttataagtttgtttaagaaagcataaattaattaagtcatatcgttgtagatacaaacacatcatctagcactaaacggatcattagcttcaaatgcaagtagtgtcaaatgcatgagaacttgaaactaattgagttttacccgttccataaggaatctattcaactgagtctcatttaggccttgtttagttcccaaaaattttacaaaatttttcagattccccgtcacatcgaatctttagacttatgcatttagtattaaatatagataaaaataaaaattaattgcacagtttggtcggaataaccgagacgaatcttttgaacctagttagtccatgattgaacaatatctgtcaaatacaaacgaaattgctacagtgctcattttgccaaaaattttggaagtaaacaaggctttagttcacttaggccctgttttgtttcctccgataaattttaactcatgttgcatagaatgtttggacacatgcatgaagtattaaatatagagtatttatgaactaaaaacatagctagagagtaatttacgatacgaatcttttaagcctagttaatccatgattggacactaattatcaaataaaacgaaaaatgctacatagtacctaccccaaccaaacacccccttaagcagcatataggctagtaataaaatatttagcagcactggtgtagtcatttctttattcttttgtgagatcttgaaattgacgaagttataacaagtgcatgaatattgaccgtcgttttctttaaaaaaatagcacaactaaatctttaaaaaaataataaaaaatacaaatccagacactatatgacgcaccggtgtatgtagtttctgtgacgccggttgcttgaagtgtgaacccatgcccagatggcaattgtctaatttgaggtaaaatagacgctggtcggaatcaaatcgttatcggtcctgtgtgtgagtgtgaccaaggagatgcaggcactgtactgcttaagtgcttagtgacacctaataataattgttcagttagcaacttctgtctcgaaagtcgtaactctacttgtttcagattatatatgatcgagtactgatgtataaggttagtctcaatacatagtttcatggcacagttaccaagactctaaactaggtaaccgagccagataagttttatggggatgaaactcctctctcatctgatgaaactccttcatttaatgaccctgccaagtcagcaattttgcatatgtggcaccctatttaatgtgcatgacactctcatgaaatatgcattgagactagcctaagtgagcatactattaccacgcaagagcaattattttaggatttccttacaatattttattaggagtttaggactgctttgctaggtaactgacgtatggttaatttgataattacccactcggtctaaaaaaatcaattataatatcgagttaaacaattttaatttgactaagtttctaaaaaatcttgatatttatgatataaataagtatcactagatttattagatttatcatgaaatatgttttcgttatatatttattgatgtcataaatattgatatttttatataagcttggtcaaactttagggcatgtgttgaatgggatactaaatctagattctggataaaaataatctctgattcagtgtctgagatattgcttggaagagatcttaggattataagattttttatccgaattcttaaaatacctaggcatccaaatggaccttagacagtttgattaaggacggaagtagagttgcacactttttcgtaggtcttcagtctcaacttataccctttgttccaaaatcatttttgtcctatattgaaatcatttaactttaatcatgtttatagaaaaataaaaatatctataacattaaattagtttcatgaatccaattagatattaatataatttacataaatttgatcaaagactcaaagtaagagaagtgagcatctccagcggtcccccaatagaactctctcaataaggtagtattatggtagcccaatattactttcgagatttatgagggagatgctgcagcagtattgtcaatatatctcccccaataaccatatgaaaggtgggagaaaatatgactgaaaagtgatagttgggatggtctctatgatattggggagttgtatctcctctttctttgaggggagacgagagaaaatactggtggccactaaaatatgggagtggtattgtgggactgttggagaagaaaaaatagcacatctctccaatatgacatctttatgaggatgatgggtggtattgagagactgttggagattttgtaaaccaaaactctaacaacctatgctttggatatcacttggacaacctcgaacatgtggtcacgccacaaataaattgtgacttaccaaaattttcggagaaaaatgcaattggaaaaaaaacctttacctgactctgactggcataaatttgtgttgttacataccaacaaacattagcagtatttagattcttctaatttgaatttgcttatgtttcagaacagactaaattttcacatggcttacaaaatagtactccctccatcctaaattgtaagttattctaaaaatcttagagagtcaaagcatttcaagtttgaccaaattttatggtagaataataacatttataatatcaattaagtattacccccttcatccatgaaagaatcaattcctagaatccgtgtcagtcaaacttttttaagtttgactaactttatagaaaagattaacaacatctatgacataaaatgcgcatcatatgaaaatatattctatgatgaatctaatgataccaatttgatactattttttctagaaatttaatcaaagtttaaaaagtttaacttaggacagctctagaaattgattctttcgtgaacggaatgagtattaggttctccattaattatattttcataatatatctatttgattcacaaaattttgtaattttttctataattttagtcaaacttgaaatgctttgattttttaagattcttggaatgatttgggatggagggagtaggtccaaagtatccgagccaagaatttgaaacaatttgagcttaagttagctgcatcgtgtacacaggagttcgacacggcggtggcggacatcaccatcac

SEQ ID NO: 4986 - DNA, 689 bp, Sorghum bicolor
  Intron number 2 from transcript Sb10g023660.2 (locus Sb10g 023660) derived from phytozome v7.0 (chr-ID chromosome_10; pos 52332142 to 52332830)
agtttgtgaatcaaggtgaatccattcgtatcgtttccgctttgccttgtcgatccatcctgtttactgtcaaatagttcaagtctctgactgattgttggagctccatcatccatgtgaatggaaaccaagtttgaatgtccaatgtttgtgctcttgaatatatagtggttgaggttctaaattctcagtaaaagctacaaactatgattcaaaaaggtctttgctttatgtactaatccttatcaatcttaaagttgacattggatgattctgcatatgaatttgtggaaagccaatgacttaaaccagcaaaagcctctatcttgttgaagtacacttctctgttctagatggcttaatgttcaaatcctgatcagtttcaaatttggcaagagatgattctcagattctgcaaacgcaaacatctatggtgtcagcattatgcatttataatattctttatagacagattactgacagtaaatttacaactatagtgatctggcaagattccttaaaaaatattgatgactaaacaactttgtggcattttcttttccaaaaaagaagagggaaccctactttgtagcatgcccagtcattactgaagaagtgaatgttttccatttatatttgttctttgctcatcttttttgaattttcatactgcctattttccaggtctt

SEQ ID NO: 4987 - DNA, 5904 bp, Sorghum bicolor
  Intron number 2 from transcript Sb10g008840.1 (locus Sb10g 008840) derived from phytozome v7.0 (chr-ID chromosome_10; pos 9264321 to 9270224)
tgccagtatttctactggtcgctccattactccaggttcctcctatgcttgctttccacttttcgacaatcgtcatccctttcccccctttcaggcttaacccgcttgttacttttaggtagccattcactgtttgcttaaccagcgaaatctgcccatttgattgatgctatttacaatctgtactacgttattacatattattctgtgtttttccgttctccctctggccccatcattcatttatgagttcttcgttagttttgtaacctgtaataaattcttatactagtttctaaatatccaaagcaaaggactctctgatggattttatttttgccccccttattcctgttctccacagttagtgtgtagggtaaaacaaactgtttgcatctaataatctagtgagaaccagcaacttccatcattctatatttctatggctctttgttgtagttcacgtattctccttggcaattatatccacaagaaattgacacacggcccatcagaacaatgacaagactgtcacacccggatgtaaaagaacattcgggtgccaaatcacatgtgcgccaggatctcaaattcacacacatggaccgacatcatcaatggtacaaaacacagtgttcaaacgaattacataaatgagagtaaaagtaccattattacaagccaaaatgtttatcaaagtgcggaggggaaacataaactaaactgttccataaataaagggaaaactaaacgccgacgtagcaggaccaccttgccacaggaaggtcgacggtagaaccacacgagcctaacaaccaggagactgtcctcagggaaatcgcaattgtactcctgatcgtccgagcaacctttaatgattatggcaagggtgagctcatgtcgaactcagcaagcacagacggaaagtaatgacatgcaaggcttaaaacaaggtaaagctgacttggtttgactgcggtagcattttagttggtcatttttaattatgactattattagaacaacctactactaattatgagtagcataaacccaacccttaattagtgtaagtagtaattagcatcttttaaatgactatcctaattattatagtggtccagggattaaccccaattataaacacaggatagcaatcctgccaacacggaatagtcatcccgccaaaacacgaggtagcaacctcgccaagttccatctccaagtatccagtgaatccaatttgctcatcaagtgagggtctgggccgctcgtgaccgtgagcacggctgatatatcagttttacactctgcagaggtgtgcacgttcactccaagtcgtgattcccatttgcccggggtcgcgactccccaaaacacttccaaggtgagcaggcggggtctcactacgagacctttcacagggtccaactaataggatgccactcgcaagtttttgccggggcgctcggcagtcgatacccatagccatggcgtaccgatcaaccgacaacttaatattcattacccaagttacttcctcacgcctacccggaaagtaacaccctactagtggaggtcctgctaattagtcaagccagagccatatagcttggagctgcactgtaagtcccagggggccgctccctgactaagtccttacggagagcagagacgggtacgcccggcaaaccggaccaccaacggtacccgctccccctgtcaccaccatcatcacgatgctcgtaagcatccaacatcgccatcaccgcagtgaccaaagattcagcacaatttaagcatcaagttgagtagagactaatacttgtttaggcatgtgtataagatgagtagagcagctaagcaaacctagtatagcctagtctacccaagtacataaccccaggtgagcaaggaataataagtaaagctagtcatgtccttagggtttgcattcattggacacatgcataaaaagtaaatgacattaatgagtaggttcaaaatgatcaaacggtgtctgcacttgccttgatcgaagtcgggttgctcgaactcagcgggatcctgaacctcttccttcacgaacgtctcgttggctatacgcgacaatcatcaatcataggaacaatacatgcaagcaaacaaacttaatcagaaacagtacaccaaagcatgcgaaaacaaaaagcaactgcactactgtaatctactcgacgaaacgaaaccatagcgaccagaatcacctaaatcggagttacgacgcaaaagttatggctaaaacaagttgaatggcatttctgtagataaactgaactatttttcgtaataaaactaattaaaaaactgaattaataaggaatttggattaaatctgcaaaatctgacggctgcaggggctattaagcaaaaccaggggcacatttctaattacttttgaactcagccgggccgcgggttaattttaaagaaaggcaggggccttttcgcaaaacggcaggggcgcgcgggggccgtggccatcctggccacgtggcggccggcggttggcccggtccatggcggcgctgtggaccgggggaagggggggcggtccaccggtccatggtggaccgggggaggcgcgcagggcggcatggacccggtccactggaccggccgtgcgggggcgctgggccgcggtccacggtggaccgcgcgccagagcaggggcggtgcgggcgcagggacggccggcgggccgtggtggcgccattggcgccgcccggagctcccggcggcggcgctacaaggctcggttggccgagcagggggcatgggcggacgcggcttggcgcgacgaacgcgatggcgtgcataccttcgcgagttgacgacggtgaagagaagcttgtcggcggcgttgcgagcttcggcaaggacggcggcggcgcggatttcgaagctagggtttaggggcgcgtgcgggcggccgaggggtgccttaaataggctagggtggtcccggggttctcgatccacgcgcggcacggaagccgagaaggaggcggcgcggcggttgctcaccccgtccgaatcggacggaggttgaagacgccccccccctgacgggtgggacccactcgcgggccccactgtcagcggctgcggggcgggagctgctgctgcgcggcttgggccgcgggatgggccgcgcggcctgctggctggcgcgaggggaaaggagagagggggggaaaagccggcccagggcgtttgcctcgcctcttttttttttcttttttttttaaaaacagttttctcctatttaattatttctccaacaaaaacttcaagcaccagcactcaaatcaaataaatgcagcggcatgaatgcatacgagcaaagtttctaccttaaatttaattttatttaattttgtaaattatttaatatttcccaaaaattcaaattgagccaaaattaaatcaaatttgaactgaatttgaaattcaaaaatttggagtgttataaagaccttaccatgttttgtagcatgcatcaccgttctgtcttttatgtcattgctcagtggttcaaaacccaccaagcgcgagaatttagaattttaccttctaagcaacaactattaatctgcttttagaatgttattccatcttgctacctaacagttcacagggtgttcttcctccaaaaaaaaagttcacagagtgcttagtttttaagtccaatctacagtgactagtgtgctctatacatagtatgcagagctgattgcattttgtcgtgcctttctttactcttcttctacgctggtggttttctgttcatgcaaatttctcctagtttactggctctaccaattattgaacataagcctaattagattgttgtttgattttggcaaaaggtaaggtttcagctgtgtgtactgttacaagttgtaagccattgtagttactttacccatttgacttatccatccctttgcttagtaaagaatttcatgtgatggcaaaactgcatgccacgagaatgggatctttggtgtttactgccttatgggcctcttcactcaagaatcagaagggtgatgctagttaaaaatatcatcaaatttaagggcacgtgtgcttcctttagctctttatctgacccttaattttttttctatttaagagttatacggtccagatgaggttaattttggtgtgaggcagtcagacaaggacaatagggccatggggactaaattacatgtgatgattaacaaaaattgaagtgcatgttgagataacttgaacaaaatatgtatgttactacatagggttcactatcatgttctgcaaaacagctgaacttcatgttttctatgctgtcaaacagctctgctaactaatgaatcatgtggggatcctatctctctttctctcccctcaccatagaaaagcaatagggttcttgtaggtggaagatattcaacggctaagaatgaacttaactggtgggtgattgaagtgaaattcttattctggttttggtgtttgtattgttgtttgtttcccacttagcagagtttatgtttccttgtatattgatcattggtttttacaacaaacttctatgggactagtagtcattaccatttttgcttaatattcatcaaacatggacatcttgatggttttgccatgctttattctctggtcatgcaaatttgccctagtttactggctctaccattgtcatgggatatgttcataaatgttaaacttgagcccaattggatggcttaatgctggcaaggtaagattttagcagtgcgtaaacctcctaattatttacgggtttctcttgtccatccctttccttagtaaagagtcatgacttaatacccatttattagtgattgaattaaagtctggctgtcttggtaatgattagttgatccgatgatgactgcatatcgctgagaatgtagttttgttgtttcctgcctggtgggcctgtttagtctagaattgccatggtagtgtcaatcaagagtttcgtcaaatataataatagtgtccatgcttcatttatagctcttagttcaacacttaggatgtcctattgaagagttgtatggtccagaattttgatatgagggagtcagacaaggagaaaaagactgtggagactaaatcacatggggctattgcgttcttacccttatttagaagtctaattgtgattttacccttgctctgtgaaaacgagcttcagtttacccttactccgtgaacagtaggataacggtgttaaatgggctcggtaaagacaagtttgcccttgcaaaaatgcccctactttttttagtacattgtgattttacccctacttagtgcaacagtgttttgttgattaccaaacctaaagagctgtagagcatgtcgaataacttgaactccctatgtatgttggttcctaggattcttgttggtggaaaatatgaggtggctcccaacccacttaattggtgtgtggctaaagtaaagtaaattcattgctctgattttggtgtccacattgttatttgtttgctagttagccaaactgaacttttttttttttttgcaagaagccaaactgaactttgtattcgattgtatattgtgcattgcctttatacaacaaactttctatgggactaatagacccccgtggccccgtgccttgactgttcctttactatggaaatatcaaagcagatgttgctacaatgttgcaatgagagatggatgataatatgcttagcagcctctcctagattcccttggggttgttggtttgctgactgaatctcaattttgtttggttttgcagtgggaaggagacagctgagtttcagattgaaccgg

SEQ ID NO: 4988 - DNA, 5049 bp, Sorghum bicolor
  Intron number 3 from transcript Sb03g012480.1 (locus Sb03g 012480) derived from phytozome v7.0 (chr-ID chromosome_3; pos 14690089 to 14695137)
cggcagctcgccggcggcgaccgccacgcactccggtgaggaaatcaaaatcaaacccacgcacacgcacgcatctctacatgtcccggcacaagttttctatggcgaataaacgcaaatattccggacgctacgtcgcgttgcacgctggttttgtgcgtgagcgtgcgttttgttcccgtgtgtgtgtatcaaaagacgcaagcctctgcaaggattcatgtgcatgcgtgtgcgtgtgttcttgcttactgaagggtcaaatcctgtccatgcaaatggggtacaggggtgtcagtgctaggctgtgagtaaaaagtatttgggagggagcttgtttgtgtagggttttgtccaagttgtgtaggctcttcctcctctttcatcctgctaccttctctctctcatagtaggctttataggccgtgtgatggaacttgagaatgctgtggtggcagtgacctttcttggattggctatggccttcccggcccatggcagaatcttggtctggccctgcagcttgcgttattaccagaggactagtgcaggtgaactgcgtggagaaatgtcttgtgaggaaaaaggtccactccgagctactcgtgctcacgagatctctacggattcgcttgttgtacatcgacatgacatatcatatcgtcacagtagtggtaaatttctggttgtgttctctggtttttttagcttatcttactttattaccgccgcgacattccccctcttctttttctgtaaagagttctgccccggagagggggagggcggggaaatgcaggcatttaggctttccccatgcaattgcactacgggagctaggatattagtgttaaccatttcatgactaggataatgtacccaacaattttgtatagattcactattttatggaggtaggcaaaatcagttttctctcctactagtacaacaagagtttttctaccttaatataaacggatcattagtgtggtagagtcttgggtgcatgactccatccaacagtgtccatctatttagatgtttgtagtttggtggatgtatatatccctaatctgtacatagggacggtggaaagttattattctttgtatagaaaaccataagcggataatttggagtccaaaacacagatagagcctttaaacagacgtgtttcttgatgacgtgtggaatacatttaacgataaacctaagagcagtactatctgtcagtgttattattaatccaatgccaacaaggggaaagattttatgaaggtgcacacaataaaaattttactattataaagaaaatcaagttgctggtttctaaagtgaaattctctcggggcaaaaagtgaaacatatatatggactaataagacgctttaataatgtcctgtcgaatccttgctcagaactctgaagagctacagcttacaggcagtataataaaaaaagataatattgtgtgcatgttactcgattggttggtccgggttcttggtagcaatattatgggcatcaatattttataaggccttgtttagttcccactaaaatccaaaaagttttcaagatttcccatcatatcgaatcttgcggcacatgcatgaagcactaaatatagacgaaaacaaaaactaattacacagtttgcctgtaaatcacgagacgaatcttttgaccctagttagtttatgattggacaatatttaccacaaacaaacgaaagtgctacagtagcgaaatccaaaaatttttcacatctaaacaaggcctaagtaaataacagcaatgctatgctttgacttgacaagacctacaagtacccatttatgtgatgcatacttcttttcggtaatgggagatgtatataccctgcatcttttagcctatggtcaacaacagacatacacggcaatcatccaagaaaacttgctatattttgtgcatgcatgtgcctgatggcctttagaaaacgaatatggggctggctagagctgatccacaactttgttgacatgcatgaggtttttgaaattttcgtcctctgtgaaagagtgaaattttatatactatttcctgcccctgcccccccaaaaaaaagatcatctcacaaatgatgaaattgtaccatatggtctgtaaaaaactacacaaatcatgtattcaggtatttgtaggggcaggcccgatctgcataaggtgcagtacactgtcgtgacctctctgaattaatcttatatcacacggattaatgcacaaaggttatgcatcaaataatgctaactaggtgcaaaaaacaagaattttgttttccatagctatagttaagtgtgtagtcacagtatctgtgtttctattttttaaaaacagggtcacttatgcatgtaaacctacttgccaatattatcttgtacatttctgacagggctgaacttagtttgtacaaaattaaaaaaaaaaagatgttgtttgcatgtacttgatcctggtaaaaataattggaaactttgactttttccttcgaactttgaccgtatttcctgtcataaatgctatatcattgttctatgatccatctgtaattgttatatttatatgtcataatgctcactacaagaatttctcataaaacctccaacaatatctgtctaatggaattagtataatcttgtttaggaagtactagtttcaaatgcatgtgcatgcatgagagtttgtgtctgagttgtttgattagttcatcaaggaccagtgatttgtccagttgagtcaaaaggaaatgaaaataggtttaagtcctatctcttggggaaaactcatgtccttggtgaattttgcagttatcttctacttctcccactttgagcgcaacataatcatgtgtgtttgcggctagatgacatcggttttattactagatcatgttgagataggtgcatccttcctttggatcgtagtatctttacctatgtggcccataggaacaaatgattgaacatattaggatcctatgagagagagagagagagaggtttacatgttatatttcttccaaagttcctccggattgagacggcccgcatgaatctctctctctctctctctccccccccctctgggaaagttgctaacatacatttttgacaggaattcaaatagagaggagagggaagaaaatttcaaagaggtccacctgatgttagatttcctccaaaatttatatggagtttcttagggttccaatccaaagggcaatatatggtttttttttcttataggggtggatccctacaaagtttcatgttatgaacctttgtgtaagaaagtcagttattggcttgtagatttcaagaataaattactaataagttaatagctctacagagccaaaaccaacaacaaccatatgtctgtatagataatatatttcaatcaatctagggccacaggaggtgatagatgatgtactgttgtggcaagtttataacacaatttcattgagggaagaatggtctgcaataagatcatatgtttcagattttgtttttacatcaaacttcctagtgtgttgtgtgtgtttcctggaatactcttccatcatctaaaaaaaatacactgaaaaagtgtaggcagatgtgttatgactggaagattatcttaggctctttgctcataggaaattatgaaatatgattggagtttgtgccatatgaactcagatggtgactgccggagatggtgacttccgggtgatttgagtcaaataaacctgtttaacttttaccagctctgtccatttttaattgtgaatcttgatctgcgcttctggaaaataagatctggaaatgctaccatcctatgcattattggtcatgccatataataacaataacttttctgctagtgacaaaaggcaggaccatagggcctattcttcttttttgaaaaaaaaaatcaatactggatttctaaagaaatagtttatggattcttgttgagtgggatgaaaggaaaaataaacaatgaaaatgcacttttttggtgggacatgtaaaatatttatttgtagtttttgtgctatggtggatcatgtaatgaagtactcaaagaagatctggtagtcacacaatcagatctgcaagattttgcatacttctcccaatgaaaaagtgtttgatatggaaataggtcttctcatatttgtctgttagaagcaagattcagttttgggatggtgagaactttgaggtggaccattggtggtccaaagctggtattagtatgtgagagttttgagcttaggttgacaaattatgttacggactatttatcagatcttgttaaagctagatatttgttgaaaaacagttttgctatccagtttagcagttattttgatggaaacatgtctctacgcagaagtttttgtactggatcacgtgacagcttctatagaatggacttatgtgccatcccaacatcatttcatttggaagcttaatgcttaacaaggccttttctgtctgaccttatgttgctaccagccgaaggcccaaaagctaataacttgtgtctgtttctatgcgataaagaatatgacacatgtattactgaaatgtcaaagatgactttagaggtacattggtttagaaagaaaatcatttctgaaggtactcattgtttctttctttttggcctccaatcatgtttcagagatgagaaaactatgttcacacatgataattgtcgtggatttaccacaactgatggatatgatgcatgtccatattttcatgcaatgactgcatgaacaagtaccagtagttccctagtgtgtaactcccaaaattatagactgtataggcaaatgattcctatgttgggaaatgttactaggccttattacatgggaacatcattaacatgtgtttgtttcagtacattctactcagcttgtttgcaaaacatactttcaggtgatatgtggatgcctagacttcttgtaagtggtttattgctgacttgatctttccttcccag

SEQ ID NO: 4989 - DNA, 5979 bp, Sorghum bicolor
  Intron number 5 from transcript Sb07g017190.2 (locus Sb07g 017190) derived from phytozome v7.0 (chr-ID chromosome_7; pos 42417013 to 42422991)
caaaaccatcggggactgttgctgctgttgtgaaggtatgcatttcttaatgatattttttgtttagtagcaaacatggctgtttgttgcaatgggacatacaatttgtgcatgattcttgtgccaattgaactatctatttttattggacttaggccctgtttggatgcgtaaggctagttgttggccagctaaattttagcccttgcccatccaaacagggcgctaattcgtggacagtcgactgattttttagccaagcctcaaactagtggttagccaactagctggccaaccccagctaatttgggctaatttgtagccccagttaataactagccccagatgaaccaaacaagcccttaattcagcttgcccaagcttaaatcaaataaattccatggcccataaaaaatgttaatgcattaaagaattttttctcaaacagcgattaatgcattaaagaattaatcccatatgggaaattaataggagattgactcaacttaaattgttggctatcgtgtgcacctgttgtgagtttaaagaaggtggaaggcgaccgcacacgcgctgcaatgggcatggacttgagtggccaggtcatgacatgtgcggtgcagcgccaataaaagctttgtagctccaaacttgaagtgtgagagtgagagcaatgtcacatggaacacggtacgacatgatgctctgcgtcctgtggttgtccattgtggttcgtcatatgggttgatgcttgggatggtggttgggacggcatccctatggttgatgggacagaggtgcctggagttggatagacagaaaccatcccttttcagcagcagccacttcaaatccagcagaattaagaggcctagataaatgagatgagttattaccagaggtttctggtgcgagttggttaccagaggtgagtgatttgaggtgacggtggctgcatcttgttgtggaagggaaacagggaggggaagaatgaaagaagtgacggcagcagctgtgtctgcgtgagaaacaacaggacgaccagattagggtatagaggatgtggtggcctgtcggtgatgggctgttgaatagaagcaccgatctatccatctcccatttacttttactttccttctcttttaaaattgtaacagagcacttaagtagtagctgattgttatgtagatactagatacaaatatgattttgtagtatttatgttgatatgcttctcaaaatcttgacatttcgatctctcttcgggactaattgtcccaaaaatagttggatcacgttccccgtctggaaccagcatcctgaagaggtattagccccacgtaccgggaacttgggaagtgctgatccatgtcctgtgtacccgttccttgtccctgtcctagtggaaactttctgagactaagtgagagatgacggaccggggcatggaataggagttgaggacaggagggggtgtgagaacggaagaaagaaatttaccgattttaatattaggtatatatagatttatctgttattcatagcttgtcaagattgagcatttgacatggttctgttgtgacgatgatttttcctgggatgctatatactgttatgttgataactttctacacttcttaatgcaatctttctgtggatgaaatttaccggacaaatagcatgagtttaaaacctgtgggctttgataagttctgtcaaaagttctaaaaatgtagaatacagcctttttttacttgcaaacatatgtgggctttgatcagtgctaaaaaaggagctattttgcactcgcctggatgggcagaggggtatcaccttgcctaggggggtaggcagtaccctaggcggcaccagcccagtggcggaggtaggcgcacaggtcacaggtgggggagaaggaaggaatgttgggcagaggtcgccggtaggggagcagcagcgtcaggcgaagtcggatggcgggcgcaggcggcggcgggtgtggacagagagagagggagtggaactggtggtaggcgcgggactctgtgagatgatagagagaagaacgggcggctggtgcgtagggagtgagggagaagagtgcataatagctcactgatcgagcgcccttgcactgaaggtgaacggggctaaccgatgtgccaaagctgtgggatgtcaaaatgcatcggtaggggagcgttccgccttagagggaagcaaatgcgaaagcgggggtggacgaagcggaagcgagaatgttagcttgagtaatgaaaacattggtgaggatccactgccccgaagcagagagggagagggagagggtcaccgcctagagagcaccttgcgccttttgtagctttggctttgatagaactatgtacatatgaccatctaatttgctaataaattatgaagctgacctgacaaatagcatgggcattgggttcaagaaaattagttccatctgaaattgttaaatagcaaatagcatagaatttggtgatcacatgaaaactcagcaggctctagagctatatgtagctctataattagttgtgttataaagaatatatatagcttctctgcactcattaaggaagagtaagtttataagtattataacatgcaaggaaagcttgacgtattttcatcaaaactagatccagaagtaagtgttgacataccgtcattaggtgttagaaactactaactcccaatgcattgctggggatagcttggatgttatagcattcaggtgttcaaagagattagatatttttgttgaaaaaattacgaatagtggattcatgttaaggtggaagccctaagggccctatgcagcctaggccattgaattgttctatatatatagtgctattctacacctaggtgtagaatagtattattgagatgcatgcaatccaaaaacttaagttgatggggagaggtgggcaattcacttatattccaacacttcccctcacgtggaggctccctcaggcctcagacgtggaacatgagtgagcaacaattattttatttaattgcgctaaccaggattcgaactggagacctctggctctgataccatagagttgcatgcaccgaccagttcaacccaaaagcttaagctgatggggagaggtgggcagttcacttatattgcaacaagtattctacactaaactgtttttttttctcgaatacgcaggagagctgcatatcattgtattagttgaagaaaaaggagtcctacatagacccaaacacactcacacacaccaccacaacttccctgttttgtaaggctacctcaaactgagagcagaacgaccgagtgggctaagaaactaaaggcccctagcagtgagcaaggacaaacccttagctcctgccagacaccaccaatggacatcatccctagctaaactaagggctgtgttgacgtttggtacagccccattgaaaacacagtcattccggtgtttccagatgctccaggtgccaaggatgacaatagaatttaagccctttctcacatccccgaaggtagctgcctccaccttttcccaccagtcatcccaaactgaatcctcaggctgaggcgtgagggaagagagtccaactcgctgcaagagatagaaccagaattgcctagcaaaaactgaaggagccgcatttcagtgctatttagtatttcgtggtgctgagtgtagcattgagtgatattgaatgttgttaggtactcaatattttttcaagtcaattttggcttgtggtgtagaaaacctagggtgtagaatagcgcttagatatatacacatgggaaggaattatcctatatatatatattaaaattagaaagcataatttttttttttcaggacaagactttgattacgttgactcattaatgtgacaaaaccgaaacaagtaatttttatcatgaatctaatgatcattttgcattacaaattaaacatgtattaattaataaaaaacatttggtcaaaggcttactgtaatgaaacgaaatgcacctcttaatttcatagagacggtattcggatcactctgagaacagatgcaatccgcaactgttctggagaaatttggataacagccctcaaaatattagaaaaagtctagataatcccttgatctttgacattgtatctactttatcccctaaactatgaaaccaggtatcaaacaccctaaactttcctaaaccaggtattaaaccccttctagtggttttggctcctggttttgccaatgtggctgttcaagttggctcacattgacacattagcacttgggcccacacgtcattgaaagtggatgcagattgcgatgcttcacgtgcggcttggcgagctctctgcgggcgccgcagtgcttgcggacaaggagcgcagggagctcgtggccgcctcagccccgcccaaggccacggaggagcacgtttcgctgctgagcacgaggcgcatgcgcccaggtggtgccgcggtgttggtgtgtgaagccagagccatgggtgtggcgcgtgaggccacgtcaccggcccgccgccagggaaggagatgagcatgtcccgccatagctgcaaggggtctccagcgtgaacacctgcagcgcgatgaggatgaacagccgctatcgccaccaccaggtgcagcctcgccttcaactccaactctgctctgcggcaccgcgacatcaagaacccgccacctctgatctgcggcaacattgtgatggtgcctctgttgtgccgccacggccttggcctaacttcgctggcacacccacagcatcggcaacctgtgcagagccccaccatcatctccgcggatgccgctgcccgagctccgcccgcctcgtcaagcctcgccgcgcccccgtcgtctctggagtctaaacccacggtcgtcgtccctgtcatctatggagaccgacatgccgacctcggccctgtctcgctcctgccccggctgtccctggccctcggcacgcgagagaatccctgcaaacacagaccatgtgagcacacacgcattcgatccaacagacttgtgcactacaagaacgagaacaagcgctgagcaaaatttgtctagcaataaagaacaaattgattccaatatctcgtcttttctccatggtacagaccaagcaatgaagaatagataagtgcctcgaatccacagctcgtgcttgctgccggagctgatgctcggcgtctctcgagcgcaggacgtcggatacatcgcacccgggctagaattgcaccgccggccatctcttgcgcgcttggagctgaagctgctcggcggtacggaggtgcgtgcgaccgggtgcagactgagtggcacggtcgtggaggtgcacactaccggtgccgggtgcgagcagagcaacgcggtcgtgggggtgcgcatgaccgggcgcaggtcgagcggcacggcggctcgcgcggccgggcggtgagaagaactgctacagtctcttagcctggatgaggccccggagccgccggacatggactccgaccccaacgatgcccctgagcaccgcgtggaagcaggcctcctggaggtgcgactgaaggtgtgaaggggcctgacagtagagccccaccgccagcaggtcttttgttgccaggttggagtgacacgtagccaaaactggctgccaaaaccactccaaggggtgaattaaatggtttggaaaacttcaatgtattcgttagacggttttaaagtttagaggataaagtacacatagtgccaaaggtgagggggttagttagacttttttctcaaaatatttaagaattctgtgaagtagggttttgacttttgagatgtactagatgcatcagcctttttcctccatacaaagaaacaatacttagttttgcagtttcgaaagttaacaattatgattttcttttttcaggttggctac

SEQ ID NO: 4990 - DNA, 4414 bp, Sorghum bicolor
  Intron number 9 from transcript Sb06g003010.1 (locus Sb06g 003010) derived from phytozome v7.0 (chr-ID chromosome_6; pos 6100327 to 6104740)
atttggggttcagcacagcagttgtacatcaggtttgccttcgtctccaatctcttagcatttttctcctggttaatttgacttctcattcgagatggggataacttttgttactgtatggtgctataataatttcatcatttctgagcttgttggtttctttgtggaactactgaaattgtgttcactaattcacttgatagattatgctcttaatagaaattcagcatagtgcagagtgtcatttcactatattttgttatttttaagtaatatatgctggagagggttgcatcgcttttccaagctgagacttaggtttaagtaaatatggtccatatggtgttgggttgtcacaccctggcttttaaaataagaccagagtcgtcatatgtgtgcccaggaagtccacacatataacaaaagaatagaaatatcagaatcaatgttatatatagcagaaaaacatatttataataacacttacaaaacatcagagtacgcggaaacaatagctaaacttcttaggctccaatcttctcagggacggttgactgggggctccgtacgccaagcacttctgataagcctctagaaaactccatagcatctatatccttcttctgagcagcactttactacacactggggtgtgggggaaatagcaagggtgagttcatgtccaactcaacaagtacaggcggaaagtataatgacatgcaaggcttaatcaaaggaaaagctgacactgtttaactgcaggtgagcttttaagttggtaaacttttattacaactctattattaaaacaacctattactaaatatgggtaaagcatcccaacccttaattagatgaaagtatattaacaattttattaatcatcattataattattaccgaggtagcaacctcagatagtaactcggggtagcaaccccattaaggtcatgggatagcaatcccaatttagaacacaggatagcaatcctgccaacacggaatagccattccgccaaagcacgaggtagcaacctcaaccaaatttcgcctccaagtatccagtgaatccaatttgctcatcaagtgagggtctgggccgctcgtgaccgtgagcacggctgatatatcagttttacactctgcagaggtgtgcactttcactccaagtcgtgattcccatttgcccggggtcgcgactccccaaaacacttccaaggtgagcaggcagggtttcactacgagacctttcacagggtccaactaataggatgccactcgtaagtttttgccggggcgcgcggcagccgtgcccatagcaatgggaccccgaactgaccgacctcttaatatgaatacccaagctacttccttacgcctacccggaaagtaacaccctaccagcggaggtcctgataattagtcaagccagagccatatagcctgataattagtcaagccagagccatatagcttggagctgcactgtaagtcccagggggccgctccctgactaagtccttacggagagcagagacgggtacgcccggcaaaccggaccaccaacagtacccgctccccctgtcctcaaccaaaccacgatgctcgcaagcaccgcaacatctccatcaccgaagtgaccattgttcaccatttaatcatttatcatcattgaagaattcattaagcaagatcattattattattattatatagattagatgagtagagcaactaagcatatctactgttcactatactacccatatatataaacccaggtatacaaggaatatagtagaagactagtcatgtccttagggtttgcagtattaagacacatgcaatggaaagtaaatgtatttaaagtttataggtacaatatgatcaaagggtgcctgcacttgccttaattcccagtgtttatctgctcagaattctttggcttctttcttctgatctccaacttctgcttcgattatcggtcctcagcgcctgatcttcaatgctgacgaaccacgcttcttctactcgtagcaaccaagcaacacaaacagacaaacaaacaatcatgactaagaacaagcatcaatcaaaagaaaagcttagaaagagcgcactaaacgacacgacttattgctacgatcgtgacaacgcaagaacgattgagaacggagctatcgttaaacggacacgactttcgaggttcggagtgtaacggagaagacgactatacgctggtcgtattttatttaataaaagaaggtgatagacttttagagaaatatctcaaagttgaattgaccaaattataaagaattataaaagatggagttaaactttagtcatattttaattgtagatggttatatatcatttaagccatttacgcctttgtaattttagaaaacataaagcaagtaagagcagctaatcaaatcctaacatgcgtcgcatgtatattaaacaagttataactaataaagaaccatttaagttgatattaataatgttaacatttatttatttataaaagatctaaattataaacataggttacttttaatccaaaaagacattaaataaatattaaacaaattaattatatactttatgtctaactaaaagaattataattaataaatatttaagttaacttcaatcaagttaatattagattataaaaatagcgaagtgtaaacttagattgtttttttgttaattaaaaatgacattcaaaaaatattaattaaactaattatatttataaacatgggacatggaaaacagtatcgctaataagtcatttacgttgccatggtcataaaacaatagaaaacatgattataactctatattgcttttaattataaaattaggtgcatatattaattaatctaatattcaattaaatatggaaaaaaatatatgacataataaaagttagcactactgcgtagagcgcgacgttacgaaactaacgcaattgaaacggaatgaaacagagttagaacgattgaatggcgaaggattaatgaccagtggcaaacttgtaattactttcatcttctaccttgagattttgtacggaccgaaccaggacaacatgctgctcgtgctgtgcgtgggaaggaagggctcggtcggaccttggccgcctggtgcgcggcgtgcagctgcagcgcggaggagcccacgggtcacggctgggacctgctcgagccgtagcaagtgggggagggcacggggcctcgccctgctcgagcgagcacacggccggtgcgctggcggcgccgacgcaggacacggcgtcacactggccagggcgccggtggccggtggcgtgtgatcaggacaagccgaggaagggccctaagtgccgaagaacgcaggaaaaacaaggtcgatctcaccggcaatggaggtttctcgccggagatgaaactggaagatgggaactagtcaaacgataatggattcgcccaaaaagaaatactacggtgaagagaatgacaagggctacctcttcatggtgatggctaacgccgggacgccatggttttgccggaaaaactcaccggagagttcgccggaaacctagcttttgcaaacttcggcgagagatggagggagctacgggtggcggctcgcgatgggatttttagatctgtgatcagcgcgacgagacgaacaccggcatatatataggtctagggtttggaaaagtttcaaaaattattaattacgggatttttagaaattcatttttagttcaaaataattccagaaaaagctgaaatcattttaaagccctgaaaaatatttccaaaattctaaaaattaaaggaaaacttttagagatatattgagagttgatcaatccaaaaaaagtttttggtgtccatgaaaaagaattttagagcatataaaaaaagattttgttctaggaaaatgggaaaaagttctgaaaaagttttggaaaattctcgggaaggatcggacggcgtctaaacgtgtttgtaaaatcttagcatgcacaaaaacaacaaacccaagtaaaaactagagcacaaagcacacaataacaaaacaaaacgcccttcacttttctttacaaaaattttagaatttcacatttttctcattttataatgacaataattaataaaataaatcttgtaatatttttaaatttttttaaatccttatttaatttagtgttttctaataacaatccaaaattagaaaattttggagtgttatatgggttatcctatttgtgttaggaaactacaaattgactgcttggtgcttttgttgagctctgaagatattttctggtagtattcaagagtagcattcaacttattctaccctattttttattaggaagctctagctgcagcttttggaa

SEQ ID NO: 4991 - DNA, 4213 bp, Sorghum bicolor
  Intron number 1 from transcript Sb08g017766.1 (locus Sb08g 017766) derived from phytozome v7.0 (chr-ID chromosome_8; pos 47629462 to 47633674 reverse strand)
cgcaaacaacttgctgaaattctaactggtcaacgcaaacaatgggaccttcatactaatggctcaagtggtgatgattctgatgctccaaggttttgtttgctacgtataccttcgtatcatttcatttttaggaagttccaggaatgaattgtagcagtgaagctattatgcaaacagccacgttgttttgtttcatacgttatcattttttttcttctttttgcagaccacagtcgaatccagtgcaggcaccaagataccgactggtattcaaatctgggctgaccgacaaaattgaaaaggggcaacccataaatataagtgtagctttagttgatggtaatgatcgaactgtagaaaatggaccccttgctagtgcaacagttgagttggttgtcgttaacgcagaattcaatcaacacaacaataaatacagttggtctagagaggatttcgaaatcaacataaagaaagcacaaggaaattcagaagcagtagatgtggatcagtcactaaaatcaatagtgagtgatggccgatttaacctggttcaggggattcagtgtcacagtggttctaaaatattcaggaactctggaaacaagaaagttaggctgggtgtgatggtagtgtcaccaacggaagaacgagttctggagggattatctaatgctttctttgtgcggggccatgatagagacagatcaaataacaggtcaaacacacaaagtaagtactattgtacggtgcattctcagttgttctgtatatttgaaacttaactttaactttgcagtgttttgtttatttgtagtttttgagtttacattactagctactccttatgtaattttacagatacatacactagtagaaaagagtacaacgccaacgccccctttttatactacaggcggttgtagttatcacgcacctgtggtgtaaaaaggcggtgtcagaactacgaaccgtttgtgaagatgcattttcacaggcggttttcctaactgaaccgcctgtagaaatcatgcatttctacatgcggttgtcctaaggaaccgccactaaaaatcatatttctacaggcggttttcctaacaaaaccgcctgtagaaatcatgtatttctacaggcggttctcctaagaaaccgcctgtaaaaatcatatttctacaggcggtttcttaagaaagccgcctgtagaaataatttgaaattaaattttttgagtttttcaaatgaccttctttgaaaaaacggtcaacatgaaagttttagatctcgaaaagttatgaaactttgtagttgataatttttttcatttgacatcatcttgtcatcgaaaactacgtttgaatttcttaaatttgaaattcaaattttgtaaatgacctcggatggaaaaacttctaatataaaagttgtagatcttaaaaagttatgaaactttatagttgacaactttttcattggaatccatttagggcctcaaataataaatatatgctcggtttgggataatatgtggggaactaaactctaatatagacacaagtgagtgataggtggagtggtagatgaggctatgcgcaagggcagtaaaaacatttctacagacggtccacataactgaaccgcctgtagaaattcatttctacaggcggttcttagttaccgcttgtagaattggcccatttctactggcctccagcacaggcggtgctgaaaaacggtagttgaaataggtttccagctgcctatacagtatgtctctgtactagtgatatacacttctactaaaaattgtttttgtattttccaccagaaatgtattatgaaaaattattgtatacgcatacctaattatgtaagtttaagcatactattgttcaaaatttggggagtctttgatgggacatattatttaccattaaattaattttaaaagaaggaatttctctagatgagtaatgtttgttgagaaatagaatcttgtttttctcaatggaatataagttccccatttaatcagtatattatctggcatttattcatatttttaacactacagttttggtgatgagctgcttttggcatagaagtttttaatgcccttagttactgtgggtttcttgtttgtctaggatccaagtttctgttgcttctaatcagtaacagttttgtaggacaagctctggttgataatggttgttatcaggaacagaatagctctatgccttacatgcaaaacccatcatggccaaattcaactcaagctggaggaacaaccagttaaggcccctgaagctctttctttttctcctacttttcatttcagtgcaacaagaattgaagatgcgctttctcaaactgaacatattaacgattagtatatcgcttgaaccctagctagtatacaaggtgcacgaccgcaccctgtaagtactattcttcctccgattctactatacattctcggttgttctgtctggaaggtttttttaacttggtttacagtttcgtttatttgtacctttccacatcgttagaatttagctgctgaggtaattatataagtatacacttgtaattggaacataaattagaaagtgtaattttgtaaagctgctatctaaaaatgttttatattccaccagaaatgtagtttgatggtggctactactattcaaaattgaagtgtttgatgggacatattctttagcataaaataaaatacaaaatcaaaggactatcttaattttttttcacgtaatattagtgttattaagaaacagaatctcgtttttcatgacatagtatatgtttgcccacttgattaggcacattacatgcattttgaatattttgggagctgcttttgtcgtaaaaagttttatgtgcgtagctttggtattttttttattaggattaaagttctgttgcatttattaaccagtaaccagtgatattttttgcaggacaagctttggttgaccatagttatcaagtacaaaatggccaaatgcctaacctgcaaaacccattatcaccaaattcaactcaaaccggggaaatcagttaaggcttgaactaagctcccttatttattttctacttttaaaagaaagtgcaagagatgcacacactctattgcacatatgtataaatcattggcatatagtatattgcttgaaccgtagtacacaaggacaaggtgcaccatggcacacttgttactccctcggttccaaattataagtcattctaagaattttggagagttaaagcattttcaagtttgaccaaaaatatagagagaaatataaagatttatgtcataaaatagatacactatgaaaatataactaacaaagaatctaatgatacttggttggtaccaaaaatgttattattttgctatataaatttggtcaaacttgaaaaattttgactcttcaagattcttggaatgacttatgatttgagagggagggagtacttgttagcgccgcctagcgcctgcctgtaaaccggcctctccttttgtcacctatttcttgaatgatgcagatcgtaatgttttatcctcatcatcaggagtgaatacagacacaagactacagcttccatttccaggaaacactactatggttcctttaggattgaatataaatggagaacaacagcctcgatttctaggaaacactcctatgctttttgcaggaccatctaccagtgtaagtgatagaaaaactcacaaccatgactaatattggcgtgctaccgggtgtagctacacaccccatgttactccttgttttgtagctacacaccccatgttactccttgttttaatagtagtccacacatgttgtagtagttataattgcatgtctcccggagtatagctactaccaccttcaataaacaatattgcgtatgtgtacatacaaatttgttagtttgactatgttgatatacttatattaaaatactccagatctttactatgtaaaaaattttaaaagagcccatatttttaaatatattatttaatactatgacagtagcatataaaataaatataatcatatactctaaatatacatacttgatatacttagtaccctagtctagtatgataatatacttagtctatatatacacttcgtcgggccatatacgtcataataaatctagagatatatac

SEQ ID NO: 4992 - DNA, 9461 bp, Sorghum bicolor
  Intron number 13 from transcript Sb01g021970.5 (locus Sb01 g021970) derived from phytozome v7.0 (chr-ID chromosome_1; pos 26697898 to 26707358 reverse strand)
gaggtttcttgaccactcatttgatcggccaggttctctaatcgaccttgttattttgtattctttgagtatgcagtcactctcttatttagagtttatatttttaatcaagattattattagcttttggacttcgaacattattatcttaaagtattattacacataattttgcgagcaggattttttttttcaaacatgcaccagagctgtgtatcattatattaagaagaaaactgaagtctagtgagtagtgactctgttatgaccagaattccctatacccgccgcaagcccagcagcggctgaaggaggggtgctgcgggcggtcaggggctataagcccacagttatctttattatataattttagagggtgttaattattatttgtgagagagggatataaatacttgtaaagactatcgagacaggtttaagcagaaacatattattgtttccggcttcctcaggaagtcgggagaaaccctagccgctgccacaacacccgcatgaacagtacctgtgggcactgtagctccgcgggtaaaccctagccgcccacctctcttgcgccatctccttccctctcgcagcgacggcgccgccgcgtcgtctccctcgttcgctcagacctagacagcctccctcgcactcatacaacctccgttcatcgtccggtagggctaggattcctaccagcttggtatcagagatgtctggtcccccggcctccaccaccgttcctccatcggcctccaccaccgcaccgccggcgtcttctccgtccttggtctccggcgcgcctgtcgcgggcgcccaaccgctaacccttgaagggctggccgggctggtcggccagatcgcccaggacatggccggcctgaaggcggcctgggcgagctcccagccgccaccgctgcccaacctaccggctaggtccggcgtgccgcttcatcgcatgcgctggccaccgttgccatcgccgctgccgtcatgggccatgagtgcccctgttagagtggaaagattagatttctgagcttctgaagacctttgagaggttggaattggcgcaggagcagatgcacgagaggcctgctgaggagcaggtgctgccggcgcgggagcgcgctgttcgatggagggttccgcaggacgtggacggcgagtatagacagccgttataggcggcttggtgctgtagttgtttggtgccgatgaagaggtggctgcaccagcagcgccgggcgtggaggggccgcacgtggcgtgcgacgttgacgtcgaaccgggcgcgccgtgtatcggggctggcctggtcagcgacgccggcacccttgcagcggcttgcgacgaggatggcgccggttcagtcgcgtcaggcgacggggcaggcccatgcggcgcgggagatccaggtgtgcctggcggtggggtaggtcctgctgccagcagtgagcccggcacgccgggcagaggcgcaggagcaccagggagcaccatatcatcatctgcaaagtcatccaaaaaacgaatacgaagaggcaggggtgctggtacgagcaacataagggaatatgagctcgtcgaacacgacatgtcgggacgtgatgattttgttagacttgagatcaagacagcggtagcccttgtgatcggagggatagccgagaaagatgcactcggtggatcgtggcgcaagtttgtgaggagtggtagctgataggttgggatagcagcgacacccaaaagcccggaggtgggaataggatggcttcgagccgaacaaggcctggtgtggtgtgctatttttgaggacttttgtggggtggaggttaaagaggtgggtggctgtgtgtaaggcatcggcccaaaaggcaggaggaagaccggcttgaatcaacaatgttcgaagaatattgttgattgagcggatgacacgcttaacttttccattttgtggtgaagtgtgtgggcaagagagtcggaaccgaattccctgggaaagaaaaggagcgagcagcatggttatcaaattcacgaccattatcgcattggacgaaactgatacgacactgaaaatgtgttaacacgtaggtgtgaaagtcgcgaatagtggaaaaagtgtcagatttcagtttcaagggaaaagtccagagataatgagtgaaatcatctaaacacaccaaataatatttattgccagacacactgggaaccggagaagtccataaatcacaatgaatgatctcaaaagggcgctgagtgcgcgttaaagatgtagcaaacggcaaacgaaaatgttttcctaactgacactcatgacaaggagtggcagctgttttatttggggcgaaggagatggcgttggctgacttcagttgagagagaactttggcgctgggatggccgaggcgccgatgccaaatgtcttctgcaagagccagcaacacgacgtgagtggaggtgggtgtcgtgaagaaagggtacaaatcgctggagctattgcaccgatagagcagcgccttagttttcagatcattcacagacaaaccaaacgggtcaaactccacagacacaaggttgtcaatggtaaacttgcgcacaaaaataagattggtgactaattgaggagaaattaaaacattggataaagaaaattgtcggttaggagagggaaaaacaacactgccactagcagtgatgggaatggaagagccgttgccgacaagaatatttgtgggtgtgtgggaaggtgaagtggaggagagaataccctgattgttggagagatgggaggatgcgccggaatccatgaaccagtcgggctgctgtagggtcatggagttcagcgtgttgatcaaggcagtgggatcccaggtgttcgtggcggtcgtcggtgcagctgctgcaggcgcgccggcagtagggaatccaggaggggtgccagcgaacatggcctgatgcggaatgccgggacgtggaccaagcacgccctgggtaggctgcattgtccacatctagaaggtgccggtgtaggggttcaggaacagacggaagccgccgaaaccgccgggcgcgccagacctgctggaggatgcgcattgctgtgattcttgttcttgtaccggttcttgttgttgttccgcggtgcagaagaggactgctggggtgccgaaggagaagctggcggctggggcgtcggcggttgaggcgccaccaccagcgccgtttgttctctaggctgcggggtcttgaggtctgcctcctcaagttccagcatggagcacgcagtgctgaacgtcggcaggggatctcaggatttgatgagggtccccatgtgacaaagagtcggacttaggcctcgaatgagcgtgaggaccagagtcggctcgttgacggggaatccgagatcggcgagcctgtcggcgtacgacttgaggcgctcgatgtagtcggagaaggagaggttgccttgcgcgagattgcggaagtccgcttcgaacgcaagggcccgcggcggcttgttgttccagaactgcgcctcgatcgctagccagatggtgcgggcgtttgcgccgggcgtcatcaccttgttcattagcttcggagagatggacgagtagaggagggagcggacagagaaatccgtcgtcgtccacaccggtgtgaccgggtcaggcaccggcataccatcgatgtggtgaccagcgccgaacttgtcgaggagggtggtgaaaagctcacaccaggcacgataatttggggggtgaagttccagggtgatggggaggtgagttttgatattgatggtggcgagagaggtagcaggattgggaggatgaaaggtcctaatatggctagaggggggggtgaatagcctatttaaaaatctacaaactcactagagcaagaggttagtaaataacaaagtgaagctttttgctctagctctaatggggtgtttgcaagccactcattcaacaattctagttgatataatcactacgcacataagagctatgtcactacaagctacactagtgagctatactacagaaggcaactaaactaattacactactttgcggtaagtaaaggataggatgagatatttataccgccgtgtaggggatgaatcaatcaccaatatagacaatcaagcaccgggagaatgccaatcaaacacaatcgagacaccgatttttctccggaggttcacgtgcttgccggcacgctacgtccccgttgtgtcgaccaacacttggtggttcggcggctaaaaggtatagcacaaacctcgtcctcactaggacactgcaagaacctacccacaagtgaggtagctcaatgacacgcgcaatccactagagttacctttcggctcttcgccggggaaggtacaagacccctcacaatcaccgggagatggccacgaacaatcaccaactcgtgccaatgctcctccgctgctccaagccggctaggtggtggcaaccaccaagagtaacaagaaaaaccgcagccaaaacgatccccaagtgccactagatgcaatcactcatgcaaatgcacttggaatcactcctaatctcacaaagatgaataatctataaaggagatgagtgagaggtgtttgcttaggctcacaaggatgtcaagtatgctagaatgccaaaagagtgagccataagccggccaacaactatttataagcccctcaaacaaatagagctgttggctctttcactgggctgaaatcggggtcatcggacgtgccgcaaggaaccaccggacacacagaccctgcgttcggtgctccagaggaagccacgtgtcaaccttttgaactatgcgcgttgatctccaacggtcaagaaagaaccaccggacacgctcaagttggcaccggacgcgtccggtgcacaccggtcatgtgcgcagagagttctgcaaacacacgaccccaccggactcggagcaccggacgctcaccgaactcgtgcgcagagaggtctgcaaaccgcactaacaccggacgctgagtaccggactcactctggtacgtccggtgccttgtcagaaaacctcagctgaagtcaggccacaccggacgcacgaatagggaataccctgcgtccgcgtgcagtgcgtccggtgcttaaccctaaccgggccaggcattgacagcacaccggacgctcaggccagcgttcggtgcctctgcgcactgcgtccggtgagtgagaaacactcccgcgacttctccaaatttcccaccggcacaatagaaaatatacacttaattttctcaaaaacgttgaatctcgccggcgggagggagagagaaacccaaacccctctcaaccctaggaacttcacctcctttgtaaatgtgctaacaccaacaagtgtccaccaccaaagtacatgtgtgttagcttttcacaaacattttcatcaaaggagttaagttagctcactaggttctaaatgcatgcatgtgaacaatgacacctagtggcacttgataaccgcttagctaaagaattttcctctttatagtacggctatctatcctaaatgtgatcacaccctctatggtgtcttgatcaccaaaactaaaaccctaagcaatacctttgccttgatctccatgagttttgtttttctcttttttcttttcaagttgagcacttgatcatcttgtggtcatcaccatcatcaccatgatcatctcttgctccatcacttggcacgtaccaacctcattaagtctacacgtacttagtatagaggttagtactagggtttcatcaattatccaaaaccaaacatgtgtaacaatattccaacagccccgactgtcccagtgtacacgatggccacatcactgaccccgacgtcgggcctgtccatggcgctcggctccggcgcttcctacggcggcgctccaccgccgccttccaccagcgtgttctacggcggcgtcgacggcagcctactctacgggggcgctccgtataccggggcgtcctcgtccttcggcagcggtggcaaccctgtttttccgacctaggaccacgccgcgggtgcccaggctgccccaaaattctacaagctcaagttcccgacgtacgacggcagggttgatcctctcaattggctgaaccactgcgagcagttcttccgtggtcaacacaccctgctttcggatcgcacatggctcgcttcgtatcatcttcggggcgcagcgcagacatggtactacgcactggagcaggacgagggcatgcccatgtggggcatgcccgtgtgggagcgtttccgcgagctgtgtcagctgcagttcggccctccagtgcagggtaccaggctggccgaattggcccgccttccgttccagtcaaccgtccaggagtacgcgcaacgctacaatgccgtgctctgccacgctcatgacctctccctgcgccagaaggcggagttgtttgtgggtgggctgccgagcacatcaaggtggatgtggagatcagaaatccgcccgaccttcagacggctcagtacctggcgcgggccttcgagcgccgcgtggcggcttttctgccggccccgcagccgcacgggaaccgtgctcccagccagccacgcccccctccgtcacctgcagcggggtctccagtgccgtctgcgacaacaaccgcggctgccctaagattccatcacctctcaccagccgaacaagctgaacggtgccgtcaaggactctgctatagttgtgatgagcccttcgtccgtggccacgtatgtcagcgtctcttctacttggaatcagacgactatctcgacgacgacatcccagccgacgtggcggtggcggccttgggtgatgagctgcccgccgacctagcgccgatgcttgcagctggccacagccccctcgcctcacatgcgggtgctggtggctaacggcgaccgcgtgccatgaaggcgtcacccggcagtaggctcggaggagtttactattgactgcttcggcatctccctgggcgagttcgatctcatcctgggggtggagttccttcgtacgttggggcccatcctctgggattttgaggacctctgcatggcctttacgcagggctctcgacgcatacaaccccctaaaaggattcctaccagactcatcatccggtagggctatgattcctaccagactcatacaaccccctaaaagggaatgacccaggacttccaaatcaaatattcctaaaccccccatgatcaataggtctcttgaccgaattaggatggccaccattcatcttcttgtgacctttccataaaaaagcccttcttagcttatcaattgcttcaattgcctacttaggaaagtccaaagcaatgagttgataaatagatatagcagtaagtacagctatcccagccgagttcatcattgctgctttccagccaggtaatttatgagctatcttctcgattatacgtagaaattggcattagagaggttcttgactaacagtggaagtccaaggtatttgtaactaactaaagaggggttccatggtggcgaaggtggccaccacgtacatcatcatttaactaactgctactctacgagtgacttctgtacttgaaaaatcaaattagtatggtaccaggttatattactttatgtaacattaattctcaccaaatgtgctatgaaaaaagataaatcccataaattctcacaataatcagaaacatctggcctttaatttaatttggtagactctaatcatcattgccagtaatagccattggatctattccatttcctaaaattacccacctctgccattattaaatacataaagtgaccccctaaatttgcatttgaattaaccactgctaccattatgaatggtaattgaaaataagcccctttattggcatctaaattactaaattatctactttttgccattacatagaagataatgcaagggaactcctaaatttgcttttagattacccagaatttttttgaggggaaattactcagatttgctgttctgaaagataatctaaagtagccattttaatttgtaaataaattacctaccattgccattatgaaaaacgaactaaaacatccctcaaatcatgtctaaatactaatataagctattatggaaaatagctcaataaccatattgtccactatatatgtttataaatgatgcactcctaccactattgaactaaaagtaagcataaatgctatgtgcctccatgtagagcaagtacacatgcgtacatttgtcaatcgtgaattaaaagcgagcataaatgctaagttttgtaattgtaagttgttactttagataagtttatacattttgacctaatcattatgacataaatactaatagtttaattgtaagcactctaattgtactactacacatcttgagtgctgtgttttaggttgaaacagttgtttatgccattatagtatttaacattggagcctaggaccttaagttaataactagcatttgtgttaaagaagtcagtggagcctaggaccttgaatccatttgttaataacgggagtttgaacttaaaatgtggataaaaagttgcaacaattaataagaaaaaaatgaaagataaaatatagatatgtcacaaaaagggttgtgacaagagctgacatagcttgagctaaggtttcaactaaatacatattaaaaactcatatatgtgcaatgcaaagaatgaaaacacatataggtaactggtaaatttatcacaaccagataagactatagaattggtattgtgtctggaaatgtatagacaaaaaaaaatgtaaagataatcaattttgatttgttgtatgtcctaaatttatccacgaaacttttgacacttatgtaacacaaattctatgccatgctgcaggatgggttgataggttggggatacctagcagtaaaatgctaagtttgggcatatgtcctagagaaatactcctctgatgtatgccagtattcagaaaactagatcttgaagctactgctttccatggccatgagtttgatatggttttgctgtctcatgagcataaagtttgtctatcaatatccaaacatgacttactgaatctttaggagctgagttttgatgcttgcatgatttgtttcctggcaccaaaagccaaaaattgtattgcctccaatggttgcttagaatcttcttttgtgcaagcaagttcatattccactccaggatatgaagagcttaagggcgtagacaattagacgtacatcacatgagatgatttatttatcaagtctctgcactataagtctataacacatcattgatctgtacatatttgattgactgcaggctccagacacatttgttgcagcagctgctcgaaa

SEQ ID NO: 4993 - DNA, 20609 bp, Sorghum bicolor
  Intron number 1 from transcript Sb03g027130.1 (locus Sb03g 027130) derived from phytozome v7.0 (chr-ID chromosome_3; pos 54464003 to 54484611 reverse strand)
gtctggctaccacggctcatttgaggacaccagtgagtttttttttctttcccaattgattaatcatatatctcaggcctgccttcttggcttaatttccttgtccttttaataaagtagttgttgatgcaaaagctagatctgcaaacacaaatggctaatacccgatttaaacgttaaggcgtgccagccgatttgaccttactatcggcaaaggtgataactcgaatactttggtcccgacaacagcgatacgcccggatgccacggccaagaggtattcacgcggaacttgagaacacaccgagcttaagtcgacgaattcctaagaactcgtagtaaaaaggaaaaaggatgacgaagtcgtcgaaatagtagatactggaatatgagtaaaaaccggtatttgattgattgatcgattgatagatagattacaaagccctagggtctacatttatactgtaacattccggatttttacgaaaaccaacaatacgagctttttaaaatttttcatgtaatcgtgtgaagcatatagtttttagatctaactcgatcctaacctgctaacaaatcgtagcatacatatagatttgtttgtagacgagtgtctttgttcgtgagtcgatttggagttgagtcttaattagggtttggagtgcacaaatccgtagcaaagtcctctcgaatctctatcgtattctttcgagtccgattccatatctatatatttgaatctccctcaaattcccttgctcataaatggaggatttcctttttcatttctcttgggccgaatctccctccatttcttcactcggcccagctagctctccttctccctctccttgctctcgcccatttcttctccccctcattccagcccacgcgcgcgccagggcctaggctgtggcccacgagggaggcagcgcccccggcccgaggcccagccgctcgctcccccatctccctctgctggcccagcagccaggccagcccacctcgcgaaagctcccgcctagcccatcccgcgcgcggcccagcccacctggcacgccctcacctgaaccctagggagcaggagctccccacgacgccgcaaccgcccagggtgggcagaaccgcccgcgcctgccctctccccctcgacgtccgtgctgatgcgctccacgtgtgccaacgtgggcacggacgcctagcaacagccgtgctcgtccctaagccctagcgctcgcgtataaaagcagctgcagccgctcgcccttcttcttccctgcgccgccgccgccatagccgacccgaagctctgtgagccgcgccatcacctacctcgcccgcaaccacggcgctcgagcgcctcgtcacaccaccccgcgcacttgtcgccgtcgagccggccaagcaggagcctagcacgccccgcggcgccgagccccgtccccgcgcacccgccgtcgcgacgccgcgtccacgacctcgccatgctgtggtcgccaacgcctccgtctccgtccacgccgagcaggaggtccgcgccctcgccgcgccgagccccgaccccgcgacgccgtcgtccgcaagccgccaccgcgccgtggaagctgcgtccatgccggccgtggtgaccgcgaccccgaccccgatgtcggtctgcgccaccacgacgacgccgtgctcgtgccccgtcgacctcgtccccggagcgcgtcctcgtcaacaacaccagcgccgagccatccacgacgccgagcagcagcaacgtcggccgcgaccccgagcaggagccccgcacgccacgacggccgaccactgcaggaatgtcgcggcatgaccacgggcacgctgagcccgtcctccaccagctgccaccccacgtttgtgatgtcgcccagagcatcaccactatgccgtgagtcacaagcccaaaactttgcctattgcatcttccatcaacctcgtcattgttgtgctgagatcggccttcgtgccgtgttcttccactatcgcagggagcagaggcttcgccataccattttgctaggctgcgacgtttcctaggtcttgctgccatgccatggccaacttcggcctccaacagcaagccacagcggtccaggacacgctgcagctagccaagtgcacctgggcgctctgcgacaagcctcgcctaccccgccatcgtcaaggtcgacctttttgcacttagttgacgccctccgtgacgtcggcaaaacccttgcccttcattcttgtatcttgtatatacttgttagttatcatctttatccatctatctatacttgtcgatacatgaattatttattctatgcctgtgccgagccttcgcgccggtctactctatttatctcttgtgctatggaaatgtgctactccgagttgtcatcgtgtctttatgttgtcagtggtcgagtcgtgattcttgtgtgtttgtcgttgtctgtggaccgtgccgtcgagccggttgagagagtgatatgtttgaatgttgcgatcgcgagtttgtctcgccatggccgtaatgccaagcatgtccctcctctcgtgttgtcgttcttgttttgtgtttcgttgcccttgaggaccgagccttcgagccggttagggaaatggtagtgcgttcaaccatttcaatcgtgggttcgacccgccgtgatcgcgatgtcgagcgtcactcgttttcccgtgtttagttgacttcgtcacgctacgcttgttagctcctactcccgtccctcggacatggtcatcgtgtgtcgtcatcgacgcggttcttacccgcacactcgatacctaggtggcctagtcgagtgggatacgaattaggggacaaccttcgtggaattgtcggagaccaactcgttaggtggagctcatggccgcgagtcgcctcgccatggtcatcgggctttaccttgtttctcgcatgtttatcttatccgtctcatatgcttatgccacctagacccggacatttcccgtagttcccgcggtgacaaccgcatcgcctggaactataggaatgaccctgtgctgattcagaggcacctaggtcgagaagtgttatgagttggaatagatcatggggtcgtatctcttttcatccaaccgtcgttcattccatgatgagttggtcgaaagagaatgaactccattcttcttctctcttgctattaattcccgtcgatccagtaagatgtggattgagctccttttatttgtttgatgttttgtttccaatctcacgactcccgtcgttgttatggcgagcggatcaatggaaagtgaaacccgtgtcctttctttccttttgggttcttcgtgcttaaactcttgtatgcttgtacctattcgaccgtagcatttatttggttctcgcggtgacaaccgcactgctatggactcgaggaatgtcttagtgcattcagtgtacctaggtcgtggtaccctataagtagcttgagcactctttttctttgtgcgtcactctttctaattccccgtctcttaccgtggcgagtggactggatggagtagaccactccccttttcttctctctttgttccaccctctcttgactctcgccaatcataatggcgtacgggttgagagagatcagagtttcttgtgcttacaaccgtttggttctcgtcaatctctatgacgcttggatcgaaagttcgtaagccctggtgtttacttaaaataagttagagtctacacctttgttattaaagccgtacaggtcgacacgatcgacccgggaagtaacggctaggcgaagactccagcttgtacttagtaaacaaccattctcatttcttttagcccagggatcggacctccaccgagagggctaagtcattatcctttcggtgctcttttagtgtagttgttcttcagtgttcttcgtctcttttcgcagtctttgaggtctagtggtttgattgtttcgctttgattgtcgtttacgaggtagttgcttcggttagcgatgatcgaatcggaaccagtcgaaggaaggacatgccgaaggaggatctcggatgagaacaactacaagtgcactgtggatcttggaaataacatttaacaggtgccacgtcccacccaacctcgtagaatcctattagacatgcaatattatagatgctagtgctttacttttatgcaaatgaactatgataggttgcatggtagaaatgcttgtgagccattgccttgttgcaacctataaccctcgcacacccgctgttaggttagatgcttgcacactacttgctactgttccttctatgcattatatctgtgatgtgatgcattggggaggattggatgtgagtggataaggcacgtggtgccaataactggataagaaatggataatggatttggggagatcttggcgtgcgtcttgggtgtgtagtgagggtcgagtcgaccgagcaggatttacgacgagtcttgggacaagtcttgccggggaatgctacctgggcgttctccacgagaggtacctatggcgggtacatgtgacagggagaggtcccgaagtggagtgtcttcgtgggacgaagcaccgggataggaggtgctgtttagcacggggtagccgggtgtcccgtcgagaggggcatcggctggcccctcgtgaagatgtcctgttcggtcaccctaaggactgagatgttctgagaaccggttcgtaggaagccttacacgccactcgccttattatggtgcgggacggatgtacgaccagctagtgcggtgccactactactaggttgatagcggatagtgtagggaggtacgggcatgaggacccacaccctcctaagacagcgtagtgacctttgggggcccggtactacgcctcatagtctcagcatgccggtggtactccggtatggccccagtcctgagtggtagggtggcatcgtatttagttggaaggcagcccggtatcagcctagacgagccggatcgtcgatgatggtgatcttgtggttagtgtaaacctctgcagagtttggttgatcgatcgatacatatgccgttttctcggctatggacctttcctatgttccgcttcgcttgactagtgagaggagtcccttctaccttcccctgggtttgtgttggatccggcgttggccgttgaggcaaggcacgagcgggagtcgtacttgccgcctagagagtgagagtgtggtgagatgtgtgtggtgggatggatggatggatgtgtggatgagatggaataaaacttgatgaattattattattaaatattgatgaacttgcataggaaaaactacagccatatataggcctcttgatgtaccctttgcatttccacctaccacaaagctacgcaaaagcatagggtgggagccagtggccagtacaaatcgtactgaaaattgtttagcaggttttggacgtggtctatgacgataactacggagaatagaaggattaggtggtctcgttcctgcgctcaagtttggttcggagatgaaggctacgcccgctgatcaactacgctgactctgctgattgcccgtgaaggaggagccttcaccgttgacgcgctacatcgactctgataaagactcgcgtgtgttttcgctagaaaaacgatgtaataggttgttgaccaagagttgtaaagtaaatgtgatgtaatcttgtctttcacgatgtatgaccatgataacagctgatatatgataatgtgatggctcaatttctgaattatcacattataattcgaatctgtggattttcccctttgtggaaaaatctaggtcgtttcatataccctgctcaaagagctacaatcagacatgactaggactcgaattctaaattaaacagaatccgtatacaaaacgaatttaaataactaaggaaaacataaaaccacccccttgtaaccgaccgggacaccgccacagatcaatcggcaaccttcacgctttccttcagagtcatcggcaatcttcctgttatggccatcgacaaacaccaatattgatcatcggccagaacacgtcaccacctttggatctagtcatattcaatcttctcttcatcggcacccatcctcatcggcaactcttctgcaagctagttactcttgctccacctgccgatctatactctgctggtctctgggtacgtgcccaaaaacggtgtcaacacatgccccccaatttcggagtatgaaatcattaatgctccgaaattctctgcagtaatgatgtctttccgcaatcaatgctcccaatctggcaaccgacagccttaatttgaacaactctgatcctattcccctgcagatttctcgaaatcctcaacctcccaaacggacatttccactttagtcgcgcatcggcaatattaccgttacagggacttgccaatggactaaccaggacgtccatatcttatcctcccaaacggctatcttcactttattcgcccatcggcaatatgatcgttacatggcgctgccgatggaccgaccaggagatctcgcacagtaaaatatccctggataatgaccacttcctgtcaaatcgcctgcacaatcccttgatcatcgtgcaaacagttaccatatctacctgagtaccctcggatttcacggatacggcgaggagataagtcagatttgcccctgcccgttttgtcctataaatagttccttctcgggtactccttcctcatcacatcattccacagctccaacttcactttcccggcggcggcactgttcgagagctccaagatctccgacgaagtccttcttcaccaactccgaagcctcgatcatcctctccgtggcaagatggccatcaacttcaccgttcctgaggtcagttcttcactccaccttttgtgctttttctcgcatccctgttcatccacaatctaatttactgaacattttctttttctttctctgttttttcttttaccttcaaaaccattagaatctgtccaacaaaatcgtcatccccaccgatcaaccacacctccaatatcttggtccgttagggaatccagatccaaccgacctcattaacgcagaaaccaacaggatcccttttagagccgagaacttctctttggatctatggaagaatactttccattcttggcccagtcctactgtgggatggaaagactggttcttgagggttagccactcgaatgaagtcaaatggggcgagagaaaactggaccaatgcatcatattgtccatcaccgatatgcataggaatgagtcattgttgatagctgcatcctacttctggtcagacacactcaatgcttttgtcttcggccacggccctgcttcccctactcttgccgatgtggttatgcttaccggcctagacgtatcttctaccgatagcacccacttctttgacactacgcctagtgccaaggtagaaacccgctccatcggcggctggtccgggtacatccagaagtaccgcaaaacagggtccgtcgatataaaggaacaaaccacctttctgaacatgtggctggacaagttcgtattctgtggccgatcggcaggcccgacctccgtttatctatcggcagcagagagactggctaacggtggccgatttcccctcggccgatacctgctcggtgcagcctatcacctccttcaccaagtgaccagaaaactcctactcggccagcccatcggcaacttgggaggtcccttgaaagcccaagtttggttttggtaattaatgacaccaagttgctaatgccttttgtttaagtgacttgagttaggcatagcaacacatgtgatgaaggggcatggtggcatggaaaggtggccacacgatcacaaagggatgaagcatgaagtggagatcatggtgatagacgaggagcaaaattatcaaggcaaaggtataaacatagggttttacttttgccggtctaagatgagtagagaagtgattgaccgggtttaggatagatagccgactatcaagaggggaaatcacggtcatctctcgaatcaagtgctactaggtccatatcttgagcatatgcattaggatctagtaaagtgctaacttaactcctttggtgaaaatgtttgtgaaaagctaacacacatgcactttggtggagaacacttggtggtgttagcacattagcaaaggaggtggagttcctagggttgagaggggtgtgggttcctctctccctcccgccgagcttgcgaagcgggattcggcgcttttgagaaaaatatgtgtatattttctattgcgccagtgggaaattttggagaagtcgcgggagtgttttctcagtgagaaacactcacaggacgctgagtgcggaggcactggacgctgagtgctagggttgagcaccggacgcactctgagagcgtccggtggttagcgtccggtgtgaggggtttttgcaaccctctctgcgcacgagtccggtgagcaccggaccgtccggtgcccagcgtccggtgaggtcgcgagtttgacaaactctctgcgcatgagtccggtgtgcaccggacacgtccggtgtggatttgcagagcgtccggtgtgttgcaggtagccgttagagcctgacacgcgaaattcaaaaaggacacgtgacctatccctgagcaccggacgctgggggtcaagcgtccggtgatcacttagttgcgtccggtgtggtcgactgcagcacactaaaaacagctaacggctagtttttttgtgggtgcttataaatagttggtggccggctttggggggttctctctttcacttttgaatacttgagacatacattgagctagagaacactccctccactcatctccttgcttgattgctaatcctagtgagattgagtgagattcaagtgcattgctttgagagttgcatttagtggcacttgattcttgagtttgctgcggatttcttgttaatcttgggtgtttcccgacgccctagacggcttagagcagcggtggtgttgagctcatgattggagattgtttcgagcctcaccaagtgatttgtgaggggttcttgagccttccccgcgggagatcgcaattggctactctagtggattgctcgtggcttggaggatccccatcttgtgagtggatgtgcagcacccgctgagggtttggctttggattgccaattagctcgtgatccatcaagtgggtgtatcgccacaacgaggagtagcttgctgggaagcaagtgaacctcggtaaaaaatcttatgtcatctcttgccgagaattctcttgtgattgtgattgattgattggatatatctctactctacaacgttggtataacaatcactctccactcctttacttacttgtataccttgctagttgtttagcttgtttagtttagtcttcttgtttaggagtgtaactagccttctcttgttgttgtgctttagtgtttagccttgtactagtttgtataggtggcttgcatagcttagttgagcttgtgctagatttgcttcgccatttgttttactaactcgcttgcttagtgaagtttgtagaaattttaattaggctattcacccccctctagccatttggaccattcatccctggtggttcatcgacatgtggcttagcctccacatgcacaagcgtctcgagtttgatctttttgcacagcgtttcccaagggacatagccgaggaccatgaactggatgaagaagaatcagcaacacgtcctcccctaaacttcggtgaggctgtcatagctctgcccggcacaggaggtaatccagatcaggtcagccgattcttccaaaccttgtacgaaggcttgaccagagagcagcgagcatggttgccttatgatgatccagacaccatgtttcctctggttttcaatccgttcaacgacacactaaacaaggatcatgaagtgatgatggcactgatcactcccagagctataccagtgaatttctttggcagtgggaaaacctccgtccagacctatgagttttacaatccatcggcactagctcgtcaattagctttcggccagctgccgattgcactctattatgctgatgtgataaaacccagggaaaccatcaccagcctccttgaatggacgcgagtagcccaactgccatcaagtgccgatacagatgcagacttgttagagtgggttccagccgccttcatcactcaggcgtacaagcaatggtgggcagaatggaaggagcatctgttctgcagatcggctcttacgtaccgcgacatgatcgaccccgagtataaagctcccgataatactgtaagtatattcaaaccgatgtttcaatttcctcaattttatttccatcggtgattcacctttgtatcatcttgcaggttgacaacacccctccatcggttagcaggagtggcaagccgattgacctgtttccatcaggcccaatctcttcaattggcaacaacactcccaccctggccgccatcatgcatcgaggtgttcgcctcaagaaagttaccaccaagaggactcagatatcctcatcggtagctgcctctactttggcacaggctttcaaggtataccttcaatttttataccgatctgattcttatatttgtcagacttgtacttacgagtctttcttcttgtatcagcactccagcgcatcggcaaggaccaaaagcaaaggtgccgatgccccccagtccagccagcagaagagaaaaggtaccaagagtaccagagcacaaacaaagcgccagagagtggcaactccccctcctcctccggtatctccaattccggtgggatcctctccttcttctccagaagcagagactcagcaagtaccacctccccctctaatgcaagaagcaccacaagtggaagaaccccaactagaagagcctcaaccagaagtacctcagccagaaggcacatcggctgatgtgcatgaaccaactaccgattcagcaggttccatcatagcatcggtagtctcttccatccagacaagtactgctcttcctcaaggtaacacacttttataaaattgttgccgatgaacttattttttcctgccttataaccacttctgttaatttttcagctgagatagttccatcggcaactctggccgatcaacccatggctccatcggcatcttcgagtcagaggcaagagattgccctgaagcaagtaagttatccaacccctctttgcatcatttatcaatacctgaccatagaataactcgttttatttcttttttaggagcaggactctcctgacagcttgttctctttcaccatcgacatctctgaagatgagggtgaagaagcaagctcttctcgggcagttatgatcacatcggcagaagtcagggcgaagctggaagaattatcggctctcctccaccaagacacagcccagctagtcgatgattctgatccggccaaagctttattcaagactctgagaggccaaattcccgccgatgctgaagaagttctcttccaagcagcacacctggagagccgtcaactgcagtaccagagggctgcccagcgccttgccgacagagccgctcagactcgtctttccgaggagatgatgaaagaaaaacttcttaccgatgaaaagcataagaccatcggcaccctaaagtcctcgggagacgcactgaagcacaaaatctccgatctgtcggcaaaaagggaagctctgttggcagaacttaaacaaatagaggatgctctgtcccaagccagacaggaagaaagccagctgccgaagacaatcaagcttcttgaacaagaatgaaatatccatggtcgcaaagcactgcagctgaagaagaagttgaagccagtagaaggttctgccgatgaagacgtcaaagagatagaagcagccaaccaaatccgcctgcgtgctatatcggccatccaagcgctgctaagcatatgagcccttcatcggcaacatactcacctctttttgcttccctgataggactgttatcggcatcttttgaaacattaaatccggccccaaacatattccaatccagccgataggagtgttatcggcatttaaacttttatgcatcgacccatatgttggggtagtacttctttagatatttgccatttaatgctctgggaaattcaactccttcgagagtttctaaaatataggcattaccaggagccgatcgacttagccgatagggaccctcccaattgggagaccactttccaaactttgaacttttagtcccgatcggtaggattaatttccatactaagtctccatcggcaaattccttagcctttaccttcttatcataccatctagcaactctcttcttattctcttctatactcatcaaagccctcagccgatgccctgctagatcatccaactcgtctgtcatcaaagtagcataatcatcggcagccaactgatcttgaaaagataatcgcctagacccagccttaatttcccaaggtaacactgcatcatgcccatacactaactgatagggtgaaaccttggtcgatccatgacaagccatccggtatgaccattaagcttcgtttaacaacgtgtgccaccgtctaggattttcttcaatctttcgtttaataagcttaataattcctttgttagatgcctcggcctgcccattagcttgagcatagtaaggagaagagtttaacactttaatccccataccgattgcgaattcatcaaaatcccctgatgtgaacatagtgccctgatcggtagtgattgtttgaggaatcccaaatcggtaaatgatgtgctctttcacaaaatcaatcatattggccgatgtgactttcttcaaagaaatagcttcaacccacttggtgaaataatcggtggcaactagaataaacttatgccctttgctagatggtggataaatctggccgatcaaatcaatagcccatcctcggaacggccaaggctttataataggattcatagccgatgcaggcgccctttgaatattaccaaacttttgacatccttgacatcctttgaaatacttaaagcaatcttcaagtatagtcggccaataatatccattcctcctaatcatccacttcatcttgaaagccgactgatgtgctccacataccccttcatggatttctcctatcaaacttctagcttcatcatcacccaagcatcggagaagaatcccatcaaccgttcggtaatacaattcatcttcgaggagcacatacttggtggcttggaaccgaacccacctttcaactttcttagatggatcctgcaaataatcaatgatttcttttctccaatcaccagcactgattgccgatattacattaatcatgggctgatatccccaggcatgctgagccaaccgattggcctcttcattatgcaatcgaggaacatgctctaatcggaaatctttgaattcttttaacagtcgcatactcctttcgtaataagttatgagaactccacttcggcattcatagcttccagccaattgatttataactagcatagaatccccgaagacctcaacagcatcagcatgaacttctcttaacaactccaatctctttattaaagcttgatactcagcctgattattcgacgacgtggcaacaatcggcaaggaaaactcatacttccttccccgaggggaaactaatactatgccgattcctgccccccggtcacatgtggatccatcaaagaagagcgtccaaggtacaatttccaaagcctccacttcaccgcaatgttgagttacaaaatcgaccataatctgtcccttaactgctttagccgattcgtaacgcagatcaaattccgacagcaccaaaatccatttaccgatcctgccactcataatcggcatagatagcatgtaccggaccacatcatctttgcaaataacagtgcattcggccgatagcaaatagtgtcttaacttgatataagagaaatacaggcacaagcatagcttctcaatagccgaatacctggtctcagcatcaatcaacctcctgcttaagtaataaattacacgctctttcccttcaaattcttgaattaaagctgaactgatgaccatcccatcggtagacaaatataatctgaagggcttcccttgctgaggtggaatgagaactggaggatttactaaataattcttgatttcatctagagccaactgttgctctttcccccaaacaaattcttgatcggcttttagcttaagaagagggctgagagcacgaattttaccagacaaattagatataaatctcctgataaaatttatcttgccgatcaaggattggagctcagtcttgttggtaggggcaactattttgttgatggcctcaatagatcttcgactgatttcaatccccctttgatgcaccatgaaaccaagaaactgccctgccgatacaccaaatgcacacttattgggattcattttcaagccatgcttccttgtgcattccaacacctttcgtagatcggcaagatgctttgtgaagtccccagacttaaccaccacatgatcaatataaatttccaccagcttgccgatgaactcatgaaatataaaattcatggccctttgataagtagcaccagcattctttaagccgaaggtcataactatccattcaaacaacccgacatgaccaggacatctaaatgcagtctttggaatatcctcttctgtcatgaatatttggttgtatcctgcattgccatccataaagctaatgatctgatgcccagccacagcatcaactagcagatcggcaactggcattgggtagccatccatcggtgcagctttgttaagattcctgaaatcaatgtagacccgaagtttcccgttcttcttgtaaaccggaacaacattggaaatccactcggcatatcgacattgccgaataaatttggcttcaataagtttagttatttcggtcttgatattgggaagaatattaggattacatcggcgagctggctgctgatgtggccggaatccagacttgataggtaaccgatgttcaacaatcgatcggtccaaaccaggcatctcagtataatcacaagcaaagcaatctttatattccttcaacaaatcagttaactgttgcttacactcaggactcaacttagcactaataaaagtaggtctaggcttatcaccactacctatatctacttctaccaaatcatcggccgatgtgaacccctggcctaactttccatcatcggcgaacctatccattaaaaaccttcgtcagaaccgactgcttggatcggtggaatttcataatcagccactttgagaaaatccttttcccaaacttctcctgaaatacacctagtcctttcgtaggtgtctgcctctgccgatgcaataacataggaagaatctcccgggacaatctcaatcttgtcacctacccactggaccaagcactggtgcattgtagacgggatgcaacaattggcatgaatccaatctctccctagcaacagattgtaggcacctttcccactgattacgaagaaggtcgtcggcaaggttttgctgccgatggtcaattctacgcagatagctcctttaactggagacacattgccttcaaagtctttgagcatcatattggtcttggtcaaatcctgatctccttttccaagcttccgatacactgtataaggcatgatgttgatagcagccccaccgtcaattaaaatcttagtcatcggctgaccatcaacccttcttttgacaaacagagccttaagatgttgcctttcatcatcggcaggcttctcaaagatggctgtcatcggatctagagccaactgagctatctggtcagaaaactccaactcatcatcactggatggcgcaaggaactccatcggcaacataaagaccatgttgacatctgccgatggacctttccccttaggatctggttgttgctgatccccagactgctcagagttctcccccttgcttaactcttcttgcctttcgcgctgcagccttattttctgtgtcctggtcaatccttctagacaccatggaggaagttgctgctgcctcaccgctgggcgacgattttcctttgactccaaccgataagtgttggcatccctgcaaaatatgaactcatcgggaacccgcgcattagccatttcttcaagttcttcctagctcctagggaaatactcgacacgatctccaagcctgtcgtgcacgctgagcctgccccccaaccaatcatgaacggatgctctccccctaatcggcccatcaaatcgccgatcattttcatgatagtaccggtcggatctgtcataccggtcataaccgttgcactcaggacaatctctgacagtggggagtttgatattttcctcccaacaatgaatgaagaacgggcaattccagtggtccctatgccgattccactcctatcggcgtctttcctcttcccgacgataattctcttgctggcgccgacatcgatcttcacattgctgccaagtctcctggggcttcctgtgagttatcacaatgccggatcggggaggccttcctgagttagctctctcctggatcaagcctttccccttcgcatcggcagtagtgatttgatgctgaggatccaccgatgcacttctttcagctgcttctgatgttaagaccttggcctttcccttagcatccagcatgtttgtcgggaaaggatgttggtcaatcttcatcggcttctgggtcttggagctgtcaaatttgatccttccagattctatagccgattgcagctgctgtctgaaaaccttgcactcattagtgtcgtgagaagttgcattgtgccacttgcaatatttcatcctttttaattcttcggccgatgggatcacatgattaggtgacagcttgatctgaccttcctgaattagaaagtcaaatatcctatcggccttagtggtgtcaaacgcaaacttctccggttctttatgtccaaaagggcaagacattggcttcttatttttacccattctgccaaactgatgactggttcttcatcagagtccgagcttgttgcttcatcaacgaacgacacctttttgttccatgctctcttaggctcgaacggcttgatatcttgatcagaaatcctctgcaccaagtgacttaagctttcaaactcctgagacgcatacttgtccctgatgtgtggcaacaaaccctggaaagccaaatcggctagctgccgatcatccagaaccaggctatagcatttgttcttgacttcccgtatcctctgcacaaaactttcaaccgattcatcattacgttgcctcaatttgaccaaatcggtgatcttctcatggaccccagaaaagaagtatttgtggaattgtttctccagatcagcccaagtaatcactgagttgggaggtaatgatataaaccaggtgaaagtcgatccagacaatgatgacgagaataagcgaacccttaactcgtccctgttagcagcttccccgcactggatgatgaacctgttgacgtgctccatggttgacgtgtcatcctgcccagaaaacttagtaaaatccggtaccttgtaccgatttggaagcgggatcaaatcatatgcgggaggatacggtgtccgataagagtaagtgttgactttgggttttatcccaaattgatctctcattacttcagcaatcttatcggcccaataagcatcggcatcttgccgatgaggtggttgcggatccgacacctgctggtaagcttccacgtgtctttgcggcgcacgatctgcatggaacattggattaatcatttggcccccaatctgtggaccaccaagctgttgcccgccaatctgctgtccgccgatctgctgcccaaaattcaccgtctggttgggcattccctgattctggaactcgggatagatctggccttgctggaaccctgtagcctgatgactctgttggggtgtttgcagaaagacttgctgcccaagccatccactattagcattcatcggcataggtcctgccgatgactggtaattgggcatcatcatcgaattgacatacccaggctgagtcatgcatctctgttgcatcagcattgagtctgccgatgcagtagtagttgtagtatactggggactctggttcatcggcatattgggaggcgccgatgccataggagccttgcctctcatatcagttgcttgagatataccgggtgtcttgaagtattccggaggcataccaaaaccccaccagttaggaggaggaactggtcctgacattgccgatgctaataaatctgtagtaagcttaatctgttctgaagtcggcggattcgtcgtcatcggtgtagattgtgcattgatagctcccatcgtacttggaggaacgggaatctccatgcccgcagcggccgtagcaaccgatggagctgtgaccaccggtgatcctggctgatgatgagaagggcccacataatctggtggcaattgtccttccttgaaagttctagccacggcattgaaaaccgtattggacagcacaccagcttggttgatcaaagcacggttgatagcactatcaaccatctcttgaagtttaccaggattggcttcaaaagtaacctgccgaggtgccggcagtgtatccttctggatcacctcgccgctcctgttcatgctgaaggacctcaggcattgctgcttgtaatcctccatggctttagcaatagcatgcttctgctcgtccttgagattggcttccgtcacggggatgacgttctcctgatcaaactcggaagtcgacatgttgatcttgatcttggatctgtcccactgggcgtgccaaaagatgtgttgatgcaaaagctagatctgcaaacacaaagggctaatacccgatttaaacgttaaggcgtgccaaccgatttgaccttactatcggcaaaggtgataactcaaatactttggttccgacaacagcgatacgcccggatgccacggccaagaggtattcacgcggaacttgagaacacgccgagcttaagtcgacgaattcctaagaactcgtagtaaaaaggaaaaaggatgacgaagtcgtcgaaatagtagatactggaatatgagtaaaaactggtgtttgatcgattgatcgattgatagataaattacaaagccctagggtctacatttataccctgctcaaagagctacaatcagacacgactaggacttgaattctaaattaaacagaatccgtatacaaaacgaatttaaacaactaaggaaaacataaaaccacccccttgtaaccgaccgggacaccgccatagatcaatcggcaacctccacgctttccttcagagtcatcggcaatcttcctgttatggccatcggcaaacaccaatattgatcatcggcaagaacacgtcaccacctttggatctagtcatattcaatcttctcttcatcggcacccatcctcatcggcaactcttctgcaagctagttactcttgctccacctgccgatctatactctgctggtctctgggtacgtgtccaaaaacagtgtcaacggtagtagtcttgtgtttcttcttgatatcatgtaaaaaatttggtgcgtccttactactatatctgctgctgacagctagcttattccaacaaaattttctgcaccatgtgattttgctttgtgccgtccgtgtgatctggtcgttgggttttgcttctctctctatatataatttaattattttttcttgtatgattgtaccataaatgggtcccaattgtacttgaccttgacccatttgaaatatacttgcagccaaggccttgtttacttcccaaattttttgcaaaatggacacagtaactattttgtttgtatatgacaaatattgtccaaccatagactaactaggctcaaaagattcgtctcgtcaatttcgaccaaactgtgcaattagtttttatttttatctatatttagtatttcatgcatgtgtctaaagattcgatgtgacggagaatctgaaaaaatttgcatttttggggtggaagtaaacaagacctaaattttgaatggtaaaacactaggagagaaacccacgtcactgggagaagaagaaaattctgattgtgtaagacatctctaggccgtgactagattgtttgtgcaccacagataccctatcctctgtcactcatgcgttatgcttgcattttgcgacttacactgtttattttgatttgatttaattgcgcagctcaatactaattaacccctttgcttcggtttcatattgtggtgttatatatgcaggatccatattttgtactggaaggtcctacccgtgctgttatgttttcag

SEQ ID NO: 4994 - DNA, 7540 bp, Sorghum bicolor
  Intron number 1 from transcript Sb02g036020.1 (locus Sb02g 036020) derived from phytozome v7.0 (chr-ID chromosome_2; pos 70396068 to 70403607)
ttcaaggttaaaggcatcctcctgcagacttacaggtacgttattatgggactaatattattggtaataaagctgtcaggagtttcgtcagacgatttattcattaatcggaatagccagccgattagtaggagtttcagaggcaatgtacattttaccatgttgacgataaagatgttgtgaatgtggattgatccctgcaagtagttagtgataaaaacaggatctactagcagtgaatcgagtcggggtacaaataacatatagcagtaaacagtggcacatgcatatgattaatctactactagaaacagagaaacagataggttagggtttcgaccatcagcgttcccggcgagtgcggatccggtggcgtccatgtcgagagtgctggtggcggagtagatcccgtcgtccttcgggcctccaccggcactgaccgacgacggcggggtaggagagaggcgcagtggtgcttcccgacgccactgcgcaagccgatcggatggcctagggtttgtcgagtagggttttgtgcacggcgaacttcgtcaaacgtgcctgcggcccccactcctgtttatatagcgcagcgcgtcgggggcccaccaaccatggatcggttgggcgcccccgatcagggcgcgatccagggggtaagaggccccagccgttgggctgggtctgagatcaacctaacattctcccccttgatctcaactgtgctatctcgctttgtcaactcaccccatcacaaatcagtgtattgagcatgcttcatcttgacagttatcactgctagattagacagccacaaacacttttctatttagagatgaattctcgccttgggccccttactatccaggaatcacaggctttcccttaaacccatgccggctacatgttctctgaacacgttgggcggtaagcctttggtaagcggatccgctagcatcttttctgtgcttatatgttcaagacttatgacgtgatcccggattttatccttgacaacataatattttatgtcaatgtgcttggctgcattgcttgacttattgttgtgagcatacaacactgctggctcgttgtcacaatacaactttagtggtttatcgatgctgtcgaccacctttaaactgggtataaatttcttaagccaattcacctgtcctgatgcctcataacaagcaataaactcagcatacattgtggacgatgcagtgactattgtttgttttgagctcttccatgatatggctccttgcgcgagagtgaatacataccctgaggtagactttctatcatctcccgcgtaatcagaatctgaataccctactatttgtaggtcatcagatcttctataggttaacatgagccctttcgtgccttgcaagtaccttaagactttctttactagattccagtgttccatacctggattactttgatatctaccaagtaacccggtcacaaaggccaggtctgggcgtgtgcacacttgagcatactgtaagcttccgacagctgaagcgtatggaacggcttgcatgcgatcgcgctcgaacttgctcttgggacattgatgttccccatacttgtcaccttttacaataggagcaggtgaaggtctacacttatgcatattgaatttcttcaatattttctctatatatgcctcttgggacaatcccaatacccctcgacttctatctcggtgaatctttatgcccaagacaaaggaagcttcacctaaatctttcatatcgaaatttgaggacaagaatctcttggtttcctgcagtagagtgacatcactactggctagtagaatgtcatctacatacagtactaggaaaatgtatttcccattcttaaactttgcatatacgcaattgtcctcaacgttctctgtaaacccaaactttctgattgtcttatcaaactttaaataccactgcctggatgcttgctttaatccataaatggatttcttcaggcgacagcccattctttcttttcctgtcacaacaaaacctttcggttgtgccatgtatacactttcttctagatccccattgaggaaagctgtcttcacatccatttgatgcaattctagatcaaaatgtgccactagggccattatgattctaaaagagtctttgctcgagacgggagagaatgtttcattataatctatcccttctcgctgagtaaaacccttggctaccagtcttgctttgtacctttctatgttccctttggagtcacgtttcaccttgtagacccatttgcagcctactgttttggctccttcaggaattttctctaggtcccaaactttattggtactcatagactttaattcatcttccatggcttcttgccacttagatgcttcggtgctcctcatggcttcttcaaatgaagtgggttcatcctccatctgaacttcttcgcattcatagactatatagtcatctggaataggagactttctcgctctttgaggtctgccagaagtttctgctactggcatttcttcttgaggttgctcttgttggggctgttgttcttcgactatgggttcattcggctcctgagggacaggttccaaattggccataggcaaaaaagcagcaggtgttgtcactactggtgtagatccaacgacaacaggcagcgtaaagtagggttcttgcaccatgggaatgggcacgaacacccgcttctcttcaaggttaatttctcgcgctgccttgctccccctgatcatctgatcttctagaaaactagcgtgtctcgtttccacaaacttggtatgtctaccagggcagtagaaacgataacttttcgacttttctggatagccaatgaaatgacaacttactgttttggggtctagctttcctatgtttgggttaaacacttttgcttcagcggggctcccccagacacgcagatggttgactgagggtttcctgctggtccacaactcatacggggttttaagtactgacttgcttggaactctgttgagaatatgaatggcggtttttaaggcctccatccacaaactcaatggcagagtggaatagctcatcatgctgcgcaccatatccattagagtacggttacgcctttctgctactccattctgctgtgggtcccctggcattgaatactgggctactatgccattttcctgtaagaaccttgcaaaaggtccaggaacttgtccataaggggtatgtcgaccgtagtactcccccccacggtcagatcttactactttgatttttctgtctagttggttttcaacctcagccttgaatatcttaaatttgtctaaagcttctgagcgttctttgattggatagatgtatccaaaacgagagtagtcatctgtgaatgtgatgaaggaatcaaaaccatccacagatgtcactggaaaaggtccacagatgtctgtgtggatcaattctagtactcccatgcttcgcttagcgcctttctttatgttctttactaacttgcctttaatgcaatcaacgcattgttctaactctgagagttctaatggtgggaggattgattctttgactaagcgttctattctccccctcgaaatatggcctaaacgacagtgccataatttcgatgaggaatcaattctctttcttttcttgctagcatctgcgggtattgcattctcagcattattacattcagcattcacattctcagacaaagataataaataaagtttgtcttgtcggaaggcaagacccacacatttattatttaactgtagcttacaatcattcttgctgaaatggcaatcaaaaccatagtctgacaaacatgaaactgaaattaaatttctagctaaagagggaacataaagaacatcatgcaactcaagggtgaagccactagctaaatctagagataaatttcctatagcttgaacttcagcttcaacaccagtggccaccttaatctgtctttctcctctttgaagggttctccctccactgaatccctgcaaagagtttgcaacatgaacagttgcacctgagtcaatccaccatgtggatctagcataacttagatataaggattcatcaacaaaagttataatgtcctcacctttcactaggcaatgtttcatgaacttagggcagtcatgcttccaatgccctgtctcattacaccatctacagcgatccgggtcctcctgcttgtgctggttgtcttgctttgggtgtgctttaggctgtgaagtgcttcctcccttgttctgggaggtggaggcatctggagctttcttgttgtagaatggcttcttgttctttcctttcacaaagttcacagaaccaccatttgcattcttgagcctttcttcctcttgcacacacatagcaatcaccttctctaaatcccactcctctggctgtgtgttgtagttaacaacaaatgtctcatactctttaggaagtgagtttagagctaggtgaatgaggaaaccatcagcaaggggcatctttagcttctctaacttggctgccatggtgctcatgctcagaatgtgctctctcacactcccccctgtgaacctcatgttagtgagtttctggatcagggtggaagcatgggctttggtggaaccagtaaactgattcttcactttctcaaggtattcttttgctgtctcacattctgggatggcacctcttaggccctctgtgatggttttcttgatgacaatcttgcacttgcggtttgacttttcccacttgtacttctcaagatcatactttgctctgatgggagcaaagtctcgcttccgattagcaaaagcttcatcggtctcattctgagccctttcgggctcctctggctcagtgggctttggctcctgaagagccaaatctatctcagcaagtgctagagcagcatcaagttcctcgcgccacagaacatagttctgccccgtcagctttgggattgcactgatgaagtgcatcgcattgagtgcttggtcatcagcgttcccggcgagtgcggatccggtggcgtccatgtcgagagtgctgacgcggtggcggagtagatcccgtcgtccttcgggcctccaccggcactgaccgacgacggcggggtaggagagaggcgcagtggtgcttcccgacgccactgcgcaagccgatcggatggcctagggtttgtcgagtagggttttgtgcacggcgaacttcgtcaaacgtgcctgcggcccccactcctgtttatatagcgcagcgcgtcgggggcccaccaaccatggatcggttgggcgcccccgatcagggcgcgatccagggggtaagaggccccagccgttgggctgggcctgagatcaacctaacagttagctaggatgcaagtttagtccgacctccttctgtcgtaactagacgacgttcgacgtgtagcttttgcctgcacctatgtttagctcaaaagattcgtttcacaaattataaatatactgtataattagttatttttatctatatttaatgctttatacataggttgtaagattcgatataaatatgtatttgctataagatttgatgtgatgaaaaatctgaaaaattttataaattttctttaaactaaacaaggcccagtatacggagtacggagagattacatgccagcctccggtcggaaacgacatatactatttccgacctcactaaaatgcatgaactacagtattagtgaaaacctacatcatatccatagcatgcacaaagctgcatgcatgcatgcgtatgggtaaagacaggtagggggcgcttaacaattacacatcacaacatgcatatacacttacttttataaatatatgtacataaaccttagtcctatgagcacttttaaaagactgagctggtagaattttaaaattacacaatacaacatagacgcccataacatgtacatacactcagctctatgaacatacatacgcaaatcctacctttatgagcacctctaaatgactgaactagaagatctcgaaattcacaaagacacccacaagatgcacgcacgcttacctctatgaacacacatacgcaaaccctacttcgatgagtatctccgaaagactaaactgtcagatcttgaaattcataaagtcaccatagacttctcggtgtcgacgtggacgccgcctacaccttaaagcatagtactgtgaattcctaaaataaatacaagaaaatacgaacactcatgtcaaaccgagggcttaaactcagatgtacacatttcaccacaagagacccaactaactgatctatgatagacacgctttgttgcgtccacacatatattggcccaatacacttctaatggctactgtgcgtaggatgaatcaaggcaatttgcattgatgctgctgcaggctgaccgaactgaccctgtacatagaacaaacacatgtaactgaggccttgttacacagaacaaattttatgtttattagatcatgtctgaccgagctattgatttatctagataaatcaatagataaatctataagtcggtcatatatgatccaatgaacatgaatttttttacagctcagacatacaattattcgtccatcataaaaatttcactacaattggactagagaaactgtaattatgaattaattatagaaaaatatatctaaagttatagtaaaaactttgttctaaagcataccatcatgtagagtccaacacagttgaattttttattttatgatttttttatgatttactatgtttttttaaagattcaaccaaaataaacctaaaaaaacgaaaaaccaccatggaggtcaagtgatcggttttgagagatgagagaggaattatttctaattttagagttgagggatgaaaagtcgagttttacgatagttaaggaaggaagaatagtttttttttttaaataaaagcatggagctatttttgccgctatagcccgaaatagcttgaaaaaaattgtgccaccatttgtgtttgtgcataattttgctttacggtttataaaacgctaaacactttggtcttaactcgccatttaaaatatggaatagaagtgttttttattgttctgggccgagcttagctggatggatttttccacagggaatcgaagttcaaaaccagcgtcacaaacggcccaatcagttttgagagagccggacaccggacttgttttgctcaagtataggaggtttttccactatatattcttaaaaaaaaaagaatctagctagatatagtttaatcaacgacctgtattgaatgttataataccaccgttagaattgaccagaaaataacagaaatttaaatacaattttcatcttctaatattctttatgtttctccaattgccgtgaaacaggttactgaccttggccagaatggttgtcatcgtccagtttttcatctggcgctttaggcaccggaactcggacagc

SEQ ID NO: 4995 - DNA, 4747 bp, Sorghum bicolor
  Intron number 1 from transcript Sb04g009360.1 (locus Sb04g 009360) derived from phytozome v7.0 (chr-ID chromosome_4; pos 11668360 to 11673106 reverse strand)
cctccgccttctaccgccggagaatcccaagcaaggtgcgctgcatttcctgttacactacactactgtctttactacagtacaattcagtatagaatccattcactactccccgcaattcgcagaaatttccctgtcttgattcttgttagtactgtattaatgaatttcgaaataccatttcatctcacacggaaagcattcatccacgttcaattataggccttgataagtttcatgggcgaaaagtttttaggtattgtagcatttttgtttgtatcttataattattgtttaaccatggactaactaggtttaaaagattaatttcataaattataaatgattttcttatttattttatttaaatacaatgcgccgcaaaatttgatgtgacgagaaatttcgaaaaaaattggtttttgggtgtaactaaagaaggcgttagtatttatttgcattgcaaatgatgatgaatgcttaaaccgttggaattcaactcgccaggccaggccccacaccattgttgatagacggagcaatccggaatccgcatccatacggaaagtagcatgcatcctcactggagattaggtgtacgtcatgatttatttagaaaattgacacatgacgccatgacagcaaaggcatatagggtcctgagctccagccaattgtcaaatgcatggcggctctattagctcctggcgcgatcgacgaggaggaatttttgtttccacatgcaaaagcacggaattccacagggcgcgggggcgatgacatcgagacggatgcctttgttttcatcgtctagaactcgagatggtagaattttcttgttacttgtataatattggtcctctctgaacctctgaagcaaacaaaagtcgaagcttctctagaatcacctttgcttgtgacgcggctgtgggtgccttgtgcatgcacttgacatcgatgcagcttgcttggggaggtgcatttgcgtggtcacggtgatataccacctagtggcggcatcgaaataatgcatgatatgcatggcagcagaaaaatagctagcgtacacaaatgtgttctacaagccacatagcagttaatagggcctgtttgtatgtattgagctaatagttagctgctaataattagcttaattatttgatctaaatggctctagctaatagtttagctaactaattattatttgcttaatgccaaataacaactactcatcccgttctaaattataagtcgttctacctatattatttttactatgtgttcagatatagcatatatctaagtgcttgtaagctagaaaagctaaaatgtcttataatttagagttgatggagtatcttactagttagacaaaaccaattgttagttagctagctaatattagctatgaactattagtagctaattcatccctactgcttagaaattcgtactatgagttttgcaaggtggacctcgaaccgtctttaaaatcctgacgttctaggcatgatttcactcctataaatatcaaggagagattaatagaggtggttatttcttattatactgatattaaatactagggatattatagctagctctatatctaaccaataaataattgtatcttaaagcatatcttcaccagatctcctatactcttcaatatcccttgaataggagatggaatatctgcagcagatctcctatatgatctcattttccaataacatttttagagatatctcaaattctatctactctcccctaaagatatgagagatagagaggtctcctatctgctgggtcccactccactacggtcacaacagtcatgtcatctagttgccacgagccgtgccgaccatcggctgctcaccgtgtcgcttgacactgacgcgctacaccacctgccttttctcttgtgtgtgtgtgtgtgtgtgtgagagagagagagagagagagaggtaacgaggattagctcctctaaatttttgagactccacttcaaactgagctttaagctaagcctaacgagacaaatcaaagtcaaaagctactcaaaatcaactcattcattctaaagaaaaatgagttaagttggagcatttttaaacgaaccacgaaaccacttcaacaaggtttttgtctagccctacacctcttgcttgccacctgtcaaccgtccgtgtgcatatgagagaggatagatggaggggcaccaatgagatgaaaggccgagacaatggttggagaagaaaattacatgatacggccctacttgttagggcagaaataaagaagatgtttttggcaacctatggagccatggtcagggttcaaaatttcggcgaaatttctccgaaatttcgcgaatttcggtaatttcggtggtggccgaaagaaaaatccgaaattttattatatactaatacatgtgctatataactttagactcatattttttattgtttatattgcatattcttctattcaatagatgtgtaatcataaatcatattgatacttgtttagatctaatttttttaaaaataaaagcatacttcatgtgctagtctctaaaaaaatttcggcgaaatttcggccgaatttcgcgaaattcggtaatttcggtggtggccgaaatttttgcgataacgaaattaaaaaccttggccatggtacctcaatatgcaaaagttgcaattgaaagatctctcacagctggttttatgagagaagtgataagatattttgtggaaatgctcttagctaaattgatccccactcttgcaagacgacgtaggtgcaataaagccaatatttcccagaatcgatgttcagtaggttatcatcaacgttggttaataataaaagctaccacaaaaaatatttggacctatttaggaggtcattgttcacggcaacactcaaataagcctatttgtttcccctcttgctcctcaaatcaactagtgacgcattgttctcttcactggtacccttcttcaactactgtgagagggagccaaaaaatcccataatgttctggcaaatgagcctttggcgtgcacgtcggcgagtaagacatacccattacatccctaaataaatcaattcctagaatctgtggtagtcaaactttttaagtttgactaactttataaaaaataataataacatctataacataaaataagcatcttatgaaaatatattctataatcaatctaatggtactaatttgatattataaatcttaactttttttctaaaattttggttaaaattttaaaattttaagaaatttatttattcactgatagatggagtagttcataatatgtggccggcaatgcatgatactcatgcatggatggagacatgcacctctgctcattggcaatttgatattaaaagctagcagctggcatggacagtcagttccggcgtatccatgccgttggctgataaagacatgacaaaaagtattgttgactgatttattgtaaaaaaatactactaaataactgacatttggctgaaaagcccaaataggcaatgtgggcactttaatttgtcgctgctggctcataatacggaccgccgtccgccatggatgatttgatttatggctggcatattggcatggatgatcgattaggatgtgccatgccatgtgcgccttttttttttctagtatatatactgactgaatgtctggaaaggtttgttgctgtcggctcgtattatgaattgtgtgacccggcattgatatcttaattatctgtgtggagggtgtacgtaattttacatgagtcgcaggttgtgagacttccatgctcctacgctgtacgtaatactacatatgggcacgtggcacatgaataatgaaccacccatgtcaacatcacacatgcctcgttggttaaaatgtactcatccatgcatgatcgatgacgatggtgcctatatatatcctaatacgacaaattaccggctccataataagatattatgcttttgcttagcttgcttctccgagttatattaaatttaggttaagctggctatttggaaatgatatgagtaagtttgtttgggaatttagttgaaatattatattttcgccgtgactttataggtactagatatatgtccttccgtgtgtttttttgatcgaaccttagtaattcatcgagaaatgaaaattgcattcatcttaggagcgagggagactagtttataaaaattgtgcttcggatacaatgtcaatttctaggctgaactcgttgagtttgtatgtggcactagtttgccacactttaccttaggcaagtttgactaagttggcaagtgtttggttgacaaataagtttaggcatgattcttttaggctccacatgtcatagagttaaaaagtgtggcaagattcttttaggcatggcaaagtgtggcaaccaatttgctagccacactttttgtggcttgccacacttacccaaagttagttatgctagattatggctagcaaccaaacatctcctaagtctctccattataaaatgccattataggcaacagtatagtatcttttttgtcacaagactcttgtcctagttagtactactacgaaacaaaatgcacatcgcatgaacacatggagggaatattattagctagttgtcctaattagcacacgttcattatgcttgctttcttgtataacaatgcaggaggtgaa

SEQ ID NO: 4996 - DNA, 4309 bp, Sorghum bicolor
  Intron number 3 from transcript Sb05g019810.1 (locus Sb05g 019810) derived from phytozome v7.0 (chr-ID chromosome_5; pos 48586558 to 48590866)
aggctactacgagctccttgtcaccacgttcacaggtgagccaccgccgtgcacaatttttttttctccattagaccattagcaatttctggttttctgccagagtttttgcatgctacaaaaactctgcggtcccatctgtgatagacagagttttatattcaaactcatttaaaaaaagacataaatcgatgcacatcgatccaatccataaatgtgtgttttttttgcaagtttgggactcaaattcgaaaagttaatgcaaaaatggaaacaaataagagtgcatgtttgcacatgaatacgaaatatttaggaatgtcttgtagtgcacatacgctgaaatttataatttttgtgtgaatttttataaaatgagtttgaatccaaacttttgcaacaaaccacatatattcatttcaaaattttgcaagtgatagatgtatattttttaaactgagtcttcatgttttcacctatatgagtttgcactacatttttgtcacggactggtgggtgggggaaggtgggtttaggcacgccgcacttttgtttggatgttatcaaataatcctcaatccacatgtgccgcggtgaattgaggtgaaatatagttcagatttttacttcaatctgctcgaacccatgtggattgatgtgaatctagctacatgcaaacaagacctaataattcaaagaatatggcaatatatcttaccacaatgaagccagacatgcccccaaaaacaaactgctttgccgaacgaatgaaggccgtgtccccatttgaagtgtgtaaagaaacactatagtgttttacagcaatcgctttcttgaaatgacttggtgcttgtttatataacggaatttgggggctactacgtgcactcttttggctgaaaatgaaattgatatgcatgttgaattactttttggatgtcatggtggccgcctgttatccgtatgtcaaagataagtagtgttgtaggcgtgtgggttgaaaagatgagtgccttttgtttcgctttctatcagttgtttatctggcttctcctgtctactcgctgtgttcctctactggtggacagaagtgagtcttgctttatgcagccacagtgtagtactgactgcatgcagtattttatatagtagtacgtctctgttatgtttctttatttactctcgtattttcataattaatgataatgcataaggcacaaggcaatgctttcgtttcaatttaagcggtgtgtatgcacttaccacaaaatatccattttttttttgtagaagcaaggaaataaataaatcatatatattttaaatttaccaaatgcgtttcttgtgcattagaaaatataattacgactttggcaaaaaaagagagaaaagataattatgtatgggtgcttattgtttgcgatctcccagttggccaatggggtgtcaattcttgacgcccagtctcccactagctttattttattgacaagtacaatcacgttcaccaaattatatcagtgacagtacactaattaatcctaaaggtaaataactttgcctcctagttttcgtgtttgcattggcagtacactcatcactttcaccagacaatgagatattgatagactcatattgtttggcagttgataattaagaaaggtcagggcagacctgtccacttcatgtaaattaaaggttccgtttcctccaaatcagtaaataatattttatttattcctccaagtaccaatgatatttcttaactatttcctcttatggaaaatcttaaaaaatacacttttgctgctttttttaaaagaaatcaactgtgcatctagagacgttgatgtaaatgctagtctcttctgaacatgatggagtaaagaacaagaatacaaattcacctagtagtagtagtagtagtaatacgatactaaaaccaaaaggctaataatgtatatgccacaagaactatagaagcagatgtgataggtaaaagaatgatatccagccaatgcgacctccatcctcaacccccacaacttcaattctcagtcttgcatttccatgaataatatgaactttgctcatcattatttgatgtttgataccttagactatgctcctcaagaaaaaataattagagaaagtttaataatacagcctacttactggctgcaaggttccttatagccttctctcagcccacctatacaatagttagttattcactattaatacatggtctacttatctctctcacagagtttcttggttcttgtgccttaagctggttgtagcttacagtctgcttctcctctctctcctcccttctctcctccacctcagcatttagcctgcttacagcctattataatacttgctcttagagcaagtattataatacagccagctgctagctgtaagacttctttacagccttcttgcagcccactcatataatagttagctcatcactattaatacatggcccacttgtctgtctcacagactttcttggtttttgtgctgagccggctgtaagcttacaactcgattttactctctcttctcttctttctcctccacctcagcatttagctggcttacagcctactataatacttgctcttagtgcaacgaatcaaccaatcaacgtatatagtcactgcatgtggaaatgctccacggaagtgtgctagtgctagtgggggcacatagtcaaagtaccattattgcattgtagcatgcatggctagagatgtgcccccaaacattggagttatcttaaaattttcttttaacaaacaccttgcgtttctaatataaaaagaaacattatcgtccattattcaggcgtggagccaggatttcaagattagaggagccgttcaaacccacaacaatcatgcgtaacaaacatatacttccacatatccataaagaaagttatttagaacaatgacacagtctctaatcctaactttgactcttctttttataaaaatatttattaaaaagtggtatatgtatatttttataaaagtatttttaagacaaatttattcatatagtttttacatttccaaacttaacaacttaaaaattattcatgattttatatttccaatgtttaacccaaaccatatattcaaaacgactttctttataggtgtggagagagtacacgacaagccgacaaaaatatacataaacaaagctgaaaactaacaaaaaggaaaactgaatattatagaaaaaaagggaacaaatttaattagccctaggtctcaaacctttacctgaccaatctaatttttaggctaaaaaaattacgacaacatttggtccaaattcaactatcaatatttttagaaaaaatagttttgaaatatgaaaattaaacatagtttatctagttttttttaatctactatgtgggatgtataaaaaaccatctacaaatatcaggtaaagatattggttttagataccgttgcatgtctgaaaattgggtattcttaagtagagggagaattgtgaagtgttacttaatataacaaggcatttgtttttgagttattttggctagtttccttcaaataatacttctttgggtcatacaaaatgtttggcaacatttggtccaaatacaactatgaataatttcagaaaaaaatagttttgaaagtatgaaaattaaatatagtttatcttgtttttaaaatatcatatgtgggatttataatacattcatctataaatatcagttaagataatgattttacaaaccgttgcatgtccgaaaattgggtattcttaagtggagggagaattatgaagttttacttaataagacatttgtgtgccttctaaagcattaactaagaaaaggctgattgtttctatattttttaacaacgactttgactcttcttctcccttctaattaaggccttgtttagttccaaaattttttgcaaaataggaatagtgccactttcgtttgtatttgacaaatattatctaattatatactaattagactcaaaagattcgtctcgtcaatttcgaccaaactgtgcaattagtttttattttcgtctatatttaatacttcatgtatgcgtctaaagatttgatgtgacggtgaatctagaaatttttgcaaaattttctgggaagtaaacaaggcctaaattggaacttattttgctccaaaaccacttgaagttattgacgggtgtctatgtacgatggcgtgcatgcaggtctgtaccggtaccgcgtgggcgacatcctgcag

SEQ ID NO: 4997 - DNA, 839 bp, Sorghum bicolor
  Intron number 3 from transcript Sb06g003000.1 (locus Sb06g 003000) derived from phytozome v7.0 (chr-ID chromosome_6; pos 6091485 to 6092323)
tcatattcagcagctcatttggagcattcctcctggtgagcaactaagtattgttttctctgcttgcactatgactaatgtcttgtgttaaagaataaagggcttatagaggtaaggtaattgcaaaggaaaaggcactaaagatactgtcatgtgtaattgactaattgaatgccatctagatgtcaaggtttcttgtagcatgtcttctcaaacattaaaactatttgctaatttgaacatcatttacgtctggcactctggcattttaggcttgctgcactatacatttacatttgctggtccctggtctagcaaggttttagcatctgctcccttggccatgaataaatattttgttttggtgcagtcattgattttagacttcgaccattgtttttttttccacaacatttacttaataatagttacaaaatgtatatatagtgtaaaaacacttatgaaatacaaaattttctataatttttataagttgactaattgttggtcagtatatacagagcttgaccttcccaatataaaacatgccttaaaaatttcaatggagggagtagaagtggaaggctcaagttcatgatatactgtgacatgtcacaatagttgatccacttggcagggcccatatgtgatttttcaaggggtgtgattcgctccattataaacctgtattatatagttatatgggatcaagtttggattctcatatacatatttgcatcatatttctgtataccacagctgcacaggttcttggtagatttgtggttattctgatgctttgatgttgctcattcgcacagctcatttacttggcgttt

SEQ ID NO: 4998 - DNA, 2892 bp, Sorghum bicolor
  Intron number 1 from transcript Sb04g008310.1 (locus Sb04g 008310) derived from phytozome v7.0 (chr-ID chromosome_4; pos 9426206 to 9429097 reverse strand)
gccctcgcccttcgccggcgacgagcacccaccaggtatgccacccctctgctctcacttgaaacttaccacccaaaccctagctaacgtgatctatttgggtttttttactcggatctcatctaattgccagtgtctacatgtccatcctactaacgattgggtccgctcatgatcgatagtgctggtacaacggatcgttaggttttgcaattctgtgtgttttgaacatagtaaggcttcgattttggcgatcggggggaaatgggggcggatgattagaagttttgcgggcaattgagctcgctgtatgcaatttgagctgtcactgtttttgtgtggttttttaagtgcgaagttgtatttgagaacacttcagagcgcagaatttgctcagctgctgagattcgcagacgttctagctgttggttttaactacaaattctgtttctgagggtcaacacgcaaattatttatgttggtttatgatgctagttttctgcagcagaccatacttagtttccataactggggggttgaaatgctgtgccctgtgtgtaactacatatttcccttttagtatggtatatataaatcgcgatctctaattttactgagacactgatatcacacaggaaacgacctattcgaagccacagctgattgagtcaatttgtttgttcgcttggctagttggcttgctccataatctttgcactagctggacatgtttgagtaaaaaagcatatgcagttctctgcaatagttgattgtctagaatgctggaattactccaaatatttatccaacagtgtgttttcagcttattccttgcatttctcagaacttgtctctgctttggacctgggtgactgaacagaattgatgtgagacccgagacagaccaaaaggcatagttgtttttaatcttattgatcagtaattttagtgccctgaccaacatatgctagcctataagtaacaaaatatggcaatggttttatgattgatagaacttacaaaatcagtataaactggattttctgtgttttctagtgtattttattgtgggatcttctgttttcaagactattattaatgcacagctagtaaccgtaaccgtaacacatcaggtcctcttgcggcatggaatttttcattttaggaataccttgtttatcttttttttttataaaaagaacactagaaaatctagatcgacaaaatgtatgaaggcctatcacatcatttttacaaagttaaatcttcagttatgagaaagatgccatagttctttcttttttacatacttgctaaaatctggattagattttaggaaggcatcgtggcaagctgttccagagtgttgttttaaagactgattagattgttattaaattaatggggtaataacatacaacataagtgttttaacaatgaaacacttaaagctgaaactcatgactacaacatatgggatacaaaattagatgatgtgttttgtgaaagatttaaagtacttctggatagaacaatttaacacatattttttacttgttttactcatcaaaatcttttgtcaaaaaaaatatgtattgtgtccatggaattgtgttttaatgagcctcaattctgggcatataagtccaaagccgattttatttgctcttaattatattgcttatgcaattctatgccttcgccttaagacttgtcctaagattgagtagcaaactacttgtggtcctgaacatcttttcacttctcaatatgtaattcgtacagttgggttcaaaggaccagttactgaggaaactcccactaagttagtcacactagaaaatggtacatgctaccgttaggcgtaccactgaagggaatgaaattgtttatctttatatgcggttactaaatgagtgagttcaatggataatataggggtttatctggttttattttatcttttcctcttaagtgacacacttcgccattggccaattacattggggcctgtcaacgttgggccttcctaccttgtaaatgtacctattgtcctcaaaaacaggtcaaattccaaataagcgaaatgactgaggtttccaaactttgtatttaaagagagatacacttttcaattttaccagttctaatatactgttaatggcatgctcaaaatggtcaaagtatttatctctatggatccatgttgtgatacgtggaaaacatagttcatctgaaattatggatacctttcttttcttctctggtacgtctcaaattcatagcagaagcactgtaaaaactgcttaatatgctagtatagtgcttcctatcctgcttgaacacaatgaaagacattattgatgaataaaagcatctctgtgatgtatgacccaatgcagtgcagtatagacctgagtagcaggaacttgaataaaactgcttgtatttgtttaaataatacaaactgctgcttcattattcactattttcttgttagttgtctcatgttaatatttaatcttgctgttagatatgccttttttattgaaaaattcaagtcttggtggaggtcatgctttcataatacaagctgttagttccttgttgctcaaaaaagatgtgtactgttctgtagttaaaacttaaaactattgcactgaaagaagataaatgcccataccagtacacaacatgtcagtgatttttaacatatatatcttgctttttttatgatgcttcctatgtagtcttaatccatttccagtcggatttagttctgggatatgaataatgcactagccgtttatctttgtttttctttttcatctcttaagtgttattttcctgcctgtaggctcaactgctgtgtagctaatctaataatttcta

SEQ ID NO: 4999 - DNA, 13009 bp, Sorghum bicolor
  Intron number 1 from transcript Sb06g015960.1 (locus Sb06g 015960) derived from phytozome v7.0 (chr-ID chromosome_6; pos 44263524 to 44276532)
ggagtcctctgacctcctcctacggttgcaggtacgtaagtagtacttcctcttggagagttaaagcgtttttaagtttgacaaaaaatatttagaaaaatataaagatttgtgtcataaaataggtacactatgaaaatataactaacaaataatataatgatacttagttggtaccaaaaatgtccttaatttgctatataaatttgatcaaacttgaaaaactttgaatctccaaaattctttgaatgacttataatttgggacagagagagtagcagcttattgtaggccttaataggctcttaggtcgtgtttggttgcacaccacgcgcttggctctgcctgaatacggcgatgagttacttcgcttgactttgggtggtttgtggcgtgaaaatacacaggaatgtggcgtgccgcaactgccacaagcaatcaaacaaatgcaaaaatttgtggcacatacggtgcagcaaggcagggccacgaaccaaatgcgtccttacgtggaatatatatagttcatgactatattaggatttcgaaaaaaatactatcctatcccatcccatgcaacatgtatatatatgtacatagatggtcaggcggcccagggccggcacgagcacacgcccaggcatgacatgattatggcggcgaacgcactgggccgaggcgtgcgcccaagcacggcacgattaatcgtgccatgccgatttgaccaaagcactattttgatgggtggcagtctatcctgacagtcatatatgaacatcaaggatgaacgaccaagccaacatctatgcataatgataaacagatctcatttatgcgtcaacagaattggccaaaatctaatacaaagtagagagtaacacatgctgacatgcaccaaaaaaaaacagatatgagataggcattcggtagactgaaaacaactaatgaacttcaacctcgcatctagctcacacggccaagcatagtcgcggtcacagcgtcgctagtgcaggcggcgacaagcatgcatctagccaggtatttttgggcggcatagtatatttctctgttctccaaaggctttggcaaattgacttggcatttgttgctatttgcaaactcccataacaaaatgcaaaggataaaaataggtcatctccaagggaattgacatatggacttggcaaagcataaaaatagaaggtctccaggtgcgcgcgctttcctcgcgcgtgactttgctcgcgcgatcgggtttgcaaagtcgtccacagcttgacatttttgccaagtttgctccctcatttgccaagttgcccaaattgcaaacttcaaatgcaaaaccgttggatacctcttttgaacctttttggcaaattactcaaatgcaaacctcaaatgcaaaacccttggagatgctccaaaagcaatttttggattgctagatgtggcttttttcaaaggtggcatttttatcgggccgcctctgtcaataatattaggagacaaaagtttacaaaagacgataaaatgatatatctaattcttaaaaatatatatttagagacaagcttattaaaatatctgtcgatataaaccaaataagtttattttaagagtcgggtgtcctaaagcccgcctcaagaaatatgtgtctaatgacatcccactaagccactaaatccatcaacaggcgccatacatctctctctcatagccgctgcaagatcttaaccgtttggtatctcaaccctcatatatttctttatctattacaactcttcatgtcttggttctgatatgtacataatttcttatcaaaaaagttatctccccatctctcttctttaatttaattgtagtgccacatctctttagtttttacttagttgacactctaattaacctgaatagcaaccttttagtttcataataaattggaatgcactaacatgcttcatcgattagtataggtggttagttgtactagcatggaacatgtggtcagttgtgcaatataatttttacatgtggtttcaattaaaaaagcctatgaaaagaaatcggtaggcccgactcaaaatacacgagtggaaacacattttcactggcagtttgcacatgtggttttccaaacaaaaccaccactaaaaaatcagatttctagtggcggtttcttaaaaaaacatatgtagaaataatttgaatttttttttgagcttttcaattgatctcgtataaaaaactgccaaaataaaagttgtacatctcaaaaagttatgaaactttgagtttataatttttttcatttgaaatcatgttgtcatcaaaaactacgttcgaatttatcaaatttaaaattcaatttttttaaaattacctcagatagagaaagtatcaatataagagttgtagatcttgaaaagttatgcaactttgtagttgacaaaaattttcaattgaatccatttatggcctcaaacaatcaatgtttgctcggtttaggataatatgtgaggaacaaaactctaaatagacataagtgagtaatgagtggagtggtagataaaacaatgttcaaggggaagtcatgggttcgaatacctaacgagacgtacaggaggctggcttccgcaaaatcgtttaaatctttttcctatttttaaaacctaatatttattttgtagacaagcattttgacaggcagttggcataacacaaccgtatgtggaaatcgattttcaaaggcgattgtcttaactgaactgtctgtgaaaatcatttttcataggcggttctcggttaattgccagtgcaaagattcatttccactggcccctagcactctcggttctagaaacgactgtgcaaatagattaggaaccgcatgtatagagcttctgtgtactactgtgttcttcatgaaaaataaaagagaaattaagtaaatagttcatatagtagagtaaccagtggtaaaacaatgtttgctacagtgcagaggcagcagaagacttcaatttattcttacatgagggagtaatataatacatgcccacctaatcattttgtaggcactactacaaaaatattttacaaaacgttttgaattgggccttctctggatgtcgtcactcccctcctctagacgcgctaagtcatgaccctctccaaccactctcttccccatgcgccccttctcccacaatgctctccccccattgctcccctcccccccatgatgcccctctccctaagcgtgagcggtagcggggcccgactgcggctaccacagggaccttcttctccctctggcggcgtgatgtgggccagatccggtggtaatagcacgtaggagacaggcagtggtggcacacgggtagccggatccggctacggcggcgctctgggaggcctctcttgacggtgacaacgcttggagggggcagatccaattgcgggggcgctcagggaggccacgacaagtggatccagtggagcgtggtctgacaagcggatctggtggagggtcaccccaatgagcgacggagtgcatgtgccgatctgcccgagcgaagacttgcggttttaacaagatggacgggaggcaggcttgcaaaggcggttgtcttaactgaaccgtctatgaaaatcatttaaatctttttttcctatttttaaaacccaatttttattttgtggacaagcattttcacaggcggttggcataacacaaccgtctgtggaaatcgatttccaaaggcggttgtcttaactgaaccgtctatgaaaatcattttccataggcggttctcagttaattgccagtgcaacgattcatttccactggcccctatcacttacggttctgaaaaacgactatgcaaatagattaggaactgcctatatagagcttctgtgtactagtgtgttcttcatgaacagtacaagaggaagtaaatagttcatatagtagagtaaccagtggtaaaacaatgtttgctacagtgcagaggcaacagaggacttcaatttattcttacatgagggactaaaataatacatgcccacctaatcattttgtaggcactactacaaaaatattttacatgacgttttgaaatgggccttctctggatgccatcactcccctcctctagatgcgctaagtcatgaccctctcccaccactctcttccccatgcgcccgttctcccacaacgctctcccccattgctcccctctcccccatgatgcccctctccctaaagcgtgagcggtagcagcgcccggctgcggctacctcagggactctcttctctctctggcggcgcaacgtgggccagatccggtggcaatagcgcgtaggagacagatcctggcagtggtggcacacgagtagttggatccggctacggcggcgttcggggaggcctctcttgattgtgacggtgcttggagggggcagatctgattgggggggcgctcggggaggccatgacaagtagatctagtggagcgtggcctgacaagcggatttagtggagggtcaccccaatgagcgatggcgtgcatgtgcagatctggcggcgctgatgtggcagatctggtggagggcggccctgacgagctgcggcgtgcacgtgccgatccgaaggccgtggacaggctcggcaggcttatctaggtttttctttttttttgtttttccatttaccgaagcaggcgttaggaccacctcagtgatctttgattagaggtggtccgcctcgattaagcgttgttggctgcctccattaaaattgttgtaatatagtgagaaggaatgcatggctcttgaattcagtggcctccctaaggacggagagatagttcaagtcacctcgctactactctagtcaataatttctttgattcaatttagtgtccatcggaagacaccatctattaggttcatgacattttgaatcctattaacaaaatttagtcaatgctgtaaaaatttaaggtgcgaacacaagtttctattcctaaggtttggcttctaagatggggcccacatgcacggcatatattaggtccatcagaagacaccatctatatttaatgctttatgcatataccgtaaggttcaatgtgactgaaaatctgaaaaattttgcaaaatgtctaagaaaataaaccaggccttaattggtgtgaagtagctgcttgttacattaaatcatctgcaacaaattctagtccgtttggataaaattttatattgttaatccgatattttgaatctaggggtccgacttttaatctgaacccttatgttatatacaaacttatatatacagtttatgcaaacctgtgagattttataacaaacaggttcaattcgtttgtaggttggaataggttgggttgaaacataaaaatatagggtggagtgggttgaagaagagagttaatttattatgggtttgattcggttgggtgggctttagacgttttcttttgacaagagcgtacagatgatgttgtttatcgttgcagaataactaattgaattgatcctgccaatactccaattgctactctgaatatataccttcctatatatactgaataaatataaccacaagtatgtactcccttcatataaaatttagatctcgtttaggaccgcgacacggtctccaaaatataacattaatctcttatttctataaaaatatttaggaaaaaatgatatatatatacttttataaaagtatttttcaagacagatatatctatataattttcacatttgcaaactcaaatatttaaaagttattgatgatttatattcttaatatttaatccaaaccttgtcaaaaacgatatctaaatcctatatagagggagtatatgcattagcatatcctaaaatttcatggttgggactatccttactccgaccttggaatctatttaagaatgtagtcactacattaatttgaggtgggtccacatgtaacatgttcgcttttttgaaaagtcatagctgaaaatattgttcacttatttattgtaacagaaaaatactgttgactgacagaaaaataacttataagacaagcgacattttcaatcttttccaataattttctatcagttttatttagatttggaattctgatattgccatgctaaccggcacatattaggttcatgacattttgagtactatttaataaattttagtcaaagttgttaatattttaaagtttgaacatgagcttttacttaggtctgacttctgatgtggggctctaactagggcataaatttgcttcttgatattttgaatcctattatataacttggaccatgcccgtgcgttgctatgggtgttaaaatccaaatcattcttcgtactctcttcatccaaaattataggatgtttcacttttttttatctttgaccactcctcttattcaaaaaatttatgtaaacgtagtcaaattttaaagcattagggtggtcgagttcgttgcggcttccatctccgatcagcacttacaaatgattgctgagaaggtatacaaatgattgctgagaaggtagtctgcttggagacaacccgtgtggcaggggctgtcatcaacattaagtgcatcagcagctgtctcctaatcacatccaagactttcgaggatgggagatcaagcatttgaacctgctccttttcatgaagctgcaactgaaattggcatcctcacctagaccaatccagggtaatattttatatcaaccagtccacaacaaaacacattttttttagctagatcaccccaataaaccaatagacacaataaaaataattatgcatccattccttctcacagagatatatgatattggtatataaaaacttgatccggagcatggatatctcaactcccacatgcatagcactaccaaatccgcaaacgaaatcctaattatttttcttaggtgacaagtgcactaatttactcaaagtctcaaacatacaaaaaggaattggctaatgacatagcaaattacatctatagcaagattttttttagaagttaataatctacaaagaaacaatgagacttaatgcaagtgtatttggctaccaaccagttaactcaaaaacttcgtaaaaacactatactttcctaactcaagtggcctaagctcaggtttgatcaaagcctggctatggagcattgtgtctgaaaatagtctggaagtaaaagtacggccatacaaaggaatttacatgtttagtctcaaacccacgctgccactttctagaatcccagaaatcctgtctcatcttcctgcagtagtgcaagtgcccaactcacatcacacttcagcttgctgcaattcctcgaagtaaatataattgtatcaacaacatttgtgaacaaaatgtctgaaggcatgctcttgtgtctgtacctgatacacaaggggcaccttaggcaccaagaaaacagcgaacatcttcttgttctccttgatcattttgtcatagatgcttttgatcagcgacacagctatcagaatctttcccacaccagtttcaacaaaagcaatttgtgtttctgctgtttgcttgctcaagcacctcaagttggtattgcctcaccctatctttcaacatcagtaatagccgtcactcttttccttgcctgcctgcatagattgttcaaaaaataaacaaagatctatctcccagacatgttgcaatgcagagataaccttgtgatcaatataaattatcttatttttgcagcactattacatcacaaacacatacacctcaaatgcaaacgtgcagagacggataatagggacatgtgcagaatcaatagtctctggcaccagtcataccttctctttactttatttttgattcaactgatatgccttgctcacacataaactccaatatgatgaatgtcagtaaagaaaatcaaacaaattaccgaacacatcatgtatgcaatactggatcttgctacagccattctaattaaagcttgccatgacttttttgatcctgcccatgtttaaccagacaagcatccaattgggaccaaatacacatggaatcaacatagattgaagtcgaaattcgtttgcaaagacatttgaacaatagtccaggcgctaatatcccaaatctcaacccataagcatcgatggtttggggaatccctgagtttcaatagtagtccagacacataatatctcaaatcccaacccgtaagcattgatggtttggggactgcaacgacaaaaacaacacgacactcttgcgagctgctgcacagggagtaggctacagctgcaacacgacactcttgcgagctgctgcagagggagtattgataattctgcaaaaacaactccaaggtcgcggggaagccaaaccagccacggatttgacactgggaagtgaagccgaggcccctcgtcggcgaggcggatggcagctccggcgaggtcgcggggaagccaaaccagccatggatcgacaccaagaaatgaagctgaggctgcatcgtgccgctgcgaacccaacggagtggaaagcgaggcggaagagggacggagtggggagatcggtagctcaatgcctcgaccttggatccgtaatggcggcgggcagtgcttggtggaggcattagggtggcagaaggagcacggggaggggagaggcggcaaggcgagggctcggcggttctgtgctgaactggtcgtggctgcttgttggtgttggggtccgcgtggcgaagggctgcggcggcggccttcatgtcggcgagtcgagggctcgacagcgcgatataagacaacgatgaaggcgtggattccagcgcacgcgaggagggtggcaggcgaaggcgaggatgggtccctctccctcggagcgcccttgtgggacacgggaatctccgggtggtcccgatgtcgagggaagccttggactctgcgagtgcccgacgctaatttgtcgcaagggtgtttcgttctgccgtagagattgacgagcgaggaggtgcgtgcagggagcgggtgcccacatgtcagcgccaaaaatttacaggaaggcatgagtggtcggcttcactatgctgtggtagacaagtcctaatcggtctgcctaaaagattggtatgcaaatgaactggtaataaactgttgaactgtcagtttttctgaaaaaccggtgaaaaccaggagatcaggccgccggagccggtgacatcacgtgcacagagcctgggggtggagaaaatagtggaaaaagagagctaaagtggctgcgaagggaatcaaacctgcaacatcagcttttgagagcagcaacaccaccgctctgatatgctggtgtttgtctttaggcagatcgcacctatttgaaccgtattgaacccatggtctaaacagttgaaccaatcaaaccgtgaaccaagaggtttatgggtttgatctccgttccggttatgctagtgattctttttaggagtagaaaattgcagtcaatttctttaaaattttaagttggtgagcttttatttttaggatccggctttaacatggggcccacaatttatacggcattgttttttttaataaaggatagaaactatccggcttcatctacctataggtagaatcaggtcaaattaatacaacgggagaaaaaaagaagataaataacggaaaaattacatccccaacaagggctcaagtattcctatgcaacaaacctcctcgatccaagatgtcaactacaccagcgtcaagacaaagtcaccgaaacacgtttgtcacaccttaaaaaaagatagtgaaaacgttggacaccgaccaccattgaagattggatgcttcttccaaggcaacagcacaaagaacttggaacagacataggactctgaaaagatttatacggcattgttaattggcgagaaagctccttgttgcattaaatcagctgcatcaaattctagtcaatttggacaaaattttataacgtgaacccgagggactgagctgccggcggccacgttgataggcttgtagggtttaggagtaaggatttaaggtttatggttttgggttaagagactcacaatgtgtactaaaatgaaccaccaattgggcagcatagtggtcaatctccagatctaaaatgtgtcattctagttatattaattatataccattataatcttcgtatagtaaaatgtgtactctactgcagtatgcaaaacataaacatcttcaggtggatcctccacccgccaagctcgcagaaaatgaagaagtcacagaggacatcatattagcggcattgaggcgagcactcgctcaacattcaagtctgcaagcggatgatgggtgctggccagcagactatagtggtcttttgttcattatgcctctcctggtacaaattataatttgaaaatgacactgtaatttgacttgaatcagatagtttatgttcgatgctaggactgcaagttcattattgattggcatatgccatacagaactaccataaacatgcagtggaaaaaagattatttgtttttctatttggtagaataagtaactgtaggtattcagcttaatcctttcttcaaagtcatccttaatacaatgatacaaactgtcagctacgaaggaactgtataccttattacttgacctgcatgcaaatatttgagaattctaaactatttcaggtattcgctttatataccactggatcactcaatactgtcctatctaaagaacaccaacgcgagatacgtcgctatatttacaatcatcaggcatgtttattatgacagcctatttactttcttattaatgtcatttcgtctatttctaagggaaattagaattcttttatgtaacatgatccttgtagaatgaagatggtggttggggtaaacaagtgttggggccgagcaccatgtttggctcatgcttgaactatgttgcattaagacttattggtgaagattgcacgaatgttgcattgaccaatggacgtgagtggattttgtctcatggaagtgcaactgcaattccacaatggggaaagatatggttctcggtatgtcatttaataaaatatttttcatgtaataaaatattttttcatgtaaatacatgattatgtaaaggcaactgggctccatatctatagtattttgccataaacctaggcaaaaatgaaaagccctttcacaaactttaaactatatgtatattcttgattttgagtgttaaacaatccattttctaaaatcattttatacttgtattaattttcaaaactttattttccatttaaattataatgctaaagtaccttccttttttttgcaaaagaaaagtcttatacttgaatttgagatgaacatggtcattggacaggtttggccgtgtgccaagtgtccaaatctgggcttatgtacaatataaatatgctcagtgtcatgtaatatagtgtattctagacattataagataaaataagagagaacataagagacgcttgtactctcgctttatttcctaacgagacactatcatcaacttgattaatgatgattggttgataaatggaaagtatttaatacaaaattgggttttgtcatctagaatgtattatattggaggacaaattttgaatgctagagtgaattatattacagggcggagggcgtagtttcctataagtctatcaatattttttatctatactactattacatgttcttaggatactttttgaaaaaagatcttaccagaaatgggatgatgaaacttgcaattgtagctactctttatgtaaactataatttttcagttctatttgagtacttcaaaagttcttatcttcttaaatgaaggtgatgggtttgtatgattggtctggaaacaatccagtaattcccgagttatggcttctcccatactttctgccaattcatccaggtacttgtttcttagtacctcaatacaattacctttgaacctttgtttttggcaatgttcctcataatgaaggtttgaggataaactggaaaaacagaagagatggcggcctaggaggccagcatctaggaatatctattttaaaatacttaataaggatcctatggaaaaatcatatatttttaaaacttgatcaaacatttacaaaagttattctggaggtgcattagagttgtagtcaagggaaccagacatgcataaatgtttatatgaatatgttgttggtgtacttttgcaaagctcaaagtacccatgtatcttgttttttttgttttactcttactagcaaaacatacccgtgcgttgcaacgggatatgtagtttgccacacagtcacataaacaacttcgggcccaaagatttattttaagtttgcatcattagttctaatttagtttagaatcgctctgcattgtgttcggataatcattacttcatgataattaggggctaatagaatgagacaaacctacttatattttctctaaacgttagtgattttatgccaaagagattagaagcaatttataaagagacttttatacttttgcttcatttacttttttttgttttccataacctctcatggtagccggccaaagaacagtagcacgtcaacctcacagtcagctaatcagacgccgttgttttctgcatccatctccctcccatgtatatacccttctgtacgatatttctttttcttttttttttctttttcttcctttaatatttacttcatctccatcttatccaaccccatgggtccttccgagttcagcctcatcctcatctgtgcccaacgaatgacacccaccgcatcggccagagagagcgacgttcgtgaggattctcggcctctctatgtccccaagccgatctctacggcaacgggctgccgaggccacgc

SEQ ID NO: 5000 - DNA, 1257 bp, Sorghum bicolor
  Intron number 1 from transcript Sb02g025050.1 (locus Sb02g 025050) derived from phytozome v7.0 (chr-ID chromosome_2; pos 59746688 to 59747944)
cgggtaccgccgccgcccgtacttcctcttctcaggtcagccggccggccgggaatcaatcctcaaggcattttttttttcaaaggattcgtcttcaaagccatcttttttatctgttgccatcgttatgtagtaggtattaatttcagttatatgcctgcgtataaacagatttcattttccccacaaggatttaccaatgcttactgttagggcccttttggatttggatatgttaattggttacaattgtttatgctcttgataaataacggcttgaccattgctgtggtggttgctgaaaaacatggctctaattcagcttaaccattgctggatgtggcctttgtgagtctgaaagggattttgtaaatgtggatgagagtgtttcgactgtgacataccattgtggagtaggtttgaatccttggcagtgtgtgcattgtttattgaatgttgatcttaattagtcggtgaaaaattatgagtgaggtagtgtttgcctccttttggggtaagattatttagtacatgtcactttcagcttgtttaccattttcagaacagttttcatgtttccaatctaagtcttatctatagttgtgtgtagtagagtcttctttccatgcctacaattttgaaaagctccgtcactccgtgtgagtattcatctgtgtaatttgtacctattcaatttatttgggtgttattatcctgctattaattagagtgtacgcaagctacacctaaactcttggcttctgaccccacccccccccccccccccaatcgcacccaatctcccctttttgtgagggaatcccccctccccggtcggcagtaaggttttattttcagataccaattctcagaatgacgtgactgtaacatacgatgccataaaatttaattggagttagtttttttacattctcttctagtagcatggttgtacggtgaaaataggagacaaatgcaaagatgattgttaatactattgctttattatgactccaaagatatttagtagattacaggttataagtgcatatttggtttattttaaccaaatacatgggactgtaggagttatgatttgtcagagagatcaatagttgtagcaactgtagacatttcttatgggaaatggcaaggttccctactggcacatagcaactgtaggcttcactgataaatccttgtttacttttcatgatggtaggaatacttggaacggtttcagctgctattgttgca

SEQ ID NO: 5001 - DNA, 2066 bp, Sorghum bicolor
  Intron number 1 from transcript Sb02g003500.1 (locus Sb02g 003500) derived from phytozome v7.0 (chr-ID chromosome_2; pos 3951723 to 3953788 reverse strand)
tatcgatttcgggctttccatcttcttcaaaccaggtacagcctcgatttacagtgctgtgttgtagtgtattgcagcacgtgcaggaatgttggccattgtcccccccaaaaatcattaaaaaacaactagtttgactgctagtttgctgtggcagtggtctcgtggactagtagtgcatttttgcattcacagctttgagttgacactgcagttcgctttggtggtgcacttgtagtgcgcttgtgcattcacagctttgagttgactgctagtttgctgttgaatatgatactagataactagaaagacttattttaaatagtatgattgaaagggttttcatgccttgtagttgtagtacaataactaatttcagagcacaaaacctttgtgtcacaacagttctgtgtagcaggggtacatatgcgtcttcagatattcaataaatctggaagggaagctcgtgaggtataagatcaaaatgagctccatccctgtaccagcgtgaaattgcgatcatcttcctagttcctacattttgaagctacaaaatagataacaatagaaagaaacggcacatagatgtgcatcatggtcatttaatctctaccctgcaatctcctcaatggaaactctgcatatccaatgattgttttcttagcttatggattgttgtcagttcaagtctgcattcatttctgcacaatagtagcatggttatttgtgatgtttaataactgaacattatctcttaatttgcatgaaaatgtgcgaatttgttcaatggagacccccatgtgagcgaactgcaaagtggtgcttacattttctgctcaatatcaacacatgtatagcaatcatgttaagttgcaaggattctatgtatgttgagatgattatatttgtaggacacatacatttggagaatctaactactataaaagaagggctatacaactatgagaagtgatgatgccaagacatatgcattttccatacaatcagtgtgttcctcaacctatgaaccttcagagttcagacgcacacacttgatccaaacttgcctgatcataccagtttagtcaaaactattgactcagcaacgctaagcaattggagctgaggaagaaagcaagtagcacatgcaagttaaccaattctaaccagcggatggtttgggtttggcccaaactgcagacactgtcatttaacactatgggtgatattgtttgaaatctatggtgttgatgaatgtgcaacctaaaaagtgacgtttgagatcctggattttatattttgattgttaattaaggctttaaggcatggttgtaacagaccctagctaggaactaatttacgtgcattctcattcattttactttgacgagatttagcacagttgcagtcatgcatgttctgagattcattattagagcagcttgggtgctgttaaagcaaatctgtgtgctgcacagactgaacagtgcatattggagcagtctgatagtggttttaggactgaaaaccaaacttaaagtttaaactctaaacttatttcaaatgcaaattggtaaaataataatttctggtggccttggtctgttttactgggagaggcacagatctcctgggtcatcgtgtaaggtcgctggactggctattttggcttttctccgttcttaatgcaatgacatgcaaatctgcttgttcaagaaaaaaagagtaagaggattaggataatgggagaggaggttttctatttttaactctttgggccccgctaaacaaccagctttggaggtatcaactgaactccatgttactaatttttctccccaaaatggaacacacatttgagatgctcttagggaagatgtttattctgtctttttgacaccaagaagggtagtattgaacttcacacaagaagaaatgaaatatcaacatgagcatatgaccactaattctctggtttttttatcgtttataacaccgtatatactactgtctattcccgtgttgtctgtgttgacttgatatgcttacaggtgaaatatttttgg

SEQ ID NO: 5002 - DNA, 7763 bp, Sorghum bicolor
  Intron number 2 from transcript Sb04g008000.1 (locus Sb04g 008000) derived from phytozome v7.0 (chr-ID chromosome_4; pos 8667813 to 8675575 reverse strand)
agaagattgagaagcgcagactcctgctcaaggtaaggacgctgccttgcatttagttttcttgtacatacagatgtagtcacgggggaaactggatctttccttgttcattcattgggggaatagagcgtttagtaatattagattaggaccagttgatggtgatatactgatttgtaatgtattggcaattacctaaaatcagttcaactgtagtttcgttgttgtaggagttcgtagttctatcaaactgattctgggggggaattcttgggaggacgtggaggtgcagttgaaagatggattgcttgaattctggcatttagtaactaatttcagactttttcagttcatctgttgaattgcaacaatgtggatgtcatattcttgggcttggtattattgcgtgatttatgttgccataagttgaaattacagttcatctttttttttgaaaaaaattgcagttcatttcatttagttatatcagattacgatcggtctatggtgatatactgatttataatatattgggcattccatagatcaactaactgtaatttctgatatactgatatgtaatgtactggcaattctctaaatcagctcaactaaaatcttgctgttctaggagtgagcagttctatcaaaccgattctggggaaattttcttgggaggacatggaggtgcatttgaaagatgttttgctagatttctagtcatttagcaactagtttcagttcagctgttgaattgcagcgatgtggatgtcatctgcttggtattattgtgttattttttgataaaggaagattttattaaattttcaagcgcattacaccgagttgatacaaagccttgaaaataattgttccggcctctgcctaacaataagcacacaaccaattaaaagaggggaccacacagactctagtgactatcaatctacggactagaacgccacacatatgcctgggagaagataaccgtggccgcctgtgccaaattattgtgtgatttatgttgtcgtatgttatgaccggcatccaatatgccaggaggcgggccagtagtggctaggattaggcgcagggataggggctgatagcccatatttattcttaaaagttatttccttaattggtggatcaaatagttatatataggagttgtaatcgtattggacagattaagcaagagtattattattctcggcttcctttagggagccgggagtttcccagcaaaccctagccgtcgccccctcccctcttcctctctcccacgcgaccacggcacctcgccgccgcgtgacgttcaagcctcgcccaccgatctcccaccactacaacctccgttcgacaaggcacagagggctgctgcctaccaatttggtatcagagatctctggttcgatgtcgcttcctccgtcttcttcgtcagcaagtgccccgcccacctcggctccgccaccgtccacatcagcgccgctgccgtcttcctcctcttcggccatgattccttcgacgcagctgctgcagggcttcagcgaaggggccctcgctgcgggcgcagcgccgtcgcgaccaggggtcatcctcacgccggaggaggtcacgcaggcgatcttcgaactaggccgcgagatggccgagctgcgcgccttcctaggcgcatccacctatgttcagccggcgccacccccccagcagcaccaccttccgccgccgccgccgccgtcctctacactcgggtcatccacgggggcgccccagttcggtatgccgccggattcatccgtacaacggtcgtcgggcggggtgccgatcacccagattcaattcccgccctctccgtccgagcttccaccgtggctgtcccagtcgcagccgatctacacgtcctctccgacgcagccttggctgccccccccccccccccccggcctccgggaaatttggggcccggccatggggggtgtcccccccccaaggggctccaacgggggggccacggggccctttttcccaggttcccagattccagtggcccctcccctaaataaacccttgcccccggggaagggttccaaaaggggtccctttctacagcggcgctcccaactatggcggcacgtacggaggccacggcggtccgccaccgttcggcacgtccgacagccagggcggccaaccgccctttggctatgatccccaggtcaagttctacaagttggaattcccaacgtacgatggcaccgtcgacccactgaactggctcaatcagtgcgaccagttcttctgcggacagcgcacgccggcgtccaaccgtacctggctggtgtcctaccatcttcgagggggcgcgcagacctggtactatgccttggagcaagacgagggcatgccgccgtgggagcgcttccgcgatttatgtcgccttcgctttggtccgccgctgcatggcagtcggctggctgagctcgggcggctgcctttcgccacttctgtccaggagttcgccgatcggtttcaggctctcgcctgccatgcaccggacgtctcgacacgtcagcgggctgagctctttgtcggcggccttccggagtatatccgggtggatgttgagatgcaccacccgcaggacctgcaagtagccatatactacgcacgtgccttcgagcgacgggcagctgcgacccctccggtgccccctgcccgcccgaccagaccagcgcagcggccgggccttccagcagcacgtgcgccaggcgcagggccggctgccgttcccccagcagcaggtgctggcgccccaggcgggcgcgcgttccgacgcctaacaccggcagagcagcaagagcgtcgccgccaggggctctgctacaactgcgatgaactctacaccccgggccatatgtgccagcgccttctctatctggcagccgacgactacattgaggaagctgtgcagccacaaggagatgcggccgcgccagctctgcaggaggccgccgccccggaagaagaggttgctaacgtcctggcagtttccctccatgcttttgcaggtattcggacgacgaacaccatgttgctgccagtgctaatcaaaggggagtgcgtgctggcgttgctcgacacgggctccacccacaacttcctcagtggagcgattatggagcgccttggcttggttccggatggcggggaccaactgcgcgtcacggtggccaatggggacaaactacgctgcgccggcatcgcccggaacgtccccatctccatcgagggcgagactttcgccatcacgtgcgccggcatcgacttgggctgtttcgacttcatcctcggctacgacttcctgcgcacgctcggccccatcacgtgggacttggaggccaagaccatggcgttctggcgtggcggacgcgggatccagtggcagggcgtgggcggggctgacacccctgcgccccccagcaggccacggcggctgctctagccgcccagcagcccctgctggacaccctcctcgagcagcatgcagccatcttcgaggagccgcgcggtcttcccccggcgaggccgtacgaccaccgcatccacctgctgccggacacgccgccggtcgccgttcgaccatatcgatacccccagctgcagaaggacgagctggagcgccagtgcgaggccatgctcgcccagggcatcatccggccaagcacttcaccgttctccgcaccggtgttgttggtccggaaggcggacgcgtcgtggcggttctgcatcgactatcgtgccctcaacgccaagacgtccaaggacaaattcccgatcccggtggtggacgagctcctcgacgagctccatggggcgcgtttcttcactaagctcgacttgcggtcgggctaccaccaggtgcggatgcaccccgatgacgtcgccaagacggccttccgcacgcaccatggccactacgagttcctggtcatgccgttcgggctctccaacgcgccggcaacgtttcaggcgctgatgaacgacgtgttgcgctcctacttgtggaggttcgtgctggttttctttgacgacattctcatctacagctcgtcatgggcggagcacctgcagcacatcgccatcgtcctcaacgagcttcgggcgcaccacctccaccttaagcgctcgaagtgctcgttcggggcgacgtcggtggtctacttgggccacgtcatctccgctggtggcgtcgccatggacgccgacaaggtggctgcggtcgcggcatggccatccccacgatcggccagggggctgcgtggcttcctgggcttggcaggctactaccggaagtttatccgggagttcgggctcattgcggcccccctaacgcgtctcttgcggcgagacgcgtttgactgggacacagaagctgaggaggccttccaggcactgaagcgcgccctcaccaccgggcctgtgctccagatgcctgacttcgacaagctgttcatggtggactgcgacgcgtcgggtgttgggttcggtgcagtccttcaccaaggcgccggacctctcgctttcttcagccgcccgttcgcagctcgccatctcaagctcgcagcttacgagcgcgagctcatcggtctggtgcaggttgtgcgccattggcggccgtacctttggggacggcactttcttattcgcactgaccattacagtttgaagtttctcttggatcagcgcttgtccacggtgcctcagcatcagtggattagcaagctcttcggcttcgacttcacggtggaataccgtccgggccgcctcaacacggtggccgacgccttgtctcgccgcgacaccgagcaggaggctccaagtcaggacggtgcggccgtgtgtgctctctcgggcccttcgttcgccttcctcgacgacgtgcgcagagccaccagggaggccgcggacgcccagcgcctgctccagcagctggccgaaggggcgctggctgctccctggcgtcttgacagtggcctgctgctacatggcagcaggatcttcgtcccggaccacgctgatctgcgccaccaggcgttgctgctggcccattcggccggccatgaaggcgtgcaaaagacgctccaccgcctgcgtactgatttctacatcccgggcgaccgtgcgctggtccaggattgggtgcgccgctgcagcacctgtcagcgcaacaagacggagacgttgcagcccgctggcctcctgcagccgctggaggtgccctcgcaggtatgggcggacatctcgatggacttcgtcgaggggctgcccaaggtgggcggcaagtccgtcattctcacggtcgttgaccgcttctccaagtacgcgcacttcatcgcgctcggccacccctacaccgccgcatccgtcgcccgcgccttcttcgacggcattgttcggttacacgggttcccctcctccatcgtcagtgacagggacccggtgtttaccgggcatgtttggcgcgacctcttccgatgcgcaggcatcaagctgcgcatgagcacggcgtttcacccgcagacggacggccagtccgaggtggttaacaaggtgattgccatgtaccttcgttgtgtcacaggtgaccggccgcgcgcatgggtggattggctgccgtgggctgagtattgctacaacacttcgttccacacggcgttgcgcgctacaccattcgaggtggtctacggcaggcccccaccgcctatcctgccataccagcccggatccgcttgctccgaggctgccgcagcgcttcttcgggaccgggatctgatcttggctgaggtgcgccagcgccttctccaagctcaggccctgtccaaacggtactacgacgcggggcatcgcgacgtggaatttgcagtcggggattgggtctatctacgcctgctccatcgcacggctcagtcccttgaccctcgggcgcggcgcaagctcggtcccaagttcgccggtccgttccgtgttctggaacgcatcggtgcggtggcctaccgtctacagcttccggagggcgcatgacttcatgacgtcttccacgtggggctgctcaagccccaccgcggagacccccctgcagcagccggcgtgctgccccctgtcctggatggcaggcatctgtccactcccgagcgcatcctgcaagctcagcagcggcgcggcgagtggcatctgctggtcaaatggcacggccttaccgacgacgaagctacttgggagtcccttccggagttccgcgagcagttccccgacttccagctcgaggacgagctgtttgcgcaggcggggagagatgttatgaccggcatccaatatgccaggaggcgggccagtagtggctaggattaggcgcagggataggggctgatagcccatatttattcttaaaagttatttccttaattggtggatcaaatagttatatataggagttgtaatcgtattggacagattaagcaagagtattattattctcggcttcctttagggagccgggagtttcccagcaaaccctagccgtcgccccctcccctcttcctctctcccacgcgaccacggcacctcgccgccgcgtgacgttcaagcctcgcccaccgatctcccaccactacaacctccgttcgacaaggcacagagggctgctgcctaccatcgtaagtaattggagataatttgttggaggacgaccaaacttttatggcttcttaatgctgagtgaaatcatgaatcactagctacttattcagaatcatgtatgatatctggccatttttcaaaataaaaatccacatcacaattttgcttttgggttgtgtgctagtttcctctgtcaaattctgtaaaaatgatctgcaccccaattatgtaggatctcttctagtaggatgaggctcttttctttgggaagagagtttctcactgttttctatttctccacaatcttgtggtctcagatcttaattatcatagctgttttctggtgtagcatttgcagccttcataaagattttatgaggatattgagtcgttgaatccaaatgaaactaaggcagtttggagtcaaatcctagcttgggaacattttgacgtcctcctgggaccgcaacagaacgaccccccaaatatttgtcactggcgggagaacactgcaagcaaagtgcctagtccggagcgaagtcgcttcaacggcatggtcatctatatcttctggaacctctggaaagagaggaacagacgaatattcaacaatgcctatgaaacggtgatgcaggtggccacgagaattaaagacgacatagaacaaagaacaaagaacaagagcaattcgatagggggcttttcttttcttgctgctgtaccaactggactgtttttggccctatttgtacataaaacactttttctactcccgttcttaattgaagggcagagctcctgctattttttttttcaaaaaaagttaacttaagctgtggtctgtactactttgctccataaatttctgagaaacaaatggcactccacatactccgatccaatccattatatctgatgtgcttgagctaaaatagtttatttgcatatgggcatcttctttgtatccctctcttcttttctttattatccttgcttgcatgtgcctatctattctaatctgacaccatgtgctgatgatatgttccagctctttggttttgcat

SEQ ID NO: 5003 - DNA, 6826 bp, Sorghum bicolor
  Intron number 1 from transcript Sb06g015950.1 (locus Sb06g 015950) derived from phytozome v7.0 (chr-ID chromosome_6; pos 44168848 to 44175673)
caggtacgtagtagcttactgtaggttttaatggcttcttagggtggagtaggtcttatgggttcttagggtttgtttacctcccgtttagtttgtcctgttaaagtttccgtctgtcacctcaaatgtttagatatatgtatggagtattaaatatagattatttacgaaacttaaaacacagctataaagagtaatttgagagacgaatcttttaagcctaattagtccatgattgaatactaattgacgaaactgctacggtatcagttaaactttaacacgcaaacaaacactccattagttaccgttgcttcatgtcacgcctttgttcatttcgcgaaaatttttgtttttttttctactgtagcactttcgtttgtatgtgacaatttttatccaattacaaagtatgtaggcttaaaagattcgtctcgtaaattacagataaactgtacaattaatttttatttttatctatatttaataattcatgcatgtatacaaagattcgatatgacgaggaatcttaaaatttttgaaaactaaacaaggcctaaaaaataccgtgatatattccttcgacctgacttttggcagcttgaaatacatataggtcttgtttagatacgaaaagattttggatttcgctactgtagcactttcgtttgtttgtggcaaatattattcaatcatggcctaactagtatcaaaagattcgtctcgcgatttacagttaaactgtacaattagtttttgtttttgtttatatttaatgtttcatacatgtgccgaaagattcgatgtgacagaaaatcttgaaaactttttggattttggtgtgaactaaacaaggccatagtaaagcaacggtaactatagtaaagcaacgccgacttttgactccactagcgtgactagcatgcgacctgcacgcgagagggcccagcccacagggcaggcgagcggggcggcccttctgagccatcggaggccttgccctaaaatttttcaaaatttcttttcacatcatatgcatgaagtattaaatataaataaaaataaaactaattgcacaatttggtcagaatttacgagatgaatctttgagcctagttagtccatagttgaacaatatttaccacaaacaaaagaaagtgctacaatatcccaaaattttttcattgaggaactaaacatatacaaagtacttcttctatctctttttaattgtcgctgttaattgtcgctgttagtgtacgtgccacaagttttacttgatttatagaaaatacataaaacatttgtttctccaaatagatttgttaaaaaaactagattcaaagatgtttctaatgatactaattatgtatttattaatattttttaatatataattgccgacagttgtttttttagatgcaagcgacaattaaaaagcgatggaagggagtagtatatatctagaaaaattccatattatttaactcaacttttgtaaaaatctcttttcttctccttaaactctaaaaccagacaaaatatattcctcaactttaaacccattcatcttacctccttgacccggttataatctgttttaaaggcggttttgtttatcttttttttttattttggctgattttctaaaaaatcatattaaatcacagaaaaattataaaatataaattctaattttattggacttcaaataagtagatgtaaataaataatatggtatgttttagtataaagtttttattgtaactttagatctatgcttttctgtaactaaacggaataagtcatagttgcagtttttatggcccaactatggtgaaatttttatggtagactaattattatatgcttaaagtatagtaaaagttttatactcattggatcatgccggtatacaaaagcataatcatggtccaattgtgtgcttaagatgtaataattcataaaattattgtaggataatttttatgccggtatactgcaaacaactaatgaacttcaaactcacatctagctcacacggcccttagcatagtcgtggtcacagtctcgttagcagggatgaaaacggatcggatatgaacggatatcactttgtttttatatttttggtcggattcagattcgaatacggataatatcaacaatgtcggataagatacgattggatgtcgacattataaatatacgatttaagtattcggatacggatacggtatcggatattaaacattcatactcggatacgaacagatctcagcccctctaaacgaattcggtctcgaataaggtcagaaaatattcgtactatttttatccctactcgttagtgtaggtggcgacaggcatctagccaggtatgtttgggcggcatagtacatttcactgttacaaaagcaattttggattggtagatacggctcctcccggaggtggcatttttattggtccccctctgtcaataattttagcagccgtatttttatgtcagccaacactatttttctctcacgataaattaacgaataatattttcagtcatgactttttagactagcgaacatctatctttataaataaccttattttaagagacgggtcttctaaagcctgcctcaagaaatatgggcctaatgacatcccattaagccattaaatccattaacaaccgccacataaccctctcatagccgccacatgaccctaattttttggtccctcaaccctcatacatctctccatgatttatctatcacaactctttatatcttggttctcatatagatatgatttcttagcaaaaaaaattattttcccgtctctcttctttaatttaattgtagtgccatatcttacttaatttttcttagttgtcactctaattaacactagtacaaggacatactatacaggcggctggtaacctatttttactggcggttttcagcaccgcctgcgctggaggccagtagaaatggaccaattccacagacggttccttatgagccgcctgtagaaaacgtttccataggcggctctgttagagaaccgtatgtggaattttttttatagaaaatatgaaatcgcgttttaaaaatagggaaattttttaattttagggaaggcccactagctaatcgcccgcccgtctctgttgaataaatcatctatattcaaataaatcatctatattcaaaggaggtacaatcccaaaaagtatatgtatagagcgccacaaaaatttagcatagacacaataaaaaaagagatgttgtaacgtttccaaggaatggcagacacaacaagttttgtcgccatgccaattcctccttgccaagttatccttggttacatgaaaatctttatttttattggaagttttgtttgccaaatatcttgtgaccctctcaccctattgttaattaaagcagcatacatagactcgattgtaaaaaccccagatgcctttaggccccaaaagaacacatccttttcctgcgataagctaagttgttgtaaagaagccgcaattctattctagttagttaaatttgcccctactaaattcctacggaaagaaatatttagtgtaggggtgttcaacactgttgcaatcgaatcttgctttctccttacaatattaaataacgcaggaaatttatccttaaggggtttattacctagccaagtatccacccaaaatctggtttgtgacccatcctttacattaaaatatccatatctaaaaaaagtatctttaacattcataaggctttttcagaagtgtgagtccaaaggtttctttacacaacttcctaaagtcttatttttaatatacttatttcttagtaattcctgccataacccattctcatttaaaagcttgaacaaccacttgctaagcaagcatttattttgaacttctatgtttttaatcccaagaccgccctgctccttaggttgacacataatttcccatttaaccaatctatattttcttttatgctaatctttttgcgagtaaaaccgtgatctaaagcagtcaatcttttctagaacaccttttggtagttcaaagaaggacatcataaatataggtaaactagacaataatgagttatgaagaccaaacgacagccaactgttaaaattttacctttccaactactaagtctcttttcaattctctcttcaatgttcttccaatctttgttaaagagttttttttgaaatgcataggcaaccccaagtaacgaaaggggaatttcccaatgacacatccaaaaagttgcgaataaaactcttcgtgacctttcgcttttccaaaacaaaagacctcatttttatggaaattaatttttaggccagatagttgctcaaaagtactgagcaataacttcatattgacagcattttcaacatcatggctcataaaaatcactgtgtcatctgcatactgaaggatggaaagtccatcttgaataagatgggggataaccccttctacctggccgtcttcctttgctctagcaattagtatggccaacatgtcaactactatgttaaatagtatgggtgacatgggatcaccttgcctcaacccctttttgtctgaaaatatggtcctaattgatcattaactttaatatttacattacctccttctgtgaagtgttgtatccattgacaccactcttgtaaaaaacctttcatccttaaagtttgttgtagaaagttttagttcactttatcataagctttttcatagtctattttaaaaatcacaccgtcttgtttttttcgtgttaagttcatgcagtgtttcgtgcagaatcacagctccctccataatatttctacctggtaagaaagctgtttgagttggtctaacaagtttctgggcgatagatgttaatctatttgttgccacttttgtgaatattttgaaagaggtattcagcaaacaaataggcctgtattgttgaataactcttgcatcattctttttgggcacttctagcatgtcttgtaggtcttcaacatggcttctaatatcttgcttgaggtgttgatcatctggatcaccatgttgcctataagtgcaaacctccttgcaccctatttgactacaaaacaaacatttgcaaacttattaattagtccaacttggtcatattgatcatcaaataccaaaatttaaactaaatagaccaagggtccatttttcttacagcatccccaccatagcatgctctctgctgcatcgggagccgtggctgtcgcgcgaatcatacaagagggagcatgttgtgtggagtacgcgcacgtattttggtaacatatggcaggataaggaacttgtatttgggagctagtgtttggggtatttatatactctcttatctatatctaacagttttgaattccccaagaccatccaacttctagagaaattctagaaagatcagaccgcatcgtgccagcccatcattagctgtgtcatgctcatgcccatgccggcactgtgggccagagtcacggcctaggcacaaccttatgcttattgttgtccagccctttggaggctccaagctatgctttctatgccagctgaaactggtggcagaatcattagtttgaagcagtggcggagccaggattttacagctgggtattccacgtataaaaaattttcaatgcatatgtgcaatagtaataggggacaaaatcaatacaaaattgatcctgatgcacaactcaagtagtacatataattttcttaaaatatatgctaggtaaaatatttgtttatcctggtaacaaggcatcaggcaaagtgagcctagtgtcgccactggtaataatcaaagtatatataaattctttatctatgttacaagaacacaatgcaacatttcttaaaaaaaaaactagaacgcaacaaaaagaagaaaacgaaaccttcaattcttgctttaaagaataaaaaatgaatgtggaatctttgtgttcaccttgttgttgcttcaagccgtatattggtcgtatatgagaaaggcgttgagggagagccgtatatgagaaagtctacaaagaccactgaccgccgccaccgctagaggaatgccgtcgatggagtttctttctgatgagttcatgggctgccgctactagttgttctactaggcttagagcaacttcaagagtttaactattcttgttgcttgtgctatttcagaatttgtatagcaaaaagtagactccaactaatatgctatctaattttgtaaaataggaagttcgctttctcttgattttcggtggctatatatagcttattacagacgctaactataagactttgtaaagtaacaattgttgtagatctctttttttttagaaattttctattcgacaaaatacctaaacaatagaatttgacaattaattttagccagactattggagttgcccttatgggttacatatttgcaacattcaacaaactaacatatatactgattatacatgtgtgtatatatacatatatttgtgtttgtcacaaaaatcatgggtattccatggaatacaggggcatacccctggcgccgcccatggtttgaagtaacaattgccggcttagcttaacgttgagaaagatcccaaaactagttttcttatttaattttgtttgtgtgaaaaattgttctagttatattaattgtatgtgtacaagtggtttaactatttctggcctatatataccattatattcttgatatactaaactgtactctactgcagt

SEQ ID NO: 5004 - DNA, 2813 bp, Sorghum bicolor
  Intron number 5 from transcript Sb03g042730.1 (locus Sb03g 042730) derived from phytozome v7.0 (chr-ID chromosome_3; pos 70114486 to 70117298)
caattgggtgctcagaccaactgctgcgtattcaggtatgccgtagacccgcgtcctacgcaaagtatgatgcattttttcattaaaaaaactagtcaaacttgagattatttgacttctaaaaaaaaaaatcaaatttacatttttttggatggcggagtagatacttagggcagtcccagtggtcaaaactatacacggtttccataacaaatatgtcaaaaaaatttatctatagaaactatagtctacaatggtgatttctttaagcaataaatgacagcaattttatactctaaaaaatgtcagcctttctctctcactcccttatctcttccatccatccaagctcggcttcctcccatcacctctagtcctctaccaaagaaagcaccagagacaagcagctgcagcacctgtacgcaaagcgcatgcatcagctccggcgagcgtaagtggcagcgtggacgagcgctaggctccagcaagcgcatgtggcggcgcgagcagtggggatgagcgagcacggcagctccgtctggcaagcgagcgcagtcgacgagcgagcacaatagcacgcgaccacggcggcgcaggcaagcgcggatgatgggtgagcgttgcggcacatgagcatggcggcatggccgagcacggctgggaagcgagggcgctgcacgggcgagcgcatgcaggctctctgtatagatcgaaactggtagtttcttcccaacggtgaatctatcgtttcttggagcctcgggtgaagggtagttgtgaagaaacgatttcctctgattcccttctctttcctcattaattaggctgccacatcagcatttttttagctgtcaggttatttaatagatatagaaactatcattaatgttctgtccttagtgatcgaactaccgataagcttctcaaagacaatatacagatagtgccaagtaattatgccattggagaaccgaaactaaacgtgtcaataagtgaggttttaagtatttcatagttcatacaactgcacattaaaaaagttaggcaagcagcaacatgaaaaagaattttatagcgtgcacccagctgtagagaggggaaagaggagcaacaaataaccaaactttgggccttccaaatgcatgtgatgctaccaaggtacaatcttaatcatagcatgatgaatcaatcgacaagaaaaccaaactcaaataagaatgattgaacatgtcaaaagatgtctccatttcaggcagtcatggttggattacaggaacctggcctgcacaagcagcagcataagcatctgcaagcccgggaaaactgtccttgtaaggatcaagaaacctcttgctgaatactttctcctttggaataacagctgcaaagaagtcagcatctttctccaccaagcccttcaccttaagagtttttagcacataatgccggggcataagacgccttggcaagctatagcagaggactgctggcctatgcactatgtacttggaatccaggccaacctctgtcttcaggaaatccaccacgcgactcaccctgccctctgaaaaattcagaacttctggcaacttgcgtatggcaatgcccagctcagcctcagagcatccaagagccttcttcaagaactctgacctagcatttatcttcccaggacttatgttgtagacggccacaatggcatgcttgaacattgctgaactgcgtggcacaccaagcatgtcggcacacgccacaatttccttgaaacgccccgtctccaatgccaataagtgtggggcgcgcaaaaggagcttgacaatatcagaatcagttaggccagactttcgcaggaatgccatattgggtttgacaacacggtcgagattttgagtgagcaggtacatgcccctgctgaggatggtgtgcaaattgtcgtaggagcccaagaaggagaggtagaatgcgagccgggggatcaatctaggcttgactaagatggtgggggcgatggaaatgaggcgggagatctgcggtggggaaaggccgacgtcgcggagctgcgcgatgcagggggttagggttctgtccacctcggagcggaggaccctcgggtccctagagattgcggcggcggcctcggctttggagacgccgattcctgcgaggaaggctcggacggcgtcaggattgtcgggcgacttgagactgggcaggtacctagaggccctgcgggcctgctctggcgtcaagccgcagctggtggtgaggtagtcctcgacgacgaactgagaggcgggagtggtgctgtagagaaagaggcggtggagagggagggaagatgcggcggcggggagaggcgaggcggcgcggacagcgggaaggaggtggcctccgaggcggagcatcgctattcgccggcgccgtgtgggtgcggcggggcggcgggcgacgctgtggtctgcgactctccgctggaggccaatgtggtagacggaagacgtttccgtttttgttactgggccggcccaatcaccaaacaacaaaggcgaccaaaaatattaattggctcaggtcgttttgtcgttagacatcagtatgttacagtcttacagagcaatttcacggtgccgtccaagttgttagacatcggttttgttgtttatctgtcgaatttgttagccattaaacaatgattttctctcataactaattaacgaatagtattttcagctaaggaaagagagtatactgatgtctatgttcatttatttctgccaggaccgcaacataccaataggggctgtgccagccga

SEQ ID NO: 5005 - DNA, 799 bp, Sorghum bicolor
  Intron number 6 from transcript Sb05g002400.1 (locus Sb05g 002400) derived from phytozome v7.0 (chr-ID chromosome_5; pos 2561092 to 2561890)
gtttggatatatagggagaatccatctccatccaagtaagctcttgttttggaaaggggttctcaaaataaaaaaaaaaatcaaaacaaaaaactagacaattaactgcaatgaatggaccattgatatagaagcattaaatgttcagatacatcacatgtttttgaggtaaatatctttgcatttagggcccttttggaacgcagttgtataggaatttcacaggaatcagttcattctcacaggaaaaatgcaggaaatggggaaaaaaaatcctgcattccaaaggtcaggtcattgtattcagttattaagcaagaatgatggattgatgtttacctgtctaaaactctcttatcgtgaacctcactgcactctgccaaacagaattggtggaacagtattgcacagaactgagctacacgtcgccctagcttatgcaaatgaacataaccaaccttcatcaaaaaagaaaaaaaaaagtaatgagttcacttaaaaagaaagtcctaatagatgtttctgtaaactcattcattttgaagggtcaggttgtatctcatctcaattatataagaacagggctcatgggtttatcctcatcggctagcttacatttgttccattgaaccttgtccaaactggctgtgattctttgtagttcttttttcttgtttgaaattgttgaaaaggaatatttctaaccagagtcttcctccattctttgttatatattggtttgtttacacatttcactcatttttgtaggcagcattcccacagtcagagagaagactgg

SEQ ID NO: 5006 - DNA, 7793 bp, Sorghum bicolor
  Intron number 2 from transcript Sb06g016380.1 (locus Sb06g 016380) derived from phytozome v7.0 (chr-ID chromosome_6; pos 45034338 to 45042130 reverse strand)
acgcacggaagagaaaagatatacgcgactcggaagcatgtaactttacacggaacatggtgacttttccaagttctaaaagattaggaggatggactaagagttgttggagaggggttttttctcatcttgctaaaaaccaaggattgagaaagagatttaaagaactcttagagatgctcttagattttttgaattagttacttgactagctagcaaacatgccggttgcaatgggagaaaataaaacatactcattctatttagtcccggttaataatagcaactaggactaaagatccacttttagtcctagttcctgtaaccagaactaaaggggaccctttagtcctggattcgtaatgtcatatgggaaacccatttaattagtcccggtttcccaaccggtcctgcatgctctagtgttttttttatcctcatgttgaagaattttcatccatctcagaaatattctcttgaatataagtttagccacattatataattcgtccatgcaagtatgttctttgcctaccaatatcgtattgtggttttatgtacgcatatacatctacaggtatatatcctccatcaatatcatactatgagttcatgagctatgtaatacccgattttaaggataaaatcagatatacaccatatgtgagtcttagaagtcaaatctcacatatagctacaaataaggggtaatatcaaaagacaatgcataaatatataacgtacttagtataaaagatataacctttgatatcaaacagcggacagacaactccaaacttcgggtattaacttccctctacaggatccaactgactggttgatcacaagcccaaaacttctcctgaggtgtgggggaaatagcaagagtgagtccatgtcgaactccacaagtatagcaactagattgtatatatcccacaatctcatgatcaatgtgacataaataatgtaaagcattaaacaataaataatgagtattttaacacacaggaatcatcacccttaatgtagatgtccccaaggccgctcctgaccgtgagctcggctagtatactagttttaacactctgcagaggttgtacatctttacccatgagtcatgatttaccctttcgcccgaggtgatcagcctcttaacccacttccaaggaaggtcggcagggatcactatgaagcctttcaaaagttcgtctaacatgttagggccgcaaggttttctttgcgcgcagatatagataccccccttccaaatggcacaatgacgcgcagcctatacacataaggacaggggctcgcactatacccaaaacggttcagcccctccgccctttcgggtaacctctaacaagctagaaaaggtcttcatactgagctaaagccagagccattatagccctcatggttgcactgttgtcccgggtgatcacgtacagacaaatcatcaagttgctaaaaagtcatttttatcatttattacttaacattaatatagtcacaggatcatggtcacagaattaaaatccaaatgttatacttgccttaaaccaaatgctcttgctgatcttgatcactgaagcactcttgatcaccacgaattgctcaccgactaattccgatcatcgatcacaaacatacggcaacaaacatacacgaagcaaacaaggctacaattagaacagtacaccaatcatataaaaatagtatgaaaagtttataaaaagattctacacaccactacgatcacacgaacgtaaatatcacgaaaatcgaagctaaaacggaaaatttatgaattttctaagatttatatagaaaaataattaattaaagtcacgaaattataaagtttcaaactgagaaaacagtgttactaacatgtagatatttcaaagacgagtctaacgcaatttgaatgggtcaaaacggaattaaaatgaatattttatgaccaaaagaaaatcagtggcaaacttgtaatttcctgagcgattagtgctgggccggttcggaaacaaatagcataaaccagatagacgctttggagcgggttcatttggaaatacttcatagaaatacctagattaagttaaattatatttgagttacaaaatcgagataaaactaattttattttttttgaaaatgtaaattaatacacactaaataatattaccgtcgagagttttatattacaaaagaaatagtcacaagcttaatttattttaatcaagggagatcatattaatgtttgcttataaaatatcatggcgcagaacctatgtttgcttttaatttagaaaagtggtagcatgcacactaatcaaattagtagctaatttatttaactcagaaacatgtgacgtgattatcactgaattggaaaggaggttgggctgaccattaatcattatgtcacttgtggcatgcaacggagcaagctggcttgagtccttccactggtttggctttggattgcaggatggtaagatgcagcgactgctcaaatagatatctagtgtagtcagctgatgaggattatgcttgaattaggatagatgcgtgaactaaaagcaaggttatgcacggttccttaccaacaacagagaagcaccaaagaagacagcaggcgttgatgaccagacctgctgctcaaacgattctccacctccgtgataagaatagcgatagtagatggatcagcaatgctgggatgataaagaggggaagaaaaattgatttactacctagggattcctaaacctggggcttccctcatggtagttttggtgtgtgcttaacccaaaaagttggtacatatatagggagaaaaactcgtcacatccacatcaattagcaatatggtactaattgatgttgaaatctccatctttactaataggcctaattaattattaaagcccattagtaaataaaacatttggtctttgaatcatgatgacgttggatttgagtaaaatgaagaaattattattttcgaaattaattattttcatggataaaataattctagaaaagttcataattagtagttaagccacgaaaaatactccgaaagcttcgaaaatttgggaaaaattctcagagatattatagaacatgaggaatccaaataaagtatttggagcttatgatgagataatttggggcatctaaaattagatttatgctcatagaaaaggctagaaaaatacccgagaagtttgtagatattgcttaatggacgagaaactcaaacgaatgacttaggtttgaaagaaaagattctgagagaccctgaccgaaatcttgagctaagagacaaggaatttgattgtagaaaaagataaatacgtgtcgaataaggaatatcgatctactaaatgtattttaaatatttttcttactatcaacacacaaaggagcaataagcagacatcacccaaaatcatatgcatcagcatgtatacacaaccatgttgctaagccttatgataaactttaatctaatgaaaaatattatttttttcctatattttcatgagcacaaaaaaaatacaaaactaaatcgattttcatctattttgaaaggagcaaattttagggtgttacaagctaccatgtcttttagaagcttcatcaagtactgcagcacgtacatgaaatttgcataaaattaaacaacgcttattattaggtgaaagtgcatatcttaacgtacgtgcaaaatggtcatcaaaatatacaaacatgtcacgttaatcactttagggtacatgaatacatgttacaagcagcaagcctcaaatatatgtcacgtctaattaaattaaagtctccaataaaaatatttgccatacctaacattataacaattcatgtacttttcatccaacgttaaggtattcatgtcagtcaaattttcttaaatttgattaggtttgtagaaaatatttgcattattgtatcttcaaataattttgttatgaaaatagaatcaacacatctatataatgatactaattatatattataagtactaatattttcttatatatttggtcaaagttaaactgaactttttgacttcttggaaaccaaataatgacacttattttgggacaggagtatgtatcaattagatctaaagaaagattttctaatctgaaagttccctcattgaaccctgttttataaaataaataaatatatttcacatattacagcctgtgaggtaacatgtaatcgcaaccatattcgatgtcacagttatttaagagttcagcagcaaagctttagtttaaattagatcacagactagactaaagtgttgggcaactggaaactagttaagccatttattagggcactcacaatgcagactctattatagagtctaaagttatttattacctcgaacaatgtggacttggagtctaaataagacttagagtcttattttttctacttctttcttcaataaatatgctgccacatcagcaaaataccataaataatatgtaattaagtgtcttggactatgtgatagagtcttgcattgtgagtgcccttacgattctgtctatccaagaaaattcgtcagtgacgtaggctttctagtaaataaggtcaatctcaatagggttttaatagagttttataggcactaaatatgctgatgtagcaccatattaatgaagagagatgataagagttttatgggagtagagagattttcatagagatgaaactcttatgcacaattttcaaactatggatacgttgaaaactgtgtcataaaactcccactaaggatgatctaacaacgatttgatctgttcttctttagtgaaattactgaatatcaacgaaacaaaatttaaatgttgatgtccgtataagcttgttaaaatctacaaaaatttgatcaaatgtttatatttcaaaattatactaactaaaaaataaaatatgtgtgatgtagtagtatatcatatatataataactcatagatctgtatttaatatttaggttaaagtaatagagagactcctgttgtaaagctgacagatgcacatctcacattacagatctgtcttaccatgtggtaaaaaagagaaacgctatgtatctgtcggaataagtattttattctaaattagcagaagtgtccgtgtgttgcaatgggtgaaaaggtatagcatcatctatagtttaacatccatgtcttattttatcttgaaaacaacaatttttcatttacatcattatatttttattgcactcaacattatgctaaaaaacatatcagcacactataacaaatgagttttttgggtttctccttctataataatcgttcgatctgtacgccgtgcaacatgagccctacgtcatacgtgatcttactcttcttctataacaatcgttcgatctaaatgtcatgctatatgagtccaccatcatccatgatctcacatgtaagatttaagacccctattcaatctcacagtaatgctacccatcataagtcacgtccttctctcttgcatattcttgactccttgattttgactcgagatattttcttttgtttaagtcatcaatagctcgttcgtggtgcaatttttgttaaagttgagaccaatagcacacaattaatcaataaggaatacaaatcaacgatgagaaaattattaaagatagaatcatgtccatgtattataacgggaaaaaataacttgatagtacgtgccctccatacacaatggtcatttgcactggcaacgaaagctggcattgcttgatttggctagtgttgatatcaccatccaacatgagtggtagaggcagacacgcatggctagccttgcgcgcatcctcttgcctttgaccgccatgacatagtggtcatgcgtttttcttttgttattaatattttctagctatttaacaattatttgttactatcaccatcgtttgtgtaattttttatttgctttccgaattgtatatattagttattcaaaaggaataattttaattaaagtttataatttataataaaagatgttttcttctttacgcacagtttttaaattatggtctgctctttgatttttggccttttcctttttgtagttattgcatgcccaattgcccatggtaaatcccgacgtgttccctgttggtcgtgcaaagttgtaggtaggctaagcggcatcatttttccgatttgattttttttaccatttcgagcatggttcggaggtgtagatagatagagataattttcaaactgaacaggatcgactttgaaaaccataatccaagtagagatcggagttgaaggaaaaatattgtgcactgaagcctgtatggactagataagcagaaagaaagatacctggtggactgacatttttataattatatattagggaaagatataaaatctctacaataagagtaattctaggcttttaaggttgccttatattattagagccgcaaaaaaaaggttgtcttatattatttgtcattctcgctccacaatatacaattttcttttttctaatacatctctatacatgtttctcttctcttttcgtttcattgtgaatcacacatttttcattccttataaattctcatgcttgagttaatgggaaggagagagagtaggtgctaagaagaaattatgttgcagcgttgcatgaaacaaaaatttctaggctgacaaatgaaacgttaaaaaaaactcatatacatgagattatcattttcacccaaattttgtattaaaggggacaacgaaagacagatgcatttgactcttggacttccaattaatgggtaaaaaaacttattatttttgggtcttttgggtgagcctggggcttcgcttatatgcattgtagcgtgctatagtactactgtagaagaaccaatgaagcccatctgacccggcttcaccggtttctcctgcttgctagttcgttttgggtggaatggagagggggaaaaaacttttgctacagtgtcatgaagaaactgaagagtaagagtcatgacaaagaaaattttaggatcttaagctttcaacacatatgacatatctacatatgctacagtagaaatttctgcctcaaagttagaactatataataactatttataacaagtacagtacttgttttatagccatgttagtaagcatttctactgatatggagaagagagggaaaaacttagctctcaactcagtaaaacaagctaagcacaggattaacgggaacctagacagtggtggacctagggtttatggtttagggtttgtggcatagacgtctcgcacaagctcattgccttgtagcatggccacggacgaccacacgcttgtctctaagcgactcaggactccatgtcgatgttgaccccgtatgctctccacatgcatgcatgcaccattagtgctaatgtgtgcttagagctcatgacgtcaagtaattcatttgcgaagatattctttattcctcatgtgggtgtttaggggcctttctgcccgcacgatttacctagaataccttgctggcgccacccatatatagctagtgtgagacatggtaccaaataataataataaagacaattttttatagacatatagaagataagtattgtctaataacttgactctgataacttaacttatatatagttaagcatttggctttatattgatcttgcttttaagggaaaacatagttgcagg

SEQ ID NO: 5007 - DNA, 18929 bp, Sorghum bicolor
  Intron number 3 from transcript Sb08g007360.1 (locus Sb08g 007360) derived from phytozome v7.0 (chr-ID chromosome_8; pos 12882106 to 12901034)
cttccggattgccgccagaaacgccatcaaagctggtaagtaataaccaaaccaccgagcatccccaaccgttttgcataattagtttggcaaatgagggagtttgccaagtctcaaaaaaatatagtaaagatgaaaagagaaaatctccaatggtttggcattaatcacttggcaaaaaagaaaattatggacacacacaatttttttgccgagcttttctcctcccagcgcgtcgggtgaatgttcgcggcaaatttatttccaccgaggcactgaggtcgcgacatttgtgcatggccgctcggagtttggtagctggagtctttgccggcaaaaacgatccaaagggcattgatggagtacgtggcgttgatggaagaccgataggcaaaaacacaaacaattaattgggagggcatcgatggagtacctaacgttgatggaagaccgatgggcagtttgcaggaaagtctggtggcgggatgtcgccaaactcgcgcaacctcaacccgtagccgtacgcggacttcgcgccagtttcccaatgccaagtgtgaacaggcttggcatatatgccaatccttctcctctttttgccaagttaacaaaattgcaaagtccaaatgccaaaccgttgaataggtgtttttaagacttttttgcagatacatgaatgcaaagtctatttgcaaaacggttggggatgctctaagtaaaattgttgacttggtagggtcattaaacgaaggagttgcaatgctggtaaaagcgatccattaactcacaacataccaacctaatatgtcattttagaactaaggctttctttagttcaccctaaaaattaaaaacttttcaagattcctcgtcacatcgaatcttgcggcacatgcatgagacactagatatagatgaaaataaaaactaattgcacagtttacctgtaaatcgcaagatgaatcttttaagcatagttactccataattggacaatgtttgtcaaataaaaacgaaagttttcgaaactaaataaggcctgcggaatttccgcaatgcttgtgataagattcatgtcaatgcaatgctggtaaaagcgatccattaactcacaacatacctacctaggccttgtttagtttcgaaaaaattttggattttgtaactgtaacattttcgtttttatttgacaaatattatctaaacatggactaactaggctcaaaagaattatctcgtgatttacaaacaaactgtgcaattagttttattttcgtctatatctaatgcttcatgcatatgctccaagatttaatgtgacggagaatcttgaaaagtttttggttttcggggtgaactaaacaaggccctaatatgtcattttagaactaagctgggaaatttgtagcagattgaaatattgatggggctgcatcactccggagttgaaatgctgacaccctatttacatgtttaaggacattaatgtcattgtgtgcatctctggtagtggaggcctatgaccgtgataatattcaagatcagaagttgtagatgcgatcaattatttggccagtttcaatggggagtttcatgtcattgtttctaagactgccatgtcatatgaaatgaaatagaacttggatgaaacacccactttcaatggagagtttcatttcatagtttcataggcatttaattgcaagactcatagagagttgtaatcgtgccaagagagtttcatctagatgaaaccaatttcttctctctctcttcttaaatacaccgccatgtcataaaaaagtctatgaggcaacctattcaatgcaaatgaaactcacatgaaactctcattgagaccggccttaacacactcgtaccaaaaatatcatttgtagagccaagcatctgaattaattacaaaggtggttactcacaacttgtgtgagtgattctacacctacttaaaattagctagagtgatagctgcatatgattattccacccacaagagctacaatgatgagtacacatggttccacctaccaaaactagagtgatgggtgaaggtaattccatctattagacctacaatgatgggtgcataagactccacctactagatctcgagtgatgtgtccgtgcctctatctactagagctagagcgataaatgtgtgacttcacctgctatctaactagatatagagcgactccacttaaaagaataatgtgataggtatgtgacacaagcagagtttagttgttgcttagtaatccagctgcaacagaaacatctgcaccttaatatacttgcagtctgctaagagttgttccttgagctccaatggctcaagttattaagggcattaaagcctcgagtagctagaactcagctacggagtccgtagccttgatccgtcttctctaatgaggttgaaccctcgccacaggcttggttgagagagagagagagaggtagtagattatattggtaatatctttcttaaccttaaccaaatgtttgttaccataatatatggccataggcctcaccaaccagagcaacatgctcctttaatttaggaactattaatagaaagctatttctaatttccaactcagccactagcggtaaccacgcctagcacgtcctcgcgtgcacccaccgtgtgttctacgcgctccgtgtcatggcatacgtcactagctcgacaatgcctagaataagtgcgcccgaccatgacatctctctccccgtcgaggagaagctcatccttgagctagaactgtgggtactttgtgcagaatggctcgatatcttccaaggttgcaaatgctgctgactcgcccttccactggacaagaacctggtgcaccccgtgagccagctggaaacctacaacatgtttctggcttaggggcaacagtgccatgatgcagaggtggtaggggaggaggagtatccggcatcagcccctagaacttcttgagttgccccacgtggaacacattgtgaatgcggttgcggggcggcaaggtgaggcggacagcgacgtcattgattagctcagtgacgcggtatggcccgaataagcatggcttgagcttgccgatgacagcctggggaagcgaggacgccacacgctgccatgacagaggagcgcccaattgcccacctggtactcgacatggtgttgcaccttgttgtagcgtagcttttgcgtcacttgagctttttctagccggtagtgaatatcggccaggaactcatcacgctcctccatgttgttggtgacagccgccacctcatgtatcctggttcatataaccggatggatggtggatcgtgtccatagacgacacagaagggcgtgtcctgtagcgatgtctggtaggtagtgttgaagacaaactctgcctacggcagccatcttagccaccatcgtggcccatccccggtgaggcaccgtaggtacataatgatcacatggttggcagccttcgattgcccatcagaatgaggatggaacgtcattgtcatgtgtagcttggtacccatcagacacatgagctcaccccagaacatcgacatgaagactgagtccctgtctgacaccatagactaggtcatgtcgtgtagtcatatgatctcggtgaagaatacctgagcgacggactcggtggagtatggatgcgccagtaaaatgaaatggcaatacttattgaacctgtccaccagggtgagtatggtcttgccatggacgcgtatgatggacttgccacagatgcgtggaagcgcttcaacgaagtcaagggcaatatttgtccaaaccccgtgaggcaccagtagaggaaactggaggctagccgaatgccagtgctcggacttgtattgctacagacgacgcacatgcacaccaagtcctagactagccacttcatgttcggaaagtgaaagtcatgtcacagatagtgtagcatacattgaacccccttgtgtctgtccttgtggacagccaccatgatcttgtggagcaacggagaggttcatggtatgtatagtcgcacgacaaaccggatcatgccatctatgactgacctaggcgccctacgagagccggcgctaatgtcctcggaaagagcaatgagagccaggtcggtttgctgtgcttagaagaggcagtcaatggagtcgaagctgtgggggtataaacccctatacccttacggccagacttcagccaggaagctcggcccactacgagacgagttcaaggcttgatcagacagcccggagtttcgcgcaaggaaacaagacgtggagatcaagcaggattctagtcggttagaataggaattgatatcgaattatctatggcaattgtaaccgactaggattagtttctagatctgtaaccctgtcctccagactatataaggaggggcaagggacccccctaggacatcatattctctcaacacaaatcaatacaaccagacgcaggacgtaggtattacgccaactcggcggccgaacctggataaaaagcttgtccgtgtcttgcgtcacatcgagttcgtagtttgcgcaccgtctaccgataaactactaccgtgggtataccccaaggtagactgccgaccagctttcgtcgacagtggcgcgccaggtagggggtgtgcgtgcaacttttccggcgaacaagatggtcacgatcccagcttccgcgaccgtgcccgaaggcctcacattcaccgtcggccagatcacgtggacgacgtgcagcggcggcttcgcgaccacggttccgaaagagatccagatccaatctgagatcacgccgtctccgaccacacgcatgacggcaccaagctcccgaccaccgttcccactctacaagggaaaggagatcgactgctcggacctcctccaagcgctcgatcgcgctgactccaagctactcgaagtctcccaactaatagatggagttctgcgccggcccgaccaagctgctcgagcggatttttcgaaatcccgccggccaactcgtgtcgccacacacgaacggctgggaacgtccctgacgataacctcaaccccctcaggacgatccgtcgagctcaaaaaggaagactatcctcgcggcctgaacaactcggcctctgtttactcacagcatgtccaatccgttttcagcaaagcgggctggtcgccgacgaggaacaatcgccaccatgtcaacatggtgacaatccgagagctacgggacgaccaggtttccagcaccaactcaagcaccggctccgtccccaccgaggttataaacaccgaggacgagggctacgacctggattttccttcacaccctccgggtttcgaccgattcccgatattccccccccggcgaggggatatcgtgttcaatgtcagcgccgacgaaccagctgttgacggagaaacagatgactagaggcaactccgcgaacagcgtaatgccgatcgcgcccgacggcgtgcggacgagcaacaacagatgccaccaagtaacctcaacgatgcctttgacatggtcggggaccagccggtctacaaaacaccaagcgccaacgtggctgtcgccatggccaacctggatcggcttcctgacacccccgagtgccagggagtccggaccagcatccgagcacacctgatcgccgcaatgggacagacagccactctgctcaagagagtccaggacgtctcttatacggaagccgcctccgaccagactaatcgtagccgggcctcacccagcaggcgtcaccgcaaccgctcccccgacaaccgtcgaggggactcacggcgcgacgatggtggtcgggacgccgattgccgccgccagcagaaccgcgtacgcggccaagaagaagaagatcaacacagggatctccgccacaacatccctcccaaagatgcccgggaccgcatcaacaggcgcgccgtagagagagcagtccacgaaaacctgcgccgcatcgagtacgatgcgacccacggtcctccgggcctaaggcagttctcctcacacctccgccaggtcgtgtggccccgcaattttaagctcgaaaaacttaaaaaatacgacggcaaggaaaatccagagaactggatcactctctatgaaatcgccgtccgatcagcggcaggagatgagcacgtcatggctaactacttccccgtagtcctcgaccaggctggtcatcagtggcttctcggcttgcccgaggactccttcgactcttgggaagagttacgacaggctttcatcgacaacttcatcgccacatgcgagcagcccggaaacaagtatgaccttgaaaggataagagacaggaagaatgaacctctgcgcgattacatccgacgattctcggatatgcgcctcaaaatcccgaagatttctcatgacgaggccatatcagcctttatcaagggcttgcgtttccatgaagcgctgaggaacaagctgttgcgtaagcgcccatcaacggtagcagagctcctcgccacggctaaaaattacaccgatgctgatgacgcagaaaaactaatccgagacgacgcgagaggccccgaccagccttctcggcgagatgacggtcgtggtcgctacgacaacagaaatcaccgccgctccgacaaccgcgatcaccgagagggttgggatcggcggcgcgacagccgtgacgacttcagaggaaagcgccctcgtgaatacgaccacgaagtaaatacggtcaaacgtcccaacggacgacgggactaccaagacgactacaacaaaacgttgaagggaccgtgccagctacacccaaagtctaaccataccatggaagagtgccgcgtcctcaaaagtatctatacacggcgggccgcccaagaggactccgccaagaaaaataacaaacgcgacgggcacgaccacgaagatgaggatgaggaccaagacagggacccccgacaccaatacgtcagccccaccgacgtggtccactccattttcgggggcaaggtctccactgagtccaagcgagaaagaaagctgttaaagagagtctgcctcaacatagacagcacggacgggctgatcgcagatccgaaatttcccgcctggtcccacagggagatctcgttcagcaggaaggaccagtgggccgctatcccagagccgggacgtttcccactgattcttgatccctgcatcaatagcatcagattcgagcgcgtgctcgtggacgggggaagctccatcgacatccttttccgcaacagcctccccgccctcaagatatcaccggcacaactaaaaccttacgacgcccaattctggggggttttgccaggtcaaagttcggtgcccctcggacagataacattgcctgtccaattcggcacacccgatcacttccggacggagttcatcaactttgtagtcgcggatttcgacgggacctaccacgccatactgggccgcccatcgctgacaaagttcatggcagtcccgcactactcatacctagtccttaagatgcccacggagaagggtgtcctaaccatcagaggcaacgtctacactgcgtacacctgcgaagaagaaagcttcaagatcaccgaggcaattgacctctcaatccgcatggcggaaacagcaaaccaagccgcacagctgcctcccgaccagctccgattacctgagcaggagacagccagaaagaattcgaaatccaaggagcacaaagaagtgcagctggtcgaaggcaaccccgagaagacagccctcatcggggctaacctggatccaaaataggaagacgcgctcgtcaggtttctaagggacaacgtgagcgttttcgcatggaaacccgcagacatgcccggtgtcccacgaaacctgatcgagcactccttaaacgtctcgaagaccgcaagaccaatcaagcaaaaactgcgacggttcgctcgtgacaaaaaggaggctattaggacagaaataacacggcttctagcagccggattcataaaagaagtgtatcatcccgattggctcgccaatccggttcttgtacgcaaaaagaataacgaatggagaatgtgcgttgattacaccgatctcaacaaacactgtcctaaagatccttttggtcttcctcgcatcgacgaggtggtcgactcaacggccggatgcgaactcctctcctttctagattgctactctggttatcaccagatctcgttaaaggaagaagatcagatcaaaacatccttcatcacacccttcggcgcatactgttacactaccatgtctttcggacttaaaaacgctggggccacttatcaaagggccatccagcaatgcctccacgacgagattcgcgatgacctcgtcgaggcctatgtggacgacgtggttgtaacaacaagggacgcgagcaccctaatcgacaatttagaccgaaccttcaaggcactcaataggtacaagtggaagctcaaccccaagaaatgcattttcggcgttccttccggtctactgctcggcaacgtcgtcagtcgcgacggcatacgaccaaacccttcaaaagtcaaagccgtactcgacatgcgaccaccgaagaacgtcaaggatattcagaagctaaccggatgcatggccgccctcagtcgtttcatctcaaggctgggagaaaaaggcctccctttcttcaaactactgaaagcgtcagaaaaattctcttggacagaggaagccgacgctgcgttcactcagcttaagaccttcctcacttcaccgcctgtcctcacagcgcctcagcccaatgaagacctactcctttacattgctgcaaccgacagggttgtttccacggcaatcgtggtcgagcgagatgaaccaggtcacgtcttcaaggtccagagacccgtttacttcataagtgaagttttaaacgaatccaaggccaggtacccacaaatacagaagcttatatacgccatcctgataacgtcaagaaagctgaagcactacttcgacggccatcgagtcctggtgacaaccagctttcctctcggggacatcctgcgcaacaaagacgccaatggcagaatcgtgaaatgggcaatggaattatgtccattttccctagagttccagagtcacaccaccgtcaagtctcaagccctggtcgatttcattgccgaatggacggatctcaacgagccttccgttccagatgtctcagaccactggtcaatgttctttgatgggtccttgaacatcaacggtgcaggcgctgggatattgttcgtatcacccaacaaggacaaactccgctacgtccttcggatcctttttccggcgtcaaacaatgtcgccgaatacgaagcatgcttacatggcgtacgactagccgttgaactgggggtcaagcgcctctatgtctacggcgactccgctttggtcatcaaccagctcaacaaggagtgggacgcaacccacgagaagatggatctctactgcaaagaaattcgcaaatgggaaactaacttctatggcatagagtacatccacgtggtccgggataagaaccaagcagcagatgcgttgtcaaagttaggctcgtctcgggcccaaatcccgcggggtattttcgtccaggacatccatgagccgagcgtaagctcccccctggtcgacaagcaacccaccgaggcaatgctcatagatgacgccactccgacaaccggtgggcgtgactggcgtatccagttcatcaaatacatctcagacgggacaggctttcaggacaaaacagagaacgagtgtctcatccgacgatcaaagaactacatcctggtcgacggaaaactcatgcggaaaaacgcaagctccgaagtactgctcaagtgcataccccaagatgatggtatcaagctcttggaggacatacacgccggatcctgcggcaaccacgccgcatctagaacgccggtcggaaaggctttccgagcaggtttttattggccaaccgcggtcagcgacgcagaaaaactggttcggcattgcgaaggatgtcagtttttcgctaagaggacccacgtacctgcccatgaaattcaaaccatcccgtcgtcttggccctttgcttgctgggggcttgacatgatcggaccatttaaaccagccccgggcaattttaagtttgtcttcgtgttaatcgacaagttctccaagtggattgaatacatgcccctggtcaaggcaacctccgagaaggctgtggagttcctcaatcaaatcatacacagattcggcatcccgaacagcataatcaccgacctgggcactcagtttactggcaccactttttgggatttctgcgatgacagaggcatagtcataaaatatgtgtcagtggcacatccacgtgccaacggtcaagttgaacgtgctaacggaatgatcgttgatgccctaaagaaaaggttgtacaccgaaaacgacagagcacccggtcgatggatgaaagaattgccggcagtggtctggggcctccgaactcagaccagtcgaaacacaggggtgtctccctacttcatggtgtacggtgcagaggcggtcttgccgtctgacatacacttcggatctcctagaatcgagcacttcgaccaggcgaccgccgacaacgccagaggactcgaaatcaattgcatggaggaaaagcgtttagtttcgtgtctccgaacagcaaaatatctcgcagcagtcaggcgatactacaacaggaatgtcaaggaccgttctttcgtggtcggcgatctggtgcttcgatggaaaacaagccaggagggaatgcacaagctatccactccctgggaaggacccttcgtggtgaccgaggtcacacgacctacgtcctacagattggcatacccagacggaacacgagtgcctaactcttggcacatcgacaaactgcgacgtttctatccataaagatttttaatgactttcttttgtaagtatcttataatttttgataatgaaattctctattttttggcccataccttgtcacacacagcactcggcaaaactcctgcaacggatgctcttagcgacaaccaagacaaatacggtgacacgtcactcagatattcttacagcgctcaaaacaacagtcatgacaaaaagcaaactttattacaaactttacatacaaagtttacaataaataccctgacgggcagacactagtctattcctacagactactttattggcctagctgctcgggctgaccacccgcctggccctgctgcccggacgaaggggtcggggccaccggcgcctggctggtcgagaccgcaggcgtcgaccgcccatctcccgcaacggacgcgcccgacaactccctggccgacctatctgagctcggctggtctggaggagtggccgttccgcacagattgatgtcgccgatcactgtcgacgacaagtccagcagactaccccgaagttcgtccgcttcctgtgggccgacttccttcgggtaccccttctccagcctgctcaagtcgaccagggggtagtgggcgcgcaccatgctgaggacgtgcgcgccggcaaactccccggcgtccttcacaaactgctggagccagtcccacgcccgttgcgccttctcgaccggggcgcgcggggctggctctctgggagctcaggactgatcaggtccaggaccggggacactcctttccagatccggcaacagttgaccttccaggagtcccggtccttgatcaggtcatccaggtgctttttggtgttcaccttgagcactgcaaacgaaacgaaacgttactctcggcataccagacaaataaaggggcaggcagcaaccagcaaggcggcacccattaccagatagctcccggtcttttctacccaattcctcttctgctcgccgcccggactccagcgcaccggcgagctgttggctgagctgctccttctcttgttggaggctcgccacctcctcctccaaatctgcgtgaatcctaaactggtcagcaaagcaagctatacaagcaagcgaagctgctcggagcgtgtgactaaccttcttgcagccggtactggtcggccaaacgacgagcgaggtcgagacgacgctccttttcggcacttatctcgaccaccttctccccgacctccgcccgcaaccggtctacctccgcggcaaggaccttgttctcggccacgacgccttctatctggtcaaagcaccgtttccggtacttcgccgttttcattacgtcctacaaagcaagcatataacgaccatgcaagacaaggcaaaagaatgcgcagcagcacaaaaagccgcttaccttgacttcgtcgacgaggcgcttggctgcgcgctccaccctggcggcctcttcggactcggcgagctcctcatgaccgataaagtgatccccgcgttggcgccacacatacacgtgttggcggccatcacggggacgaccctcgatctcttccacctcgtcatcggaggccgcccgggtttcctcctcctgggctgcgtcacccccggtggtggtcccaggcatcactggcccttggaccagacctggggagcccgcagccggagaggctcctgctcggggcggcggggggacttcactccccccggcaggaggagcggccggagattctcccttccctgaggagttagttgggggagcctctccagccctggtcgggctgcttgttgtagtcggcgccgcgctcgggagcccctcggtgctcccaggcgcgactgcagctgttggctgctctgtggtctggggggccgcatccccagaaccgcgggcaggctcgcccgttccctggccggcagtttggccagggtcgacatccgatgccgcactacaggaacaaaagtttttaaaaaaaagaggagtccaaaatacgtaagtcgaacacttacaggtctgaccgacggtgggtcgcggtgaacctcctcctcgcccggccgatcggcacctgtgcccccatctcgacaacctgcggggcagcggcgccgctggccactcgatcagtggcgaccgacgcagtgtccgggcggctccgaggccgtcggaccaacgacggcgcagcctcctcgtcgtcgtcgtcgtcgtcgacgatccgcacgagccgacgacgcttcggtgcttggctgctctccgccggtagatctgccggcagctccggtgtcggcaagggatctgccggcaatggccttttccccgctaccctctcctcggaggtcgggacggggcgggctcggtcttcctcactgctggtgtaatgagtacaccgagcagcgtcctcctctggcgggacctctcccgcaggattttccatccccggcgccagtgatacatacactgcgcaccggtcgacatcaccgacctgcaaaagcaacagagatgagtcaactgcagacgatatacgaatgatcaaacagaatctgctacatacctttggtgctggtcgtcctaacttgaaggcttgcacccgatcactgccacggatgaagcccccatccgcgaagttaaacagctcgttcaacagctgttgtacctccgctttctccaagatctccgaccgcatcctggtcgggtctgcgcttccggcatactcgtacgccgagtgcaccctcttctggcagggcatcacccggcggcaaatgaagttgccgaccacgccaagcccgtctaggcgcgaccagtcgatcagcttcatgagatccgccactggaccgtcgaactccgggcggtcggtccagctcgtcctcttctcgggaatgtatcccacgtcgcagaacgtggagctgcccggttcctccctgacgtagaaccacttcctgtaccattcggtcaaggaagtgttccatgggcagtgcaggtagcggttcttcatcccatcacgaaggttgaggtatactccacctgcaaccttggagcctccaactgctcccttcttcctcaagcagaaaaggtaccggaaaagatcgaagtgcggctctatgccaacataggcctcgcacaggtggatgaaggtggaaataaggagaattgagttcgggtgcagattgcaaatcccgatctcatagtacaaaagaagaccttgaagaaaaggatgaacaggaacaccaaagcctctcttaacgaaatcttcaaaaacgacgatctcaccggcgcgagggtcggggtagctctccccctccggtgccctccagccgccgagctctgcgccgtgcagaagccccatatcgacgaggtcaccaagagattttgtagtgctgcgagacttcttccactccttggccatcagttcggccctcttcctggagtcgctcttcgccattagaggtgcgaatgtgggctggagttaggatgatgcaggagattggagaagatgagagcggaaggtttgaaggcaatggcaggcgaagcggtacagagctgaaagtgtgaggtgcaccccctccattgtgtcatgctaggatagcacgtcagccatggcgttcgcgacactcggcttatagttgatggagaagtcaaagcccagcagcttgcccacccattgttgttgtggaatggtggccaagcactggtccagcaagtacttcaagctatagtggtccatcttgacgatgaaacggtggccccagaggtatggcctctagtggcatacgatgtggaccagcccgatgagctcccgttcatacgcggcgactgtacaatggtggggtgcgacgggtcggctaaagagggcgattgggtggccgtcttgaatgagcaccaccccaaagccatgagacgaggcgtcacactcaacgacaaatgtcttggtgaagtccggcatggcgaggatgggtgccaaggtgaacgcaaccttgagcacaccaaaagacagcgaccacctcgtcgttctaggagaagccatccttcttgaggagggttgttcgtggtgctatgaccgagctgtagttgtcaacgaacttgtggtagtagcctgccaagccaaggaagctgcacaccgctcgcgccaagcgaggaaccggccagtcgtgaatggcctacaccttggccagatccatggctacacttacctttgatatgatgtggccgaggtaggagatggaagttaggctgaacacacacttggagcacttgccaaagaggcagtggtggcgcaactaagtgaggacgacgcgtagatgatgaagatggtctgcccaagacttgctatatatcaagatgtcgtcaaagaaaacaggcacaaagcgacataagaatgggtggagtacatcattcatgagagcctagaatgttgttggggcattgcacagcccgaacgacataaccaggaactcgtagaggctgttgtgggtgcgaaacatcatcttgtggatgtccttcgacctcacgcgcacctaatggtactcgaggcacaagtcaagcttggagaagaactgggtgtcatggagctcgtcgacgaccgaactcgggaatgtgtccttcactatgagggcattcagcgcacggtagtcgacgtagaaccaccatgacccttctagcttcttgatgaggacaggggatgaaaacgccaagtcactatggcagacaattccctactcaatcatggtggtgcacttccactcaagttcatctttgtgggccatggggtaccgataccgccgcatagtcatcgatgccccatcaggcttgaggacgatgtggtggtcatgggcatgcactggaggcagtccctttgactcgacaaagacgtcatcgatggaggcaagtagcccctctaggaggagggattcatcagctgtggcggcatggaggcccagcgcagtaggcggtgccatgccacaccaacagatggtgcgcccgtcctgctagaacatcatggtgcaggcgatgagattccagacgatgggctccaacgtggccatctagtgcgtgtcgaggaccatgtcatacccagttaggggcatcatgaagaggtcgacatggaaagctatgttatcgatgaggatcggggcttgtcgaatcacaccaaggtaggagacgcgctcattattttccactgtcgtcgtaggccttcggtgcaactcaatgggtaggcccgtgcgcctagcagccaactccctgatgaaactatggatggagactgtgtcaacgagcgtcatgaagaacatggcaggcaagagaacatagagctggatggtgttgcagacgaggaccccaacaatcgtgtgcagggataaaaccggggcctccgtgtccccggtcgtggcgtcctcggcggtggcgatgtcaacgagctcgaagagggggccgcacaaaggggcagtccatactgcaggtggagtagctccttgaagcagcgccacaacggggtgccctcatccatttggacttggatgtaccacactgcgctccctccttgaggttgtagggtgccatccacactttctcctcttatatgatccactactagtggaagtacgacttgcagtggttgatgaagatgagtgagtccgacttgtcgtcgtaccgcaggaagtccatcctctagaacttcaacggctagtcttggtgatgctcaccagaaggcagcttgtggctcgacgaggaggaatagtccgatgtgagtgcagcaatcgccttggcattggccaccagtgccttggcgttggattcggcggtggcctacagggtggtgacggctttggcgagggcctcgacggtggccttgaggtcgccgttgtcacccatggtggaggaacaagatgtgacggaggacgaggctggagacggcagcatggcggctggtggtggggatgtgggggcagcggcggttggagaagtggagcgaggcggcgaggatcgacgagaccgtgataccacgttgtcaaagacgttaaaccctcgggtagcttgacctcggctacggaatttgtagccttgatccgtcttctccggtgaggttgaaccctcgccgcatgcttggtttagagagagtggtaggagattaaattggtaatatcttttaaccttaaccaaatgtctgctacgagaatatatggccatcggcctcaccaaccagagcaacatgctcctttagtttagaaactattaatagaaagctatttctaatttataactcagccaatagcggtgaccacgcctagcatgtccacgtgcgtgcccaccgcacgttccgcgcgctcggcgttgcggcgtaagtcacgggctcggcggcgcgtggaataatagtgcacccgaccatgacacaaataatctaaggtccatttggcacagctcctccagcggctttcagaagccgttttgagctgttttgtgccaaatgggataaaatagaatgactccaccaacgaagttcgtaaaaacatactctcatagagcttctggggtgtgaagaggtaaaaatagtggcttctccttgtttcacctcatcctacgtggcgttctatgagagcacattttaagaaaagagctgttttgccaaacggtttaccaaattgattccatcgatagagttattcatgaagctgaagcccaaaaaacagcttcattgatgaagtcaagccgtgccaagcgggatctaaattctccttattataatcattaatcgaacgctagatatccacatattaatttaaaacgacgagagctacaaccctgagatctatctattccaatttctgcgactttaatggttttgtaccctaactgatctagatgctcgaaaagagtattttcctttgtctatattcgagagaattaccatgcaaacagaatcgaattatacttaataagttaaactatttggcttggaatttgacattacaccacttttcaaagtttacatataagcctaccttaaattcatataaatcactattttatatttttattttgcaactcgtaacatgctcttcaacacgctctcatatgatagaattgcaacacttaagtatctctctcgtatagctgataataatacacaaatataatctaatacaactagattaggttaattattatgtgtataaattatgattattaaaatgagttcaattccaacagtccaaaccctcacgtaaaatcacataactaatcaatcttgtgacagatatatatctctggcatggacttacactatagcctaaactgatagaagtataaatcagagtatactcttacttagtgactaggaaagtaccaagaaaattccatagttatggtggaatcagtgaaggctaaaagacgaatgtacagtgagtatatctccaaattctagaatgacacaagagctgggttataccaaataattgatctccgcctttgtctaaaagtctctagtagtggacaaggctaaaacctcctagctctgcctcaagatataagatattttgaatgtattcaaggttacatataaaatttatggatctacaaaagtcaaaacaatttataacttgaaaccgttaggtaatatacatatctattgagggaagttaggtaatatatatagatgccttatagtacattcctttgaaagcaaagatcgttttgaccatgagttacagttattttttttaatgtgccaggtgttaataatcttcactacaaattagaagttacaataaatcacaataaatacttatatttatgacggagcaactactacatgcattttgcagggagtaattaataaaaaaaattactaacagttgacctactcttgtgactaaaaaggctttgacggagtggagatccacgcggcaaacggg

SEQ ID NO: 5008 - DNA, 523 bp, Sorghum bicolor
  Intron number 1 from transcript Sb09g020680.1 (locus Sb09g 020680) derived from phytozome v7.0 (chr-ID chromosome_9; pos 50085856 to 50086378)
cggcgaggaagccgatagcaaggcgtcgtcttccggtgaggtccttctcgtgtgtatccgatgccttcgaatcgctgggcctgtgggtgggttataggatgtttgggcgattcgcatcgcatgtgcagtatcccaggtcgcagccttttcgtggatccggttcgttacctgttgataggatgcgatttgtagttgaggcgccgtgcctttcgtgagactggcgagacccagatactcagatgttgatcttgctccgcacttagttgataggattttgttgattgtgaattgcgataatactgtgtttttacgttttgttaattttggtagacaaaatacattaggcttatatatgacttaagtatatgtgcaaaacatgtgatcaatccagcgtgatggccacattagaaatgctttggtttacccttccacaaatgacaaaactacactggagagcatcaactaggacgtggacctggccttgattctgctcagttgatggtttttgttaatgcagggcacg

SEQ ID NO: 5009 - DNA, 2765 bp, Sorghum bicolor
  Intron number 2 from transcript Sb04g012440.1 (locus Sb04g 012440) derived from phytozome v7.0 (chr-ID chromosome_4; pos 19812517 to 19815281)
gaatccgcccctggtacgtggtggaacagaaaaaaatagaagtttttttaagattcccaatgcaaaatctatatctatatttcgtctggagtattttcgtctggcctccctagcttcttatatggaccggtggagatctggtaaaaaattgcttccaaatctaagaatcagaacgcaacagagatggaaaaaaagaaactggagatcaggtacaatatgtagatctctttcgtgttccattaggaatcagaataaaaaatagaaatcgaattagataacctttcgtgttccaagcgtcagtgtacgaggattcgaggaagaagcgatgtcgccggcatagtacgccaggaggcagccgtcgctccagacatccgtgcggcgagtgttgctggcgcagccctcggtggctgccgtgacggcggcccggaggcacgcgtggcagtctgatgcgtcgtcgtcgccgccgccaaagccgaagccgaggccgagcgcgtgcgtgtggtcgcgcccagggtccggctgggagcgcagcgcagcgaacccctcggccgccgcggggacatggctgggcggcaggcgcgaggcgagctgacacttttgccgccgctcggtgacggtggttggtggctttggggtcttttcggcaggcgtgggagggaggggaaatggaagagcgcagcgtagcgagacggtcaggcagaaagcatatgcagatgtgttggctcagcgcgttcgtccgttggatggaatcgtggcttccgctggcagagaggaaaaaggaataaaagtttttagggttcccaatataaaatctcctttatatattacaacacattgagattaaagaaactatagaggcctaaatacaaaatatttatcctatttatttacttttcttttattatttcaatcgtctgaaaattgataaatacataaattcatagaaaaatctaaaaattacaaaataaattttgttcagctctacatatgtagatccatgcagtgaacaaaaaatatcacaaattttattattttttttgttggagatgtttgcctatgctttttagtgtaaaattgatcggctgaaattgataaatacgtagtaattcatagaaaaatctaaaaattacaaaataaattttgttcagctccacatatgtagatccatgcagtaaacaaaaaatatcacaaattttagtatatttttttattggagatgcttgcctatgtttttagtgtaaaattgaaattgtagttatcttgctccaattattatgaaaattttatggtagtttatttaatgtgatgcttgatttgtggtaaaagttttagcaccatttctgcatatctcactattttactaaattacctaaatttatgcttgaggatgcttacactacctttgcacaatgtgttgttatgtcatatgaacacttcattagcgcatgtatacaaagttagcaacaaacttctcatgttttaatataatactaaggtatattaagaggtaatattagagtaagataaggtttgactaatttctatttttattattaaataaatatatctccaagctacatattattgtaaatattaactatctataataccatagatgtcatggttatcaataaaatagtggacattaaattttataaaaaggataaatataaatagatatgtaacattatgtcatcagtttctatgaccatttaatatttttctcccgttgcaacgcacgggcatatttgctagtaatactaaatatgtaacattatattcatcataaaacataattttgtatataatgtacttatagaataaatctcccttggtcctagaacaataaccatatttgatgaacaagataaagtcatacaaattatactttgacccttaatttttctcataatatgtcttcatttactaaagagtaaaatcgaacctattgatccaaatattttgatcagaaacatattgaacacaaatgtattgattcaatttttgtgtgctgagcttctacataatttgactagttattggtcagaaccagtaaattttttccctgtacaaagtatgtttttcattgccggacaaagggagtaatccatcaaataatattattgtgttatttttgtggtaaactgaaaatcaaattagtcatggattttaccggattatttcactggtggtaccacggagtgatctattgttatcaatcaggttcatattatatacatgtcttttattagtagaatgcttagatacataaaacagaggccatatgcatttgttttgaacaaagcatttacattcgttttaaaatttctttaatgcaatatcttaaataattatctagcttatacatttaaactactctaaactcttaaatttgcgccttcaattccaagatagcaatcgttaatgggatggttatatatatatatatatatatatatatatatatatatatatatatatatatatatatatatatatatatatatatctttcatgatttatgagttttcatatgtacggtgcaaactcactacgtggggatttaaagcatcgtttcattgttttcccatttagactgggttaaataaatttagttttggatcttatttgttgtttcaaaatgttttgtatagtaggtagattacaattttgtgctgtctagcttttatctctttcagtatcaactaatttatgtttttaatatgcaaaacgaataactgatttaattaattatacatgcagag

SEQ ID NO: 5010 - DNA, 3273 bp, Sorghum bicolor
  Intron number 1 from transcript Sb01g013770.1 (locus Sb01g 013770) derived from phytozome v7.0 (chr-ID chromosome_1; pos 12832517 to 12835789)
gtggcaggagggaagcgtgtcatcgtcgaggcctggtgagtgccttcgtgtgtactttcaggatatgcggtgatttggctgctaagagagagaagggatgattttggggggacacgggaaaagatgggatttaggttattttgttctcatttgatttcccttattgttgtttttttttctgccggaggaacaacgatatggtcttttagcaaggaaaagcgggtgaataaatagtgataaacacaaattggaaggagtagacaatatgtggtgtgggcttgtttttctttgcagttgtgaggtgtcgttactgattaatgctatataaggcttgtttagatcaaaaagtttttagattttgacacactgtagcactttcgtttttatttgacaaacattgtctaatcatagagtaactagacttaaaagattcgtctcgcgatttgcactgtgcaattattttttgttttcatatatatttaatgctctatgcatatgccgcaagattcaatgtgatgggaatcttgaaaagattttggtttttggggtgaactaaacaaggcctaagttggaatacacattctttacattgacaaacaatatgaggaagtaagttgtcctgtatactttttattgttttcagaggaacaacaaatgtacttaattttttttaaatagttttaaagatgaagaatgtgtgcaaccctatccattgcaggctatgcaatgtcacctatccaaacacattttttatcctcatgtctgcaggctattaaaatcatgtctttttttttggggacaatctcactttgtaatagctagtccatagtcacataaaacaggttcactaccatctacattctaatctcactttgtaatagctagtctggttctggtgttatctacaatctcatcttaagaattaattttacaatccttaggtttattgaatccctagctaggatctgaccttgatatggtccttgaaatatgtttgcccaatgatcggtgatgtcgctgatacttcccatggagctgatcatgagatggctctggataccagatgtaacatgcctgatgatccccgacggctgccggatcgccggcgaggacgatcgcgaggttggggcggcggcggcatgctgaggggctgtctggctggggctggtggcagcctggccttgatggccgccggctggctggggtggtgacgcccaggctagggctgctggtggcggctgagaagagagggagggagcggcgccagggaggcaggagcaagagagaggggacaagggataaacccaaaacttttcttagtttctcattaagtgtctccctcatatacagtggcggagccaggagttatatatagggggggccaatcaaaaaaatctaacttgtcaaaactaaacataaccggtgaccgcctagcttaattcatgacttgacatagttgctcacattttctatatgtattttaggatcaaatatgttattcttccggtggtaaacgataaatccttaataaaaagatgtttgagatgatttcgtaaatcaacttgagagatgcgtctcaatttttctaaggtgcttcatagtattatctagttatggtttgtattccctccatcccaaattataaatcattctaagaacttttgagaatcaaagtagaaagaatcgcaaagatttatgtcatcaaattaattaatgaataacctagcggtacttatttgatatcataaatattattatcttatcatataaatttggtcacatttaagatgcttggactctctaaaatttttagaatgacttataatttaaaatggagggagtacaattttattatctagagaatactaataagtatatataagaaaagttattatatttctcaaaaatcataaatttatactagtaatgacacatgttagggggggccatggcccctgccagcccccccttggctccaccactgctcatatatataagggggtttacaatcactaatgggcctggccctttaacttaaccatctattatgataacttggcctattgtccttaactagccactatctgtaggtttggcccttctcctagtatatgttttgccgatcattacaacatcatttctgaaatgcatggtgaatttgaaacagtaatgtatattggagtaaattgggtctgcttttagattctatgatgatttgatctagtcatagtattttcattctgttatgtcaaccttgttatcctgttttcccatgatatatatatagttcaccaatttcagtagatagtttctatttggaacaaaggaaatggggttccatttctttttctgtagaacagaagattgaaggatcattctattcactgctgggaacctggagtaggtttaatgtagggttactcttttatgtaggagtttttttgttagtggacaaaattgggaaaatatgtacttttttcaaattggaaaagggtgtggtggttatcaaacttcttgttttcctcttctgtatattgtcacagtttcccctgctgtgtggataataaaacaaaaaaaagttggtagtgtttctttctcctgtggtcttgcatgtcagcaagtttaatattgtcaaatagagttttttattagcattaaactttgcaacaaatctgggtgaagttaagcattatggatctttgtttaaaaaggggaagttaggcagtgcctagttgctaggcagagtaataccactttgttgacacctagcattttctctatgtatttccctgttctctctgttattttgctctcatctctgaatcccccctccacccaccacacacacacacacaaacacacacacgtcttcatttgacatgcaaaaagtacaatcaagaaggcttgccttgtcacttagcgtcgtctttattgcctgtctagtgcctagcaccttgtgtaacattgtttttgaggtcacatgtcagcaaattttgtctcggggacaacacattgcaaggaatagttgccttcactacttgaaggcttccatttgtttcatcgttcttaatatatttattcctcggggacaacacattgcaaggaatagttgccttcattacttgaaggcttccatttgtttcatcgttcttaatatatttattcctgtcaatgcactttatttggagatactgagctccaactttttcttatagttcttctttctgctattttatagcactcagtgcagacagtttaagatccgagctcaga

SEQ ID NO: 5011 - DNA, 3275 bp, Sorghum bicolor
  Intron number 6 from transcript Sb06g016960.1 (locus Sb06g 016960) derived from phytozome v7.0 (chr-ID chromosome_6; pos 46077954 to 46081228)
cggaggtgctctcccgccgggaatacgacggcaaggtcagtcactcacccccctcgtcagattctcttctctgcccctgagactgtgagacgcggcaaagtgggccccactgtcgcagtgacgatcctgtctcgcttgtcgtgagcctgcgtacgagcacgtgccggccccttggagtccacgtaacgtaacgcgggtctcaatgcctcccgtcccccgagtgtccgtccgtgcaccaggtctataggcgagcgcaccagtgtcagcatgtgggcccatcgcatgaatgcaaagatatggttgccaagtctatagaaaaattatagatgtagtataaatattatagattcttaatttaatatatctcaatagcacaactatctaatgtcataaatattatttttcaatagattcatgtcaaattttaaatagtttaaatttgaataatgagaaagctagaattaggccttgtttagttctaaaaaaatttataattttttttagattctccgttgcatcgaatctttagacgtatgatgaaacattaaatatagacgaaaataaaaactaattacacagtgtaatttgcgagatgaatcttttgaacttagttaatctatgtttggataatatttatcaaacacaaacaaaaattgtctattttaaaaaaaatttggaactaatcaaggccttactggagttagtgcatgcctatagaccgggctcacccttctgcaaaacaggaaacgttttagggtccataggcctgtgggccccgggccccagagatctgtgggctctggcggattatgggatttgggatttgtccgggattgagatttgcttgcccgtggccgggcagacagagcctcctgccaccgagcagtggggcccagggagcatcgtgattcgggacctcgcagcggcagcgcgcacgccgtcgccgtgtgattcggcttcaggtacgcaggcggcaagctgcatgcagtgctagctctgtgctctggccgggctcgggacgaacagggtgtgctgtgcaatggggcccggagaccatgctgactctcacatagtgtgagtgtcgtcagtgtcactagctcctgttgccgctgctcctgtagaggctgctgttagattagatgcctagactcccagctaatgcgatctggtactggcggaattaggagtagtggggtagtgcccgagtggtttgagttgaaaaaaaaaactcattctgaaaaagcataaaagagaccatgcaaggatatgtatgttccttcaatccttcctttgtgaagcgatttggacattcacattgttcacatgtcatgcttgatggcgatgcaggctccacctgcaagctacacacaactgaaggtgggcgaaaggtttaggttcatggaattcggaccagtttagcagtcaagattgtagtctgtacgattctgcttgctttattaaattgtggcctggaagaaagttagctcggctgaagaaaaagtgatattctgtagatccagatatattgttcataagtgctacttgattcgagtcagttttctttttaatagcaatttgagtgaggttgaagatcagtgaatggctaggagcaaagtgccattttgtaaataggagcatgcaaccttcagaagaacttttttttttttttacttttctatcattaggaatttgagaaaggaacatacatgaaaatattaggtgaatccatccttgtgacaagctggttactttatgtccttttcatagccattttaccatcatggttttaactgattgatgttttttttttttgaaagtaactgattgatgttagaggccctcaagtgcagtcattttcaagcagtcatgttagactgaaccgctatttggcctcttgtggtcctttgaagctattttctactctccctttttcttttttctcattgtcagctatcgctaaacagtggttgtattttgttccattgctatccaaccaaccatgctaatctattattctgtttcggtttctcctttccagcactgcaaaattggttgcatttgcttgtcagaaacagtaagatgcctttgagactataggtagctcattgtttttttggtttggttgatttcgagaacatcccttcaagactatgcaaagaccatagtggcattgatctgtccaaccatacgtgcccactcctatttcataaagttctctgtctgctttcaccttgaaagattgtattcacagtctttatttctccaagtatacctaattttatgctgagtgaatttgacttcgctgcaaagttcttggatcagcagtttcagtttgataactcatttatatgagttaaaaacaacatcagttgtttatattgccctaaactccttaaaaacaacctcatttgtgcggggtcaaaggcgagcaactaccaaactataatattctctaatgcggtaacaccatattttatcctcaacatatcaccattagagtaataaaccctcaatttaaaacttttacatagattccttatatcactgcttacttatctttgatttggaagttgttgcttgtttatttagctgggtacctgggttgataccagcgacgaagccagcagtggggctaggggggctccagccccccctaccgctgctggcacagtggaatttttagtgctctccttctgattttagacataaatttataagatagggtgagctgaacactttattttttagatatattttgtgaatttcatcattaatctatatttacgaggagtaatagtagagttaagttgatgtagaacttttgttcagcccctcctaaatttttttctagcttcgtccctggttgatacaggtcaaatgttcacccgagttgtattgttttctctatgaaagctcatagcgtacattttagaagtttgctacaaatgtaacatagctgaagtcttgcctactatgaagaccacttgaatgatgtatggcatcttttagcgagccaactacatacaccaaatactaacagtagaaattcagtctcagaacatcccacacgatgtccagaattccaggcatgtgtggcccaacagaatgtggagcctttctaaaacttgtatcgatgatcagaactgcatcttaatatcctattggcagtaaatgttctttagttcaaactttaccgattcgtcattgcctttatatttgtttgcttattttgccttaacatatttgcaacatctgattgatggttcagactgccg

SEQ ID NO: 5012 - DNA, 9043 bp, Sorghum bicolor
  Intron number 1 from transcript Sb01g016396.1 (locus Sb01g 016396) derived from phytozome v7.0 (chr-ID chromosome_1; pos 16440989 to 16450031 reverse strand)
taggaggcggccagagcggaggcgtgataggaaacggttgcattgaattgaagttttgtactagtagacattatccatagtaaatatgttctaaaagaaaatccaaagtaaatatatgcagtatcctgatatttagttgggccttgtttagttcacccaaaaatcaaaaacttttcaagattgttcgtcacatcgaatcttgtagcacatgtatgaagcactaaatatagatgaaaatagaaactaattgcatagtttacctgtaaatcgcgagatgaatcttttaagcctagttactccatgattggacaatgtttgtcaagtaaaaacgaaagtgctatagggggtgtttgggactgctccacaaactccaccatggagagctccacaaaaaactggagtttgtggagtacccctttaggtgctctcacaactccaccttttttcttgaactcagtgcgtggagctgaaaccgtttggctaaaaaaacgtagagcggagctgaaaaacgtggagcagagcagtcccaaacacccccatagtcccgaaaaccaaaatatttttggaactaaacaaggccttgctctatgtataaacaaattgtatttagactccatatagtgctagtaattatctattttggatccaaatagatatagataatagattagttgattgttagctttgacctatctcactatctagattaaattgtataataaattattagggagctaactattatagatagtgaaaataaaatgtatacttggttctttatatttttgttgcatgtagttatttttatgttttactttctgatcttatatgtcttgtagaaatataaagttgagaatattttgtttttatgtgtgcttcggcttacgtaacctatatgttatttacttatctgtatacaaataacactaaacataaataaatcacattgtagaaacataaatacaagtttattcgggcaatcaatcaaactaacttatgcttgactagaatgaatgttggtgtaggatctagggatgacaaaggatccgacaaagacagatattactcatattatatttgtctttataatatctgttgggatttatattggaatacggatagtgtcaactactcctatgtcaaataagatatgattgaacatcaacatcataaatatatgatttgaatattcgaatacagatatgtattggatgttcaatatccgaatttggatacagacattattcccctctaaatgaatttggtcttaaatacagcaaatatccgcattgttttcatcactagtaggatctattgtaaatttataatgattattaacattaaaagaataaagaataattccatctgtttataaaaatttatgtttctacttttatctaatatgctaatcatgagagatgaaaaaaaaggaatagatgttgatcacaagaaacagagagaaaaaagatcttaaccgtagtaacttttttataaaccgtagcaattttttctttctgataaaaccgctagcaacttcttgtactcctatccaactgctactattacaagttctgtatctcttctctctccacacggtttcttcttttcttttttttcttgcccacacggtttcttcttcttctttctcttttttttttccttgccacaaccacgatattactactcacttcgctgaacccgttctacggagtaccactgcttggttcgaaactaacaaatatttttactgccccatatccgaatattaatagtgaaatgcaaatttaaatgtgcctcaatcacagctagatcaatttatctctgtactttttttaaatctaagatagtaaaattatctctgtaccgagaacgacaattgctgccttccaggaaaatagccaggcgcatctccactccaagttgatgaaatccaaccgcataggagtggagtacattatctattacttaaaaatagtatagttaaattttaatacaaatataaacaaaatgtaagcactcgcattaagttgtgagtcaagttaatgcaacacttttaagatataataacatacaataatgtgaacttcaactcagatatgctgcattgacggattccactcccttcatctcaaattgtaagttattccaagaatcttggaaagtcaaaatatttcaagtttgatcaaatttatatagtcggataataacatttatgatatcaactaagtattattaggttattcattaattatattttcataatactatctatttgatgccataaaactttgtatttttttctataattttggttaaacatgagatgttttgactctccaagattcttagaatgacttacaatttgagatggaaagagtactatataatagcactcgcattaagtttttaccatataacaacttataaacagatagcataacatccacacggttcacgagcactagtgttgcattgaaggattctactcgggggaaaatatagaagaaatagagcagaagggtgcttgggcgacccatgaaatggaagtggtattttggaatgcataaaagagtggcacatcttgtacattaacattcgggacatgtctggatcggggttgagataggaaaagggaaatagattggaataaaaagatacatatgttagtactcaatccatttcaaattataagatgttttgatttttctagattcattatttttctccgcacttagatatacactatgtctagataaattgtgaaaaccatggatgtcatgccacgaacccatccaattccttcctatacttataatttggagcgaatggactatttatttatgtgtcatatctttattttcaatttttcaaatatgagatcaaatctatccacaatcgtaccccttatttatctatccccaccaccatctcccaaacaccatcttcatttcctatttctcaaatatgggaccaaatctatcccataattgcaacctttatttccctatcccaaccaccatttcccatttcccaaacaccatcttcattttctatttctcaaaaatgggaccaaatctatcacataattgcaccccttgtttccctgtcccaaccaccatttcccatttcctaaacaccagctatcatttataactgcaatgtcaatcttataatgttaatttacgtgagtactaaagattatatgaccaagttattatttaatgatgtgtatatatgaacatcaaatgtatttcaaattttttcttttttatgtacaacatttgattaaaatcagttttgtttctttttaggccttgtttacttctacctaaaaatccaaaattttttaagattctccgttatatcgaatctttagacgcatgtatagagtattaaatatagacgaaaatgaaaactaattgcacagtttgatcaaaatttatgagacgaatcttttgagcctagttagtctataattagacaataattaccacaaacaaacgaaagtgttacagtaataaaaaaaagtttcacgaggaactaaacacgggcttaggccagtctcaatgcatagtttcataacacagttaccaagactataaactaagtaaccgagccacaagagtttcatggggatgaaactcttttctcatctgatgaaacttcttcatttaatgattctgtcaagtcagcaattttacttatgtggcatcttatttaatgtgtatgacactctcatgaaacatgtattgatcttaggacgaggaagcagacaagcagtataggaaggaattggatgggttcgtggcatgacatccatggttttgacttttgactgtggcgggtgcgggcgtggacgggtagtggcgttacgcagtgcggtcatgcgcgctctgcagcggcccagcggctttcgcggcggtaaaatcttttgcttgctcgcctggttttggttttgctgccatcatgggggtgcgccgtggtcagcggcattcacacacggcacggcaggaacatgacagagactagcagcagcctaggcctaggcctagcctcctcctcctccagcccttgcaaaatggatgggcgggcggttgggctccggcgcgtgccgagcctcctctcctgacctcccctggtgtccaccggaccaccatgaccacagccatgcatttcgttgtcacgtccccctcctcttgcaacaatcggaaggatcggaggcagtatacatgacacgcccatcgattccttagctttgctgtatgaaattaagctgtatggctaaacacaccgttagcatgtaattttagtctgctcccaaaaaaaaagcatgtaattttagtcgtcacacacatggccttgtttagttcgtgaaggaaaaaaattcgcgacactgtagcactttcgtttgtttgtggtaattattgtccaaccatggattaactaggctcaaaagattcgtctcgtcaatttcgaccaaactgtgcaattagtttttattttcatctacatctaatactccatgcatgtgtctaaagattcgatgtgacgaggaatcttgaaaaattttagatttttggatggaagtaaacaagacctaaaatacttattaacgcttcatgctaaccgttagtatgtttgggtatttttttaaaaaatgtttcatggaaatagctctgctgtatgaagcatcatcatcatgataaatgtttgttataggggccttgtttagttcttactaaaaataaaaaaaaaattaaaattctctatcatatcgaatcttacaccactaaacaatgccagagtttgaaataagtacactcggccccgggcccggacccgtgaacgtggtacggtgatgagatgtcagaggccgcgccgccaagcgcagctctgtttttgctgctggacatgaaaatcttttgctcgggctttgtttagttctgaaaaaatttcgaatttcggtattatagtatttttgtttttatttgataaatattatttaattatagactaaataggtttaaaagattcatctcgtaatttacaagtaaactatataattagattttgttttcgtctatatataatgtttcatgtatgtgttttaaaatttgatgtgataagaaatcttgaaaagtttttggattttgtttgaactaaacaataccttgctcgcttggtttgctgtggaccgtggtcagcggcattcagcaggagcagggcggtggattggacgtccacggcagcaacatgactgtcagactagccgcgcgtagctgctttgatgtagatagtttgcactaaaatgttttagatttttaatgtaactaaataatgccggaatgagaaatatcaagataagctaaaatagcattgttcgctgatttgttatgaaataaaatatactgataaaccaagtgaacaatagtgctaaagataaatctaggaggagcttcattactacaataaaattcattcacgaagtcgtaaagaaaaaaaaaatcttactgtgagagaaaatactataatataacggataaaccaggcgaataagttaagcgaccgatagcgccaaagatagagcttcatcgctacaataaactttattcacgaaggcaggcagttcaagtggccttgtttttcctattttttttttgttttgggtgctgtaatatttttattttttatttaataattattgtctaattataaactaattaagcttaaaagatttatcttataatttataaacaacctatacaattaatttttatttttgtttatatttaatgtttcatacatgtatcacaagattcaatgcgacgagaaattttaaaaacttttttagtgttttggtatgaactaaacaaggccaaaaagaaaaagtgtagggccttgtttagttccaaaaatttttgggaaatcgatactgtagcactttcgtttgtatttgacaaatattgtccaatcatagactaactagccttaaaagattcgtctcgtcaattccgaccaaattatgcaattagtttttattttcgtttatatttaatacttcatacatgcgtctaaagattcgatgtgacgaggaatctgaaaattttacaaaattttttagacaaagcctaggagagaggcacacttccccttcccagggctagtttcgtaattggatcatgtagacagctttgttccgctgcttgcggcctgtttggtgcggtgcggtagggaaaaaaaaagaacgaagccggcgtcgccgacccgtaattagtgcgttatatagggttttggcgtcttttcctctccacgtcctgcagcgcgctcgtgctctcgctaagccccggcctcctcccgccgccgctgtagctatggtggggtgcgagggtgcggccgcggggcacgaaggcggggaggccggggcgtcgccgaggaggggcgaggaggacggcgacgagctcggggatgcgagtgcggagtcgtggagcacgaggtcgatgggggccacgccgagcttctccgcggcgcgcgcgacggcaagtaaaccccatcctacaggcacccctccggtccgcgcgatcggcccgtcgtcggcgtccgcaccggccgcgattacagcgcacaacgcggtccacaaggtgcggaaacctagcccgctgcgcgtcgttcagagtgtggtgtttttttttttttgactaatttgggatgttttcggtgtccgtaggacgaactgcagctgccgaactttgtggataaggaggagtacaggcagactatgacagacatccaaaaaaaaatggatgtattgaaaaactttatgaagcaggccaacaaggaggggcaggccaacaaggaggggcaggacctcaccggcaaggtttgtttctcgccggtttagtgattgggtagctatgtttggattattgactgggtgttatgtttggattatttactgggtgattgtttgtcccctctaattctgtgtgattctagcgtacttgtgcttgagcagtgcttttttgaggttttgggttttggtagggggcttttggagtccctctagtctctgctaatgctaatttctgtttacaagttccaacggttctaattcgatcggttcagagcacacgtcagttgcttccagatcgcctaagtttctctgccatactataagttggctgatggccaaaatttggttaccgaaacttaattttggcagccatctggttggctacgccaacatctcacaattgacattgccaaatttatggcaaacattcttgccttagttttgttattttttcttgccaaatctttggtatggcaatttttggtagctaaccaaacagagtcagttttttcccagctgcttgcttgttttaattccttaactgattcggaagcaatgcctcgaaggaggggttctttactaggttgtatcgtcatgttgaattcgctctaaacaagagcggtgcttctcctttttttttggttcagatttctttggttttgaacgttgctaacccatgaacttatacatggtggtggtgtttttgtacttagcttgtctggttaatttaggggtttctcaaaactgggagccggtaaaacgtctggattcctgttgttttgaagggtcctttttgcatttagatttcatgaggctgcaatgaatttatgtaggtccaaatgagactacggtggtttcaaatttttattaggaaaaatagtacgtttggccacaaatcatttctccaagagggagcctctaaaaattgtcaattaattgatgatgcactccggttcacttttaatttatccttccgtcacgcttaatttttgtgggttccaggagcaggttgtgtcagtagttggtttccattcttgctgctgcttgcacgtgaaatggcatcccatttatgtcctaatatgccctgaagaacaacacaactttttgtttgaatttaaatttgatagaacctgtgcccatgtctctaaccgcatgcattttgacttcttcaggttttgaaccaagcagtacatatttctgcattagtttttcgatcacaaacttttctcagagtttctgattggctattgccattctcatagttcaaatcatagtgtacctgtgggaaccatatgagcttattaagcctttcctagtgtgcactagtaatatcattttcttctatgtaccacagagtatatggttttcttgtaattaggatgactgatatgcacagcagcagtacttggtttgttctagaaattttcctgccttatttacttgaaaagggcttgtgctgtttgcttccaattagattactcttgtttgtgttcttctatacgcttttgtatatgcaatcagttatattttttagagttcaaggtcagtatcaattgcaaaaggaataatggacaagcattctacagttcattgtatcacaaatgatcgcatcctagaatttctttttgttgcttgttctcatgttaaattgcattctagatgtatgatgctattagctgcagatgcataatgctccagatcgttgaaataacatttatattacaggaatcactgcattagttcactattatatgttcctggagattatttaatagtatatatgtctgttttaaaaaaataagttccttgtttgttgctcaatctgtgtttcgttgttgaaattcagattctgttatatcggtgaacattgtggtccattttttttttcagtggcctctagtattctattgttctatgagtatatgggtctttccttctttcaacatgtatctggtgtgacatcataatatagatcatttttttgtatgtagattggggaaggaggcacaggaggcgctgatgtggtgcagccaaaggttaactgcccacactacactgacaaggatgcttcccgcttgaagaccaattggacggatatatggtctttcaaaggtgctaccttgtgtgagtcttgccaaaaagatgcccgcacggaaaggaagcagaccgcgaagaagaaaaagagtcgcgcaa

SEQ ID NO: 5013 - DNA, 2682 bp, Sorghum bicolor
  Intron number 7 from transcript Sb10g013060.1 (locus Sb10g 013060) derived from phytozome v7.0 (chr-ID chromosome_10; pos 20421828 to 20424509 reverse strand)
ttgttgagcatccatttgcagaaatagaccaaaaggtactcatatcttttatttgatatttggtcctgcaactttagttagatgctttgtttcattctttttggaaatcctgactctggttacagtccagatgctgagtcaaaatgtttgcattttggatctgcgtgcctgcccagatgtttctccgtccatgctcatagagctaatggctggtgaaaacagcatcatcagcagagtttttggtatgatctgttagtatttatctgtgtttttcagttacatgcaagtaattttctgtaacttaacttgcaacagaaatagtaagaacagaagcacctcctttttagtatttagattgaccattatagtgattagaaaatagaaacaacttattttggtttcttctagtggcgtttttcaagttatgttaatatgtttcacttttctgtgcacatgtggaggtataagcttttttgtcctctattcaaatgaatggggcagtactgagaactgttcttaaatacttagtattttatgttgcactggtttggcctcagtgttcagctgattgatttgacattaaatgtcaaactcatacctttttctgcatatacttgaggctgccatgctagctatttttagttagttttagtcattcaattgaaaaaatatcttctggaataaaatggttttatctgacttgacatgtatgaacttaccaaggagtacctgatctgttgctcttagtaggccttgccctgttctgacagctcgtgactatggtttacaatcctggcaatgtcaatgacatatgacaatattagttatgtctgttttaacttgccatctttattctctctacaatcatggaatgttacaggaaatactagacgccttcaaccagacaaacctgtaactaaagcgcaagcagctgctgcactaaccagtggtcgaatgaaggaagcaattcaggaagagttaaatagacttgaagcagaaaaccaagcccatctttctgttatagctgaaatattggaagagttaattagtaggggagatatacaacaacaatgggaggaaatgatgaaaaaggagcaagaacgggctcttaaagttgacaataatcttcaacatgtgttgcatgagcttgcaaatgagaggacagacagagaagaggaactagcagacttgttgaaagaaagagcagatttagaacgccagaatcaggaacttataaatttaaggtcagaagttgatggaatgtatgatagattagcaactgagaatgaagaggtcatggctgatcagcaaactttggaaaaccagttgtccgacatgaccagcaagcatcaaactgtcaatgaagctaaatcatatcttgaagctgagaaggaagctcttacaatgctaaggtatgtattctatacaaacttactgttttggtcatcacagaaaacaacttcaatgtggttgcatcaatttatgtgcgtcctaggaaaaatgtgtgaatcatcggtcgttgtggacacaccaatttatgtgcgtccatgattgtctggtttgtaaattgtaacttctttgctggctgcattgaaaagccacatggaggaaagccaagctatagctatattgatttggctatgttctttttattgggttggctagctggtcggaggttaaattataattggaggcctgacaatttatatttgaaatttgtggattctgattctttgaagttcaaatttatttcacaattcgaaaaatgcagaaaatccaataccatgaaacaaaaagctgatttttttgttctttcagtaaatttctataagttgaactatgaattatgctatttggttatgtaatttagttgttgaaagttaaaattggaattcctgtatttctattattcatagtttcatgtttctttttctgaatttcagatgttacaatttttcagttttcgaaaacatcaaatacaatttttttatttttattttttgtttattttttgcatatttcaaaacttcagaattaattccaatttacattgaaaccaaatcatgcttttatgctggtaaatttgctcatctgcatttgtggtaattaaagcaaacaggggcctcctgatgcaattttaatgcgaaaaataatatacttagcatcaacagcagtcttcttgaagaaattatcaagatggtcaatgacttatacagttacacgtgttgcttcagtgtcagcactatgctattgatattctctaaatgcgatgtcagtgctgcataccaactatagagcattcatttatttagccttggtagtttggggcatttataagttcaaacacacttaggccgtgtttagttcctgaaggtaaaaaatttcgcgacactagcattttcatttgtttgtggtaattattgtctaatcatggactaactagactcaaaagattgcaattagtttttattttcgtctatatttaatactccatgcatgcgtctaaagattcgatgtgacggggaatcttgaaaaattttggtttttgggatggaaataaacaaggccttagttgttgtactggtactctggtactcttggtctaaatcgaaaaggaaaaaaaaaactcttgtggaactgatattacacatctaccggtttatttcaggacttgggtggaag

SEQ ID NO: 5014 - DNA, 725 bp, Sorghum bicolor
  Intron number 3 from transcript Sb04g007610.1 (locus Sb04g 007610) derived from phytozome v7.0 (chr-ID chromosome_4; pos 7960341 to 7961065)
agcctgctttcaaggtttactgctttcatctctttctcgatctcttttgctcttctaggctcaaatatgtttacttttatttgcatttcatgaagaaataaaaccctgcatgaggtttatggagaggggcacaattcaagcttcaccactttgttttatacctactcccttctattctttgatactatcttatgtttgcttttgcttccattgcatgaggtaagatgcatatagagttagagtcttgcatggtaatcatgaacaaattcaaattcaattgatgctagtgttaaggataaaacagaggttctattctctagatggacatatctgtgctcatgcagattgagattctttgtagttgtcccttcatagattctatagatgatctcaattcatttaatctgatttgatgcttaggattattgtatgatctcattcattttaccctgatttcatggttaggatttaacctcaccggtttaaccggcatttaaaatgcgtaattcgcacataaaaaacattaatggctttatattacatggcaaacaataacctgttcgcttatctaaagagtcattgttgaaagtactgttcgctgatttattatgagagaaaaacattgctgattgacagaaaaagtacggcttataaatattttatgtttgacctttccttctctccctgcaggctgtgttcaaaattactcttgaagttccttctga

SEQ ID NO: 5015 - DNA, 11596 bp, Sorghum bicolor
  Intron number 2 from transcript Sb06g006510.1 (locus Sb06g 006510) derived from phytozome v7.0 (chr-ID chromosome_6; pos 15951117 to 15962712 reverse strand)
caccaaagagatactgtgacttaacaggttttgaggtaagtttacttcaatttagttccttattttgggcttgcatatctgttatggaatggctatggatagatggattagcagatagaccccggatagtcgcccttcctcgggaactatcttaggatcttcttgcttgactctaactgatacatgatggtctcttttatagagacaacttacttgacccctgtaacgcccccttggccctcgcccgtcgccggcgatggcgtgagatgtggaacagcaaagcacaaggagaattttcgcgacgaggacgccggccgggcaaacccccgattattaccgaaatacgcctttcggctacacaaacgtaaacttaaacaacaagtatacaatacgcctctcggtagatgatgccttgttggcacggtggcttcctgtagcccgtcacgctgttaccgccgtgacacctccccctccttgagaagcagcttgtccccacgctggcgcatctgggaatcggctctacacgacagtgtaatcttcccatgtagtgatattgttggataaccctgtccatgtgaccctcacctggagtatggcagcattgcctttcttcacaagacgatgctccacaatctcctttgggactactgatggtgcctgcaagtcagtagtgactggccttgtgactggcagcttgtcaaatactggagcatagttggctgtgaatggtttcagttgggaggtatggaagaccttatggatttgagatccagggggtaattgcaatttgtatgccactgagcccactttctccagaacctgatagggaccaaagtacttgaaggacaatttggggtaaggacgatttgcaactgaggactgtgtatacggttgtagctttagcagcaccatgtcaccaactgcaaatgtatggtctgttctctttctgtcagcatactgcttcattctgttttgagctcgagttttatgatgcttgagagctgccaaatgtagttctctgttggtgatcataagtctgacatcttcaggtgtgtcatcaggaacagcacccaaattggcctcacatccatatagtgctttaaatggagaacaaccaatggatgaatggtgtgaagagttgtaccatagttcagccaaaggaagccagtccttccaagtagttggggcatcttgtagagagcacctcaggtacatttccaagcattggttaaccctttcagtctgcccatctgactgtgggtgatatgccgtggtcagattcagatcaatcttatatgcagtgaacagggccttccagaagttactgacaaagatagtgtctctattagagaccacagaatttggcagtccatggagcttgatgatgttatccaagaataactatgctatggtggttgcagtgtatgggtgtctcactgggataaagtgagcatacttggtcaatctgtccaccacaactaatatgtcactgaagcctttggattttggcagtccttcaataaagtccatggacagatctctccagatatcctgaggtatgggtaggggattgagcagccccataggatgagtatgactatgctttgcttgctggcatatgttgcattgcttgatgtaattctccacattcattttcatacctttctaggcaaaaaaatgcttgagtctttgatatgtaacagcaatgccagagtggccgccaatagcactggagtgactgaaggatatcaatcttgtcaatcttgtctgcagagcagagttgtggccaatccaaatctttcctttgaaccatatgagtcttttctccaaagaaaagccttgttcattaggactagctagtgctaattgttgcaggagttgttgagcctgtgtgtcagtagcatatgaattcaaaacttcctggacccaagcaggttggaccactgagactgcttgcaagggaagaagatgggcaactctggaaagagcatcagcagctaggttttcctttcctttgcgatcgatgattttgaagttgaggcccataagccttgccatggctttcttctgcatttaagagtgaagattttgctcatttagatatgctagagacttatggtcagtgagaatggtgaactcattcctttagtgtctccatttctccactgccataatcagggctaggaattctttctcatatatagaaatgttcttgtttcttccagacagtgccttgctcagataggctactggtttaccatgttgcattaggacagctcccactccatcttggcaagcatctgtctctatgacaaatggttcttgaaagttgggcaaagctagtactggtgtttgtgtcattgccatcttgactttgtcaaatgaagaccactggaaagcctttttgttgagcaaggagttgagtggttttgtgattaagccataccctttgataaatctcctgtagtatccagtcaggcccaggaaacctctcagttctgtgacagatgttggtactggccatttttgcatattttgtatcttgctaggattagtggaaacaccagtagaagatatgatatgtcccaaataagagaggctgggttgagcaaatgagcatttggattctttcagatatagttggttctgcctgagaagctcaaaaacctcctgtaaatgtaccatgtggtcatctagtgtagggctgtaaatgaggatgtcatctaaaaataccagcacattttctgagatagggtttcagaatatggttcattaggcactgaaaggtagctggggcatttgttaacccaaatggcatgactttgtactggtaatgaccctgatgggttttgaaagctgtcttatattcatctgcaggatccattctcacttgatgatacccagatttcatatccaacttggtgaagtatttggtaccagccagctcatccagaatttcttcaatgattggcattgggaatctgttcttgatggtaagggcattgagattgagttttcggtaatccacacaaagtctccaagtaccatccttctttttcactagcaatacaggggatgcaaaagggcttttgctgtgtgtgatgaacccagattgcagtaactcctgcacttgctgctcaatttcagtcttatgatgaggggaatagtgatatggcttgctaactaggatataatggtatagcatgatcatggattctgtgaggtggtaacacagtgggtgtttgaaaaatatccttgtattgcaagatgatgtgctgaatttgctcaggtactgctgcagatttgtcaacttgttggtggtgttctactaagacaaaggcccacacctcgttacccttagcaaatttatgagctttagtagctgagattgtggtaacttccttggctagggcatggagtcctttcagagtgattgatctcccatcctctgtgaaagtcatggttttttgatcccagtcaaaagtcatttgtggatgagctttgagccagtcataacccaagatggcatgataaggttgcatatccaacactatcatgttactggtcattgtatgcccctgacagtaccatttcatatttgctgccatgctgtcagtagtgatagtgttgccattggctaacttgacccttttaggttgagtagagattagtggtatgtttgtcatatctgcaaactgtttgctgacaaagctatgggagctaccactatccagtaatatcagcatcactttgtctttgactttagccctgaatttgagacatgagaggttgtcctttgtggtaatggcattgatagatagctgacaaaattgttcatgtaactcatcttctgtagctagtgcattgaggacatcatcagggagctctctttcgagatccatatcatttacagctaaagcattagcttgggccttgtttcacagccatgtgtcttggaacaaatttttctccacaactgaagcaaagaccattagcttttctgtagtctctgagttgtctgtccttccatgaaatggtagtttgctgccctgtcttcaggtcttgttttggctgattgaactgtctgtacgagcctgcaaacttgtttttgagctttgttctttctgcttgttgttgctgaatcttagctaatgcagcagctttgatgacagttggtggcatttgagattctaccataactctaatgtcatctttcagtcctcttttagatcaaaggcgtttacccaactttattagaaagcgtaacaaacaccccgatccgaaactggggtttccagttttacatgacaaagtgccaaccagaatggaaccacctctagaaagatcaacagagaaacagacgactctaaccagtttctcacacaccaactcagcgaaacttaagaactctactacaagacaactaaaacgcagcagcagtgtttgacgacattaggttcagcatatcgtctgccattggcttcatcttggacttcagcaaagggcgccaggacttgatcagcatcagcgtcttgtggatcaatgcagccggtgacgccatgactttcttgttgaagactaaatcattcctggacttccagacagaccacaaagcacctgcagatataaaaagggttaacacttgtttcttacctcgactcttttccacaatctctaaaaacagcgccgagcagcttgttggagccatttcccatcccagacattctcgcaagaaagtccataggaaaatggctaagggacattggaagagtatatgatcagacgtttcaagtttatcacaaacaaaacaattttcggggccagaccattttttctttttcagctgaactccacattgaatcctatcatgcaaagccatccaaaagaagatcttaacctttaacggtattggactattccaaatcagcatagctctggtatctttcacacctccaaacgtcagtgctttatacaaggagctcgtactatattttccagatttttccaatgcccagcgaactacatcagtcccatttgacagctgaacctcctctaacaaagctagtaattcttgacactcaacattgaaactgtcattaagttgcctcctgaatgaaatattccattgaccctgatcaaaagctctgccaacctcaatatcctgatctgaagcaattttaaacaggttatggaatctgatctttaaaggacactcacccagccagcaatcatgccaaaatcttgtttggtgccctgctctgatctcaactattctccccttttgataccattgtctcatatccagcaatgatctccagaattgggatccttttctatttttgatttggaaaatgcttttctgtcccaaatatttctttcttaacagtgaacagcacaaactgtcattccacctttctaacttatcaatccattttaccaacaagcacttgttcatcactctcacatctaaaaaacccaaacctccaaactctttaggtctactaagtgctggccacttaaccatatgatattttctcttcttacccgaaccttgccaaaagaatctagctctaatagaatcaagcatttggtaattaccctcatagagctcatatacccccatagtgtacatcgggatgctggacagggacgaatcaattagaatggatttaccacctgaggagagagaatcacattgccatgtccctaatcttttttctgtcttatcgctcacatatctcaattgagcttttgtgattttacagtcactaaccggcataccaagatactgcatagggaatgatccagttttacaccccaagatcgtcgctgcttgtcgttgctcatttaccgacaaaccgactgaaaaaatttcactcttctcaaaattgatcttcattcccgacatagcttcataacaagatagaatcagtctcacatttgttagattttcaacagagaactgtaacagtagcaccgtatcgtccgcatactgtagatgtgtaatacctccatctaataaatgtgacaccaagccttgaatcactccagcgtcactagctctagataacataactgataaagcatcagctaccagattgaaaagcaggggagataaaggatcaccctgtctcagacccttataactcctaaaaaattcgcctctctacccatttaaatctatgcacactctacctcctctaactgctttactaatccactggatccaagtatcagagaaacctttcctatgtaagacctcttccaaaaagttccagtccactttgtcatatgccttctcaaaatccaatttcaaaataactccagagctttttttggatttcaactcatgcaaaatctcttgcaaaatcacaaccccctccaaaatattcctacctaggataaaggctgtttggtaagggctaatgatcttgtcaatcacagctgtcaatctgatagtgagagtcttggtgattatcttgtatataacatttaacaagcagataggtctgaattgctttacattgatagctggcttgaccttaggaattaagataataactccataattgagcctccaaagctctaagtgaccttcatatagattatccaacatttctttaacatcctccctgatactgggccagaaggccttataaaattcgactgtgaacccatctggaccgggggcagtattattcttcatctgtttgattgtattatctagctcttccagagtgaatggtttgattaaggcttcattgtccacttgctgaatctgttgatgagcaggccaaatatccgggtccaagtgcatctgtgctacctcagctctaccaaacagagttttataatactcagtaatatgacttttcagaagatttggttctatctcttcttgaccatcaatctctagcatagtaacctgcattttcctctttctaccagtagcacacttatgaaaataattggaattagagtcaccttgtaacagccatttttccccacctctcttctgccattgaatttcctcatcagtcagaatttgttgtagagatttatctaaagaatatctctcttcccattcagcaagactaagatctctaatttcactgtaatcatctaggagattaattctggacatgatatcttgtttagctcttctctgatggctgtcctgattctgaccccagcctttaatagctcttctcaatttgctcgaagtaatatgccaatgatccagaatattatgtttgtatctggaaggccatttatctaaagcccactctctgaaaccttcctggtttaaccaatgggagctaaacctaaaataacactggcgttgtgaacaaatacctccagtatctacaatgagtgggttatgatcagaccctactctcggcgccgtgagaacagctgtcatattgaaattatcctcccaagagttagataccaggaccctgtccagaacacacatgataggtggtttctgcttgtttgaccacgtataacgactaccagtcctaatcacttctttgagctcagttgtattaatcatttcattaaaggcatccatcatttgaagatcaacatttcctgaagacttttcctctatcttccgaactaaattgaaatcaccacccagcaacacaggcaactctgaattttgaaccaaaatttgaatttcttccaagaactctaattttctgtcatcatgggctggtccatagacattaaccagtttccacacaaaaccatctgacttcattgttaaagtgcagctctggaaaaagttaccaaaaatctcttctgatgtcattgccagttctctgtccacacccagcagcaacccaccagaatgaccagtacaaggtaaccaggaccagaacatatctttttgaccagcaaatctatctaactctctctgactaaaagtacttttaatagtctcttgcagacaaacacaatcaaaggaatacttactaattaactctacttctttcagtcctcttatgtactgcttggtgaaaaacatctcatcaaagccagcatgatgcatgcttactccatactgaaagctctggaattgagttgtgtattcttctactgttgcagtctgcctaagttcaagcagttggtccatgtaagaactgtagtcttctgatccaaattgcttctccacctcatagcaaaaatgagtccagctcttgaaggaattgttctgtttaaatgcctggtaccatttgcatgcatttccgaccttggctgctgtgatccacatcccttcaggaatactgtacatgtcaaagtagtccttacagtcatctaaccgaacttttggatcattcccatagaaatcaggaaaatccatcttaggcatgatgtttttaggcagtctatggtcattatgtgtgccctgatgttggtagccctgtttgctagacctagaagcctgatgatctgtcttgagtgtcttgacatgtctagtcttttcttgtttgtgctgctctgcaaatgggttgtcaaaaccctgatctttgccaaacaacatagaatccatatcgtcctcatcaaacacagggtcagtatcaaatgttggttgacctgcatcaagaggttgcttctcaggtttccccaaggttgctctggcaatagcaattgcattggcttccacagtacgggcaatcttatgctgttcttcagtataggaatccatagcttgatctctgagatccatctgcgctttcatttggctctgtgtgttactgaggccatcaatgtgggtaaataaagcatccagacttctctctagtttcttccagcgagtattgtcgtcttcgcgactgcgagtcatcacgccaaggagcaggctggtccgtgaagaaggctcaagctgcttactgcgcctaggagccagttgtgtggcagaaaggttcagccttagcctcccctgttgaatctgcacacacgatcactgtcgcttgggaaagaggcagtcgtctcgggattttacggcaggattgctcgcacgcaagcgcgggaacaacctgacaacctgaacgttggactttcccccgccgtacaccaccgcactcgtgatcaatcgttggatacccggaattttacacgcgaacacgtgccgcgcaaccctaatccacgatcgatcggtgctagatgaagaaaaagggagtgaatttggtgtactcactccggttctcgacgccgaacccggttgccgttgccgaaccccagtcgaacacgtcgtgagcgtcgccgccgcggtcacttggtgctcgatttagcgcgtcgatgaagtggtgctgggcgcggtcgtgaggatcagcgtcgagctgcgatggtggtggtggtggtggctgcaggttttgtccctgccgcgctccagtaactagcgttggctccgagcaagaagctcgtcgccgctgccgaggaaagatcgggctctgatgccactgtaacgcccccttggccctcgcccgtcgccggcgatgacgtgagatgcgaaacatcaaagcacaaggagaattttcgcgacgaggacgccggccgggcaaacccccgtgccttggctccgaatttggttttcataatcgatgtccgtctccctgatcgggtctgattattacagaacggcctctagcccagaatacgcctttcggttacacaaatgtaaacgtaaacaacaagtatacaatacgcctctcggtagatgacgccttgttggcacggtggcttcctgtagcccgtcacgctgttgccgccgtgacaacccctaaggaatatcctaaccgaatcaatctatcttatctctttcctaacttatccctttccaaactaatcctaatcaatctaagctgatctgatctgttactgctcacgtggtattgttcacgtgctacagtactgcgtgggcccctggtctggttccagttgccataacaatatctgagaaggtcattcagtggttatattgagtatctaaaggtcaaattggaagaagaaaaaagggtcatactgtgtttccttggtacttctatactggtcacggtgtgtttacttactattagtattatatttttggtggtgctaacttttgacttgatatgtgattgtatcatccgtataggaccggttcagttcttgtgtagaatgtgtgctattagctgctggtcggtaggttagaagaaagaccaaatggtagcttaagagaagctatacctaagaaaaactggaacgccagtagtatgcaactccctctgttccaaaatgtatagtttattttagtttgccccaagttaaaatttctctaactaagacgaggttttaagaaaaatggaccatctactgtatcaaattagttttattaaattcaccatgaaatatttcttgatagagtagtttggtactgtagataactgaatagtaacatattttctgtaaacttggtcaaagttagagaaatttgaattaggaaaaactaaaatgacctacatttggaacagatgtagtcaatgctgttgccttttgaacagcggactattatgttaaagaagcttccgtgtcttttttcttttggaaatgcatactgttttcttcttttggagctgtgaagatgaagatggtgtttggagaatatggctgtcatgatactcttttgagtttgtatttctttcctcctgaaacttctgattaaggccatttcacatggtatttttttccctttcttgtccatttgtggaagccaatagaatgaaaacttctgattggaactgttaggcggttggtagcgctagactataaaccactgggtgattataggttcccagcagtgacttcacacaattaaggcacttatatctaatgtatggctagtctgttttggaacatgaaaaaaagcaagattttgtatctattgtttcttaaactggaagtgtgttatgtggctgctagggttgagggagattgattggaattgagggagtggcggctggaggcgtgaacagtacccacgggtactgttcatagggaggcggctgtgagagcgagagaggagactagggttttggacgctaggaacgccagccgcggggctctgcctacggtcggcaaaagagaagggatttccttctaatctcattataaagagaggtttacttaacccctaagcaagcgactaattaaccctaatgggctaaggcccaataggcccttactctttcgaacactacaccccacctagacatgtagctcgtcctcgagctgcaacttaacgatgacaccaacaatgactccacaagacacaaacataacacctaaaaacaagccttttacatctcggcttgttttattattctcaaccagaaattgattgggactccttaactaaattgtacctgactgctcagttttatatctgcatgacagacatgaaagaaaactgaattctagaaagaatatactctgaacaaacttatttgcattgctattttttttatcaaacttacatcacctactttgcattttagttctctttgattgtcgatggcaactaaactaaatccctcattgcaggcgccat

SEQ ID NO: 5016 - DNA, 29929 bp, Sorghum bicolor
  Intron number 12 from transcript Sb07g012920.1 (locus Sb07 g012920) derived from phytozome v7.0 (chr-ID chromosome_7; pos 26402875 to 26432803)
cattgaaccaaggcactgccagaggtaagcaaaattgtttttttttctcgaacacgcaggagagctgcgtatcattatattaatagaagaaaaggaaaagtcttacaggggctaaacccaaacagaggcaaaaccccacaaacacacacaccacacagccttaaaacaaaacagctaagtcaccggggaagaaatacaagggcgaccaagggagaacccccactgccgaaatgaggaatatgcgtctcatccgcaccatgcgaccgacaagaaatcctcgcaccgctgcttgtaggcgcaccgttgcttgctccttcaatgtttttattgcatgaaaagcctgtgcttggcagcgtgccagaagtccccgtgctgctgcttggaggcatacaaccgcccgacgttcacggtccttctcagttcatggtccttctccttcgcgttgatcaactccttgatgcgatccagctgcgtgaatatatcagcaaagatgggggaagtgtcgttggcagcaggggacacatggtggagcaggtcggggcacggaggcgatgtgaagcgcaggtgcaggagctcggtgaagtgacgccacgttggggtgccctcctcctggacctggaggaaccacgtacgagccccatcgtccaaatgacaggaagccatccataccatttcttcctccatgatgcgctctcgacggaagtatgtgtcgcaactgttgatgaagatgagggggtcggaattaccgtcgtaacgcggaaaacccagcttctggaaccgcgacggacaattgttgtggtgtttcatggcagccgagctgttgctggatgccgagggccttgatggcggcgacgttggccttcacggaggcctggaggtccttcatggcgtcggtgttggccttcatggcggctgtgatggtcgctagggaagctttgaggtcgttggtgcagggggaggcggacggcggcctggtggttgtggtggcggctgccagtgttggagttgtggcggcgggcgccgaggagtcgcggacggcgcggggaagacccgaagagggtgcagacaagacccgcgtggaggcgggcggcgcagacgtgcgcgaggatggccagcgcacaggaacgacgcgacgacggggacttgcacggacggctggtggtgggcggtggcggtggatggtggtggggatcggcgggatgtggtgtggcggcggcggtgggtggtgatggggatcgggaggagttggtgtagcggcggcggcgggtggtgatggggattgggatcttaatcgatgttttttttggatgaagaggatcactggactctagataccggatgttatggtgatggatatttgggagataactaggccttatgctttgccaagagcttgagagattgagggggtattttgggataactaggccttatgctttgccaagagcttgagatattgagggagactagaattgtttcctcataattcattgcttgattatatcaatagtctacagatatttatgtcccttctacttcacctcttttgctaaataacttatttgggactaatataaattgcaaatacaaagataactaaacttataaagataactgggccgaagtatcagcccgtcggcccaggcagcccgttggctgcccatgacaccatacatgtttgtcaggaatgctctcattcagctccaccctagataaaatatcccagagatggacatactgtgttagagcagccacatcaacttcgccctgtaagtcttctatccacctgttctcagggaagggcctcattaacagtacgtttattcaatcgccttttaggaaccagagcaacaacaagaggagcaatctcctggattccttgaccatccagccacttgtccttccagaagaaggtattagttccactccccacttctgtacgaaccgcgaccgagatcagcccagcgacctccttgctgacctggaccggcagatttgcccaaggtttgcttggagcactccgctgcagccagggccatcttgctttcaaggcaatccccaatgttttcagatcagatattcccagtccgcctaattcttggggtcgacaaaccttgggccaggcaaccacgcaatgacccccatttgcttctcttcttcccttccaaaggaaggaccttctaatcttatcgatggctttgagagcccaaggcggaagatcaagtgccataacaacataaattaggatacccgtaagcacaaattgcacgtgaatcaccctgccagcacgtgtcatcaaatcagccttccatcccgggagctgtccagccactttatcaatgatgggttggacctgctccttggtcaattttttattggacaggggcaaacccagatacttgcaagggaaatcctgaacctcacacggcagcatgttttgaatgagggtcaggtcctcctcagcacagcagatcggcaacacgttgcttttttgaacatttgttttgaggcctgaggcttccccaaacaaatgcaggagctgtaaagataaatttatgtctgctgcagtgggttggagaaaaagagcgacatcatcagcataaagagagatcttgtgctgaataggtctcctagataagggctgaagcagtccggcatccgcagccctagtgaacatcagattcaggatatccataactagaatgaagagcatgggtgatagagggtctccctgcctcaatcctcttctatgctttatactctctcccggtatgccattgaggagcacctgtgtggatgaggtagatagaaggccactgatcaagtcacaccagcgcactccaaaccccagcttcctaagaacctccaagaggaaagcccaagaaaccgaatcaaatgctctggtgatgtctaattttagaagtaatctaggcagcttctgagaatgcaggtacttcactgtttgctgaaccatcatgaaattgtcctggatgaaccttttcttaatgaatgcactctgatttggggagaccatctcatcaaggcgttctgcaagtcgatttgccataactttggtcagtagtttggcaaagctgtgaaccaagctgataggcctgaagtccttaacttgcaccgcattcgactttttaggtatcaaacttatgtaagccgaattcagtttacttaagtttctgcaattaccactccacagtgactgtatggcagccattatgtcattttttataacagcccagcagcatttataaaatctgcccgtaaaaccatcaggtcccggggccttatccggaggcagatcctttatggaattgaacagctcttcctcagagaaaggcagatccagattaagtaactcaaagcttggacaaccaagagactccaggttgatagttctttctcttccataatcggtcccaataaggttatcataaaactccaagactgcagctgccttgtcttcatgccgtgtaaagagttggtcgccaacatgcagttttgggatgaagttcttctttctgtaatgggcatgctggtggaaaagccttgtattggcatctccctcttttagccaaccaattctagatcggagccgggcaatagttcgcaacaaagatgctagagcaagagaatgtttcttgagcttgtttctcagccacaattcatttggctgcagcggcctattctcctgtgccttttcaaattgacgaatgatttccttagcaagcagccattgggacttgatatgaccacatttcttctggctccaactttgtaggcctcttgctgtagctttcaactttagctccacagtttggagaggacactggccgggctgcacactgtcccaagaatccttcacagcatccagaaaaccgtcaagtgagggccagaaagcctcaaaatgaaacctcttcctgctgccaataacatcctgcagcccaagtaataaggggcagtggtctgaatccatagaatcacccacttgcagaagacaaccaggaaactgctcctcccagtcaagagagcagaacattctatccaacctgtccaaggttggagaagaattgatacttcttgaggagttccataaaatctggtgcagcatcatgtctctgccatttagattctagacataacaagttaaaaaagagttgccttgcaaccacatccatgacagaatttttttcttcgaaagcacaggagaactgcacatcattatatttaagaaggaaatgagtctaactagactcatacaacctctagtggggcagggttaattacatgtagactcaccaaagaaaccactaagaaggaccaatgaccaacaaacatagttatgaccatatggcatatgctacttagaactttggcccctcccatacaccatactgcatgtttccattgacattaggtgaagtgcccttaaagacgcagccattcctatgttttcatgtccaccataccaccaaaatgaccaatgttgagaccttgcgatattgtttagcaacctgctgcaaggcttgacgccaccacttagtaaaacaaggtcattcattcgcggggtacatccacgatatgtgttatttctgtgaagactgatacatgatatttgagttatcattatgtagaagtaaaattcgattaaatgtagctatgtatctcaacatgcaagctatccacctcagcaatgcactatcaatgtaattaaaatccactagcacatgcaattgtaatgttcaagtcagtaaagacaagcattttattgcccatgtcaacatgccacgcaatccactaatccgcgattcccgcagaaacgcgtgagggtatgcttctagttttcaagatatcttgtgaagtactatttttcttcttgagggtatgtgataatcggctaatgagttatcttaatgctcataacccacataactattggccaggtaacacacacaagtggggaattttagatctgccagatggcagtttggccataggccacttattgcattatatagcaaaagcaaacttggtttacaagaaagagttcaaccactacagcatattctagtgcataaagtagatgctacttagatgctaaggcatcaactgaaaacaacaatacagtgaatagtaaatactaaatagctaaagtagataactagatactcccttggtccctgaataaatagattcctggaatctaagattttatagaaaaaaattaacaacatttatgatataaaatgagaaccttatgaaaatatattctacgataaatctaatgatactaatttgatgccataaatcttaatgcttttttgtagaaatttggtcaaagtttaaaaatgtcgacttacaactctaggaacctatttattcagggacagagggagtacattagagagtagcattaggcttaactctcatttctccccataagcgttatggtcagccttgggggtgatctgcttcagcccaatcctctccctcatctcttggaacttggccttgcctagcgacttggtgaggatatcagccagctgatcagtggttgcaatgtggttggccttgatgcttgtgagattgccagctgaccaagtagttgctaaggaagaacatggttctgctcgtactcttacttgtgtcgatgtcaccagcgaggtcgctgtcgcagcagccgacaaagtgtgctgtgccgggagccttggtgtagtgtagaccgtagttgagggtgcccgccacataccgaaggatgcgcttgatagcctactaatgctccaccgtgggccgctccatgaaccggctcatgaacccgacgatgaacgccaagttcggccgagtgtgcaccaggtagcgtagactgccgatgagccgccggtagtgtgtgggatcgacctcctccgctgtgctgtgctgactgaccccccagtcgttcctccattggagtgcaggctggattgtagctagtcatgccgccgagctcgaggatgcacttggtgtagtgtgtttggcggaaggtgataccattggcatcttggcgcacctcgatgtcgatgtagaaatagaggaggctgaggttgctcatgttgaacacctttttcatctacaccttgaacgcctccacttctcattcctccacgccggtgattatgaggttgtcgacgttgttagtcgctggatccttgctctaggtgtgagcaggatccttgctctcattgagaggatagcacatagagttggggcaattttctgggtttatttctcacacaatgctatgccaacctgaggggttggggatacatatttatagggctgctaaccagccagcatatgccaagatgctagtctaagatgctgtcctacagatgctaactgctgtcctaaaagcagtcaaggatgctgtcctacatatgctaactgctgtcctaaaagtagtcaaggatgctatgacacaaggaccatgtgctgcctactgcagcccacaagcactagccagcagagacttgtccatcattctccccctaagtcttgtgtggctccttgtggggtatctgagccatcccgatcctggcgcggagttcctggaacttgattcgcccaagggacttggtcagaaagtcggagagctggtcttgggtgttgatgtagttggcctgaacgctcccttcctccaggcagctcctgatgaagtggtacctcacccggatgtgcttgctgcgctcatggaagactggattcttcgccaaggccaaggcggacttgctgtccaccctgagctccactgcctctgcgtctctgccaaggagatcgccaagcagccgagccagccacagagcctgagtagaagcggtagtggctgcgatgtattctgcctcgcagctggacagagccaccacctgctgcttgaccgactgccagctgatcggacaattgctgaggaagaagagtgtcccgctggtgctcttgctcgtgtcgatgtcgtcggcgtggttgctgtcactgtacctgatgaaatgtgccgcaccggggcacctcggtagtgcaaaccgtagtcggaggtgcccgcgacatagcggaggatcctcttcacggcctgttggtgctctgtcgtcggtcgctgcatgaaccggctgacgtagccgacggcgaacgccaagtccggtcgcgtgtggataaggtagcgaaggctgcccacaatgcgtcggtactgtgtcgcgtccacctcttcctccgtactctcccgactcagcctcagcctctcctccataggagtgtgggctgggttgcaaccagtgagaccgcccagctccacaatgcgcttggcgtaggctgtctggcggagagaggtgccggagctgtcctggtggacctcgatccccatgtagaaggagagagggcccaagtcgctcatctggaaggtcgccctcatcttctccttgaacgcctcgatctccacctcctcggtgtcggtgatcacaagatcgtcgacgtagacacccaccagtagggcctttcgtccactgccccgtcggtagatggccgcctcgtgcgggctttgctcgaagcccatccccttcagcgtggaatccagtttggcattccacgccctcggtgcctgccgcaagccatagagagccttgcgcagacgaagcaccttgccttccttgccgggaatcacaaatcccggctgctggtgcacgtagacctcctccaagtcgctgttaaggacgccaacttgacatccatgtgatggacacgccagccctcctgggcagctagcgcaaggagaagtcgcacggactccatctgtgctacgggggcaaaggtgtcgtcgaagtcgaccccctcctgctgcacgaagcctcgtgccaccaagcgagccttgtgcttgacgatggcaccggcttcatccctcttcagcttgaacatccacttaagggtgatcgcgcggtgaccacgagggagatcagcaagctcccaagtgcggttctgctggatcgcgtccatctcctgctgcatcgcggcacgccatgccgcgtctccctccgcctcagcgaaggagcgaggctcaccgtcctcgtgtgccagctgcagctccgtctcaaagtcgtgtaccgctaacccagggacacgttagttaccgaggatgttgtccatggtgcggtagcgtagaggctcatcgtcgtggtaggcgtcgacgcggtcctcatcgccggaaagtggagtggcgaactccaccgaacgctgacggaccaaagctgctggtgccgaccttggagatgccggcaccggtgtaggagagtggggagtcggtgcaggagtgcgtggtgtagccggtggtgttggactcgctggtggtgaaggcggtggtgggctcgccgaagcggatggcgagccgggtgccgaggagggcaagctcggtgaggacgagctgctagctcccccggctccctccaggtggacgtagtcgatgacgaagtcactgagggtcgaggccgagccgtcggccaccgccttgtcccaagtccagcctcgctcttcatcgaacacacgtcctgggagatgcggacgcgctgtgtcgcagggtcgaggatgcggtaggccttggcgccttccgcgcagccgacgaacactcctagagtgctccggttgtcgagcttgccgacgtgagtgagctccttggcgaatgccagacagccgaagacgcggaggtggctcaccaccggcttgtgcccgtgccaggcctcgtacggcgtcatgccgtcaagcgccttggtgggcgagcggttgaggagatggacagcggtcatcaccgcctctccccagtagatcgccggcatccctctctccttgaggagggcgcgggtggtggcaaccaccgtctggttgcggcgctcgacgacgccgttctgctgcggggtgtacagcgtggtgaagtggcgctggatcccctcgttggcgcagtgcgccgtgaactcagccgccgtgaactcgccgctgttgtccgtgcgcagcacccgaagcttgtggccgcactccttcgcagcagcttggtggtgcttgatggcgtccgcggctgcccccttggtgtcgaggacagcccacatgtagcgggacgcgtcgtcgacaaggaggaagtagcgtcgtcctccaggtgtagccggtgtcacggggccgcaaaggtcgccgtgcacgagctctagcttctccttggcgtggaagcttgcttggtggggaaagggcagcagtcgctgcttagtgaggacgcaggtgtcgtagaactgctccacgtggttgacgcacggcatgccctgcaccatctccttgttgccgagctgcttcagggccttgaagttgaggtgcccaaagcgctcgtgccaccgccaggcttcattgtcccgccgagctgcaagacaaaagggttgcgccacctgtacgtgaagaacgtagaggcggttgctccccctgttcaccttggcgagaagtcggtgacgaggatcccaaatgcgaagcacgccgtccttgatctccacgcgcgagccattctcatccagctgtgccaagctgatgatggagttcctcagcgcggggatgtagtagacgccggtgagcagccgatgctcaccgttcttggcgacgaagattacggagccgacgcccttgatctctacggtggaggcgtcccgaacttgacggagccttgaacgtcggagtcgagctcggagaagaactcccgccggcctgtcatgtggtgggtggcgccggtttcgaggcaccacccatcgatcttgttgctaccgccggacccgctgctgaggagggcgtgtgccttgggctcgtcgaggtggagaagagccgctgtagccggtgctgctaggggtgtctcggtgctagcatgtgtcatgaacagggctggctgctcctccgcctgcgcgacgtgggcctgggcgcgtcgtggctgcctgcagtccttagcccaatgaccagcacgaccacagttgttgtagcagtcatcttgtgtcggcttgggtttttcggcagcggcgccttgggcacctccgtgggcgcctccgtcggcacgcccttgcgccccggcctgggcgcctttgcgtgacttgccgcgcttgcggctggctgctgcagaagaaggctccccgttcttgtcacctcgcccggcagcccactgctcccgggtgagaaggagcttgggccccgaggagggttgtggctcgtcactgttgacaaccttgaggcgacctactgcctcctcgatcgagccattctcagccaggtggttgctgcacgtacacctccttgaggtcgcctttgaggaaggtagatttcacatccatgtgatggacgcgccagccttcttgagccactagcgagaggacttgaattgattccatgcgtgccactggagctaatgtgtcgtcgtagttgatcctgtcttgctaggcgaagccgtgcgccactagtcgccccttgtgcttgatcaccatgcctagctcgtccttattaagattgaacacccatttcagggtgattgggtggtggccatcgggcagacgaaccagctcccaagtgcggttctgctcgacggacttgagctcctgctccattgccgactgccattctggatcaccttgtgcctccgcgtaattggcaggctcaccggcgtgcatgctcggcgaagagacgctgcactggaggaggcggaggctgatcgccgataatgttggtcatcgtgcggtagcatagaggctcgtcgttatagtagacatccagatgatcctagtcgttctctagtggcgtggcgtactcgatttgaggctaatcgccatgcacttgtgaagcagctgttggggatgcaggtggtggtgtggccgactgtggtgctggaggagtggccgctactaccgacgtgcttccgggctcccctagacttggtgatggtgagcgcgatgcaggttgtggtgtaggtgatgctggtgatgaaggtccagccaccatcgaagatgcactctatgccctccttgctcctctaggccaccaatactcaacgatgaattcaccggccgctgatcccgagccaccaagacctggcttggaccagtcccagctgcggccttcgtcgaagacgacgctgcgggccaccttcgcgcgctgagccgccgggtcgaggatgtggtaggccttctctccttttacgtaccagatgaacaggctaggcttgctgcgatcgtcgagcttacccagctggttcagctccttggtgtagtcgaggtagccgatcgtcttcaagtggttgattgccagtgtgcgttcgtgctaagcctcgtaggggtcttgccctgcaagcttcgagttggcaaacgattgatctcatgaactactttcatcaccaccacccccaatacttggccgacatccctctctgttttagcagcaaccgggccatggcgatcacagtctgatttcggcgctcaatgacgccattctgctgtggcgagtaggggactgagtagtggtgttgaatgccctcgtcggcgaactcggcgacggtgaagtccccgccattgtcgatgcgtaacacctagagctggtggccactctccctcttcgccgtagcttgtacttgcttgatggtgtctatggtggcatccttggattgcagcaagatggcccatatgaagcaggatgcgtcgtccaccagtagtaggaagtagtgccgcctgcctggagtcgtcggcgtcacgggattgcatagttcaccgtgaactagctcgagctgctcccgggcacggtgttggagacaaaacataggtttggggctagatttagatttcattagccttatcacaactctggcaggttggggatacatatagggtagcttgcttggtccttaagaaaggattatagcatattctagagttgctaaagtagatgctaaagcaatataagacaagggtgacacaatcgctatctattttagataaaaaaatcctaagtagataagcacaatactttgctttcattctccacctaagcttcgtatggtgtattctcattgagggccttggtggatgagcggttaagtaggtgaatggtggtcatcaccgcctaacccagtagattgccaacatccctctctacttgaggagggtgggcggtggccactaccgtttggttgcggcgctcaacgacgccattctactgtagggtgtatggtgcggagaagtggcgcttgatcccctcgtcagcgtagtacgtcgcgaactcagccgccgtgaactcgtcgttgttgttgtagcatagcacccgaagcttgcgactgcagcttgatggcatccgcaggagtgcccatatgtagtggtactcgtcatcgatgggctctagcttctccttggctaggaagctcgcttggtggggaaagggaagccgtttggtgaggatgcaggagttgcagaagtgctccatgtgctcgactcgtggcatgccttgcaccatctctgtaatgctgagctgctttagggcctcgaagttgaggtgcccaaagtggtcgtgccgcgtcatctctgtggcgggttgcaagtcccacgagctgcgccacttgcacgtgaagaacgtagaggcagttggtgcctctcttcaccttggcgagaaggcgatgatggcgatactagatgtgcaggaccccgtgcttgatctccacgcataagccgttctcatctagctgtcccaagctaacgctggagttcctcagcgcggggatgtaagtagacactagtgagcagcccatgcttgtcggttttgcggtggagaaaacagagccgacacccttgatctccacggcgaaggcatcaccgaacttgacggagcttcgaacgctagagtcaagctcggagaagtcccaccgcccggtcatggggtgggtggcgctggtgttgaggtaccacccgttgatcttcttgccatcaaacccgttgccaaggaagacgtgggctcgtgactcatcgaggtggcagagcgcggcaacgaccagcgtgtgagaggattgtggctcgatgctcccatctacgaagaatagagccagctcatcaccctcgtgcacttgcgcgacatgtgcctgaccgctgcgctttgccagccgacagtccttggcccaatggctagtcctcctgcagttcttgcaggagcgccaccacgcacatggggaggcttatctcgcttgcacggccggcgcttgcggctgctcattgaacctgaagcctccccggtgggcgagccactgctcctcagtgaagagaagcttgcgaccgatggtcaccggctctgagaggggtagctgctcgcggttgtcgacggccttgaggtgacccgtcacctcctcgatggatagctcgaagaagtccagcaacatctcgatcgcgatagcgacctagaagtgaagtctttgacgccgtaccacgccaactgctgcattagggtgttgaggtggagagcaaagtcgttgacgtcctcgcccagcttgaaggctaagttctcccagtcctgatgcttttgcaacgtggatttgtgggttcggtcgctaccgatgcgtgatgttgcgatgcttgacagtccgcatgtttgcgagcgaggactgcagctccgtcagaacagcagcaaaaagcacctccagcgcccatcgatcctccttgaagtcggcatcaccgtactggacctcggcccacatgtgccgcgcttgcatcttcaccttcatcaccatgggctattcgttgtagttggtcgtggtgagcatgggccatccaccgccggtatcagcgtccttgaagatggtctgacgacgagaggaaagttgtggcggccacagcgactatggcgccggtccgaggaaggggaggtgcgcgcttgtgggggctctatgcaccagcgtcctgtccaccctgctctctgtcgttgtctaaatcccagttgtctaggtcatgtccgctacgggcatgtctgcgtccgtctaggtcccggttgatgtcccgctgggcccgctcgtgtgccacgtgctcccactcccgctcgacgcgaggatcccatgcgcggtggtccgaatagcccgcgttggctcgtgtggctcatccgctcgcatccgtacatgtgacccacgtgcccgtgtctatcaaagccgcgccgacgaagccgtgctggtctgctcccgcgcccacgggtagggcatcagcctcttttgccgcagtctgagcagcagcagccgcgtcctcgtccgcgtgtagggtagcagcctcttctgccccgctctaagcaggtgcagccgcgaccgcggcctcctcagtggccgccagctgctgctcctgtgcatccgccgtcaccgcccgctccgcttccctttcgtacctctttgccgcgacgaactctgcagcctgcctacgccgtgtgctggtggtcgagtgatttgtggaggaagaggtatacaagtggatggtcatgctgccggattgagatgggtaaggggtagaacccaaatgaacttaggctttagataccaatcgttggagacaaaacataggtttggggctagatttagatttcgttagccttaccataactatgtatacggtagctttcttggtccttaagaatggattacaacatatgatggagatactaaagtagatgctaaagcaagataagggctgacacacagccaccaactaaaaatcctaactagataagcacaacacttatgcttgcacactgtacatggctgggtaagggaaggggcacctcctctactttgtcgtgatgcaggtgtcgcagagttgcttgacgtggttgatcaccggcatcctgtgcaccatggctgccttgctgagcttgtgcagagcctcgaagtgaagatgaccaaactgctcatgccagccaagcttcatcgtccttacacgtggcgagccagagtggccgagctgcctcaaggtgaaggatgtagtaatggcttgggccgcgacagaccttgacgagaagtcgcctacgccgatcccaaatccgaagtaccctctttcgatctccaccttgcaccggccttcatccagttggccgaggctcatgatggagttccgtagcgctgggatgtagtagatgccgtgtagtatggggtgctcgctaggcttgccttcgaacacgatcgagctggcgccttggatctccacctttgacgtgtcaccaaacctcactgatccacgaacgctcgtgtcgaggtcgagaagagctcatgatggccggtcatgtggtgggtggcaccgttgttgaggtaccatccgtcgagcttgtcctcgcaagagccaatgttgaggtaggcatgggctcacggttccttgatgtcggggttggtggcggactcggtgcagaagcttaaagctcgtgccttgtcactactctgctctgcatccagctccaggaagccgtgagtgaggaacggagcagcctcctcctctgctttcgtgacgtgcgctgcatcgccacgctcacgacgaggataggggcaatcctttgcccagtggccgacatggttgcagttgaggtatgtgttgtcgtggtttgccttgcattcgtcggcagcggttcctaccttctctgcttgaccgccgccatcacgatctccttttggctttgctttcttgccaccgcatgtacgccggtggtgctccttgcacgtgctggagtcgttccctcccttctcttgccgagcgagccattgctcctcggtgtacattagcttgccaccgacggtgagcttggtgggaggtgcctcatcgcgatcgtccaccatcttcggtctcttggtgacctcctcgatagtgagttcctcgaagtcaaggattgtctctattgtgatcacgtgctgggagtacttcgacacggtgcgcaggaacttctccacgcgcacgcctcctagaggtccttgtcaccgtggcgagccatctgctgcttcagagtggagagacggattgcaaaacgatcaatttgctcacttgggcgaaaggagagattcttccggtcctttcgcagccgctgtagtgtcgccccgcgaacacggtcgatgacgatgcatgctgcagcgatggagccccacgcttccttggcttgagaccttgtcggcaagaggagctcccatctttggaggaacggcggcgaggatttccttgagctctcgccaattgttgtggtactagacgctggcgccatcgacggcctcccagagctggcgagcctacatcttgaccttcatgagcagactctactcgtggtagtttctcttggtgagcatcggccacggtgcgcccacgccgagtccttgtgcaccatctggacagcaggagacccgtgacggcctctgcgtccgcggcgatgctccggcgatggtgatggagcgcggcaccgagcagggctccgcgatcctctgggctgcctctccatctcctctcgcagcgtggcagtggtagccgctgcagcctgagccgctgttgctgcagcggttgctatagtagataactagatacattagagagtagcactaggcttaactctcaagaacaacggttactgataaataggcattagtaagcatcattacatttacatttaaaaaggaatattggttcttgttggtgctaagtgacagcatttgaggtgactgaacatttacatttaaaaaggaatattggttcttgttgtgatgacaagttgtatttacttaatttaatttgtcacatctttttttttcttttgtcattctttaacttatcttttttctcttgttcttcatgaatgcagtatggtcccctttattttttgtaggttctgctgttggtttcaggttggatagcttgctcaaactaagtgacacccgtgctcgtaacaataagatgactttgatgcactatttatccaaggtacccctctattagaacacacttagaacaatccctttgtgagataaagggctttaaaagttttgttctgttctctccctagtaatttatactcataattcatatgtttcaattgtaatctcccactacgacctaaggaccatgacaagcagcttggatattccttagttcctggagaaaaacaattttattgtcattgccttgtggcccatgaacacaagtgagccaccaaggttggccacctgtcagacagaattgaacagagacacagtgggaatcagatggggaactgagagctagacgaagatagtgatgccaagcagtgataattccaccactagctctagtggacggcacaacaacaaaattgacaaatccgagtgtttcagttaatggccttgggctcaactaaccctagaagggtagacatataaccagccatacatgggcctcatggacctaatacacacacatacttcaaccgcccccctgcactctgaaccaccggcgcagcagcggagttacagattgtacacgaaaataagatacacacacaagcgccccccacagacgcaactaaccaccagtgatgctgaggctggaggggaactcggtgaaggtcgaggacggtaggcccttggtgaagatgtcggcaaactggaaggtggtcgggacgtggaggatccgaacattgcagatggcgactcgatcacagacaaagtgtagatcaatctccacatgtttggtccgctggtgctgcacagtgttggtggagaggtacaccgcactaacgttgtcacagtagaccaggctgcttcgggagagaggctgtggagctcggcaaggagctgtcggaggcaggaagcctcagccacgccgttagcaacagcacaatactctgcctcggcactggagcgggagaccaccggctggcgcttagacgacaggacaccaggttgctgcctagaaaagatagcgtagccggaggtggagcgccgagtgttcggacacccggcccagtcggcgtcagtgtagacgacgagctcggtggagaaagactggtggagcagaccgtagtcggcagtgctgtggagatagcggaggaggcgcttgagagcactgaggtggggctctcggggttcatgcatatggagacaaatctgctaaactgcataggtgatgtccggcctggtgaaggtgcggtactgaagtgcacgggccagaccttggtatgcagtagagtctgtcactgggttgcccttggcctctgatagcttgccctatgtgtcaaccaaagtggagcagggcttgcagttagtcatcccagctcgctcgaggatatcaagggtgtagtgccgctagtggagaagtagcccggtgggatgaggcttaacaatgaccccgaggaagtggtggagcacaccaagatccttcatagcaaactcttgctgaagtgaggtgatgatgcggcgaagtagtgacggactagatgctgtgaggacaatatcatcaacatacagcagcaggtaggcagtctcagcttcgtggtgatagataaacagggacgtatgtgacttggcctccacaaattccagtgtcaataggaaagcagcaaacctagagtaccatgcccgaggggcctgcttgaggccgtagagagacttgttgagctggcagaccatgttgggacgagaagagtcaacaaaccccgctggctggctgcaatagactgtctcaatgagagtaccgtgcagaaaagcattcttgacgtccagttgatgcacgggccatgagcgagtgagccagtgagagtaccgtgcggacagtggctggcttcactgctgcgccgaatgtctcatcatagtcgactccagggtgctgagtgaaaccccggagaacccagcgagccatgtactgatcaagggtaccattaacctgccgcttgtgtgtccaaatccacttgacgatgacgccgttggtgttagacagacgggccactagatcctatgtccggttagcaaggagtgctgcatactcttccatgcggctccagtgagggtccgtcaaggcgtcgtgaacggaagagggaagagggtacaggagagacctgcggttcaccgggcaacgccgtgagacctcagggctgcagggtaccaaccgtgtgttgcatcaccatagggtgaacgtaacacgggtgtcggtgaaggagcggtgggtggtacaccggcggcacaacacggccagccgcggccgcggcggcggggtaggcgtcgccggcggagaagaggccacgggtggtggagacgtcgctggcggagaagagaccaccgggggtgactgaggcagcggagccggccgtgcacgacgctggtagacgtgcatcggctgggcgaaatgcgcaggggcgcggaagccgacatccctggacccgcgtcgggcgtaggggcaggtgcagcatcggaggacgcctccggacccatgcagggtgcaggtccaggggcgtcactagttggcggcgagctgtggcacgggctcggtgaagggcacggtggagcagtacctgtaggatacaacggcaaaagtggttggaccaccatgtcagtgggaaagagagaaggggtcaaggtcaggggtggaagtgcgtgtggtggtggtgcagaaggggaagacagactcatcaaataccacatgtcgagagatgaggacccgacgagaggtgaggtcaaagcaacggtaacccttgtgttccgggaaatacccgaggaagacacacaaaatcgaacggggagccagcttgtggggagcggtggcagtggtgttagggtaacacgcacacccgaacacacgaaggtgctcatatcgaggagggggtaccgaagagagcatgttgtggcgtaggagctgggcaggcagcggaaggaaggtggttaactgcatcagagcatcacgactagcatggctgaggcgacggtgccaagtggtggaggaaggagtggcggcgaaagcagctgacaaaacagacgacgaagaccagaagagtcaaattcaacaaaacaggaattgtcagctgtaagtcgacgaatagaaaggaggttgtgaaccatagaaggtgcaacaagaacatcaggaagacgaaaagaaccatgagcgccggtggcacccatggatgtgacaggaagacatgaactatttgcgaccatgatggacgaagggtgagaggaaggagggtgaatggaggagagcatatcagggttaggggtagtgtagtaagtggcacctgagttggcgatccagtccggactgacaggcggtgtcagggccatggtgctgaaggagcgggccaaagccactggttcccaaccaactgaccctggcgaggcggcgggaggtgtggcccacggagacgcagagcgaaacccgtaggagcaccagcgagcatggctgccggcgtgcgaggctcaccgtcgggagcctagcaacgccacatggagatgcgccctaaccagggttgtggaaagagagccagggtgcaccccgtggaggtgccggcgccgggttgctcccacagccaggacccgcaccatgtccctctccgtggcgacagcggccgccacggccccctcccacccccactcggcccggggggaggaccaaggagagatgacggtggcgcagcggacggtcgcggcggaggagtagcgtccagggcagtcgaggagggcgaggaccctggcgcagagttggacccaagctggaggccctgagtgagctcctccatgacaaggtcatcacggacctgctggaaggtgggaaagcgccgctgccgggtaatccacgtccggaggtgggcgtagcggtcactgagcccgcggaggacgttgaggaccaggagacggtcctccacgggccagccaaggtcaccgagggagttcaccatgcccttcatccggcagcagaactcgccaacagaggtgtcgccctggacgaaggtagggaagctcgcatcgaggcgtagagcccgagcttcggcattgcccataaattggccctcgagcgcaagccaggcccgatgagcatcagcggagttgcgaacgaggtcgtggaggtcgagcgagatcgtcccgaggatccaggagagcacatgctgtcgaggcgcagccatgagggggtctggaccgcgacctaggcgtcgacgaggatgtggtcgtcgagggcgcagcggcggagggtgaggaccatgtcccgccaacgggcgtaggaggtgactcaggctcgaggacgaccggaacgaggcggatgttttggacacccccggcctggtagtggagttgcgccacgtgcggatcggtcggatcgtgctagatgaccgtggtgtgggacatgcgtgacccgtcgagccggaggaagtggccccgacatcgggtgaggcagggaggacgaggagctgctccgcttcagcgatctggcgggccagtgcatcggccgcatcgcgctcgcgctcccaagtgagggcggccgcacgcacacaggcccggccctccgcggcggcggcgagggcggagtcgggacccgctgcgtggaggtgggacgtgggcggaggaggcaaggcggggaaggtagagggacccacgcctgcgcccagcacgcgcagcagggcgtcgttggcgtaagcttcgtcccacggcatgcccagcccggcccctgcagctatggcgccgggccctgcagctgcggccatggcggccatagtgtccgcggtggccatggcgcccgcatcggcggcgcctgcgtcggcgtctccaaccccagcggccgcgacaccccatgtgcgcccgcggcacccgccaaggccatgagaagggatgcggaggcggcggcctggtcggcggcggcgcggggcgcatcctagccggctgcggcgcggggtctgcgcggggcgcgtcctggccagctgcggcgcaggggtcggcgtgggtcgcgtcttggccggctgcaggacgggcaggcggcactgggtgcggccacctgcacccaggaggagttggggaggggagggaagcaatggaagtaggtgggggagggagagagaaaccctagcttgataccatgtttcagttaatgggcttgggctcagctaaccctagaagggtagacatataaccagccatacatgggcctcgtgggcctaatacacacacatacttcaacaccgagcccaacatggataaaaggacttgttgtgaaacagcagccatcttagtctcctggatacaaactatgtctactctagacgagtccaccagagttcttacagtgtcaagacaagaataataacaacttaaacagagccatgatgggcagatttagaggattaatcaatgatttatcgctcgtggaaatacctttgcatgggcgcaaatttacatggtcgaacagacaagtttgtcctaccttgttcaagctggacagcgtattatgctcaactgattgggaggaactgtttccaaattgtttgctgcagagtgcttctacagacaactccgaccattgtccaatcatcttttgattacaggagagcaagacgggcaagaggcagttttattttgaagttttctggcctaaactggaagggtttcaggctggtggtcgaggatgcatggtcagctatacctgtgtcttcctgccctttgagactccaaaaatttcagagctgtcgccaaaagcctgcaaagttggagccataagaaagttggacatgtgaattcactgttaagccttgctagagaaatactccatatgttggaaattgcgcaggataactggaaccttactgataaggagaactggctgaggaatagacttgagaaacactctctagctttgtcctcttttcgacgcactattgcaaggagttggtctcgaattggatgaaagtgatgctaacacagccctcttccgtcttcatgcccaacataggaagaggaaaattttcattgcaagaattgtggagggcaaccaaattcttactgctcatgaagataaggccaaagcaatccttgatttcgacgatggccctgattggtagcagctcagattgggggcagacgattgaccttgatgaatgagaattgtttgtcacaatttcgttgagcttgatgccccattctcagaagagaaggtctggaagacaattaccctcttgtcttcagataaggcccacggaactgatggtttcactggacgttttgtggcaggtatgaaaggggacatcatggctgcattttcagcagtatggagcagaaaactcttaattcttcttatataaccttgctaccgaaagaagatgctgcacatgtcaaagatttcagaccaattagtttagtacatagttttgctaaacttcttactaaattacttgccaacagattagctggttggctgcaccaaatgttctcacctaatcaagtgcttttattaaaggaagattcatccaagataatttcatgcttgtgcaacaaacagcaagatttctgcatcaacatcactacatctccaccccagaattcttctcaagctggatatcacaaaggccttcgattctgtttcttgggcctgcctccttgaagtgctgaggaaattgggatttggacaaatttggtgcaacatcttgagtgggctcttggccacctcattgacacaagtccttaatgggattcctggagaggtcattctacattggtgtgggctgcggcaaggagatcccttgtcccctatgttatcttgagccatttggttttaagggcttctagtgatggttttctgcaacccctggccccccgaccgttgatgcagtggatgtccctgtatgctgatgatgttgagatttttctgcgacctacaaaaggtgacattgctgtaatccttgatctctgaaatatgtttggtgaggcaccaggactcaagaccaatgtactgaagattaacgtcatacctatcaaatgcacctcttctgatatcagtacaatacaggatcacatttcctgtgagttgcttgaattccatgcaaatacttggggctacccctctccctttggcagttgacaaagaaacaggtgtgtccttttattgatcgaattgctggtcgccttcctggatagaaagctgaccttctaagacgggtcgacagattctagtacagttttttcttacctaaatactgatttatcttgctattgcattagacctccaaccttgggtaatcaataaaattaataggatcagacaaggctttctttggaaaggaagaaaggatgtaaaaggtggacactgccgggtggcatggccggtgtttcgcccgcgtgagcttggtggtcttggcatctcagatcttcaaaaactcatttgggccgtccgaatgagatggctttggttggaaaaaacagcgcctccatgggcagaattccccattcatgtgcatcaatgtgtaagagctttcttcttaatggtggtcatttctgaagtcggtgatggagcttgtacactttttttggacggatagatggcttcatggtcgatgtattgctgatattgccccacatttgtttgctctgattcctaagagacaagcaaataaacgcactgtcctggaaggtctcacaaaccagacatggatctcagatctgcagggtgcactttcagtgaatgccattgtggatctcagatctgcagggtgcactttcagggtgcactgtctagtgtggaaccaaagcctgttgtggaggattctcatatttggaaactcagctcaagtggacagtacacagcaaaatcagcatataggggtttattccacggatcagtgagactattctcttgagaggattttgaagacttgggctccggccaaatgtcgcttcttcatgtggcttgtcgcacacaatagatgctggacagcagataggctagcaaggcatgatcttgactgttggagtataaggtttcccatgtatgtgaccatattgctacccttctagggtgagcccaattaagaaaatgacagtttacagcatggtatcaagctagggtttctcttctccctccctcccttcccagcccagccgccaggcagcagccgccgccggccggcgcgccgccgcagccgcggccatggccgcccctcctccaccaccagccggcgcgggcgcgccgcccctgcgcgcggcccccctgggcgcggccccccgaggcgcgggcgcgccgcccctgcgcgcggcctccctgggcgcgggcgcgccgcccctgcgcgcggcccccctgggcgcggcctccctgggcgcgggccccctgggcgcgagcgcgccggccctgagcgcagctgcgggcgcgccgcccctgggcgcgggtgctgcccttcctccacacactccgccctcgccactgcccctcaccgctgcccgcgctgctgctgcggacggccatgtgcgcatgcatgtcggggtgacctcctccggctccggggacgcggccgtcgccgccatgcctgctgcagtggctgccggactgggcatgccctgggctgacgctgccggactgggcttgccgcgtgctgacgcagccgcggcggtcaccgccctcgccgctgaccgggccgctgcggcggcggacaggacctcgtctcttcttgctcctcctccctccgagccaagcgggggttgggggggccgtggcagccaccgtcgccaccgcggtggaggcgggtggagtctctcagcgcctctgtggcctccacctccgagtgccttgccagtgcctgtcggatgggacccggcggcctgggcatctttccgccacccgtggtcgaccatgtggggcgacggcaggtcggcgcctctgttgtcggacacaacagctctacgtgcgcgggccatggccgctgtgcctagaggagctgcgtctccttccacaccggcttcctcattcctctccaccgccaaaccttcgcccgcggctcctcctgccgcagggctgcgaccagtcagtcctgactggatcgctgactcgggcgccaccttccatatcacgcccgatgcgagtctcctctcttctatcagtcctccccacccttcttgtccttcttccatcatggtcgctaatggcacctgcattcctgtctcctccgtaggcactgccaattcccatggctcttttcatatccccgatgttcttgtggctcccggtatggttcacaacctcctctctattcgccgcttcacgactgacaactcttgttcggttgagttcgacccctctggcctcaccgtgcgggagttggcttcccggcgtcctcttctccgttgtgacagcactgggcctctctacacccttcgtttcccggtttccgctgcacctcctttgccttcttattcacccccttcggcttctgccttcactaccacctcctccactacgtggcaccgtcgccttggccatcctggcagcactgctttgtcccagctcagtcgcagttccgctgtgccttgcccccgcactcctgatgagcatttgtgtcatgcatgccagttgggccgtcatgttagacttcctttccctacctcctcctcccatgcggctcacatctttgatcttatccattgcgacctgtggacatctcctgttcttagtatgtctggctacaagtactacttggtggtggttgatgacttctcccattactcttggacttttcccttgcgtgccaagtccgatacattcaccactcttcgccacttctttgcatgggtgtccacccagttcggcctcaccatcaaggccgtgcagtgtgacaacgggcgtgagtttgataacaccaccgctcgctccttcttcctctcctgtggtgtccagttgcgcatgtcttgcccttacacctcccctcagaacggcaaggctgagtgcatgattcgcaccacaaacgatgtcatgcgcacccttctgttacaggcctcgcttcccgctcgcttctgggctgagagcctccacaccgccacctatctccttaaccgcttgccctccacggcttcccctgcgcccactccacaccacgctcttttcggtacccctccccgctacgatcaccttcgtgtgtttgggtgcgcttgctaccccaacacagctgccacttctcctcataagcttgccccccgttctactctctgtatcttcctgggttactcccctgagcataaggggtaccgttgcttggacctctcttctcgccgtgtcctcatctctcgccacgtcgtgtttgacgagtcggcattccctttctccaccacccccacctccacacctcctgctgaccctgcggaggcttctttttttcccactgacccggtggttccaccaccgtttccactataccctgcaggtcttgctccggcacgctctcctggtggtccttcaagccaggaccctcctgtacctggcacgacagaggcagccccagagcttcctccaccgctaccagtggttgcgctgcctcccgttgtgcccgaagtcgtcgccccgatcgcgggaccgcgcgccccgtcctcacctccccggcgcttcggcctcgtctaccagcggcggcgagagccggctccgcctctgcagccggtgtcgctggctccgtcgccgccctcgccggtacgggctccgccgtcgaccccgccacctccggcggagcacccgtccatgccgcctccggccccgaggcgctctcgcgccgagccgccggtgtaccacccgcctctacttcaccgggatcctcgtcacactcacccaatggtgacgaggcaggcatcccggccgcgggccctcaccgctgctacctgcgagacggggatctctccggtaccctcttccgtccgcgaggccttgtcagatcctcactggcgccgtgcgatggaagaggagtacgcggccctcctcgctaaccagacgtgggatctggtgccccgtccgtcggcctccaacgttgtcaccggcaagtggatctggacgcacaagcggcgtgctgatggttccttggagcgctacaaggctcgctgggtcctccggggtttcagtcagcggcccggcattgactatgatgagaccttcagtccagtggtgaagccagctaccgtccgcaccgtactatctgtggctctcgagcgctcctggcctgtgcatcagctggatgtcaagaatgccttcctccatggcactctgaccgagacagtctactgcagtcagccggccggtttcgtggattcttctcgccctgacttggtctgccggctcaacaagtctctctacggtctcaagcaggcacctcgggtgtggtattctcggttctctaccttcctgcagactcttgggttcatggaggccaagtccgacacctcactgttcatataccaccatgggggtgagactgcttacctgctcctctatgtggatgacattgttctcaccgcctgcagcgagtcactgctccagcgcatcattaccactctccagaaggaatttgctatgaaggatcttggtctgctccatcacttcctcggtgtcactgttgagccccgaccttcaggcttgttcctccaccagcggcagttcacttgtgacattctcgagcgagcagggatgactgactgcaagtcttgttctactccggtcgatacccagggcaagctgtcagaggcagagggtccgatgcttgggccagaggactctaccgcctaccggagtcttgctggcgcgctccagtacctcaccttcacacggcctgacatcacctacgccgtgcagcagctctgcctctacatgcatgctccgcgggagccccaccttgctgctatgaagcggctcctccggtacctccgtggcactctaggctatgggctgctcctcagccggtcctcctctgccgagctggttgtctacaccgacgctgattgggcgggctgccccgacacccgcaggtccacctccggctacgctgtcttcctgggcggcaaccttgtctcgtggtcgtccaagcgacagccggtggtctcacgctccagtgccgaggcggagtaccgcgccgttgccaatggtgtggccgaggctgcttggctccgccagctactggctgagcttcaccgccccctcgccaggagctcacttgtctactgcgacaacgtcagcgccgtctatctctccaccaaccctgtgcagcaccagcggaccaagcatgtggagatcgacctgcacttcgtccgcgaccatgtggccatcggcgacgtccgggtcctccacgtcccgaccacctcacagtttgcggacatcttcaccaagggcctcccttcctcgactttcgccgagtttcgctccagcctcaacgtcaccggtggctagttgtggctgcgggggggtattgtgtgttatgtgttttctttcttgtccagtcttgaactccgctgtgccggtagtccagactgcgggggggtgttggagtataaggtttaggcccatgaggcccatgtatgtgaccatattgctacccttctagggtgagcccaattaagaaaatgacagtttacagcattgaccatccctctcgttgccttctttgtgaccaggacacagtatgaatcaccttctggttgactatgtttttgcacgagatttttggtttgacctgttgcagaaggttggcatgcaaagcatctcaccccagacaggtgaaacatcctttgatgcttggtgggacagagctagcaaggctgctggtggactggcaagaaaaggcttgaactctcattttaggagcttggacactctggaatcacagaaatctctgcgttcaatggagtttcaccaaatctaaatagagttttaactcttgcttctgatgagttgaggttgtgggggactgc

SEQ ID NO: 5017 - DNA, 13539 bp, Sorghum bicolor
  Intron number 1 from transcript Sb01g049020.1 (locus Sb01g 049020) derived from phytozome v7.0 (chr-ID chromosome_1; pos 72016125 to 72029663)
ccgcgcggcaagctcttcgaattcgccagcggcaggtacccatccgtcttccctccgacaatccgctggtctttctttagctatcctttttcggtttgggggcaatccattgtcttccgtgtctgcgggttcggtgattggtaaatggccgatgtgggactcgttactttactgttttccctgggaccgaaagcctgcaaaaatctgatggattcttgcgcgctccctgcgcaaactcctgtagcaaccgcatggcctctcccgtgtcccgtcttttgagttttctttggacccgtggggaacgaacatctgtgactgtgcagataccaccccactcctctctcctcttccctctccttgtgctatccattggccggtttgaagattttgtgccccgaagatcttgtctcgccgtggggtgcgtttgaattcctttctgctcctctcgcaatggttttgcatcaactttaccgtggtttcaggcggaaaggacagttagtacatgtagggagttcatttctccgataaaactagtgtagccgtctagccaataggaaaattcggcctcataacaggcaaaaaaatgttcacgtacggcgcaatagatcaaccaggctacgattgactagcagtggtcgcactaaatgcactgcgacctgagcaaatatttttcaactaataataaatctctacagggatgatttcctctttctttgggtcagttaaacccgttttaattaaaccatggagcgatctggaggtccgtttccagtgccatcggtcttctttgtagtacggctggcacttcttgagttcttctgctgttcagacacaaaaccaacgcatgcgatattgtgtactatgccttccactgtacatatattgttttgtttttggctctcttgccatatacttaacacaaaaatgggatttctccctcaaaccacactgcggccttcgtcaagttttctgctggctgtagtttaatccacgcttcgttagatttgggcctcacccccgtttcttgcctgccttgtgatggcttcatggatttggtttatgtgctggatctgttagtagtacagcctgctgttttttttgccacatagttaacccaaaaaaataattttgtactcaaaccacattgtagctagccttcgtcaggttgatggccagtggtgctctcttgtttactgctggctgtagtttcatccacatttcattagatttggttctcatccatctttgcctgccttgtgatggcttcatagacgtagtttatgtgctggatctacaagtaatataggttgttgtgtttttccccacatagttaacacaaaaaggaattttgtactcaaaccacattgtggcctttgtcagatttatggtagtggtgctatcttgtttactgctagttggagtttcatccacccatcttacctgccttgtgatgtctaaatagatgtggtttatgtgctggatctactagtaatataaattatatgcatagaccatggtacaggaaatatatattggacgcccaatagggttgacgaatatgagggggatggggctgctaactaggcaaatgaaaataattatacttttaccatattataattattaccaagaaaattgccccatgctaccatagccaaatcgatctaacttcctttcatagtgctcaactttttattaaggtggtacctaaggaccaattcatttcttttagatgggattaattacttgatatgattagataaccattgcaatgggtataatgtcgaatacagaaaaatgtagtgacaatggggaaaattcagagactaactgttttccttacctaggcacaagattaccatccaaacggagaaaatatttgaactattgttgatttctaacataagaaaataagatccttcaaagaccttgtttcaaaagcatagtttcataatttactttatttatttatttattcttgtgtatcaaaaacaaattctttgaatttggtcttttcataagtactctcttatagcaattttgcccaactcatagctagcttagctaagaaggatctctacataataagtggtgtcaacaatattaaaattgattgtgttttttaaattggccttgcttagatctaatggagcctaacttacctatttttagttagacatttgtctgtctatttaaaatatggcaataacataatcctaattatcaagtcaatattaaaaataggatgaatatataatttcttcttgccatgtgataatatcattgtatagtccactttgtctcctcatatgacatacaaatacattgacatgttaattattttgataagtcactagtgtaatcacgaggcccatgaggactaccacatatgtcataatagtggattgttcgatgcatcaactttgcttgatcatgattccaatttatgtgatgtttgatcctattcaaccaatcttagtcactacgtttaaaacttccatatcttgtttcatttgtaaaattttagcttggacatttattcaacaaaaacccgcatgtctcaataggacctaaaaatgatgcggctaaaaaccacatgaatacgaaggttagccacgatatttgaggggacaacttgcatgtagtagtttactcggttgttgttgtgtattggtttggaatctagaaacaccaaaatttaatccaacaataacgaaaaactatttaggaatatgtatatgctaatgtgttgcatggaaatcgatgtaaatgccagtaaccttaatgcaaatactagagaaacattgtcattaagaatacgtaatatctatataaccaatatctcaattcttaattaattatattgtattttcctagtaaagtgtttagaaatataacaacgcagatgtatttttttagatttaagaatgcatgcatttggtaaagctagatagtttcatacattcaattatttgatcctgccatactacttacaaatagtttttttgttgggaatatggtgccaacttagattaaaatagttactaccatcttaaccattatacttttttatttggtacttgataactttgttacttatataatactagataaatgcctgtgtgttgaatcggatcataatttttgaaccaaaccttagtaatcagacgcggatgcgtgagctctaaggacttgcatcagacgtggatacatggattctttcttcatatcgaaactgggtaggacatggacgcgctctgattagatgttgatgcgtatgagatgtagacacgtgtgcaaagatcaatattttgcattgctagatagatgatgacgttagagtctttaggtgtgaagagatttgctctagattaaactgttaaattataactttttagaaagtaagtaatagctttagataagtcgctacattcatgttgtaacagaaaaaactagggatgcaattacgcaagagtaagtagatgccttcgcacattgaaaactattatggggatcatactccttttagaaaactatgttgggccctttgagatcatgatttatgaggacaactttgttctctgcatagtgttctattgataattgttcggagttacaacagaatttcacatcttgagggctaattagttgttttaggtgtaagtcctccctgacacactgggagctaactctagccaaattgccatttgtaatggatttttgttggtagaccatgacttggttaggcctctttatttttttgttaggaccacttatcaagtgctttggactaaatggtgtgctctgagcataacacatttggactccttggctagggtagttgtgacttgtgaatgagttacttgtctacattgtgcttttcatgctgttgatcttgaggaaaaaggggtacacattttcacgtatcttttctttggtcgatttaaccgatgacgatcatttgtgaacataattctaaatagaccgctataactttttcgtagggtctatgtatatgatgttgccaattgtgttttgctattaccactaatgacgttgtagctccactaaacaccactaactggcttagctgtgacatattttttgcaccactaatatttaccgaggcaaatatatattgctcactctagatagctatatatatatgtctcttcattgtgttatttatttaataaatgatgcaataaattactcccttcagttctaaagaatgtcgctttctaaagcgacacggtcttaaaaaacaactttgacattactttttgctataaaatatttataaaatatagtcaaaatatacttttatgaaactatatttcaagatgaatctacttacatcactttcatttttcaaactcaacctaaaagaatttatttatagtcaaatgtttgacttaagacaacattaaaacgacattctttaggaaatcagagggagtattgaattgcttgatttttgaatactgattatagctgtgacgactgttttagtgaatggtacaagtgcatggaccttgagacatgttccctagagcctcatacatgtatttgagtattatgttgatgaaatttaattaacaatatgttttcctacacgattcattaataattttcatgttttctataaaaccgctaaatgaaataggttatgctaattcttgtatagttttttgtagctttagaaggaggctactacgttatctctctatttagaaccttgattgtgaatgtttgacccttggtgtacttttcgagagatttatgcatcattagatcatttccccatagagggcatggccacaatcattaagcgcagtcacaatagtttaggtgcatgtcagcattcatgaaaagcttaccaactatgattccctacaaagcaatatagcacatggggttctagtagaaccaagatcaaaataaggttgaggcgatggacttgaggaaaattgaggttgtgtaacattctcaactaagcaacatagcacaaggggatcatgtgacgaacaacagaatgataccatgggcttggtgcgtgcgaccttggcatagctagaccacatatcaacgttggagatctggtttaagagccttgatcaacaattcagcatcaacacaccctcaacattgctctttatcgcctcaagcatggctagtgcaagctagccccaactagtcaagatggggtgcttttgcaacaatgctaggaggggtcaatgggggctcatacactttcacaatcttgagttcccaactttcgcaagccacaacaatctctttttacctttaattgatgtgctctattttcgtgacaacgcatggtgagagacaagcctctcgttgcacatcatctacatggagcggcatagttctacatgcatgttaagtgccacgatgacacccaccaaggcgatgtttctacgtgcacaaaccccttgggggagcttgtggcctacttgttgaatagatcatatatcaccaaggaaggttcttggctctcttcacatatgtcgcatcactcacgaggagagccctgacgtgcaactttgggatcctcaattgttggattcaccatgagtttggcttggtcatttgaatagcctcaacaagcgtcaacgactatggcatgcataaacttttctatgttgcccaccaacttctcatcgatgacacacaacctgaattttcctcccaccatcacatgatccaattttgatgcacctttacctgcctatacatatgttaggcacaccattgatggccatatgaagacatcatgtttctctttgatgtgtccctgtgccaattgcattgctcaccacatgaccctatataaagattggcgagcgccaccgcctggtcctagcgatgagcactatgttaagggtcttaatcatgtttacaagtgtttttttccttttggatatcaaagacgatgagtccattggtaagcagtggcgtagccacagggtatgccaggtatgcactggcataccctgcagcaccgacaactagagtgttatatatatatacacatacgtataacagtataagcatctgtattgtaaagtgtaaaaagaaaaaaaaacttatgtagaattctggtcatcacgccacgacgaaaggcccatgtggtagcccacacggcaagttacgaagatagtataatctaagacatttatatcccttcaaaagcatcaaataaaatagtcagaaaatagcaactaagtttctggttctcttctatggtcatatttcaattatggatggtttagtttaaaccatgaatttaagttttatcatgttacttagtgcatatataccaaatcacattgttaattttaacgaattgctaaaataaatttagcaaattgtatatgaaattttttggatggcataccctatactgaaatcctagattcgccactgttggtaagtggccccaaaatctcgctacatgcgaccacatgaatttagactagcaacacaaatttggttcctatacgtttcattggtgcaatgctccttgcattgttgtacttttattaacatgcagttttgtgttgtagttcggggcaccatgtattgtccttctgtttgggcacgcaaggactttgcttgtcatgtccttacatgtggccacaaggacatcattgtcatatcattgtagggattttgtgtcgtgttggaggagctactagatgaaccacacaaggaaacttaagttgttgtttaatttgttatgattctaagattagaaaagtatcataaagaatagaaattaattattttagaaggaaaacttcaattttggtgcctatttttcaaccttgagtaaaatatcatgttataagacaatatcaatattaatattgcatgctttttctcctttgaatgacaaaacaaacaacatcataagaaatagggacgagaaacacatgcaatacaagttgttatggtcaatatttgtaacttagggtgaaagatgatcgcatatgagtggatttctaaatatcgtttcacagagagaggtgtctaaaaatgatctaagtggttgagggctaaaaaagttgtactacttattcacttgtcgcacaaaatcactttttactcgtagaatccaggagaatcactttcagagacaaaatcactttggaaggaggagatctgctgaataggccctaaagcttgcaccaagtagtttcatctttctttgatggaaatagagtttagattggacatgtctacaatagacaacagtaacaacaacaacaacaacaacaaacaataataataacaaagcctgttagtcccaagcaagttggggtaggctagagttgaaacccaacatgagcccctagtcatggttcatgtacgtcgatagcttctttccaaacagtactatctaagcaaagatctctaggcacattccaaccctttaaatctcttttcattgcttcccccatgtaagaaggtcttcctctacctctcctcacattgatatcttgacttaggactccataatgcactagtgccttaggtctcctttggacatagccaaaccacctcaacctatattgaacaagattttcacattattttgtgatagaaactggttggtcaaggtaatatctgcaattagataaatctatgcttagtttaggaaaatcctcatatgatacgaaatgtacaaagttgtgcttaacctatcaatttaactttataaaaaactactagataattattcttcatagcaagtggaatacatatttgagtactagtgacaaaaagcttaatgtcatcttagttagcaaatttgttgtagtgacataaacttgtcattttgtaaataatcttcaaagattgatgatgctccctaacttagcatttgagtattctttatcatggttaattgacggtgaagttgacagtgaaataagagatgattgtgtgtggaaactagagcttggtatgtcacaggcccttccaaggtgtaacgagtaacgacaatcattgcaacttgtaacttggatgttgttgtgatatcaggttcgcagtcccataggttatcctggaccgttgatacaaaggttgtatcatctccttattttgcagactctagcttgtcttcaagtttgagccaacataaagtaatgcctccaagtgatttttgcataaacaacaattggttatccaagctagaccaagtttagagtttactaaggatgaagtcgtgatgaaaaactcttaaggttttcccaagaacaaccaaataacttgttgcatgccatgtgcaagtatgagtgtcgtatcccaacatcaatgatgaaagctaaatctcactagccaatgtgatgtaatataccaaggacaaaaccctagcaaaagacattcaaattgaagaggaaaaagcacaagctgtttgtgtcaaacaccaccatggaatgttcactattaattggtgctgctacaaaacattgaattgggaaaacatcaaatggtaccttggacatatggtcgccttgggactatagaactaaagcaaggacttgagttgtcataggctgatctacagccccagtggctagcccgagtgaggcctagagcggggccttgggtggccatggcttgggcctaggcgctacaaggggcatgcatgtagagggggcgacgactctgtgtaggcctcctcctaaccagagaagtctggattaaatagaaactagaaataattagatgagaattggaataagtggtaggtgatcctcttgatctcttgtcaagtgacaagttagtaccaacgatgttgccgaagtaagtggtaggcatagctttacctttgtggagctcagcgtggaaaaaaatcatctttcaatgacaatgtttgtcatctcctttagtgtttaggcatttgtcatcgttttgtcatctacttctgtgtaattgatggggtatacaaggtagaagaatgtgattttgatgccatgagttggtctccacgggccaacaaagcatgatgcccataagcacgtcctatgctcataagtcatgaccttctctagtttgtcgacaccataagcttgatatagatctttagtgccttataagaagacatagatcatagatttcaaccaacccagtgcccagatctagaaattgttcaaagtactctactcgtaaagtacagggcaatatgtcaaatgacaaacaacttactaagggagtttgtgtgataagatgatctaaagcaaatattgatgagtttgatgaagagttccttggttggtatatcgttctccctttatagcatcattttacatactactagatgaggtataacatcactaacatgctagtatcatgtggttttggtggttttaggaagcaagatgggccttttctatcttatataatcggaactccataactttgaaagaagtactcacacctatttaaaccaaggcgaattgatcatcatcacccttagaagttaggaatgtgagcttgtgtaagtgtgtgagggatccgctacctattgcttagatttgcacctatcaactgtgagcggtctattgaaagcaagtataccatcagtgttgtgatctttgaacttacattgacatcatcaaaatcttgatgttagagaaccaacttgtgatgctagtggcacttaagagactgtgaatggttaatggtaggcgttattgcatcgtggatgatattgatggcatcttgatggtgtgtgatggtggtggcacttagctatatgaattgaaatttaccttcttttatttcctcatgttacatgagggcttatcacccccaaccaaaaaagtcatgataatgtatgttactcagcttacaacaatgttgtgattagtgatcaaacaatccattgtgagacggatgacatcctgaataaaatagggttgcatcaagggttagccttcaaccccgatctattttcgttagcatgtgtttgtttttggatgatattggatggattggacatgtcataggttttagagttgggttggacccattttttgtttggattgagggacatggtcaatccaatttcttgtttgctgcgagggattgaatgggttggaatggatggccttttcaacattgttagttgctggtcatcatgggggccccactcctatgtgttcttcctcttctagtagaaggagccttacattaggaggctgctccatgagcctgggattaggggctagagcttgtcttgcaccgcggtgtctgggcgccgaagcttgcccccacacgtcaacacagaagagacaatgtccatctgggtcaaaacaatttctaagatggaacccacatctcgaaagtatattcctctatggcttcaacccaacacctagcccttcaaccaaatagctctaaaaatgggtccaactcactgaacattcttcaacctcctaaccaaacacacgcttagtgatcgatgaggtcaggagtgtcataactcataagaattaccccttagtgtatgattgatggagtgctatttgatgaagagtgggagtacataagaaagtagagttggttgtattctctagagtcaaaaggtttagacttagcagaactaaacctaactacatgaggtgtgagtgtgtgattgctgacctgctagacatccaaaggagatgctagtttggaggatcatgtaggttaagctaaatgaataggggtgtttagtggacctaaagcgttattagtaccaataacaaaacaattgacaatattatattgatacccccaatgaaaaagctatagcggtgacatagcaagctatttagaaccctaagtgcaatggatgaaatgtcaaagcatctaaagtttttcattgatggtgactggtgagagatacctcaatcatgtgttgtcctttagatgcatcaaccataaatggggatgtctcccttcatgtaacccttagtggaattagacatacaaggtggagatatgtttgagaagaataggtattaatcaagcggttaccaatgggttaaaaggatgatttcataggtaatttctaaaggtatattgagtttttatggagaaagtcctatagaggcacaagcacatatagacaacttgtaggtatagctaagcaacaaaacttaatgatagttaaggcattaaggttactacttaaagataagcaaaatcattatactgactagagttgcttggtcaatctattaggctatggttgcatactaatacaatgtggaaacaaatttattttaggtcccagtctctctatactatacattgaaccatgaatcaatatacttggtggctcaagtacaggtctatattttggtacaatgtatgcaaaagagtttaaattattatctaacaacatgcaaatgggcacacacatcatctcaatgactcctcaaggatcgcctcccaactatggttccaagatgtgcgagtggtctctttaccacatggtgtacacgtttatgatataaaatgagctactaccactcttatctttttatgttggtgttccctttggcatttatgcattcaatggtaaaagaagtacctcacatggataatgtaaatttaaattggtggtttgctctgtgttgcttcttatcttaaacataaaagaactttaaccataatcctttgccttcactaccaaaccgaagttatttcactactcgagttttgtggggcaattagtgatgtcatactctatggtacaaagtatttgaagacgtttcattactacatatatatatagattgggagcaccttacaagttaagttatgttaattcataagatttgaaaatggttgtgaataactattcccccccccttttgtagtgaccagtgtgtccttaaatcagcaatgcttgaattgaaacacgttttcccatgctggtttcatttttattttagaagcaaagataaccatttcttcatattaaaaggtctcacttcctaaattgctgaagataataggataaaatgcattgtgaccaaccttttttgaagtttatgagttttgctacataactattgtgcttctcttttgtgtggggacatacagtttgatgtggtgatgatcccactcaactgaaataaatttcatggcctgcaccacacctctaaagtaaataatttctagtcactaattacgatgcaaaatatgcttcaatataaaatcataatgtcgtaagcaataatatttcaagagatatatccatttttatggttatcccctttttgttctaagaggtcaaagcaccattttggttggacttgttaatgaataaaattgtagaaaccaagttcaaacataacagggccaattaatatacaaggcaatgcacaatatgtgccgatataaaatggtaatatcatgtgtaataaagttttatgatacataacctatagtcatgaatacaaatcctatcatgtgtgagtgcacatttactttccaatgttctgaaaagatcaaaattttcatagacattattttcttgtttggttggccaacctgggttgtgtatcctagtcttgattagcaactgtggacacaagctctggccaaatttcaaatactatttgttgggacataatatctatcatatcgctgaagtttgtatatgataattttaataccaatctgcttctggtcaactttcaaatacttattcttgaaattttcagtgactttcctttgctacttcttttataatcacatcactccaaactgtccttgtaacttaggctgcagtatttcagtgatttttagtactttatgtgtcagagagactgagattgtgcacaatatcaaaccagtgcaataggaaattgggcttggttgttgagttccaccttgccccttcttgagttatgaaccaacaaaccctataatataccacttggtctgcagctttataagaaatcggattgtatgttacccacacaattggatgcggagagctgataaaatagtgccacagattgagtaaatctgtaaccttcactcttaaatgaaacgttgatgactgagaagttttttttactattgctactaaattgtttagtatccatgtctatataagaccatacttgtctagtaaactttatgcttactaagagttatctagatgtaaagagctctggtacaaactgcagaaaacacatcatgcattttaatggataatctttgtttataatactagctatgtgatcgaaacatggaaaaaaaggatgtgaaacttcatgaattctaacttgaatttattgcatccaagctatctgatgcattttgtgatccatgttttagaatgagataaatccaagtatttgaatatgcaaagatatacctaagaatttgtgagtttcacaataaattaaccaatacctaaattcttacataattttagatttttagtaactttgtttttctcccttttcagtgtgcagaaaacaattgaacgttatagaacataca

SEQ ID NO: 5018 - DNA, 1825 bp, Sorghum bicolor
  Intron number 1 from transcript Sb03g025180.1 (locus Sb03g 025180) derived from phytozome v7.0 (chr-ID chromosome_3; pos 50563002 to 50564826)
ccgaccggtgagctcctctctctcccctcctccccctccgttcccgcctcggcctgtcgatttctagcgctgcggtattgatctcgtcgcccccacatcatccggttctggctcgaatcggcggtggggttattattatttttttctactaatatgtgctccgtgtgcgcccgtggagagggcctctgctcggttcgattttcctcttagtcgaggggaagttcggggatcggattgcggggatggattgctgttgtggcgccgtagcgtcgcgggttgcttcgggattttggtggttccggaagttcgcttgggaacatagggtttggttctggatgccagactccacgctcacggaggtgctacatggcgctctaggctcccttgctgcattttcctttgctgcttgcggatgtgtgctgtggtgtcctgagtctaatcacttaatgactgaggcactataggtactaggctagaataattgtatgtgttgtgtgccccctcttgcaaagtgcttttttgatccgtagtgcttagagggacctaatttcagctagggccatgcaaagttgtgtgcctaattgcttatattccttgatgcttgttgcttaatctaagttctaaacatgcacgccaccacttatgacaatgggttctggctcacatccaaaatggagatatggacggcataagactgagctactccgactttctttgatactgtagattaccaacaaatcaacaaacataacccttgttttcattttttgggtttctatttttgccttttagtgcggggcatgctgtggcttattgctgtatggttacatttggctcgtggaggtgaacactgcatttgccttttgtcacctgcatacagttgcgctagcatcgtcaacctcagttgtctgtgactgtgactgagatatttagttggaattgcaatatgggaccctgtggcatcttggtgttctggctttgaagcacacaggtggtggttgtaggtgagggtggtactcagttcgaggctcaaagttataggtgtcaatggtttaattcctcttttacttattctgttaaatgtattctctttgatgccatgaatttttcacagcccaccaaaagcaggcaactgggctttgtacgctgtccttcagtggaactatgccgcttgtgcttaggcttgttgctaggtctcactgaatgtgataaatcctagaaaatataagacatctatagcgaacataggctgaattgcaaacctgacgtctttgttttgcggtgtggattgtttgtgttttgagtgtataaatgctctttgctccacctgttccattattaatttattatagaaaaattgaaaaccagtaagttttacattcatttttgcaagctgaagttatttattcacttgatgtgcagttgtgtgtagaattctgttatgatagtgttgaatctgtccataagagttccttgctcttattcttttgcttcctttcatatattgctatctggatcatgatgtatgaataattctggtgcaatatttggcattctctactagctccttgttttgctacagtactcaatatatgattttgcatgaaacttcctgttgattttatttacaagttgtcttaatatatttacaaatcatagaaggaaggtaattttatccatctctagttaatggagataagcttctgttttaacaccagattttggtgttatggcctacttcataatattagttccatgtgtgcacagacatattttctttcatctatagctaatgtttttttgaatgatttccagtaagcgtgaa

SEQ ID NO: 5019 - DNA, 5594 bp, Sorghum bicolor
  Intron number 1 from transcript Sb02g034090.1 (locus Sb02g 034090) derived from phytozome v7.0 (chr-ID chromosome_2; pos 68597937 to 68603530 reverse strand)
actcctgggccaccgtcaccggctacgccttcgtggtacgtgtcgtactgtacgcgcgcgcgcgcgcgcgcggcccatcgcatctccctcgccccgctctttttgccgtgcatgcatccatgtcactgtgtgtgaagtctccaatccattctcgatcgcccccgccgccgcttcggcaggcagcgggtcgggatcatcgcacgcacccgccgccacatgccgacctgttcttcgcctcttggctccttgcataccctagcacgttccgagttcctctaatcatgttgctttgtttgatgtttctgggattatcattcggacacggtgatggtagcacgtagcagcagcatgagcatagctgcacgacctggctgagtcttgcgagcattggggggctttttcgggaactggagtctggaggtggccaaagccctacagcccctactggtgaaataaccaaggggctacacctacactcgatcgctcctatgttcaacgcccgtgctccacggcctgttgacatctggagcgcatgcatgcatctgtttttacatctacagtatgtttttttaatcctaaaactttacgtccaaaacttttgtttgtatttagatgcttctcaaattttttggtctgcaacataaaacacgagtccctaaacaagtttacacagtttttgggctccaagatcccaaattctaaatctttacagtcaagttttacaagttcttatttagatccattcttcaaaaagtgttcatttctttaaaagttttgtttgtttggctgcatctaagggcctgtttaaatcctaaatctttagatcccaaaacttttgggtgtaaactttacatttaaataggtgtttaaatgcttaccaaattttttggtctgcaacacacaagacacggatccttaagcaagtttatatagttttgggcctctaagatcccaaattcgaaatctttacagccaagttttacaagcttctgtttagatctattcttccaaaaagtgctaatttctccaaaagttttggttgtttggctgcatctaaacagggccaaactgggccttagttttaccaaaaattttataatttttttcaaatttctcgttaaatcgaatcttacagcatatgcatgaagcattaaatattattaaaaaaaataattaattatatagtttgtttgtgatttacgagataaatcttttgaacctatgattaaacaaaatttgtcaaatacgaatgaaagtagtgcaatatattcattacaaaattttggaactaaacaaggccggagctctcgaagattctcaggcgccgcgcgttgttggtttgcctgataaacatataaaccgctgaagatagttttagactaagctaaaacggactgacgcaggtaacagaactggctgatttgttacgattacgagctgctgaatagctgtcaattctcaagggaacaagaatagcaatctcgtgggagggttgtgctgtgcacttgcagcctgtggccggcaatatggaggacaaacggcgatcggttgagacattcaagacagggtggcggagcgtgcaccatttgattgagattgatctgccatgcatggagtagtactatagtatatcccatgcatacggactattcccatccacgaaaatcgaaaatacttgtgaccgtggatacctgtccaagcaagcttgtccgctgcggcgctgccgctgcctgcctttgtcgcatgctcacagccgcggcggatacgcgcacgtacggtcgcgctagaaacaaccaataccaatagtctcccggccgccctgctcgctcgctcgcttttgctgtcaactgtgagcgtgaggccacgaaacgataagcaattcgaggtgtgtgtagcgtgcgccgccgccggttttgcgtggtcgccagaggtgcccgtccgccgcttccctcctttatttcatgaatcatcatcatcttcttcttcttccatgtgccattgtccgtcatatgcgcctgatgtggccctgtgctgtgcatgcatttggtagcggccggcggattgttgtgatcgcgcgcacgggcaccagcagctcccgcgtgtacaccgttgaccattgggatttgggcgtggtggcgcactacgtacatactactacacggaaagaaaattgcatgcaaattaattaaaaccgtatgctgcgccgctaccgtatgcaaaccatatacgtactacatgcatgcatgcacggcgcgcccggcgccgcagagggcgttggcggttgactgctagtactgcgcctactgcctagtgctggctatcgtgcgcggccagcgccccgcgtcgttgcggaccggatcagatagacgaggacgatcggtctcgcacggcacgccggcacggtctgcaagtcatcgatcgggcacgcatcggcggtcacgtcagattcagacataacaccacagaaactggcacttgttcttccagtctactcctactactatttgtattttggtcttgtttagataggaaaagattttggttttcgctactgttgcatttccgtttgtttgtgacaaatattgttcaatcatagattaactaagatcaaaagattcgtctcgcgatttacagttaaactgtacaattagtttttattttcatctatatttaatgcttcatgcatgtgctgaaagatttgatatgacagtggattttgaaaacttttttatttttggatgaactaaacaaggtcttttttttatacaacttcgatcaaacttcaagtgcaaacccacgggtcgataggctatatctacgttacacgagtacggttacgagtatcgaatacgtgggtacatactttctaaaaacaaaacctcactaaaatggtgtatccgagtatccgtatccgcgtatccgacgagtatccgatacggatacgtcacccccttggagtatccgtgtaatataaggctatatctacgttacacgagtacggttacgagtatcgaatacgtgggtacatactttctaaaaacaaaacctcactaaaatggtgtatccgagtatccgtatccgcgtatccgacgagtatccgatacggatacgtcacccccttggagtatccgtgtaatataaggctatatagtcgttattaatgaattaacaaaaagaaaataaatcttttgaggatcggagaagagaaaatagggagcttgcccgaaaccggtggctagcttgattcagagaattattgcatcgacagcctagctacgtagtcatcaactgcatttgattagtttatataaaaaaaactgcatctgattaggccattcatcacggtagtgtttgcttggctcataagccaagcgaacaagcttgtgagttgtgacctatttttagggatgaaaacggatcgaatcggagcggataatagcttttccatatcctaatttttttcttgatcggatgtggagcggatcggatatcatacggattcggatacggatacaaattttttagatgtcggaaatagtacggattcggaccggtggagcggaagcggactttttaaagtcggataatatgtgcttatgtgttaacttttatgatgagaaaaattcattaaccaaagtcataaagcgtttgtgcaacaaaaaataatcaccatcaatccaccacttcaatttaagatctagaaaatttagtacatattagcggtttgaatttaagagtataaaaaagtgtgtaaaataagtaaatattcttaattaggtaaaattttgccttcactctttgccttgtactagtccttcactttggtagaattctttcatcagacgagttttgttgtgggctacaatataatcatgtttgtgtcatgggctgacttatattctttttacttggactccttcagattattctattataagtgtcggataatccgtgtttaattatcggataatccatcccatattctacaccgtattcacttataatcagattcagattatccatatccgcatagatattaaaacatttatctattcttaaaattcagattcggagcggatcgaagcggagaattatcgataccactttcaaccctacctattttatcgtttactagctgccaaaagcacgtatcgtatcgtgactgttaagcctccgatccaatctttgcatgcggcataaaaaaaaagagagctgtccctttacacgaatcctgaaaccaaaatgcagtcaaacgcatgctctctacgcttgattttcagactgctagactgatcgtggtcaggggatttggtgatggcttcgcacggaattccgtttgtgtggttatatgtgaacgctcaggaatcaaggcggcttattatatgctgatacgctatatatgctgatacgctaaggccttgtttagtttggaaaaaaatttggatttcgctactgtagcactttcgtttgtttgtggcaaatattattcaatcatagactaactaggatcaaaagattcgtctcgcgatttacaggtaaactgcgtaattagtttttattttcgtctatatttaatgcttcatgcatgtgccgcaagattcgatgtgacgggaaatcttgaaaacttttgaaaactaaacaaggcctaaagaatgtgatgtttccaaagaaaaataaattaatggagcgagggttgacctgttctatatatatgttgcttgcgttcggtatgcttggctcaagtcaaaataatgtcaatcaatccatactagtacagcaactatacaaacagtttggctttatatacagtagcagtgtagcacatcagtcgcttaattacttttgcttttttttttctcgaacacacaaaaaaacttacgcgttattgtattaaggtagaatagtttatatacaagcaccttgaaagcggcttaggcgagagtcgccagaatatgcattaggccggattatcttgttgatactagtaggtaaacaaggctgcattattcttggtacctagattttcacagaatctttgacttggtatgacataaataaatctcttaagttttgcagctgtatcttagaagtagtatttgcaggcttgctgctgatatattctctttgcttcaactttgattttcttttgtcggcgcaaaataaataaatcaaatctgttagatctgtcccacacatatacaactcatatacagggttcaattgacttacaactatatcaaatggctcaaatcacttgggtattttctgactaataaatcagaaggcccactctttagtgcatacatactcccttaaacctcagttttaaattataggttttttctaattcgaaattctctaactgactaagcttatagaaatacagagagtttcagtaagtccaactaattaactatgttctgacaagtgccatttcgtatttggagttgtgatcaatcgcgcgtgaggaagctagctgttgatcagctaagtggtgttgcttctgaatcatttgttttccatggaaaatgatcatatcatccatggctgtgtttccagaccgggctgagcggcgccctggagacgctgtgcgg

SEQ ID NO: 5020 - DNA, 582 bp, Sorghum bicolor
  Intron number 1 from transcript Sb07g028620.1 (locus Sb07g 028620) derived from phytozome v7.0 (chr-ID chromosome_7; pos 63617922 to 63618503 reverse strand)
ggcagccgcagcgtcttccccgtcggcaagctccggtacgtaattaattaattaaagcgcgcggccgcagctctgcactctgcttgccttctgtttcggcctttgcctttggggacgattcagattcacctccaatgttaatgttaataattccggacaccactcttgtcagatttgtgcgccgagctatgcattataatcagttttatattatatcatatacatacatataaaaggcagtagctttacagtagatgactggtagtggtagttgatagtaattgctgcgatgccaagcttcagacgtgcagtaaaattcgacatgttcctatcactgtcgtcaggggtaaagccaaaactgttacattgtttcaacacatagtttttctcttgctgaaaggattcttcagattttttgttttattattaaaaaaagggagaaatgaccccttgtctggccaaatcgaaatctgaatttccaatactagtatactacttaggattattaatataaaggaaccatgaggtttgaaagaattctgaagccacagtattctgctctgctgcagtgaccagcgattc

SEQ ID NO: 5021 - DNA, 1885 bp, Sorghum bicolor
  Intron number 2 from transcript Sb01g000696.1 (locus Sb01g 000696) derived from phytozome v7.0 (chr-ID chromosome_1; pos 676880 to 678764 reverse strand)
ggccagaagcccatcaagggctcgccttacccaaggtgcctgcccaccttagtattttttttcttttaatttgttcttgccaatgcaaataacaaacaaattaacacttaataaggattcaatacaatatataattaatacttatcaacatcagatctcttcctttgccttctttttctgaaaaggattgcagtctctttttgttgcacaggtacacacggtgtagagagatgtaacataaaaaaaattaatgtttccatttcattaataatgtgcactgctcttatgggcagctataccatagcaagtcaacagaaaccatgcatggtcatcttcgatacagaccgctccaatattccctgataagaactgaattaattggtccagcaaataggcatttagatattgtttcagagaaaaaacatattaattcattcatatatagctccctcttgatctaattataagtacttactttctactttaccttctcaactataatatactacaagaaatagttagatgtatatataaagaatctatcgtgcatgtttatatacttcttacacgaacaaacatcctcgattaggttgatcaccccttcacttaaggtcgccaatcgccacaaagagactatacgtaggcaattaacccaggcacacttcgtcttaaagtgggcttcatatagggcaaattggcagatgagactaacaatagtaagatggcaatctctgttgatttcatcatcattctttttatcagttacatccatctattttctctatttattatgcatcaaattaagataagtttatgtatttaatatgcaactaattaaattctggtgtttctaaaagattcagtccaagtttatgggccaatgtccaattgctaattggaaatgtatgtggcagaaaagatatatctttgcacttttaataggccaattatatgtgtgcctctagtttgttgtgtatatatatgtctcatttggatgccatagtttgcttccaccaatttgtctaattgtgcaaagtatgtaaaactaaggacagccatattagctgtggacttattctgtttagctgaaaccaagaatatataaccagaaccagaaactctcttggctgcctaggtttcctatactcttgtatatatatggtcaaatccatactgtttccagtcagaagtggtcgtgattcatacattcagacttgcttcttctagtttagtttaaccccatgtacgtgtatattttaatatgcgagtcaacagaaatttcaaatgcaattattatagtgaaagtagatcttcctaacaaattagtttgtccatatatattccataaacttactgtaattgttttagaagtcaaatatgtttttacatttttaatgttccttcactaatactactctacattttttcaaaggtattgacagatatccaaataaataacgaaaatactccattacaataactttaattaatggtgacataagtattctagcaacaaattacttaggctagtaaagcttccatatatcaatctacatgcctgagctgtaatatttgtatgttttcatgattttacctcatatcctatgccacctagaatttcatcaaatccttcatatattaattatagatcctacatacttgatacagaagcacaaattatattaattatgttctagtatatagaggcggtaagattatcgatatgtgtatatatattgtttcaaatctaaaataataatagccaatcccttatcccaatactcattaatccactgctgggaaggttttatctaaagtatattatttcccaatgcatgtatttgattaagtgaaactttattttattttacagaggttactacag

SEQ ID NO: 5022 - DNA, 564 bp, Sorghum bicolor
  Intron number 3 from transcript Sb03g046960.2 (locus Sb03g 046960) derived from phytozome v7.0 (chr-ID chromosome_3; pos 73975784 to 73976347 reverse strand)
ttcagcacttgctgtttttcggactccatcagctggtaattttattcttacagctagttctaactatattcgtgtatagttccttcttatgacatgatctgctgggagaggcgagaccaccaggtaacaacacgcttcgcccctgtcggaaataaatgctgtcattggatggattagacaagtgtagttatctgagaagaaatttgtgaactaaaacgctaggtgctctgattccatccctaaagcacggctatcctctttcagtttatttataggtcacttcatctactaataatacatgtcgtagactgctatgcatgtcaggagtggatcgttgtattttgctgtgtttcatggttaattgctcagctccaatgttttgtgctgatttgctgctattccattctattctgtttggctaacacttagatgcagatgatatgaactgtcaagcattccactgttagcttttcttgtagttttggttccatgtattctgatcactttattctttccaatcaatttgcagctattgaggctcaggcttgcatacctccaagatac

SEQ ID NO: 5023 - DNA, 1314 bp, Sorghum bicolor
  Intron number 13 from transcript Sb03g035900.1 (locus Sb03 g035900) derived from phytozome v7.0 (chr-ID chromosome_3; pos 63914460 to 63915773 reverse strand)
tcaaggtacttcgctgggccttgtggtttgatattattatgattatgattattgatcttgtatgtttagattagtaagttacttccttaaagttaaataattctgtgatgtctgtactatccgttttacattctactatggactgagtatttggctgcaatattaggtgtttccatattttttcaagtgttttacttgttatattagaatttagtccactgcaggggactgttattcccaagtcaccaaatttatactagaaattgagattggggatgggtagttggggtcaggttttggggttttacccatttgtgtttgtagagtgtgttcactggtttgatggtgcacatcgaatcgggatgcctgcgtgtcaggagtgcctctattcgtggtgtgagtcttgcagtgggggtgctgtgttggtttagtggccgcgttttgggggggggggagctgtgtcaaaatcaaagaatatggcgccaggtggattggagagagagagaggaaagctgttggtggcaataaggcagaaggaggcagtacatgtagcgtggtgggtggaggcagggcaagaagaaatagtggagagataggcggggaggataatattagacgagggagggtaatgggagccattggattttgatctgtttttttttaaatgacttacaccaacataagtgacctgatgaggaaacatacccttttgtgtgtgtcagggtttactatattttgtggccattatgaatccaggtgcatattttattacaatgcaatcaactaatcatttcttggagtctcatcctgctcttgcatctgaagtatatttttctggagttatgttattgaacttgtttaaaaaaaattgaacactaatatattgtccaattatggactaactaggctcaaaagattcgtctcacaaattacaggtaaactgtgtaattagtttttgtttttgtctatatttaatactccatgcatgtgccgcaagattcgacgtgacagggaatctaaaatttttggcaaaactttttgggaactaaacaaggcctaacattgctagagtagattgggctggccaactggtgtaactgcaactatttattgctgttgttatattctagcaaacaaaaaataattttactggactgctgttgtaacaattgtttgggatgcactctaattgctattgcaagatcataacatggccttattcttttttttgtaatggcgagaaaaggttttccatgatctcatgatgctctcttcgcaggaggagctttcgaaagaatttggcatcccagtaga

SEQ ID NO: 5024 - DNA, 4373 bp, Sorghum bicolor
  Intron number 2 from transcript Sb01g022220.2 (locus Sb01g 022220) derived from phytozome v7.0 (chr-ID chromosome_1; pos 27303136 to 27307508)
acttctgcagcgacacttgcagcgaccacgccaaggtggtacctttctgcccatttccttagtgatttttgcatatctgcgcaaagttttgctaggcgctaggcggaatctaggcgatgacccctagcctagggactagtcgagcctaggctagcctaggcgacgctaggcgttttgccaatttatatataaatatataatatatacatttataggcacaaatcatgaataatttagataaaaaacagggaaggatcagtagacataccttaggtcctttgtatgattactgaatttcctgtagcaatgctgcaatagaagtggacagcactttaagatgcaattgggcatcaatataagtggtacaaaaatagaaaatagcaagttaggtacttatctgaggtctgatccttctcccatccaatctcatcacttcagcaacattggatagccttttgaaatcacaaacatgaagggacagcagacagcaacagcaacacagaatataaaaactaacagtacattccatcacatgattgatgatcctcagttctcacaacacaaaacacaagcacatagcaggagttctaagttcataagttaaagatacatggatgcaggatgcataagcataataaaagctaaaacatgacatgaagctgtctcacacttcttcagtagggttcatccatcacatagtcatcctcatcttcatcaaactcttcttcttcggactggaactcttctccttcatagagctctctcacccttgcacttctacgtggctgtagttgttcttctgctcccactgcatctccaagcacagaccaaggtatccttgtaccttccatgagttcctcatcttcatcatctctaaaaacaactgctgccaaatcatctccattctcttggaggaaaccttgagcttcagttgtgtcactagacaagagaacatcagtaattttctttgacttaatctttgctctcttattaagcagcctgttgttgaattgaatgtagaccaacttgctgaggcggtctacagtaagtctgtttctccttttagtgtgcactgcatcaaacccactccaatttctttcacaaccagaagagcttgatgtcaaagataggatccttgtagccatcttctgtagagctggtgtttcagttccatacagccgccaccatgatgctgaaataaacactattaattagtagttatagcagattttcttgttagatgatcacaacaaacagccatgtataatcatgaaacaacttttacctggattatattcaaagttttcaaaagtccttgcaagtttcttgttaaatggtccttctctattctgaaacttctggagttcaacattggcagcttgttcttgcatttcctcatcatgataataaaaagtctccacacaactgataaaacctactgttattttggggacatcaaaaattgatggatcaacataactatagtgtggattcagcaaataagctgccaaatgcaatggagaatcaagtcttccagccatcttcttctcaacaatagcaataacatccttgaaacgggactcaacattgccaaacgcctctttgatctgtctctttgccttcaatagttctccatatacgaaacccatggatggcttcacatctccatcaaccaaacgaagaactttgaacaatggctcaaaaacagccaatgtcaacttcacatccttccaaaaatttggattcaatatagttgctgtagcattttttcccttctttgatttcacatccttcagtgagtcccacctactatgaaccaccatctttcttagctggtccttcttctcttgtatgctttccaaagtcagaaagtttgaagcaaacctagtcactcctggccttactatctctctcccctcagtgaagtatctcatgcactctagtgttcttgtgtgcccatagacaaatatggtgaatgcctttgcttggtcaaccaccttcttgaatcgaggaatgttgccaatttcttggagcatcaagttgattgtgtgagctgcacaagaggtccaaaagatctgtggtctcttctcatgcagcagcttctttgctcccatgttgttagaagcattgtcagtcacaacttgtaccacatcatcctcaccaactaactcaattgctttgtccactagttcaaatatgacttcacttgtgtgtgacacatctgacatctcttttgaggaaataaaactggttccatcagcacaattagtgcacacattcattatgcttctcctcttcttatctgaccaagcatcggtcataatagagcacccattcttcatcttctcggcttcacgttcttgcagcaaactcttggttcttgcatgttcttcttctagcaatctccctctcaggtcaaacatagttggaggttcaattccaggcccaaattgtccaattgcttcacacatttgcttgaactcatcgttgtcacaagcattgaatggtattgctgccagtgttacaaaattagtgcagtactgcagcaataggtagtagcatagcatccaatgaaatctgaaataaaaaaacagcaaggaaattaccatggttataggcccatcttgcgatatatttatgcacctcatgtaatctttctttccaaagttccttgttcagcttctgttgagtcaaagattcagatttggttgctgtaggatcaatagctcttgtccatttatccatggggcctaatttgtgaggctctgaacttccaacacaagtgacttcctctgaggttccaaccctagatacatgaacttcctctctaagttctagctcacgaacagtcttctcctccctcttcctttttgcttcatctagtgctttcttacacttttcttgagcctcctttaacttatctttggaggtcttcgtgccctggcatttctttgcattctttccttcctgagcgatatgctgcttcaaccgataaacccctccatacatgaccttgtcacagagtatgcacttcacctggtccttgttgtttggattaacaagaaccccaaactcccatcccacatcatctgagttccttctcaagacattcgctttggctgttgcactttcagagtcaggttgaccccctgtttctgtcatctgaacaatcaacaaattacaaacatacacatgcaatctgatttcagaacaagcagtcaaacaaattacaaacatacactttcaatcagtatgcctgtaggctgtagcaatcagcaaatctgagtttcagtttcagaacatgcaatctgatttcatttcagaacaagcagtcaagcaatcagatataatcacagaaccagagcatgcatgtcagttcagttagttcaagcaggaaacaaatcaagaaacagagagcaggaaacaaatcaagaaacagagcagatcatccaccatccagttcaagggagcagagtaggggaggaccgaggacatacctttggcttcgggcgtcggccttgggggctggggctccacctgagggagatgcccttcgaagcttcaatgtggggaggaagacgagctgggcggagaccggggaggacggaggagtggaggagaggacgaggttggagcggactggccgtcggggaggagtgccgcgccggcggaagctgcttcctggcggagaggagcgtcgcgtggcagcggaatagcgtcgtgcgcggcttctgtatccctacgcggccttatccgtcgcgcgcgcggcaaatttccagcggcgccaagctttcccgcgcgcgcgctcgcccgccgccgcctaacattttgccgctcgcgcgcgctcgcctgccggctgcctcgcgtcgattatgcgccgcctagggcttctgggcgtcggcggagcggcgcctaggcgctcccgtcgacttgaggggcgactaccctcctagtccaggcgccgggccttagcctagcgattagtcgcgactaggcgcatcctaatcgtcgactttcaaaactttgtatctgcgtggatctcaccttggtgcatattcttgtgatgcttagttgctctctacgcctcactaactgttagtagctagtgaaatctacaagtgttcatgtctcaacattcagttaggtcttggtataatagtgtgttcgaagttcgaacactatgtgatagtcgtatttccagttatgtattgtgtttgtggaaatgcaatgtggattctacctcgtggatctttaattttcctttacatgttatttgcctgccgtagaataaaataaaagaaagcaaaaatgttcagcatttgaggctggattttgctaacaatacgtgtgatttccaccaatctaggggttcc

SEQ ID NO: 5025 - DNA, 2684 bp, Sorghum bicolor
  Intron number 6 from transcript Sb01g005910.1 (locus Sb01g 005910) derived from phytozome v7.0 (chr-ID chromosome_1; pos 4918371 to 4921054 reverse strand)
aaacatttgaccatcccgtggcatgtgagatttgacacttcctgttcttagctggttattctgtttgcagaatatgttcttgcttatgctttaagctattattaacaggtcttctagttgtgtcatcaatggacaaagaaccagtcaataaatttgttgatctcttcaacacaaatcagttgccatctcttttgaatgaaggcataatggatccacagattttgaagcattaccttgtacttcatgaccagcaagaggggccacaagacatgtattgttcttcacctttctttctaactaaagaagatactcttaagcaatttatgatgttataaaatcatttttttaaacatagctagcgaatgtttttcatacctgaccaaccttcagaattgtcaaacataatgcttgtgaatctgtatcggcaaaatggttgaaaaacctgaactgcctacatattttgtagttcacactttttaggattatttgtcttcatcaaggttagacaaggttcctcatagtggttaatttcttatgtgtccctattgcatttagtattcatgcttccttgctttcctaattctatgcattttaacttctaagggttttttttacccctaggccctaactttgtgcttctgcaaaggaaattgttttacatccgacacccatttgtcagacagcagaccataaccgtgctgtgtctggtcataaactcataatcaggactcaggtcagatggataggttgtatgcataacatcgctattttgtaaaagagcttatgtgctttctcgcttcttgcctagaagcacatctttgagttccatggtgaaatttaattattatgcattgttccagactgaggttactctacacatgtccatatcaaatttggtccaccgacatcataaacagagtgacagaaacacttttctgaaagatgtcactgatttaatggtcccattgctatgccacttttctattatctgctgtgttgatgatattatagtggtttcacaacactaagggcttatttggttcctaccatgggaagtttgcctgagcctggcatcaaaaccaggcatttggttttgaacacctgagatcggatgcgtctgcctggcgttgctccctagtagagagcctcaaccaaacatgccctaaatgtgctgcatagtccatttttattatttgatgcttgtatatcagtattgttgagttttagtgcttatagctctcttttgttgttcaatgatgttactttagcattgacccttcccaattattatattataaaataaatttatctgtttttgtgtaatagttaaacagatccatccaagactgcatataacttaactacttaagcacttaatggtgaagtgaatgttgcttaaagcttctgatgtcctacctccttggtaagcaacagacttgtaagctgggaaactggtccctagcgacctatatagctaatatgatctctatcctgtgcacccaatgttacttgtagaattcttgcttcagttttaaacttttaatttaagacgatgaaagcttaaggctctgtttcgggagcttatggcagctcctgctacttccagaagctccaaaagcgaaaagctcccttggagagtccaacttcccctctaatccgctaccaaaaaaagcttggtaccagaagccagaaactggagtataggaccttttgcagatgatggatgcgttttgtagattctactacaagttgcatgtatagaattgataaacaatttaaatataataacaataatggccaataattgtagggaaaatttgctgcagggcatagaaactgatgctgagctgccttggggcaccaaaaaaaatgcaattaactgctggacacacttgtccacggaaattttgctcctggataccatggcgattaaaataatgtttttggccagaggattttgaaacacagtgaaatgtcatttttgctcctagcgctttcttcttctccctctcctttctcctctttctcctttctgctccctttatcacaaggtctgggcgtaggttgggcatgacacgggcagccaatgcagcaagtggtggcatgcatggttagcgccatgcgactaggagggcgctgtgtgggctcgactgacagtgtccaacatggcgattgtgggtggcgtgaggtactaacagtgggtggggtgcacgcaactttcgcgtaaaaggcaaccgggtcaaaccatgtgggccctaggagacttcggccagtgtgtcaaacatggtggcagcggggggcggggggggggggggtgttgtatttgtggatatcggtgattggggagcacatagcgacatagtatatagggtgattactcagcacaacaatttctatgaaactatgacatgctaaataaagacagttaaacatatggaagtgttcttcacgataaatacatgacatataatttacattattaatgtataaaatccttatatattgatgatcgaagtgaagaacttttgatgtataggaatcctaaaattacatgtattttgaatcagagggagtgtggattagagtaaaataaagtagcataattttataatatatttaaaagtgaataatttttttttttaaaatcagggcatcaattgtccaaagggtatttcggaacggtc

SEQ ID NO: 5026 - DNA, 2215 bp, Sorghum bicolor
  Intron number 1 from transcript Sb05g007080.1 (locus Sb05g 007080) derived from phytozome v7.0 (chr-ID chromosome_5; pos 12431497 to 12433711 reverse strand)
ctgcggcgccggcgcaggcgtcggattctttggcggtaaaacccctggccttcccgtctcttcctgtaaatagtagcatttcttcggtttctggtgagtttttgtaagcctggtttgtggtcagttcttgtctagaggaaccgtccgcattgctctcttctcttgacgcctcgattgattcggtcgattagggtaccctaaatgagattgaggttcgatagattggtgtgcactttacttaccgtcccttttgttggttgccgattaccaggtcgggggttttagtgaggatatgctttcccccaagccgcagttgttcaaacagatttgtttcctcgaaacctgcggattggttttgaggatttcctgatctggcgttgcttaatttattcctgagagattttatccttttccgaatcagtagtgattctgattttttttttctttaaatgatttattagtagattggttacaggtggtatactacttggcctttttcatggaatataggtttactcaagggtttatcagttacagattgttgcgaatggtgcatgatcacagtcctaaataaggaatcttatcaaaagatatttcacaattttttcttggtaacattcactggttcagttaaaatgtcttatcctaaggtcggcaacttgacagtgtaggcattattcctaacaatttatgtatttatgtttttgctaagtgttaccaccaaggcagtgttctgaaaaacttgggcactatccggcagtcgggtgatactgcaagtaggcagatgctcatagaacaattattaaatatctaaaacaatgtgcatttcactgcttaatccttgagggcgttaggataattattcctgcctaacaagctgtggttaattttctgactatttgtggactaaatgttgtgtcacttccaaacaaaaaacagtggtataactacttgcttaattttatgatttatgtgtattcagaaactgtgtactcctctgtcccaaaataattgcacatctcgcttttggacgagttaaactttttttttaaactttgactagatttttagaaaatatatgatccacatttgtatctcctaatatgtttattatgaaactatatttcagtattaatctaatgatacctaagtgtcataaattttagttttttttgtatatcttttgtcaaacttaaaaaagtttgatccttgaaaagcgagatgtgtagttattttgggacagagggagtaagcatgtatgctcttacaacatcaattttttccatctcagaccgtttgatgtttgaactgaaacacattgttaccaagttatacatgtgcatggttgtcagcataaaaaatatcaattcctaatgccagtggcatagtgattgttgatattgttagcattctgaaaattgagtggatgaattaatacatgccacttcagaaatgaaaaaaatatgatacactctctgatggatttggatctcatgttcactttagccaactaaataaaatggaagatctggttctatattttaggggataaaagacctaggggaggggctgagggagtgagtgtatcgacctatcctgtggcgtaaccagacatacaaaagccctacatggcaccaggtgcgtgtacatctaaatcatagttcttaaggcgtaaaggcaaggcattgacaatgtgccaccacctggacgcctaggcgcccgccttgcctgcctaggcgagcattttgcaaggcgctggggggtcgcctggacgcgtaggcgacgccttaagaactatgatctaaatatctagaagactgaaggatagaatgaccttgttgtagttgaactttgaggtgctgaaaagctcacttggattaagtacagggtgaaattctcagtgataatatggcaaggagaatcatgaactccagactccagagacatacatgtatgaagtgatttttacttatcaactggttcttgttgcgcacacctaacattagagcatatatatgcttttttttttcaaaagttaatatgtttctagattggtgaaactaggagttatggagatttagtggttgtgtgcctttgttattattttacactgaacatagaaaagatgttttaagtaatttgtttttcatcacgaatgctatatgtctgcacacttattctttttccatgattactttaggtgcaggattaggct

SEQ ID NO: 5027 - DNA, 640 bp, Sorghum bicolor
  Intron number 3 from transcript Sb03g013540.2 (locus Sb03g 013540) derived from phytozome v7.0 (chr-ID chromosome_3; pos 17009477 to 17010116)
gtgtggatatactcactggtattggcaccattgtggtgggtcatctacatctttcgtctttcctgtggttgtcttaaaaatcagatattttgctattagaatgtcatgtttattgcaagaagtattgttcatatcatcttatccaggtataagacctcacttttcaattgctattcttagctatcaacagatcatgcttggctaaatgtcagggatctgtatcctaagtgtaggccttttccaaattgttaaaagacttgtactccctccattccaaattgtaagttgttttggcttttctaggtgcatagcaaaagctatgtacctagagaagccaaaatgacttacaatttggaatggagggagtatatgtttagcactactatgactaaagttggccaatttctgttgcaattcggatactacaatgtgcatctacatgaatcagaattttgagatattctaggtattatttatgctaaatctgaaaattatttgtattctgctatattagatgttgtgtatataaacattgagtcgagctatgtctgctatatagtctttcaaatgttgtagagtatcatttgtagtgattaaatattctgtttctgatatctgtaggggaagcaaaaagtgagat

SEQ ID NO: 5028 - DNA, 2155 bp, Sorghum bicolor
  Intron number 11 from transcript Sb08g003670.1 (locus Sb08 g003670) derived from phytozome v7.0 (chr-ID chromosome_8; pos 4205039 to 4207193 reverse strand)
aagcttgtcccttcggagcttgatgtaagttcacttgtctaagatcattttcttattatttcatagcatcgctcgttgcacctgtcctcaatatctctttaggcttcacctttagttggtctatgcttcgtccaatttggcacatatcaactctttgcttcacttcactgcaacttgtttttagcgagtatcaactttcatatcacttgctgtgatgatagtggacatgcatgtgtctattattatgatagatttacacctaaacatatccatgagggctacttgcacttcttggtacatttgtaactgtctgcgatagccaaaaaaattttcttgcctaccttaagaagaaaagtggctagacaagcatctgaaatcccaagattcttcagtgactcttcaaatctaattagtagtcaagaaaagtgcaaatgcagttcctaggtatagagggtagcagcaagtagccaaatcatctcaagtctcagggtttcagcttcgatgcatatatatatatatatatatatatatatatatatatatatatatatatatatatagttcctacctagcataaacggaccagaatagggccttaaatagctcgtcaaacttttagacatttttacaagtaagtgcatcatttcttcaaaaggacagcttcccaaaagatcgaatatttgaaatattcctgccaaatagcatccattttctaacttattgatcatacactaagatattaacatagtttaaattaaatcttggaggaatcaacaatgccactttagcagtacatctttatattatttttttacagttgaaaagaactatacagttcctacctatcataattcataaacataccagaatagggccttaaatagctcgtcaaacttttagacagttgtacaagtgcgtgcatcatttcttcaaaaggacagcaccccaaaagtggtccgtacaaggaagatatctatatgaaaatgtcataagaactcgaatatatagatgccaaatgaatgattgagctgggatgattaaaaataaatcacacatagtgggacactcatgggatgactctgccatggtgaagcaaacagggtggacgcaaatccgcactcaaaggatgtaggatttccacaccttctaataaaagagttaagtatgtgatcctcatgtagggcactaattaagaagctccaatttcttttccttgaatgccatcatgactgacttctgaaaatttcaaccgaataagaatgaataaatggcagtcagaataaatagagctagtacaaaatgaacttatccagcaagcagaacactacaaaaataatttaattcaaatccataatcatggtcagtattacccatacaaatattagactttccatattaattccaaggaattttcggcataattgcaagcttcaaaatggcatggacaaccaaaccagagcatgatatatattacttgccataagccatgcatttccaagctcaggatatggattttaaaactgtcatggatcaggaaacatgtttcaatggaatatatttagcagtagcgaatatgttaaatgacttcaaagactctaaaatccacatatagatcactcttgaggcaagcttttcttttggcccactagcaaatatccagcaaatcatatctatattaaaggcagttccaaataaattactgctagaaatcctccaaaaagatgtattaaatggaatgattttgtctaagataattttagtatttcatagcatggctcgttgcacctgtcctcaatttctcttttggcttcacctttagttggtccatgcttcatccaatttggcacatatcaactactttgcttcacttcactgcaacttgtttttagggagtatcaacttccatatcacttgctgtgatgaatcaacggttgatagttacaaattgagtttttttttttaatttagcataacatattcccgggttatgcatccattttggaaactagtctatgcaaattatctttgtgccacttctgaattcaatggctttcattttgcagtatttttaatgtagtgcaagcactttataaggcattaacccctttctatattgtcaggctgatacagactactggctcttatcggacaacgc
